United States Patent Application Publication US 2014/0057251 A1 - sequence listing, part 16

SEQ ID NO: 18472 - DNA, 3746 bp, Cannabis sativa
atgtaaccattgaatagtcacatagtcactcatatatatatatatatattacatatagagaaggatgtgcctcccgtgatgattatgggtttgatttgggtctttgtccatattaaggttttttttcttctaagtaaaaaaaatacgctcatgtaaaaggtgcacaaaagggttttattagttcttcatgatatgtgtttataaataacccagtgtatatattttacattttgaacattatgatgactaggagtgtgataatcgttgctttgaacctaaacaaaactccaaactgcataggcctagacatagagagccctagagaaacaattttggggcatccatgtccattttacaccctgcagtatgcacatttgtggggccaacttgaagttgacattgggtaaaggtttttttattttattaaatatataaagttaaaaaatataaaataaaggggaaacaaaaacaaaaaacaaagctaactagtctaataatcttattgtaaaaagcaaaaggtaaacttgattgtgaaatatgtccatcatggttttgtggagctccaactctgtgtgcttgatccacataatgacagcctttttataaaccataccttttcttttaggaaaataatatataaggacaataaaccctccaatttattgttttgtgtacatgaacaaagtgcccatcatattttcactaacacagtaacattggtgatcagattgtgttctttggactcttcaaaatggtagtaatgttacaattattatatattatttataatgcatataaatgtgtgtaggtctctcaacttataaataaaggtatgcatatagtctagttcttttaccttgaggtgtataaaaataataaaacatatataatgaaggaatgagtgggttttggaccaggtaaagttaccttgagatcattgtttttttatttatttttttatgccttttgtcatcataaagaagaagaaatttttctcacaagtaataattatgtgcactttgttatgttatataaatttaatttgtacaacaattgatacactccacttatcctttcttttttctcttacatattttcaactacattcttctattagataggagaaaaataggagaagtgaaaatgaaggacattaacaaaataaacatataaaatccttctttttttattttttttttctttcatttgagaggttcaatgtggatttttatttttcaaagaaaataaagagcaaaaattaatttaaagggaaaaatattagttaatacccttattgctttaccaaaaacttttctcctcaacttttttttattaaaatatttaacatttttagtaaataaacttgggagagggaaagagaattgtaggtaatgatagtaattttcaaatgattctttcaaaaatacctttacataaaaaactttatctttataacgtataatttgaaatacgttttggatacctccaaagcatatttgtatacaatttcgtaattaattagttatatttaatttatattaaaggtagcttataatttaaaatacatttaggtaacatgaaaaattattttcgaaattaataaattatcatgtaatgcaaactactatttttatatacatttttgttattttgaatattaagttgttatcgtataatataatataatttaatcaacaaaattctaaaatgaaagttaactaaggtttaaagaaaaatatataaagagtaacaaatcactatattagtaacaaaatggttttcttttttctaaaaataacaaaaaaaaaaaaaaaatctacatcttcaaatgtttacatcgaatagtagatcacaatagtattttttttagggttcataaataacggcgtggtcaatttttttttttaaagaacaaaaagagaaaaaaaaaatatcagattgtcattaaaagttattaatgtcaaaacataggtattcaaaacatgtaaaaacattattaaaagttaaaattagaggtgaagctatttaataaaattagataccaaataaagtgtcaaatgtaaaactaccaaaaaaaagaaacaagaaaaaccaacatcactcctttaaaaaaccttgttaaagtataaacattaataccaattcactacagattattttcaaaatattaaaactatgcagaatttttaaccatcaaaatattattgaattgcatgaaaattcattaagaaaaacccaccatttctacaatattgcatcaaaatttgtcccatttaaaaaatgtatattttaggatatcttttaatgttgtattttagttatttatgattggtttgtattagtttacactagtgtgtttctgttttttcttcttctttttaagtttagaaggtcgacacttaaaaaaggctgagaacattgacaaaaagattaaaaaagaaaaaatatgttgggtccgcccttgttagtggacttgcaccaattaagggctcaaggcccaaattaaataaaacctaaaagaaattaaaaaaataaggaagcagtagtaggtggtatcttgagcagccaagaggaagaaagaaaaggagagggaaagaagaggaagaaagctagagagagaaagatatttctccattttgctttgaagatcaactggttgattcttatcaatttcagctaaaattttgggaggtgaatccttgtaaggtgctcttcatctaccagctctgatttggtgattgtcctctctaaggtgctcttctacaatactcacttggtgagacccaaacttttactatttgtgtatccatcttttgagatgatgatgattattgtattggtgatccaagattgtttaattgtgatgtttttgtgaccctctacgtttactagagaagaactttgcaatcccattattgaacgttagtgatagtagatgatttgagcggactacggtcccgtaatttttctcacattaggtttccacgtaaaaatcttggtgtctcacttttatgcttgatttgtgtattttctattgtttgtggtgctttagttgatatttgatattgctcattgtagtgtttgataagtatcatatttgtgacatacaaaaagggaaaatattatggttaattgcaatagattttcccaacaagtggtatcatagcaaaggttgattggtgttgaattcttgtctattaaaaaatggatgagtcggatggaatgatgaaattgaacttataaaactattctgcttgaaagcatttgatggaagatttgctctattgtaaagatttgtacaaacctattaaaggtagtgagaagccgtctaagctagataatgaggaatgggaagttaaacatagaaaagccattacctatattagacgatggatggataaaaatcttcatgagcatatctctagtgaaaccagagctgatatcatttgtaaaaagctataaaatctctatgcaaagagaacggctggcaataaaatttctttacttagaagacttgtaaatttgaagtataaggatggtggtagtatggttgagcatacaagtcaatttcagagtcttgcaaactagttagtttccatgaagatgaatatggatgatgagatgcaagcatcattactcctcagttcattaactaacagttgggaaacgttggtgataatggtttctaattccatgctagaagggactttgactattgattcagtcaaagatagtttgcttaatga

SEQ ID NO: 18473 - DNA, 2112 bp, Cannabis sativa
tgcagtttatcgctggaattgtggagcacagaatttctgatgaatttccatctcaaacaatatttgtaaatttgctgtcatttattgctcggacgatcaattcctactggggaactcaggtaatagccatctcctttcgcttctatactttcgttcaactacagttactttctacttgtgaaaaatatgctcagagattgacaaacacgtctttatcctgtccgtaaggcaaaataacatttagctgtaatgtacttctatttgtttggaactatagtttattactttattattactattatgaaggaatttaaactagaaaatctaggcttaagttaataggaaaccattctgaattcttttttgtagacctttccctaaaatcttattttccgccaccaagttttgatacatttttttttacttaatctccattcctatttctttgaatttttcacgcactgcatcacagtggctataatgaaataagatgattattcttgaacttggcttaacattgtttcttcaatgctgcagcaatggattgatctcgctcactatacaggactgcagtctcgggcaaaggaattaccctctttacaaaattctgattctcctagtcacgtcgcattggaaggcaataccacagaagaaaccaatatagatgagataaaaaatcaggaaggtgataatcccattttatagtagagccacagttttttttttttaagttaatttttttccctccttcccttcatatactaatgaaaagagggaacatgaaacgtgaaacagagcagcccttgtgttatagaactctaaatacccaatttttgtatacattcaatgcaattattccaattttgatgaaaatatatagaaagttgtatctcgctattctgttgtgtacttctgaaattttgcgcaatttaacataaattaacaaataaaaacaatattgtaatggaaactgggcagcctgtagcgcctctaacattccttggaatagtatacaccaaccaactaagcagaacaatctgattgatatggccaacaatgtttgatttaattttgagaaatgctaaatgtactccatattacactctgatattggtatttcactaagacaaattctacttaccgattgaataatttgaacaatacgatttgttttgatgagattggattgttacaaaatgatttcaagcattttaatagttatttttatttgtaatgtgaataaaaaccaattaaaatcaaacttgtggatcgtgaaaagtcaagttgaatgtgtaaagagtggaatagagagtcaaactgttattcaaatttcaaaccataaatatttactctcacataaatcacccaaccataagaaaacaaatgtcttctttatcagttggacctgtcaaccaattcgaacaactacaatgggaaacaatatttgtttatcaaatatattttttcaaccaaatgtcgtaaatcagaatctctcatacataaattcttgtgttagtgttgcaacagttatttatcttgttcttcattcatcctatctagcagcttctgcttgaccttctgcagtgcaagttcaaggttttccagctgcatatatttaagttgtaaatttttagttttagcaaatctttaagcacataagttatgttaagaacatagggcagttgatccatacctcttgtttggcaaatctatttcgtagaaataacccactatacaaatcaaaactatccttcatggtgttctctttctgcaaataatttgatgttagtctcctttctcctccattgcagattcttttttttttttgtttaactatttaaacatagaaggaaagaaaaaaaagaaaacacttcaatatgatcattaattataccaactggattagtgtttcaaagccttttgtgttcataggtgtggactcaatcgccatttccgacaataccctgaaaaacatgtagatgcctgagagttgttcatgacagaattttttttatttttttttcaccagtaattactgttatatggctggaaaaaaacgaagaagaagaatacctgccaatagtgtgagtgagaaattggctcttagcagcc

SEQ ID NO: 18474 - DNA, 4624 bp, Cannabis sativa
  modified_base (4521)..(4533): a, c, t, g, unknown or other
acaacatgttaaaataattattttgatttcataacattttattccctttcatttctcccattaatttattccgataacgattacgctttagtaaacgtgccataagtgttcacactgcaaattactcttacaaaataaagaaatagtagcaaataagaagaaaggagaacttaatgtaaattaatgataaaaacaataaaatattgtaatggtgcaatttgtcttttcccaactccgtttgagagaggtgcctagataggaaagagttattagtatccattccttcctttccttctccacctctgagaaaagctatggcggaagggaaacaaaagaagggacttgaaggaactggtttggatttgccgaaaaatcgttacggcaacttgaagagtgcttcaactgatcaaaacttgaagcatattcttacagatatcaagacatcaaaaactcctgtgagatcttccttcacttctttcttttgattctcatttttgtgtaagtttttttcttttttttttctaattgtttttcctatttacaggcggtcatcaattatggtgcatcttggtaagtcccccattgtagttttttttttttttttggtaattgtattttattgttatgcacgcaaagtgttcgatgaaaaatttatttgaactaaatagtgttgtaatttcagtgacttccagaagattttaatttacatatcttatttttattgggttttcaggtgtggtgtttgcagccagattctcccatcattttgtaagctgagtaacaattttccaaagctttcatttatctacgcagacattgatgaatgcccagaaactactctgcatattaggtatacacctacctttcatttttatagagacggtgaaagagtagatgagatgtttggtgctggagaagaacgccttcatgatcggttatggctccattcttgattacattatttgtatcaaacttatgtaatcaaaattgtattcatattcacctataaatgacatcctcagttcatgactttctttgtcttttttaattaaattgtgtcaatgagaaattgtaagctttgaattcgtttacttcctttttttcattttgacccttttgggtgaacaaaagccgcaaaactaacatgccctcttgatattaatgaactatttgcacttgtagcataagtacacttgcactgttaaatgagaaaacaattaatagttgtaaatcaattgatattatatagaattcgcattaatgaatcagcatagttttctcgaacaatcacttgcagaatggaaaaattggggtaaaaaaaaatcttcaaaaagaattacaaaatgagacaagactcgaacaatttgctaccaccttctaatcagctaaactcaaatgcacacatctcgtattgccattctcactcatttacttgttgagctttagcaatagaagtatgcattgaagttttctttattcttcactctcaagccaaaccatggctacgataataaccacttcgaccttgacaaccctctaatttaagcctttggcttgaggatcttcactgtctcccaagtgaaatcgggatcatcacggccaaaatgaccataagcagcagtcttctggaacctgtagttgcctcctctcttcaagtcaaggttaatggacatcatcccaggcctgaagtcgaaactctccttgatgagagccaatatatctctgtctggaatcgttcctgtcttgtaggtatcaacaaagaccgacagtggctctggcacaccaattgcataagaaacctgcacgatgcaacggcgggcaagccctgaagccacgacactctttgctgcctgccttacaatgtaagcaccacttctgtccaccttggttgggtccttccctgagaaagcacctccgccatgagcaccccaaccaccataggtgtcaataatgatcttacggccagtaaggcctgcatctccatgtggtccaccaatgacaaatctgcctgaagggttgaggtgaaagatggtgttctcatccatatactgagctgggataacaggcttaatgacatgttctttcagatcaatggcgatctgttcatttgtcacagtctcatcgtgctgagttgagatgaggacggtgtggactctgagagggaccatggcaccattgtcgttcttgtactcaacagtcacttgggtcttaccatctggcctcaaccaggcacaagtcttgttcttcctcacctcagtgagcttagcaccaagctttgttgccaggacatgagtgagtggcatgagctctggggtctcgtcagttgcataaccgaacatgtggccttggtcaccagctccaatctcctcaggcttcttggtgaggtgaccatggactccctgagcaatgtctgggctctgttgctcgatgttaacaaggaccttgcagttatcagcatcaagtccaacatctggagaggtgaaaccaatttctctgcaggtgtcacgaactatcttttcgtagtcaacagtagccttggtggtgatctcaccaaacaccataaccatgttcgttttggtacaggtttcacaagccaccttgctctctgggtcttgctccaggcaagcatcgaggatggcatctgagacctggtcacagagcttgtctggatgtccctcgttaacagattcggaagtaaacaaaaaggtatccatatctataatctgcacattaaatcaaaattgaccaaaaatgtcagatctcaaattagcccagaagcccaaaataaaatttcaagatctgggttgcatcgttatgttaaaaccagatccaaaaaaacacgaaattcgattgtatcatataatgtaaaatctgggtttactcgcttttgagttgtaactgaaaattatataaagatctacaattttaagattcaagagacaaaaatattcattcatgtaagaacacaacattgaagaataaacgaaaagacaataatcagaactcagatctaagaaaagagtagaaacctgtgtgaatgtgagtgggagaccttcttcaacgacagaaagatgtgagagaggaattgaaagatacaatttttatgagatatatatagtaagaggacgaggggtggagaaaaccatggttacgtctgactcgctctaagtgttttcaatgtcttttttaggtagatggaaaatgctgacttgtctattttctattgggtaacattctttgaatacaatttaactatggcccacaaaatggagcggtggtagagcttcatttgacctgtggtgaaatgtctcaatacatatttcagatcttgccaactaggatttgggggtgggtggtgtggtccaaatcaaaatgtaggtaaataaagtccttttatgtagatctgtttttaagtaattgacccctcatgagccaacttgcctttaaattaaggcaaaaacatttgctatttttcttttcggattttttgtttcaatagaataatgttatttttcatcaaataaaataaaataatgttatttattcagatctctacagcatactcatttattgtaattgagtttatgcatgtgacacagttgtgtgtgtaacactgatagttattgcattttttcttcttacataaatttgggaatatatctagaaaaagtgaagaaaaaaaatcaactaatcatttttatttgttaaagaatggattttttcttctcctataatccatggagtgtaacaacttgtttttttaggtgaaacccataacttattcatatatgtatataaaatattttttttctcaaacttttttttaaatattatataatatacaaaaatcaccaaccataaatactatagggaaatttaaagtggatctctatatttttgacatttaaatagttttaattttaacaagataggtattttaaaaaattttacaaacacaccaaaaaaaaaataatattcaaataatcttttatgtatatatgtatcaaataaaatgttgtgctatctaaattgttaattaattcaattttctcaaaaacaacaacaatataataaaaaagattacaactatctaaatattaaaaacacaaaaagagcacttctacttccagtgcagtttccaaacacttctttttggggaatgcaccataaaaacgcctattactataaattttcgttttccaattcagatttcaaattttggccgacagattctttatggtaacatggcaattgtaaatgacatcatagctatttcttttgttgttttcttatgaggtcttcaagttcaattttactcccaaatagtataatagttaaaaaaaaaaaataaggctaattagtatttttgtccttgaactttgacatgtatcaaatcatgtctcctgaacttttaaggtcgttaaaaatgcccatgaactattgagattgttagattaaaggacttttgtctaatttcattcaattttactatttcgataattgtttatgtactaaaccatnnnnnnnnnnnnntgatatctaccaaatcataccctcgaaatttgacatgtactaaattatggtccctgaacttttatctattttagacttttttactaaaatt

SEQ ID NO: 18475 - DNA, 4846 bp, Cannabis sativa
tcctaggccagctcgatctatgagccaaccacatagaagtgctctgggaaatctgtcttccaaaggatggagccatagttgatctttgagatgatttaaatcgtaggagagaaaattgggacaaaaagtttttccgtttgcctaaaaatcaaccgattaatgtggagaactatattccacaaaatgtagataactttttaccctttggtgctctgaagggtcaacagtgacacatgcccgtcaataggcaagtcaagttgatctaggggtgcaagcctagttggaccaacttaagagactcattcaaggcctgaccgacctgaaactcaccgacctagagctttatcgaacaagaggttcaccattctaacaacaaatcaattccctcgatctgtcgaccaagttcaaaatacccacttggaagatgtacaccaagccaaccagatccgttatctcatatcaaatactttgaagatggacctacaaatagtaaaaggtgatgtaaggcatagaatatttcctgctaccttggcagaggccgcccaacagtggtacttcaagttagcaccagggaaattcaattcatggaatgcctttgccttagagttctacacctaattctcttctttgagacaactccctgctcacttagaagacttggtcgaagtaagacttggagaaactttgaaggattacataagttagtttatgactgagcccacaaaagtgaaaggacttaccaaagagggaagactagcagctgtgctaggaggtattgagctaaaaggagaattgtggaaatatatcaaatgactcattgtcagctcgatgggagagttttaagaccgagcagacaaatttataaagcttgaggaagcaatttggtgagtggacataattagcacaaaaagggtcgaccaaagtcctgcactctcaaccactacaactaatacatctatctagctgggaaacaatttcgaccatggtggtaaaaggtcaaacaatagaaacaaccacaaaaatgggaaaaaagggaagtttaataataaaatcgatcaacaacacccccgagagaaggcatcaaagttcactgtcttcaccatactcatcggggagcgagaaatcatttttatggcaactcaattggttgtgccttacaagagaccccctccgattaagaaagatatgagcaagaaggataccaccaaatactgccaatttcacaaagattttggccatgatagtaacaagtgcaacaatttgaaggacgagattgaattcctcattagaaagaataatatgcacatatgtcagtatgcgaagaccgaccagaaccaacaagttgtccaacttgataacaataagaatcatctaatgcctccatcggtggatgtgcatttacaattgatcattgggggccacacattgttagagatttgaacaaggctagagaaaggtatgctcaaacacttcaatatgaacgaaaagatgaagaagtattggttatggaagagagaaaaccaaagcagccgcgcagagaagaagccatcatctcatttagtaaagatgatgctaaccatatcatttacctacacaatgatccctggttgtcgaagtgtaaatttctaacatgatagtggcttggtcaatgattaataatgaagcttcctcaaatattctttttacaacaacatatgaaaaagatggggcttcataagatttggttccctgcccgcagctagtgtatgtttttttcgaaaaaagtatagctcctcttagatacatcgtctccctttcaacataggaaagattccaatgacaaacattataatggcccaatttctagtaattgatgtaccttctgcttttaacatcatgataggacgaccatatttgacttgaaagtagcaatttaccacttgtgcgtcaagtttttaacaaggaaagggatcggatgcctaaagggagaccaaaacactgcccaccaccaatgctacaatcttgctttgacaaaggcaaaaaagaaagaaccttctggccaagggtcaaaggtcgagaaaaatttgaattaatagggatccacccaaggcgaggatgaagacatggatccttgctttggagatccttatacgaacatcgggctggtggaggaattagaagaaatagagatcgattccactatgccgaataggaagctcgaaattgaacgaggtttgttgctcaaaataaaatccactttgataaaatttctaagagaaaatcttgacattttttgctagtcgcatgaagacatccatatttttgtctcgtacaacaaaaatgccctcaacgttgatcctagtttttgtcctgtacagaaaaaatggagactactagacaaagaacgcacacagacacttaaggaggaattataaaagctctgaacaaacaagttcatcatagaagctttttatcctgcatgggtacccaaccctatcttagtgcccaagccaaacaaaaaatgacacgtatgcattgattgaaccgatcttaataaggcatgttcaaaggattgcttcccacttccaaggatcaatcaactcatagatgctatgataagtcatgagatcctaagatttatggatgcctattcgaggtataatcagataaagatgcattcatctgaccaagagcatacaaatttttggattgacattggcttgtattgctacatagttcggctattcagagtaaagaatgttagggctaccaaccaactgttagtcgataagatgttcaaagattagactaggcataacatggaaatttatgtggatgacatgcttgtcaaatctagaaaggctggggggaatatagaggacttggatgaatgcttccaaatcctcaaaaaatacaacatgaatctcaatcccctcaagtattcttttaaggctagttcaggtaaattattaggctttattattaatgcccgaggaattgaaactaacccagaaaagattcaagtccttttggatatgaaatcacccacgaaggttaaaaaagttcaaagcctcactggtcggatagccgccctaagtagattcgtgtcaaaatcaacagataattgtgtacccttttttaacatcctacaaggaaataaaaatttgaatggactgaggagcatgaagaagcttttcaagcattaaaatagtagcttgcacagcctcctatcttatcaaaatctctggacaaagaggaattggggatataccttgcagtgaccaaatttatagtaagcatcgtactaatcaaagaggaaaacaacatccaacatctggtttactatgttagaaagaggctaattgatgttgaaagtcgataccctctaattaaaaaactaatttattgcctgctccttgcttcaagaaaattaagaccgtacttccaaactcaccccatacgagtttactgttggttttatggtactaaatttggtacgcaactgaataaaaggtttctgattatcatcgtacaatatcctcaggatcaccatatgtatatgtattatatctgaaagtaaatagacaaaaatatgattttcccctcgaagcctatcagggtattcttgagtctttttgtatgttgtctccttaattgatctcgatttacccacactatagtcttccagatcctccaccacacacaaggactagtgtggattagtacaaaaaagtgtatacaaaattcttagtcaattctcaacacatgagcaagaactattttatagtgataatagagaaaaaatattaattatattaattctttttaggcttacaaaaagtaatgcgtatatatttttggtttataaggtatatttaaaataaaatcaataaaatttttattgaattaaatgtttaaattcaaattatttattaaatcatatttaattatttgaatagataatataatcaaattctattatagatattttttttaataaccgattaagagaatctcttaactactttgagagaatatctcaaccatcagaaatatatataattacttttcaaattcaaatttaaatatcttttaaattaattaacccaagaataaattcagtagagcaaccctattaatggggcacttatcactatgtaagaatacagtgatagtgacaccacctatatcttaataagacattggtggtgtcttttatctaaaaaacttttatcttttttccaatttatttaattaataaattttaaaaaataaataattattattttgacaaattcaaataattttttccaaacttacatgtacaacttttatccctatctttgatagtgttttaaggcggccatctagaacgataaacctataattgtaagctccaataaattagattataacctagtatatatatatatattatatatataaaagttaatgataataatattaattattgatttccagttttatttttattacaatcaataaaaataaataaaaacattctttattatcatttgaaagctccattaaattataagaaaaatctataatatccaacctgagtaaaacaaaaacatgccaatcgaaccctttgcgcattgataattgcgtttttccttttcctcacttaagtttctccacatcagattctactttaggtatgcatgcgattttccgagacaaaagccgatattattagtgccaagaaaaagctgatatttcctttaataaacttgctgcattctactttttttggttagtttagttggtatcacttcactttgttattggcatttgtgctatgtctcacatataataataatagtactataacatataattgcag

SEQ ID NO: 18476 - DNA, 4586 bp, Cannabis sativa
  modified_base (2020)..(2020): a, c, t, g, unknown or other
tttacgaaattttacatagaaatctctattgcaacaagcactgtaacctaaattgcaacaaaaaatcgtatagaaacctttgttggcgctgcaaccactttaaaaactcaaacagtaaatttgagaaaaaaaaaaaaaaatttaaaaaacagagaataatttcccaaatttaatttggtaaaatagtattttgttttcctttgttgacaatattctttctggctacacccttataggaaaatggatgtgtctccatatttttaaagaaaaattaattataaaatttatttttattttctctaaactccaaataagaacaaatgatatgaagtataatatgttaacttttattatattaaaaatatttatgtaaagtttttattagatcaatatataaagtttttaaatttattattatctataattgtgtaataattaattataagagagtgtgaaaatagaagcacccattattaagtgagtagaagaagaaaaataataataataatattaaaacgacatgtcgtattattgttggtataaaagtaattacagtgataaactatttgggttttggtgttcagctcctccttcctcagttctctcgattttgtttggattttgggggtttatctagggttcctctcttgctctcactctctgctcccatggcgaagccaagccgaggccgtcgttcgccctcgggttccatttctggctcctcctcacgctctcgttcctactctcgctccgattctcgctcctcctctcgttcccgctcccgctctcgatctcgctcaaggtcattttcttcaagttcttctccttctagaagtggcagctctcgcagccgaagcccacctctacctaagaaaaggtttcttcttcttcttcttcttgaacattttctttttttaaattcttcttctagggttttggttatatatggtctttattgctgacaaattacagaagtgtagagatgaatgtaagtgattatatgtcgaaattaagctacttaaatggtttatcgaatttttcctatgaaaaaagaatcttaagtttaattttgtaagattgttgttgatttttgttctgggtttgcaaaattttagaattgactttgttctttatggaattagttgtggtaccataccacattgcctaaatgacccaactttgagtctaaatcaatgtgtcatttgcagtcctgatacagctcgacgtggtcgctccccacctccacaatctaaaaaggcgtctccaccaccaaggttaatacttagtctataattcaattgaggaattctctagaggaagttacttcatctttgtttgctccaactttatttaaaattggcaccttaactgcagttagtatgttttgatatagttaatgttcttgtcctgcggctgtgcttttaaacctccttcagtacgccagattctatacttcaattttaatgaattatctaatatcccaagaatcctatgtactgtattttttgccaaaaaatagatagcactttattcttattgtggttcatcagagttctagtgcatatgtttccctacccactaactgatttttctttcctttttccattttgtgtgattatctttgtatacactaacgagtgttgcaatggttttcaggaagctttctcctatccatgagtcacttgttcttcacattgatgctctcaccaggaatgtgcatgaaaaccatctgcgagaaatattcggtatgcattgctctgatctctccatatataaacaattttgcatatattagctataatgctattatataggtggtcctaggcggcaagtttaggtttttctgtgattgttattgtattgtctaatacaacatgaacacgccttataagtctagatgcaaatttccccctttcttttatctggagaacataaaaattagctttgtgtaaacatatatttataaggttcaatgaacgcagaatacataataattgtatttttattatatatatatatntatatatatatatataaaataatggattgattagtgattaactaatagtcatagctatagcctagtggtagtacctcacttcttctcacaaagaggaggtcccaatttgaatcccccaccccgatgtcaaaaaaaaaaaggattagtgattaactatccttaccagttaccatacttagtgtaatttaatagttttaaatagtttttgagctgttaactgggcagcattgacattgaagaaaatttaaaacctttgcatgatccatcttaatgatgtttgatgatagttgtgcatttaggatctgtttcatttttcttaccatatttcctatgcaggtaactttggagaagttgtcaatgttgagcttgcgatggatcgtactgtaagttcagactaaatttggtactttggtctgcttaacttttctcctgggaaaattttgtgaacattatttcatatgcaggttaatcttccgaaaggatatggatacgttgagttcaagtcaagagcagatgcagaaaaagctcaaatacacatggatggtgtaagttttattcaaatgttgggagtgtatgatgtttaatatgatgatatcatgttaggaataatgttttcgtatacccttattacaggctcaaattgatgggaacgtagttcgagcaaggttcacattacctcagcggcagaaagtttcacctcctcctaagcctctccctggtcctccaaagcgagatgcacctaaagctgataatgtcgttgctgataaggatgtgccaaagcgaccaagagaacgtatgcttttttttatggaatttatgattatagcatcctaatgctgtcttctttttttcaattataccaatgctttcatttgtaatcttaatttcagcttctcctcgccggaaacctccactctcaccacgaaggagatcccctgtgggccgcagaggtgggtcaccgagacgacttcctgactcgcctccaccacgccgtcgtggtgactcccctcctcctcgccgtcggatggactctcctcctcaccgtcgtggtgatacacctccacgaaggaggattgcatctcctggaagaggtcgttccccatcccctccactaaggcgcagatcccctcctcctaggtatgcagacagtagtattacatatatttagtttttcaagtttgagtatatatgtataaataagcttcttcatcttcttcttcttcttttagaccatctcctcctcctagaaggatgcgtggcagtcctcttcgtaggcgatctccccttcctccaagacggcggtaattctttctaaatattttatttcaacttctcttaaaatctacaagttagttgaatttggtactctgtttttttttcctgcatcttactaataacttttgtttcttacttagttcacctccaagacgccgtagtcctcctaggagatctccactaggtcgcagacgcagccgttctcctattcgtaggcctcttaggtcacgctcaagatcattatcgccaagaaggttggatttgccttaatacttttgcgataacctaaaccttgtttatatgctgtttcttattatttcatattctaacctgcttggaatcacaggggccggggaccagctggaagacgcgggaggtcatcatcatcgtctggatcacctagtcctcgaaaggtattacattctttattttactcttactgagtaaacttggcttgtgggatacactgtataacatcgtttcaattgattaaacagattccccggaaagtattatctcgcagtccaagaaggtaaatctctgttccctattactttcactcggaaacttcaatgtttcattccttctatatgtttcatattttgcaaccatttcttaagctgttgtgtattacattatatgttcaggccattgagaggaagaagcagtagcaacagctcgagcagtagctcacctccacctcctcgaaagccataggaaaaagctaacccccacaatgtttgtctggtatgatggagccatgaactatgtaatgtccaaaaattactagagaggctgagttgatattctcattttactagttttgtgtatgaagaagaagaagaagaagccatattgtatttcaaagatagttgttttggttgaatgatatgattagtcacttttcttccattcatttcgtttaatgttgtttttgttcaaacccaacaacatatatgccaaagcgggattcgagtcaagtgctttaggatttgaattattgctaaaagatatattagaagaactaagaaagtgattatggtaaaaaaaaaaaaggattttctttgatgttgtacaaggattgttgctgcacactatatagtcctaaataattaattagtaaaatatttttagtccattttgaaaatagaaactccacaactaatctcttgtgtcatttatagaggttgagtaaggttataccttatgttaatttaggcatacttaaatttggtttattttacattttataatttttataaaactaaatgtaatattgttccttttgaat

SEQ ID NO: 18477 - DNA, 3689 bp, Cannabis sativa
cctaccataaattaataagaagtacaaataaataaataaaaacgaaaacccaacaattattactacccaaacttcaaacaattccagctcaactgaataaaaaacaaaacacatctagaaaatcgcatccctttgacgttgttatgattattcaaattatcaaaacaaagcaccgaataaacataaagtaaaaattaaattaaaaagataaaaataccataatccccataattgtacttcataatcatattttaaacttccactaacaattctcaaaaaaaaaaaaaaatcttccactaacaataatacaatatcaccccaaataggcatttttaaatcgattgccccattaatcacaacactccaaacaaatatctatctttttctattatcagtcccacccaatcacaaaacttgtctattaatttaacattaccctaacgtgtataaacattttgagcaaaacaaaattaaatatatagccaaacaacttcacggccgagaaaatttaaatactttaaaccccaaaaggcaaaaaaatatataataaaggtgggagcattaaagagaaagtttcccttaagaaggaccatatctatattccattccacccccgaaaaaaaaattaacactactattttttttttcgttgttgtttctgagattgaaaaataataataaaaggaataattttttttttcctttaatagaaaaaaaaaaaaaaagaaaataaaagaaaagaaagattttactttaagcattcggactccaaaggctccacaaacgagaattcaataaccccaatacgtccggcaatacctttctagccaaacccttgtggtcattcgccgtcgtcattgtccgtacagataccgccacgtcatcgctcacttccgtgagctgctgctgctcacctttgacggcgccgttttggctttcatcttcaaacttttcgttcttcgctgctggagcatcgacaacagcaacatataacggactttgactcccatgactattctcctccggcaccggaagcaacgttggttgtggcggaacatcagggagtactagagggctctggaccagctggtgatgatcgcggcggccgagcttgtcccggcgtttgcctcggccgctgttgttgttgttgttgttgttcttggacttttcaccgtgagaaaggtggtcttcaaaggcctcaatgacttggtggatgagctcgcggttaggggaggagtcccacctgaaccagtagctggtatagcaatcaaagcagtcgcaatcgaacataggaggcttatgcccaatattagtactattactattactattattattattattgccagaacctttctttgaggatttcttctttgattctttggtcaccaatgaagaagatgaagatgaagaagaggaggttttcatggacctggtaatcatataagctaagacttctttgtcttcgagagagagaactgaagccaaagctagaatggcagctggaagaagcttcaaaacagagagaatttctgtgtcatttgatgaagaagaagaagaagatgatgagtttggagatgggtaaactttacccttgttctttatcttcatggtgactactactaggctgggtaaggttagatgaaaaacaaaaagctttatttttcaatcaatggaggattactggtgtagagagaaagagagagggttgggttctgaagggagagagagagagagagagagaagagcagtgcgttttaattttcttggtggagaagaaagaaaaggtatgcgtcgagtctaattatttttgtttattattttccaaagatataattttgaaccatgcttacattccggctgagcgcgtgttctgcacggttacggcttttatagaaaatacaagaatataacaaaattatatattatattataattaaagtaaggtatatttggttgttgttttacctatctgagatatatttgtgtaatttattcttatgacaaaaagttttgaagtcgtctcatttttttttgttaaaaaaaaaggtttaaactttaaagttgttttttgtatcaatatcaattttagtattgttaaattgaacttgaaattgaatgaaaaccctgaaaaggaattaagattaactatatatttttttagcaaaaaaggaattaaatatgaatggtttgttattttatcaaatatgaaagtgtagcaattagcaaatattataccgtgcattcttatttattgcttatgattgtaaatgtttgaattaatgtgttgtttttaagacattttttatatgttttaaaagtttcaatctattaataagagtttgaatagagcgggagctgatctttctacaaaattataacttgaactaaaacaaaagttgcgagcaaataatgtgcaattttattagtagatcgcttaacaaaacaaactttaacattgacaagagaaaataaaagtgattgacactcaaataccattaaactaaacaataaaagtattcagataggactctccaaagcttgaatcgaaacaagactgtccgacacaataacatcttaaacgctttttctcttgaaaaatcaaaatcataatggagtaactttcaaattctatttggtattgtattgtataaagggcattcttattccagggttataattgtaaattattgacttaatttgtaaaatatcttattttaatagaaagaaaaatcaaaatcaaaactgagtagctttataaactactaataataatccattttcaaaactaagaataatatattaagtccactttcaatgtaaaagtcgagaggtaatctgtattaagtagtttctaaattattgtacaaggttgaatggtaggtcgtaggaagtgacaacacagtcctcgcgcgtgggattggcttgggaatcctaatcaggtgtagtcaggtccatattagtaatctatcagcttagggcagtgtggtccaaactccagcgaaagagaaaagggtttatggggacagggctcggcagacaagggtacagctccctccctctctgctatatgatcaactttttcgggttaaaatagtcaattcacaaagagctcccgcccatttggataaggacaaccgaccaaaaaccacggtcaaataacatttttgaagaaatgctaaaaaaatattaatagtgtataacactttatttcagtataattaagtaatatagttgttttttaatttaatttttttttaatattataataaatagttatttaaaaatataattttaatatatattaaaattataaatatattattttatctcatagtattattaataattttatttattaaaaattaaaagtacaaatttgttaataattatttagaattatttattaaaaaatttaaaatttattatatatagtattggaaaattctataatgcactttcttaaaatggatatattgatgcacccttatctgttttagcatccgaaataattttttagtcaaattttttcttatggtcatgtacattatatttgccacctttttatattaggagaattacttcatatatatattttttttcaaatttacggtttggattgtttcgattgtttctatgagtttgctatgtgaattttgatcatagcaatttaaatttttccgttggtt

SEQ ID NO: 18478 - DNA, 3548 bp, Cannabis sativa
  modified_base (27)..(28): a, c, t, g, unknown or other
aaacgtgattaactgctaatttccaanntaaactaagcggtctttacaaatcatatcaggattgagattaaatgatcaataattaactaaatgatattaaagaaaaaaatattacgataagtttataaatttgtttcgctgtcaatatcaatccagtctaatgtattgctgatatatccaatattagtttattttactaatatcttgaaaaagccgttccacttattcaagtgtaagcaaactccatttttgattatcacgtcaatgtaatattagtttttaaaatctatatcatagttagaaaagcagaaacgactttaattaaaaataatttaatctaatataaactaaaattaaaaaactgagacaccaccatttttggtgcaaccaaattgctaaagttgtttaatttcttagacaattttacataaaaagactatatgttaacaaaattaagaataaaaattggtattttacctcttgaattttggcccaaaaataaaatcacgcccctaaattattatcaatgttagttattttatttgaactattactgttagtgaaatacgagactttcgttaaataattagtaattttatatcctcaaattataataactattatattttacctttcgaacttttactactgccaatcgtgtcccttatattaaaacaaataaatttgttagtgataaaagttcaacaagcaaaatacgatagtggtcatactttgagggttaaaatttctaatactaaagtctaatagaaatttcatattttactaatgtttaaaattgggaggaattatttaacatcgctaacaattcaaggagtacaatcttattagtgaacaaatgtaggggccaaaatacttattcattcaaaaattatatataaagaattaaatggtaaataaaaatagactaattaaatggtaaataaaagtttagcaagcaaaatacgtggtcatactttaaggggtaaaatttctaatactgaagtctaatagaaatttcatatttaactaatgtttaaaattgggagaatatatttaacatcactaacaattcaaggggcacaatcttataagtcacaaaatataggggccaaaatgcttattgattcacaaattatatacaaagaattaatggtaaataaaaataggctaattaagatttttgtcccctgaaatttgacatgtacgatatcatgctctttgaaattttaaggtaacatgaactatttaaattgttagatttaagaacttttgtcaaattttagtaaagaaaatataacatggataaaaatttaagagacataatttggtacatgtcaaagttcgatgaatataatttggtatatgtcaaagttcgagggacataatttagtacataaataatcactgaattagtaaaattgaatgaaattggacaaaaatccttaaatctaacaatttcaatagctcgggagaaatttttaacggtaaaaaaattttagaaaacataatttagtacatatcaaagtttaagaggcgaaaattctaaaaatattaatagggaactaaggagagccaacaatttctttctataactgtattattaagtgtatgtgtatatacatgttaagccatatagtatgtatagttgtgtgtatatgttatacataaataactcacttgtttatcttcaaaccattttccaaaggcttgaaagctgccaatactacagcaactttacatacaagaaatccaagcataccaacaatgagatctttgggtgtgaaagccatgggaaaatctccagagctgtacttagccacaaacaaagcaaacccaattgccaatgcaacagtagatattggtcctttaaaccctccaatcatttgttcagtttctcctgtgttctgggaacttggatccggaggaggagctggtaattcatcgaccgacctttgcaacacgagaagatacaagaaaccgccaatcccacctgctaaaaatgcgaaagctccatgttctccaaccgaaaaagatgcagctgatgtaccgaaaaatatcaacatggcatcataaagtagcaaagagaatttaagatctgcatactgtctcatactctcctcatttgatatcttttggctttcaagtgatgtcgattcgggaaggcttaaggtagagggatccagccctgatatttcggtggcaagacaaggtctaagttctagcatcgagatattacttccttccccgagcagaatatcctcagcttgaaattcatacttgacactgacataccgaagatcttctgcgcctttctggttggacaacggttgagacgaggaaacaactaccaagctcactcttcctaacctccattggcctgaccatagagaattgtcaaatgaggatcactttgtgagtgaagtagaatcttaaagctttaatcttgaaaatatttgtggtataagtatccaaaattttgcttttataaccggcataaatccaatgattaatttagcagtctaagtatccaatattagtaatttggaatttttcttcagttttatctctacagactccgttagtgttttaaacagaacacatcattgaatctgaacaaaaacgtgtagtatcagttacttctaaatctttcaacaaatttaaaaactagtctatattgatgggactacacgaaaatgaatcattaggtctataccgcatagaaactcaaaactttgagtacgtaaatatcctaaatcataataacatagacaaactaacctgattcaaggccgatccaaatagccttaactctctgtaatttaggtccaatgaaagtaaattcatccacagaacctctttgaaaagggaataacaagtcattatctgaatcagcagactgatgtttaaccaaacttgcaggaattctttgtaataaagagtccccattttcatcaatcaaacacaggagaacaccagcattcaagtcagtgagacttgaggctgagaaattactagtacctaacttaactttgtacaaagattgagatacaccattcttaaaagaactgaaatcattttctactgctgagctatctttacagattttagcttctgctgtttggaaaaggcgcgccggctttgcatagtcctgaaaatctgtaatgagaagagttttcagatagtttaaatctggaatctcagcaaaatttcttggctttccaagaaccgaaaaatcgattacagagttttctttgcaatgccaatgatgacttactttcaaaggatcaaaatctaatccaatcactattcaattagattaacaactatggatgtaaacatacaagtatcaaacgtttcacaaatttcaataagcacaactgaggactataactctatacagtctagcaacaaaagcaatatgtgaatcagaacaagataattaaggtattctattgttaattaacaattgtcatcaataaaatctggtagggattttatttaaacttgaattttagtatgttttgtaacaaatttagttacccttttgt

SEQ ID NO: 18479 - DNA, 5880 bp, Cannabis sativa
ttagaaccaaccatacataaaataatgtcaatcaaaaatatccatctagaccctaattaagtgtttagctactcaatgtcattgtagcgaaatctcacatatcaacttaagaaaagaggagaaaatagagaagaagagaatgttgaaaatcctctaaagaatgcctccaatattgaatttggtctctgaatttcgtactcctttttcaacctttttatttccttctaaattgctttccaaaataaactgaagttcactccttatatagccattgagggactaaaaagatagaaaaaacgcacatgctataaatcctgttcagctttgaattaggaacccaccataagcccacgagtagcaagaaatctttttctacttcaaaataggggcgggccgcagcccgtgtgcaatcttcacacaatgatagaaaaatttcaagggacgggtcgcggcatgcctttcctaggccgcggtccgtgtgtaattttccacattttcaaggcgtgtaatctttttttctaggccggatctcaattttacacagctaacttttatgcgatcttttatcttctttttttttttatcttattttcctctgatattttttgaatcttcttctattttagatttgcgaaaataaaagataacatgcgttaaatttctctaaacacgagtaaaactaaattaaaaatacactaaaattaatttaaaaataatactaaaaacaatcgaacagtacgaaggtggtactcagtgcatgtggtatagaggtcgcacttccgtaaagaacgttcttgaccatttggtgagctttgtaaataggcacacgagagcctaagttcaagtcggtactacatagtatatatattttatgcatatcttactgagtttgttgactcagtaagatgcatgaacatatggagaatgcatctcaaataatgaattctctacagatcatgtttaggcagcattctaatcaaacaagacataatgctactcgtagctacatgaattgtaagatgaaggaggttatccctgtttgatctcatgtattgtacatgattgagctaatgcatgaggcagagacacacatgactatcattgatgagaggactcaagtgaatatgatccttgagttgctatctccttgcttcaaggctttcaccaaaatctatgtaatgaacaagctagatttcaacatgactcaattggtgaacgagttgaccgtgtttgagaaccttaacaaggataagtccaaagaaggtgagtcaaacatcattgaagcaaaatccaactctccttcttcttaagaaaaggaagtggaacagtgaggacaacagtggtggcaagcccaaaggcaagaagtcacccaaggccaagaagcaaagccagcctcatgtccaaggacaagaaggttaaagtcaaatatttccattgtggcataaagggacactagaagaaaaactgtaacaagtatctctccgagcttaagaaaggttataaatatgatttatttattcttgaagctaacttaggggaggatgataaatccttatagattgttgattctgggaccactaatcatatttgttcttctacgcagatacttgaatcgtcaagggaactggccgatggagaggtgactatgcgtgtgtggaacagagcataagtgtctgccaagggtaataataaatttttgttattgaaaaatgttaattttatttttgaatttaccaggaatattatttctttatctcttttgcatgaataatttttcaatgttggttttattaatgataagattattatttctaagaaaagtatgcctatttgttatgcaaaatagagttaatgaagttatgttctcaagccaagtgagcaattgatttcaaataatgattcgtttaaagtagctttgcctcaaggtttctgatgatgatgaaacatatctatgacatctatgtttatgccaccctggcctagacagaattaactggttagcaaaggatgctctttcgagagaactataggttggaactcttccagtatgtgaatcttgtctagaaggcaagatggcaaaaatacctttctctgcaaaaggcaatagtaccaaaaaataacttgagcttatacacactaatatgtgcggacctgtaaatatttaagcatgaggtggttatgaatacttttttatttttattgacaattattctagatacagtcatacttacctaatgtccaagaagtctaaaacttttggaaattcaaagacttcaaggctatggctaaaactaaattgggtaaatcattaaagacactttgatcaaatcatggtggcgagtatttagattctaaattataagtctatttgttggaagaagggatcttgtcccgacttataacacttagaacaactcagcataacgatgttgcagagagaagaaaccagacgttgttagacatgatcaaatcgatgaaggtaaattatttaataagtaattttaagtttgttttaaatattttcaatgaaggtactaactaatattttctttcttttgttttataggtcaagttcagcacgttatacacaaatgatgagataaatattctgtataattagtgagttgataacatttaagtagagttgatgcaataaggacaattatgagtatatgatcattcatgtatatttttggttagtttaaacactttgttttgattaagtaattagtttcataacttctaatatatattatatatggttaaattagaatcatcattaatttttaaataattaattaaatacattgcatgattattaagatagtttcttactattaggaatattttatattaactcaaccacatcattgtaactgtatatacaaaattgtaaaaacctgaagactaatgcaagggaagaaatgacaaaaaaaattgcattttttttttcctattttgcaatatattgtcgaactgtagtcgacactattcaaaagaatagtcgtcatttacaactggttgattgactgactatagccgacagtgtagaaccgacaacaaatggttagtcaaccctattaaactgtcaacaactctactgagtattgtcgttagttttcaacagtcgtcaaaggtaatactcgactgatgcctattccgcctaattttacgtcagtagcataggcgtcaaacttaggacccaataacaaaagttaccccactattaaaaatggacgtaacgatgcaaaatggagcttacatatattcttttacttccccataagaattctatgtacattttatctatctctttaaaaaacaaattgaaggatattgtaaatactcatttaataactcttctagtaaagaaaagttcatcaaatatgtatttttttttttcagaatgtaaggaagattttagttttttataagattttttagaaaaagctatagtacaccatctcgggatatttcagtagaccatcattttgtttgtttcggcatatagaaaagttttttaatgttctttggtttaatgatcatgtacgttataattatttaagattacttgtaacttttcaaaaaattctaaattgtttataatgttaaaattaaggttcaaacaatttcttttccaggcatataagaaaaataattgtgtgtgcaataaacattttattttcaattttctaaaaatttataagcgatcctaaatagctacaacgtaaacaatcatggaaaaaaaattaactataaaactgttccgaataccaaaacatataaaaaatctaatgtaggataaacttatcccaaaaaaaaaattataaaattttgagatacaaataaatttctcttttttaatttaatgctaagaatgacctcaaagaataatgatagaatattaatggccatgattttaataattgaatgaatgcttctattttttagaggtaaaagaataattttatcatttgaaaaaataatttgattccaaggtgcatgcgtttcatttctgaccaacctaacatctactaagtttttgtaaaggaacccagcgaatcccaatgtgagaaacgaggggtcgtgtgttgagcctggttaactcagttacttgtgctgtgtacaaaaacacacatttagtctactgtcaaatcaggccatcacttcgatactcacccagccaccaaaacatcattcatgaccattatatatattttattttttgaaggtacacgatagtcttagattttcttcgcctaataattattctacattgaagaaagtacatttatataaatacaaggcagttcaagatttttatcaaacgtgaaaagtaaattactctgtagggttctttagtgttacacgaggcaatgacgacagagttgaaaacttgtatggtttttactttgtttcatagtttttaccatgcgtttttccaatttaccatcaaaacaaacctaataaaaaaaccaacggtaactggaaaattgtgcagcatttttaatttaaaaaaataaaataaaaaaggaggtaaaaatcaatttcttatccagatgcatagtatacatacatacagctttagtttaaccctcgtttatttccttatagttccccaggtctcagaatccatcatcatgataatttagaccctttaatttaaagaccagaaaagagccctttatacgtacacatgtttaaaacaaaagcatgctcacagcgcccaaagtggtggctcagcgctgcaaagctatgactctatttcccttcaaacttcactttcaaccttactaaataatagtgaataataatattacctttcttttttactttaaaacaacactccaccaacagcccactaagtaatgaatatcacatttaatcaactcaacatttattttaagcctgtttgcggttacctttcttttcactatagccaaaaaaaggaatcttgttggttcatcttgaagggtaaatgccaacaattaaagttctatcttgtttttggtgagcttatcaaaataataataaaaaggctgtctttttatattggatgtaagtttctagtttgagttagcaacaaaaaaaagtttccagtttgtttctggttggttgttgattttttttttttaaaaaataaaagttactattgagagatatgtaaacaaaagaaagtaattgtaacttaagcaacatttctaaaaggatttaatattcccaactttctttacttgtacaagatattgttttaacagagtcaaataagtgaaaacatcaaaaagatccctagaaaagtaaaccacgaaggcccttttacaacaatggctggagacccaaaagtgggcatagtcacatatgaattctgatctaagttagcattagcatcagccaaattatcatttgaatttggttggagaagtttgagcctctgagggcaaggctttaccccaaatgggacatgtcttggtgttggtgttgatggtggtaacaatccaatggaatagcaaagatttgggttgtcccaagccccaaagcgactccccattttcccataaaatgattcagagaatttaagctctcctgtcagattgtttccattcaggtagagagctccaacacatggcagagcagcaagcattggtgagagatttcctgaaaggttgttatcacttaaatccagaaacctcaccctctttaattctgatacagactctggaatctcccctgtcaaaccagtgttagagagatctaacatctctaattgctttagctttttccattcaagcctcattaggtctccaccaattggattattagccaagaccatctgttgtaatgaaaacaactcctcaaatgacttagtcaacccaccagaaa

SEQ ID NO: 18480 - DNA, 2406 bp, Cannabis sativa
ataaaagtgtatgagaaaatgataataagtttttttgcacatattttataattaattaaaataatgtatacaaaattgtaaaatgcccataaataaactaccaaagttagggttcaaccctttgtcgtacaataatagaacaaattgtcaaatgttggtagttttagtatgttctcccaacattgcttatatttattctttgttcagttatttgtgacctaaatattaaaatttattttccagttacagattaatatttaagtaaattttgtaataataaaaatatttttcgtcaatatttttattataaatgagatcatggccggccctatgtgcaaaaataaaaattggggagtgagactattggaatttatactctcgagcttttagttattaaactaatcaaattaccactaggttataatacatatttaacattaaaagtattattatttattttattactaattatattttaattttttttttcaaaatggggccctgagcggtgggggcctaaggcggctgcctccttcgtctcacctcaagggcggccctgaatgagatacgttaatttctcagttaataatcttcagcctttaacgtgtacattcttatggagagaaacataaccttttgctttaagtgataaaactcagctcaagaatatgttgaggtattggccatcctttaataggaaagatgcagagtacaaaaggtagaaggaggacacttgtctctcggatacagactctatgaccacatacatgaaaagatggaataacagaattgtccaacggacacacacactcatgcttgggaccacattacacagctacaaagtgaaacaaccaatatagagaaaatacagagtaattagtatactaagtaaatattacttaatgacaggtttcttaacaccaccccccaagcgagagggtgattgtgttacaccaagcttgtcaactagaaactaaaatcttgagtgagataattctttggtgaagcaatcgacaatttgatttgaggaaggcacatattgaatgttgcgctttttctgctgtactctgtctcttacaaagtgaagatcgagttcagttttgttcaagcatggtaaacttgatttgtagctaatgcacttgcactcatgttatcacaccaaaccacaaaagttgcggataatggaaacttaatctcactgagtaaagactcaagccagataatctcagctgttacatgagctaaagctctttactttgactttgtgcttaatctcgaaaccactgtctgtttcttggatggccaagacactaaagtatctccaaaacatgaagatcagaaaattactctagccatttctgttagagtacgattctttctttcaaccactctattttgttcacgagttttaagagtaaaaaattcatgagaaataccattagatttacaaaactcatcataaacagtatttttaaagtcttttcaatgatcaatcctaatgcgaacaatcttaccaatattgcgatctctttcaactcttaatttcaaacacagatttaaaggcctcaaaagtatcagatttttctcttagaaagtctacccatgaaaaacaagaaaaatcatcaacacacacaaaaataaatctcttaccatacaagctttcaacctggattggacccattagatccatgtgaagaagttcgaggactctggaagtattcacattaggaacacttttgtgagaaattttgagttgcttaccaagctgacatggtccacattttcccacatattccttacccaatttaagtaatcttcgaacaattcttgcacttgacaatctttttagatttttgaaatgaatatgaccaagtttttcatgtcataaatcagtagtattattaatggtagaatgacaaatagcataagtggtgagagtgtaacaattgtcactagatctgagcccttgcaagacaatttcatcaagaatattataaacataacaatcgttaccatcaaagctaacagtataaccctaatcacaaatttgactaatgctaagaagattaacttttagtccttcaaccaatatgacattcttcagtctaggaagaccttcaaaattaagagtcccattcatatgacttttttaacaagaccgttacttaaagtaacttctccacaatgcattggtctaatgttgtcaagataatctttttcccttgtcatgtgtctagaacaaccactgtcaaaataccacaagtgagaagtagtagttttaaaatatgaagagcctactaagcattaggggtgttcattggatcacatccgatccaatccaattgaattgagtcatccgatccaatccgatccaatggatgtattggattggatcggttccatcca

SEQ ID NO: 18481 - DNA, 6642 bp, Cannabis sativa
ttttttgtaactttattttctgaaaactgtttttaaaaaacaaggccaaacaagccaaattgtttttaaaaacaattttctgtttttaaaaacgaaaaacagttttttagttatgatgccaaacatgcacttaatctttctttgtccctttgtctttcgatcattgtttttttgtaaggtgttgattgtttctcaaaaggttcggtcttttgttggattgtgtctctctgtggtgggtgtgtagtaagtgctggtatttacagaggccaactcaagggattctcttgctcaagagaatgtccttttgggggaagttcaagagttaggagttgaagttaatgtttctgaccaaactaaggatgtaaatggcattgaggatggtcaggataataactttgcagataatattcaggagggtagttgtgaatttaatgatgctttaaatggaaacaaagatacaaataaggttgataatcttaaaactttgaggcaatcattccttgactcttgtactctagagctggaactggattttgaactcagcgaggagatcactagaacaaggattttggcctatttttttttaaggaaaaggcatctctaggtctcatctcaaagatataggttctagataatagaccgtggttgatcaatgggaagatgatgattatccatgaatggccttaggatggtgtgtggagtaatgtggacatggggaaggcagttttttgagttcaagcgacgggaatacctactctataattgggttaatactccaaccattgttgcgaaggtacaggtctacaagggctttgatctcgcaaatcaatgaacgattaagcaaaggggctttcttaaattccaagttgaaatttctacgtacaccaactcatttcaggtttctacttggatattaagagaggcaataaagaatggattcaatttcgatattataagctacctaaaatctgctataattgtggttacttgggccatgataagaagtagtatgtgagaccaatagcctttgtgtaccctcttgttggtgatcctgtccctgcttttggtctgtggattaaagcaaagattgctttttttaagctgttttaacactaaaaattacctcgaatggttcaataacaaggaaggagatttcgggccaaatgttgagttcagatttgaaaaaaaaaaattggcacactctttgtcaataaagttgaaccccagaattctagacaaagcccctgtcacagttttccaaacgacttctgctgatttatctctcattggtcgatctttacagaaagtcatcagaactacacaaaatcacccaggtgcaagatatggaaattatttaaaagttgtagagaaataacctgttaatatggtggagaaaatcgatgctcttaacagggactcgtcgttatcatcaagaaatcctcttcaagctagaaggaccaagtcaatctcccctagtttcttgcatagacattatatgggaaaaaattgtgaggatcgagataagaagatcctagaaaagttttcttcctgtcctatcccaactcctaatgatgctagggtcataacaacgatcatgaccaatattaggcccacctatgagcagatggtggaaagcccacatgttaatttatgcaaatctaggagcccacataagcactctgaacctactcatttcccatggcccattaatgctggtgatacgggcttagctgaagaactcatgggccagccccttatagacaaatttgagcccactcttactcttttccatgacccagttgatgtctcggatcacgttcaccactgtcctcgacaaaggaagagaaaatttggtctctctctagttccgtttgtccaaagaacccctgaaaattctcgtgtttttaactctaagactccaatttcgcctcctttcccccctaattcgtctactgctcatttttccatgggtattggcattacatcttcttcctccaaaaagaaggataagagaagaaaaaagaactcaagaccaagtaattcgacagtggatttcaagaaaaatattattttggattcgagtaaagaagaggtgatgaagaattttacaagcgaaaggaatttggtgaatgttaggattgagagcatccataattttcacttgggcgagaaggcgtcccttaccaaccccccaaactcaatgtggatcttatcttggaattgttggggactggctcaggacccgacagtccaagccttaggggtctgggtgaggaatcacaggtcggagtgtgtctttctcatggaaactaaagttaacagtgaaaaatggagggtacgactagaagtttggggttcacaaattgtatttgtatccctacaaggggattgcggattgttactgtctgatgtggcaatatgacacacaaattcaattgattaagcatggtaagtccttctttgaaatagtgttgtgggatcctaatgttagattaggttggagattgattactctttatggtactccctatgaagatgcaaaatgtgttttctgggatgatttgaaaaggtgtgattcttgggatggtccttggctaattattggtgacttaaattgtttgagaattgctgaggagaaactgggggtgttaaagcctcttggcgcgattgcaaatatctgaatggtttcctagatcaccatggatgaatcaacttaggacacaaggggtgtaaattcacctggcagaataatagattctcagggagtctcattcgagagaggttggatagagcaatttcttcctttgattgggttacattattcccacagggtggagtaattaacttttctatttcaatctcggatcatgctctcattctatttgattatctgctgaatagaaagagaggtttctttccttttcattttttcaaagcatggactacggtggcctcatgtagagaagttgttctctctgtttggaacaatacttctctagatcctacaaagggctatttaaaaaatgtggataagattaaaagtgatctaagggtatggagaaaggataattttgaggactgcgataaactaattactaggttggaggatcaactagcttggattcaaaaacaatctgtcaatttgaagctatgtgaagaagaatactttattcaagagcaacttcgagaagcttggaagaaaaaagaaagtttgtggcgccaaaagtcgagggaagtctggttgcgtttgggagatagaaactccaagttttttcatgcttcaacgattattcaaagaagaagaaaccagatcctgagcttaaaagaccatgaagggaataagtgcgatgacagaaggaaaatgtcaagtattatagaaaattacttttctggtttgttttcttcttgcaacttggttattcctttggagctagaagatttattcaataagaaaattggagatgaagataatgctttcctgtctcgaatcccttctagtaagggatactgtgttcgatctccatcctcttaaggccccaggtccggacggtctctcagggtgtttttttcgtaagtattgggacattgttggtaggaatttttgtgatgtggttatagatttcttcagtatgggatctatgaatttgaatttgaattccaccttcatttatgtgatcccaaattctaagaatccggagagaattgagcagtttagacccataagtttatgcaatttcctttataaggtaattgcaaaaattttgtctaaccgcttaagacctttgatggatgttttggtgtctccttttcaatatgcttttattcctggaagatggattgctgaatcttccattctcactcaagaaatcgtccacaagatttaccataaaaagggtaaaggaggtttgatggctattaaactcgatatgcataaaccatatgataagatggagtggtgctttctccatagagttcttttggaaaacggtttcaatgagaagaactgtaaaatgattttggagtgtatgaaaactatttcttattcagttattctcaaagggagcccattgcaaaagttctgtctaaattgaggtcttcaccaaggagatcttctttccccattcctacttctcttctgccaagaagtgctatctaagattcttgtaagggctgaagataggggtctcatccatggtattaaaatttcaagaaatgccccgcccatctcgcacttgatgtttgttgatgttactattctatttgcctgcgctaacaaaaatgaagctctaaaaattctcaaatgtttgtctttgtatgaagcatggttaggtcaaacttgtagcaaggaaaaatcttctatcctctttttaggtaacttggattcgaacaaaaaagcttcaatcctcaagaatcttgccatctctcatgttaggggcgatgaaagatacttgggcaatcctttcgtctttaagaggaggaaaaaggatgagtacattaagttaaaagaaagcatggttaaaaaagtggaaggttggaaaataaaatctctttcatacgcggggaggttaattttgatcaaattggttgctaattccatactgatatgtgatgtctacaaacaaggtcccactctctacttgcagggaagctgatgctataattaggaaattttggtagatttgcaataaagagaacgatagattcatggccctaaggtcttaggattctttgtgtcaacctaagtgctctggaggattgggtttatgtagatttgaagacataaatagagccttattggcaaagcttgcgtggaatctcactggaagcgagccaaaaccttgggttagatgtgtgttaagtaagtatttctaccatgataatttttggtccatctctcccaaaagttgtgactctattctatggaaatgtttgctggatgttagagatatcttgagaagagggtcagtgtccttggcggcttcaggggagtccattgatctctggcatcaagcttggattccttggttggaatttaatgatttcaaggatctaatggaggatttgcgttcaaaaaaggttcacagttcctaccgattgcagatatctcccttggaaactcttggaatactgtcatggttagtcagctttttggggatcaactgggtgctatgattgccaaaattcctagaattccctacctacattcagatagtttgatttggaagttaaagaaggatatgatcttttcagttaaggaagcttatttagttaatcaagctcatcgttttgactccaaaagagatatttgggggtggatttggaacacaaacatccatcccagaatctcaatgatgctttggcgtgttctcaataatgctattcctacattctctaagctcgcttttgtttcgtgtaaaggtgtagaagagacatccttgcacttgtttcgtgattgtccgtttacaagggctttgtggtttgatggacttttacgtgttcaaattgacttgattccaggcaactcagtgatctcatttatggaaaatcttttagaagtgcatatgggagttaaaaggaccacttttttttttttttttacttttattggctgtgttttccttgagttatggcactttcgaaatagtattaggtgtaatggaggccttacaaaggttgatttgctgatgcaaaaggtgtgttggcaccttttctaaatttttggcccttttgaagagtatgagggggaagtaggcttgacccctagggttgggagggagtcagtgcagcttcctatttctcccagagataaggcacactttattctctatactgatgcttcgtggaaagatggaattgcaagtattgccgtgattgccattaatttgttggactcttcttgggatttttcactaacagagtaggtgctcagtcagctctcgtagctgaaatcattgcgatttcttcaacacttactcgtgcaactagagataattggagtaatatcgatattctttctgattgtcagttgatggttcaagctcttgcttctaaaagggcttccccgattggggttgtttaggtttatcactttcaattttagatttagctagtagtatctctaattgtaatttattttttactagatgtttttttaactcctttgcaggtggactagcaaagagcgttaaaatttctagtcagttggctggtttatatcaaggggaggaaaatctcactatgattctcgtcaatctcttttagtttatgaacttttagttctttaaaaaagaaaaaaaaaaacaaaaaacaaaaacgtcctgactagaggatccaatccaaatcccaataattgcatacatttggtttggataactgaaaagttttttgtcaagaaattagaaaaatagctgataataatataaaagacattaaagatttatgaatgttttaaagtaagttttgattccatttcaaaaaagaaaaattccctcaaaataaatctagttttatttttctaataaacgattttaacttttttaatgaaaatatatatatttatgtgacacactaacacaagcacagcatatctattatatagggatatgattttgttctgttattgtactttcacggattacaatc

SEQ ID NO: 18482 - DNA, 3403 bp, Cannabis sativa
aagtttcttagaatttgcactgctaacatcttctgtatttaataaaagaaaatttgcatcacaaacatgtatgaaaagtcaaataaaaacaaaacatattctgtattttggtttcaaagttttggttacacttcattgaatccaatgagtcagaaactctagcaatttgttagggaggtccatgagaaatcgaaaccagaccatatcaagctgtaattagaagatacaacatgcattctccaatttcattccatacatcaataatagtatatattattcttgttgatatgtaaatgttaatagtacaatgagatagaacatggtctcctctccttcagcaacatattgtgatttcttggaacttttatcaacactgatatagacaataaagggatatcattaaattcaatcatgctaatgatatcccttgattattaggcactgagtagataaatatgctcacattatacaattttgtattcaattatgtgtttttattgttccttacatggacttattttcccagattgacgaggcagaagtatttaaggaaaccaaacagttcacctacaaagacggttcacagtttgtcttcatggacctggtatttttttaatcttcatattctaatttcatatactggtcttcggttgcaggagtttttacaagattcttgctgaagcaggaccgatttagtatccaggggctatgcctcaaggaacgcgtcactgtaactgtcaagatttgaatttcaactaacttcattttcatactttataggtgtaattgtactcttttgcagatcacatacgaggaaattcgcctcaatgatgctgatgtcggggataaaacaaagtggttgaaagaaggaatggactgcaatctcctactttggaaaggaaaggtacttgtcaaatcctttccaagtttttctgagcatttgttataatttgattacgtatgattatctttctttaatggcgaattgcgtttgctatatcgttttaggttattggccttgaacttcctgtcacagtgcagttgaaagtagaacaagttgatccaggactcaaaggtgacacggctcaaggtaatgttatttcgtttcgttgttaaatttcgaaggacctaatgtcttgtccttgtactgaatttgccatgtgaattttttctttgcaggtggtggaacaaagcctgcaactcttgaaaccggaacaatcgtcaatgtcccgttattcataaatacaggggacacaataatagtcgatacaagaaccggacaatacacgagtcgggcatgagttatagcttgtagattacctaccattagacaattcttttcggccttttgtttaccattaaagagagttctattctatcttcactgtatgagaaatgtacacaaagttttcacttgaaattagtaaaacctcaacctttgttgtaaactacttggctcatatttgagaatagcttaatacatttttgtatctaatcaaagaaagtgaatcaatttatcgtcgtagtaatattacaagaagcaaagaatcgacaacattttctcattgttgcggtttcttgctaggaatcaaaccgcgcttcactgcagccccgtacacattacaagcaccgatgaaattaccatgtttgtttaacccatcaatcaaaaggttataacttcctctactaggaactatacccccttcattcaacaaaaccaaaacaaacaacgcctcgttcgcctttccctccacacaaagcgcttgaattacaccgttcagtgtgataatctgcggtgaaaatcccattcgaatcatcgtctgtaaacttacactagcctcatcaattttcttccctatacacagagtctgaatcactagatcgtacgtactaggttcgaacaaatcgccatcgtttttcatcttcttgaacaattggtaagcatctcgaaacaagtcttcttttcttcccctacaaaatctcctacacaatcctcttaacagagagttcatcatcttcttatccacattcaatccaatctccaacatttccttacaaatcctcaaagcagtcttggtttttcgccatttcaataacccatgtaacaaagtactgtaactgatataatcaggctgacaatctctctctttcatcatcttcaaaatcttaatcccttccaatggtcttccctctacacaaaacccattaaagagagtattgaaagtgacaacatttggtgataaactcatctccaaagcttcattaagcaattccatagcctcatctgatctaccaactttacaaaaaccacccataacagctgtatatgaatacatatcaactccaacaatggagtctttcttcatcctcattaacatatcaaatgcttcctctactctccccacataacacaaccctttcaacaaacaattatatatttgaacagttggcttaaaaccaatcccacccatcaaatccaaaaccccaaaagctctctgcaacttaccctttttacataatgaattcatcaaaatatttacagcagaaaaatttggaacaaacccattatccaacatataccttagaacactctctgcctcatcaaaatcattattctcacaataacacctaataattacagaaaatgtccaagaatctggctccaaaccatagctagacatttcatcaaacagtttcaaggcaagataaggctcctcagcaataacaagagctaaaagtagttcattgaactcaaaaatggttcccaagtcaccatttagcttctgaacagtgatgatttggtgtttttccttaaagggtaagcctttgatttcatcaacaagaggttttaggcttaattgggtggtgggtttctcataaaaatcatggctttctttgatgggtatttctgtaatgttgtttttactattaagagcataagaagaagaagaaacatggtgatgggttttgttggttttgaatgttttgtagaagcaaattgggttggtcactaaaatagagttgaacacatgaattggagaaggcattagagaataataatgtagtataagtatttttgggagtagtattgaatttataaatatatttttcaaattatttcatttttatttatttatttatttatccacaccattttaatattctatataaaagaaattatataagaagaaaaattactactttacaataaaacattttgaaagaaaaaaaaaattacactactttatgattatattagcttacttgtttatttatttatttttttgagtaattaacgtgaaatttttatatattttatttaatttttatacacttatttttttttcttatattattatactatttacataatgtcaccttttaagataatgttatcatcact

SEQ ID NO: 18483 - DNA, 4231 bp, Cannabis sativa
catatctttgagttgataaataaaattataattagggttatttagtgctaaactctcttattttttaatttttaattttttagtattttataaattaaaaatactaactagatattacggttaaatactaattaaattattacaatattagtttcgaaattttattgtatacatagatatcacaataataattcagttgatatctaagattatttttaataatttttgtagttggtttttattttctttaaataaaattaattatagtacaaatttaattacacttacaaagactgttatgtttttagaactagaaggaatgaattgttttgtcttgtcttttattttcttttataaataatttaatacaaatacaaaacaccaaaattacttttttttttgttggtgtatgcagaaacacaaaccctaagaaagtgactctatttaaagaaatggaccaagatgtcctctaaattgtgggcacaaaatttatgatgtgtcaattttggattggaaaaacttgactcattcataaaattatggggaaaatgcagcaaggcaagtccatgaaaataggcccaattacagcaaactattgagaagacacctcaactaacatgtgcttaagaggaatttggagaaaaaaaaaatacacaaacaaaaacatcaaaacaaaataaaacaagacaaaaaaccatgtgcatatatgaaatatataaatgtagtatttagtagtaattgactaaattttacaaaccattttcttcctctttattttttatttattttgtttatattcccataaaatgttatcaaaagtaccacattgaaagagtgcaaaagtaaattttatttagacacatataataataacttaagtaatatagaatttttaggtctatcccaagctaaagaaaaatgaagtcttagactcccatctttaactttttcataattttcatcataaaagctaaaatactactcttatgatgaagaagggcttaagcggattatttcttaagtgttaagatgtaattaaagaattgtatggcttttgtacccatatttaggtatttgggtgttgatattgatcacacatgtatattttgcattgactattgcgattctaaatataaacataaggatgttagggtactttattgttggttagagttagagtatatcaatatttttgttggataaatctctatactaactgtcacatgaaaaaataccttaaacaaggttacaaggaaataaaataagaatttttacaagcctcaacagacctttataactcttggagtagtcagttctgtttcataggcttaaatcttttagctctttactatacaagaaaaaaataataactttcaagactccaacaaactttcagcaactcaagcaaacaaataacaattttttttttttttttttttgtaactgtttctaactgatttctcttaactcaaacacaacaaagcacatacagcaacaacactataaaataagggtcaacttgcccatttggaagagagttttcagcccagccaaggaaagcagtagcaacaaccatttgaagtggaaaaatcctccgttttaagagagaaaaacatagagagagttagaaacacatattgtaaccaaaccagaaaaataagagtgaaagacaagaaaagaagctttgagattacctgctggtttgtggcatggaatctccataaccttgtaactcggctttgacattgatagtggagattcaagcaactttgagggtcgcttgacggagacatacctctgatttagagggaactctaaaatcatttctttgtgttcttcattttattttctgttggtttttcctttagtctttctctagtttcgggttgcttgttgtgtgtgttgcaggttcgaaagagcagcattaagcttgggttagaaagctctcataaagcttgaagaagaagattagaagggctgaagaagaagggaaaaatgtagcagtgggttgaagatgatcatgaggagcggctgctagggtttcaagcaagaagaaaggagaagaagagaaggaggcttcatctagggttagaggaagtaaggaaattggcctgctagggtttctgctgataaagaagcatttatactgccataaaaaaggtaaggttttgagggaaaatatctcttgatccgcacaagagaggaaggtccttttttaccttagttttttgtactttgggatgttggtgtaggggcattttaatgcttaatttcctacagttttgttagagatacctttgttggaatgttagagggactaacaaccaacaaaagcataagaaaatgaagcaattgatttattctaaaaatattgggtttgttagtctcctagaaaccaagattcaaaataagaataaggggaaactgtatactagtttgtttcaaggatggggtttttctaataacaacccctagttagacaaagggagaataattattgcttgataacctaatgtctacactgtagatattaaattttgttctagtcagctgtttcattgctatgttcactcaaatcagcaaccagggaagttttttgtaacactggtttatggctttaatgatgaacaaagaagaggagagctatgggcagacttggagaaattagctaaggggattgatgaggcatggataatgatgggggaattcaatgagatacttaatgcaaatgaaagaattggaaagaaagcacaatgtactcattctcagagattcagagattgtgtggagcattgtggtacgtttgatttgaagttttctggaacatttctaacctggaataataaacaaaagcatgaggatagaattttttccaaaattgattgagcaatggtcaattctcactagatgaattcttttctttgttctgaagcagttttcttgcctgaattatgctttgaccatagccctatcttagtgtcaatataccaggatatgagctttggaaaaaaaaacccttcaagtattttaacatgtggaaattggcccctagatatgataaacaggttgttgaatgttggaaagaagaagtcaggggttccaaaatgttcagaattgttactaaattgagaaggttgaagcatgtgctgaagaagatcaataaagagggcttttctgagatacataaagcagatttatttgctaatgctgaataaactgtagcacaagagaatttgagcaaagaccctcttaatatggagctgatggaggctgagcaagaagcatgcaggaagtacaatgaagttcataaggcatattctctgtttttatcacagaaagccaaagttactagggcagcttatggtgatgactactctgccatttttcatgcttctcttaagttgagaagaatccataagaaaattttctcgattgaagatgagcatggattatggtgtgatacaccagaaggggtccaagatgcttttctaagctactatgagagattattagggacaaatatgcaagatacaaaaagagtctttcaatcaatgattgaccttgggcccaacgttaatgatcatcatagaagaattatccttgctgaatactctgaataagaagtgaaagaggccttatttttaatacctagtaacaaggcaccagggcttgatgggtttggcagtgcattcttccaggataattggcaactttatgaaatagagtttgtggaagttgttctgtccttccttagctttagaaaaatgttaaaggaaatcaacactaccactatcactcttattcctaagactacttgtccaaagagtgttgctgacttcaggcctatcttatgttgcaatgtcctatataagactgccaccaaagttgtttgcaatagattaaggaagaccctgcctgaccttattgcagagaactaatgtggatttgttcacgataggtatattgcacataatgttctagtttgtcaagatttggtgagactatatgggaggaaaaactgcaaatctagttgcatgatcataattgatttaaggaaggcctatgacaccattgaatgggaattcttagaagaaatgttgatcggttatgggtttcctgaccagtttatacaatttattatgtgctgcataagaactcccaaattttctttgctcttcaatggatccatgtgtggtttctttaatgcaaagagagggttaagacaagggga

SEQ ID NO: 18484 - DNA, 3331 bp, Cannabis sativa
aaagctatattaggtaagttcaaaaagaatatctgtgcaacagaatatgaccctactattataataaactgtaataaaattaaatacctctataggagtatcccttttctctgcagcagcaactaatgtttcaatgttcagagctgacccaaaccctgtatgatacgatgtttaaaaaggcacccacactcaaagaaggaatacaagaaatgacaaaaaagaggggaaattacttgtggaaggaactcctcttgtagaacgaacaaatccttgggtagaagaaagcattgccggagaactagttgcactatgtaactgcagtttttcagtaacataacacttaggttggacattagattactacatgaagacaagagcatgtactaaatatttttgaataatcaaagcttactttctgagcactactagcttcaccaataggagcacctggtgtttgcacgacagaagataaaggtggtttgtcattggatgaagccacagggatcttatgacgctcatcaaaagagctatcatgtctctgttgaagctgcagagaagaagagagttgctgcccagagtgcatggtaccagggacattcaactgcaactaaccaaaattgtgttaggcaatcattccatctaatgttttctaaaatgtgtttttaaatttccatttcaacaaacagtagcaatagaactgaagtgtggttgtactgcaaaacataaattaaaaaaatgatgcattgactggcatgctagcttaaaataagatgcgtcaaaaggaatctgtctataatgccacaagagtgttatctatattatgattatatattcataccaatattgactagacacgccttataataattaatactaaagtaatagtgatagtgaaatatgtggagcacaaacagctagtagcatgagcttggtgatggaaacctaaaaaaattagtgcatgaagcatattttctcacgttcaaaccatgtcagtaaacagaaagtcattatgctacaatgaagtaatgcacacttgagaagaaaagcatagtatctaatggaagagaaaaaaaaaagatggcaaccatggctttcgtcctctctctacccatttagccaaattatattgcatcacacaagacaagaaataggaatcacgacttacatccatatgtcctgatgccacttgatatgggccatggtgatgagcagaagaagcctggttgcccccttcagagtctgaatgacctgatgaaatcctagctagagcttgttcaatgaaagtaactagctctaaatgagtactacgtagatgggaaatttgtaatatatggttgcagtattgcggccactctataaggcgatccacaaactgctccaaagccttggtaccaaacacaaacatctgcatgtcaagagagggaaaagagcataagcaaaaataaaataccaagtgaatgaaagaaattcaataatagatacaaacttttgaatcagcaggtttgcgcaatgcatccagaacaccgcgtagagcaatcccaagtggaagatgagttacaagttgatgcttgataacagaacctaggatatacaccaacaccagagtatacaaaatttaaatcaattcaaagacatagttgccataaaatcaatgaaattaaaatatgattggcttcatcagagtaaaccacaataagggtatgcacataatgtatatcgatatgaaagacaaagaaccaatgaaaacgaatgcaatcagcttgagtgcataattcagatacgttaatttaattgactttataagatcatgctctagagatcaaatgtaaagataagagtaattcagatatgttaatctaacagtcaattatttaggaagtattaatgctacatcttttcttcaaagaaatttgatgattgaatgcaatgcatcattacaaaagcatttgaataactaactaaataagatcatgctctagagatcaaatgtaaagataaagtaagtaaaatgccaaactgatccattattgctatttcagccactaaaaaacaatgctatctatcagcacaggaagaaattactatctataagcatcaaccttatactttaaaatcaaaatgaatgacaagaaacagtcatttaccataaacaccagaaaaattatatgaaatccataaaaatgctacaaactcaccaaaaagaatggctgcaatcttcaattgcttttcgggatactttggaaagaacatgtactcctcaaacagatttgcaatcatgcactcaaaaattaagttcttcctgtaagtttgtgcaacaatgtcatctattacttctcaagatatatacatgaacattagtaagtgatatcaacatatcaggacatctataaacaaaaagattctctaacaaatggtcacaatcaaaacataaaacatgtgccaaacaggaaaaatatctggcatcatattttcttgaagtttttgttgtttacatcaatgccgcacaacttggaatcaatgtaaaattgaaagataagtgatgattcctcctcaagaacaagcaaaaacattcataattaaaaggtttgcaatatgaagaacgcaaacaacataattatttatatgtctgcccaaggcacaataaaacacccatcacatggtcacaatactttaacatcaaagatgaaataaaataatcataatgttatgatttcaaaagcttataaacaacaaaagtcaatttttgataatatcaaaagttttaactagtatggaattaattcaatcggttcaaaaactgtacctatttacagatgattctttgaagcgggccaacatctgcaccatttcagcaatggtcaaattaccagaaaacatctgatggaagtaagagttggcttcagcttcaatgtcatctgcatatccatcagttgatgaatcagcagttccaccattttgaagtcttggattagagtcaacaattgatacatccaacctttccaattcctcagaaagttggctagaagtaatcaatccagtatgagatttaagggcctattgtcaaaaatcaaaaacaaagaaattacataattacagtgaagaataaagtagtacaaaaaagttgtatcccaattgcagtaccttcaaaaaggtactagtagcatccgcataaagattggagatggcaccagaatgttggaaaggtcgggtggaaaaatcatgtgatccaccaaattggatctcctttaagaacttgaggcactcctacaaagtttaagtacaattagctcatgatacacaatacttttttatacatataaaagaacaaaac

SEQ ID NO: 18485 - DNA, 6127 bp, Cannabis sativa
tcgctagattatgatcatgaagacttcgaaaacccatcccacctgagtatttatgaacaaccatcctgtcccaagactcttaagtaatgccttaccttgtcttgaagaagagcaccaccaactagaacataaaattctttcgatctcttgacaaactttcagcggtagcaagaaaacactcatcacatagctaggcagagcttgagccactattttaattaaaacttctttgccagcacgagataacatcttagcatcccaactctccactcttttcctcactcgatctttcaagaaaccctaacctgaagatttattccttcccatagtgccaggatgaccaagatacttgctattatcatcagcttgagccattactgtaattatcatgatacgatctctcattgccacatccgtattggtgctgaaaaagattgacgactttgctaaattgactttttgacaagaggcaagtttaaacttcctcaacagagtcataatgtaggaagcttctccctccgaagcttgacaacataagtaactgtcatcagtgaaaaacatatgggaaatagagggtgcaccacacgcaatcttacaacaatggatcaatttattcatctcataacgctaaataagagccgagaaaccttcagcacaaagaataaacaaataggtagacaaaggatcccttgacgaataccccgagaagccacaaccgggcctatcttctgacctccatgagtgatatgatattggatcgaacgaacacaagctagtataagataaatccaccactgatgaaaacccatcttagtcagagttgcttccaagaaaggccactcgactttatcataggccttactcatatcaagtttaagagccataaatcctttttttcccttgagatttcctctttcaatagtgtaagacttcaaaagagacaagaatattgtctgaaatcaaacgatccgggatgaacacactttgaaaaggagagattatttggtcaagaagcccattcattttattagcaagaacttttgacacaattttatacaacacattacacagcgcaatcggcctaaggtcacccataacaatggggttcttctttttgggaataagaacaagatttgtatcattaagacctgatgatatctcaccagtagcaaaaaaattctgaaccgtcgacaccacatccgcacccacaatagaccaacttttttgataaaaggcaggagtcattccatccggacctagagatttatccggattcatatcgaaaagagccgttttcacttcttcagcagtcgctttaaggaacttctgattatgaatagctgagacagatggctcaatacaatcgctaatttcatcccaatgagaatggcctaaagcggaaaaaatatcagagaaataccgaagcatgacctgatcaagacccctgccccattcaacccattgttatcatcttggagtttttgaatgacattgttattctttctagtagtagtagaagcataaaaaaaattgtgttactatccccatatttgagccaaagctggttagatctttgacgccaatgaatctctttttgatggaaaatagtattaagattttttttctcagcttcataaagggaacaagaagttgggtcccttttgtttttcaactactgcaagatctttttttattcaaaaatttgacttttaaagttacatgttatagcctttccccacgttgacactaattcaccacaagcagtcaccttatataccacagatgttcccacactcgcttcccacccatctttgatagcttgtaaacacataggatcagagagtcaggcattctcaaatcaaaaacaatacttgtgagggagagataaataggtaataggatctaagaataaagtagtatgatctgaagaagaatagtcaagattgaataatttagctaaagaataaacattaagccaagaaataaaagccagacacctgacgaaaacctcgctcccaagtaaattgatacctcaccagctccaaatcaactaagtcacactcttgaatcacttgacgaaaaccttccaccaaccacttaggatagggtcggcccccacgcttgtctatttgagaaacaacattgttgaaatctcccataagacaccatggcagctgagactcatccttcaaacttctaaatatatttcatgtattagcccgaaggcttcttttgggttcaaaataaatgcaagttaatctccaatccaccatacccaaaattcgaacaatgacatcaatatggttgatcgaaaatcccaccacttcagcttcatcactttccttccaaaaaaaaatgcaagtccccctccccttccttgaccttccacaacaaacgaaccatcaaaattgatggagcgaacacgatcaatcctctccttgctacacaatgtttcactaagaaaaacaaacttgggcttcttttgagaaatcatctctttaaggaattgaagagtcaatgggttcccaagcccatgaaaattccaacttagacaactcataatgactagcaggccctctttgtaaggcctgcctgtgacaagtttttcgaaagcccaactccatcctctttatcctcattagaaacaacattctccacatttttgccatcaccattaatccaatatataaccaccttccccaggcccaagatgattattaataaaaccacctgaacccccttcagatggcccacgtgcctggtcaaccattatctcatcctcactaataatcggcccagtatccatcaagcccactctctttcttttgggatcagtaataataattccttcagatattggtatattacacccataccccatcttattctctgaattatttaaatctattccacctctacttcccgccagtgaaatttcagtagcatccataataatggcagcaaatttctccctcaaattgctctaagcattattccccttcattacctctcccccatttccttcatgattaactctatcagaattttccaagtttggaaagtttgtagtcaaccgttgaggcctcccacccgtccctgaactcatcaaactcgtaggtgcaaacaactccagtttccttaaccattttgatccatctggtaggttcatcttcttcagtgcaactttcatccaatcaccataaggtttttcaatctgggccatcagagtaataaacaatttaaagcaaaatcggtctgtgtgaccaattataccacagatgaaacaaaagtgtggcacccgctcatacttaaaatgaacccaaacccagtcaatgtccttcttcctaagatgccatttccgtttgagagggacatcgatatcaatcgaaacctatactcgtaaatagtcccgccatacaccaatgaaattttaggatctgtctccacacatcttccaacataattcccaattgctttgagaactatatcagacataagacctggtacaatatcatgtacctgcaccttaatgtccaatttgttaagctttattgcccatggattatccccttctgttaacctttcaaagatacagttgttgccgattacatgtccatagactcccttcaatcatccattgaatatccacctcatgataaaattgaaacaaaaaaagaatgctctcaagttgtttcacatacatgcccgtaccgggctttccacagagatgccaattggttctgaacaaattccaaatccatgactctgctggataagaatttacctacaagacaccaacgaccatcaaaactgcaatccgtctcaacgtcatctcccaatttaaaacctccttgttcttcttcttcttcttccaatgtcagatttgcacaaacatcttctaactcatgaatattccttgaactgctaaccgccatgatcaacaaaatacgctaaaaaaaagagaaactcaaactctcaaaaccatgtcaaagacaagactgaaatcaatcacgattgagcgacttaaatttttatatccgaagaattggttattaggttagtatgcgtgaatatttaatagttaactcattgttgtattgtggtagccatattatgacaacgtgagacaaggtcttaatagtacaataattttgcttgctaacattactgaagcaaataaggactcaacatatacatgagataaagaaaaaaagaaaaggagtacatgatgttgcaggtacaacaatcataacattggacatagaagaatagaaataatttgatataatagaaattagaaattaacattcaataatgaaattaagaattcatgtctcgagttttgaaataacccttaactaaaagaaaactactcaaaactagacattataatgatataatcataataaatagtaaaagtagaaggagaaggagaagaaaagaactagaatgaagaacactttgaagccgatgtccgtctcttccttgctctctccttgagtttctctctttaatttgtagcttttagaattattcaattcgtagcctaagacatcctatttatagtgcttgaagatagatgaatcatcctagaattaggattctatttataatgcttaaaaagatagatgaatccacttagaattaggattctatttataatacttgagaagatagatgaatctcttagaattaggattctatttatagtattaggaaatatctcactaaaggaaaagataattcattttttgaaaaaaaaaaaagataaaaaaatcgcaactctacttgaaaagctatctttattttcactatcttctttttcagaaatttcctactgcgatgaatgagagtattttggccttgactctcttgatattacttggaattgggcgattcaaaatgttctggaaagctaagaacgagatctaaaacttttatgttgagctccaagtccagttctacctctaaggtcgtccgaattcgtaattaagttctgccttgtaaaatcgagctcgtgagcttccactatttttttaccaaaatatgctaaaatccctccaaaagactctaaatgcatgaatattctttaagatagcctaacaaatgaaaattacactagtccataatttaaagaattaatttaagaatattaatacataaattgattttatttataagacaaatatggactcatcaatttaattttaaagtacttaactacaatccttgtgagatcgatcttgtgagtattacttgttaaaacgatacatatatttacaaattctacaaacatagggtagaaaatacatgtgtacaaattctacaaacatagggtagaaaatacatgtgtagaaaatactctatgttttgtgaaaacacatgtgtagaatttgtaaataaaaggtactaacatgattattattgaaaacataaggtataccaagtttgtattttcacaaaacatagggttctaaatgagtatttactcttcatccattctccaacaacaacacattgggaaggatgcaaaagactttttagatatcttaaagacacaatcaatgaaggacttctcattagaccaacgacaagactctgtttacaggcttactcagatggaaattggacaagctatctagatgacaaacgctcaccaagtggctatgccatcttttcagaggaaatttagtatcttgatctgccaaaaaaaacaataagtagttgttcgatcaagtactgaaagtgagtttcgtgctcttgctaacatagctgtcgagataaaagtggctatgctctgttcttgccgaattgaaagttactctacatattcctccaattatttgggttgataatttaggagtagcttccttagctgcaaaccatgtcttccatgcttaatcaaagcatatcgagattgatttgcatttaaatcatgttcgagaaaatcgaagtttgttatgtgccttcatgtgatcagacaattggcattcttaccaagccactatcgacgtatcatttcaactgttgtgaaaattgtatacgcaagtgtacgcaatcgtaacaagtaataaagtgataaatcgagtatcgtctccacagggattgaaaattggaaattaattta

SEQ ID NO: 18486 - DNA, 8085 bp, Cannabis sativa
cgtgcatcgcacgtaacaatatactagtatatatatatatgcatggtaagaaataaatacaatactgtttggctgttaatgatcaaaagctaaatgggattcatacaactgcaataatttattaattttcttttaataatattactctcaaaacccaatatttccataaatgtctactgtctacacataaaataacaacacatttttctttactttttttttttttttggacaaactggccactttggtctgaagtaaataaataaataaagccagcaaaatcctgcaaaagaaagaaagaaaaaaaaattcagggatgagatttgagaaatttgttgattaattttaagtgacatttaatattttgggacaaaacttacactagttatttgatcggttggaattaacataagcaagaatggtagccaatagaatgatgaacatgataatctgcattgggatttaagatttaattagtcctttttcttctctaaaaaaatattaattcaaagagagagactcaccacagctgaataatttgactgattcttgagtatataagatttcctgtaatataaaaataaaaagataaggcaggcacacaaaatttagaaaagaaaaacagtgttcaatattcatgaaaatgtacaagaaattaattatgaaaaatacctattggcggtaagggtccaagaattcttgcaggctttctgtatagagtctagtctgcttaatgtcttttgtgcatttgggtcattggtgtcaacctgtggtagccaatgataataaattgattttaatatcgaaatatgaaccttaaaaaacaaaaaaaaaaaaggaaagagatttgcatattaatcaaaatcgccattacaaacaaggctcacaattataatccaaaccccaagaaagttttttggtcatacatatatttgatgataagggataaatgatagagcacttctctaaatgaatgagagaagaccaaacattctctcttttgattggttggagccttggagggggaattagaagaaaataggagattttgattgtataatgggaattactccaatgagcaaactatacatcaaattaaggatttgaaatccttcctaccaaataatcataattctctccaaaacacactcttcatcacataagtatggagcacaagcagaagattatgcctttttcatggttgaggaaaatgttaggctttttaattatactcatttttcattggtataatttgtaagttaccgattattatacttataaatcttccatagggtgcagccattatcatggtttctacatatacaagaatcataccttggactttatgatacaagagaaatcatagaaagcgccgtagacatcagccattgtattcgttctatcaattactttagccgtaagacctagaaaacacaagcaaagtgaaatcagcatcagggactcatgattcttgacaagaaaatacaagcatggccaaacaatattatattagtaccattagagcatttcccattctacccaaacaatacaaagccaaaagataaataaaatatatgcacatttaaagcaatcttcaacttgtgagaagagtattaaagaaaacttttaaatgtgttagaccccatgtttattaagagagagagagagaatagcaaataaaagggttacatgggtcttcgtattaattgtaatattagggagggaatacatagtatacatagcatgctaagaagaatttagagggttatgcgtaggcctctcaaatgcctaggatattgtctctgtacttctctgttctaatatcaacctatacacaagtttctatttttctgctattgttcttattttggctactgttctgttgtgattgagattaattgcgatcaaaaggatagtcgggtcttatggtaacaaatgttataagaccggcattacagaaacacaacagacagggatgggttctgacaatctttatgaaaattctagccagaagtactgctcctaattctaaagttcatatataagatatacatagattaagtgcaaagaacgcatagaaagcttaggccttaagttgtcatgtcaaaagtatgatgtgcactttttctttcaaaataacacacattctgtattaacatgaaaaccatttcaacttctgatgatgcacaacaggacatactgtgctgagatacctcacaatatctcaacccggaagggtatggagattgtggagcaagctgctcagttggatattattattaccaacaagttggctaggttgtgcagccaggaggatgaatgagcatttatgctttcatttttgttcatttactttgtgagatttacccttgggaactttttgttgaaggtactttgttcttaattttgcggtttgttttggaatctggtttcttgtattgcttgctcaaataccttaggggctgtttagaattgattaatatgttaggaagggaaaggtaatcttgatgattacccagttttttatgaagttttaaattttttaaaccctttaagtaatttcttctcttttgccattttctatttcaactatttatgctttcctctttctactatatatttgtctcacctaacacattctctataaaaagaaattcatgtgcaaagactgaaatcttaccgcgcctcatcttcactacacctctgaagacttcaatgttgttgtagcacaaagatagtgtgccaatcgacatgacctacgcatatgtattgaaggtaaagataagtttcaaatttctgaaaaacaaaatttcttgattcatgacaagtacatgattattcgtgaaaccggaggtgaaaacaacaaaaaaaataaaatcaagttggtaacaaatcacttaaacactgtcagtcacccacattccaatgctatagattaaagagtactgttatcttgttaagattaactttgaccaaaaatttgttcaaatgagcattttgtactgttcggtaaaatactaatttggtattattgaaactacagagatgtatgtgggcatatttaagcaaaccacgaggtaaaataccttctttattttcatctataccgaaccattctagaaatttattcaagttaaagaagtaagaactgtacataatcactggatcaacttcaaattgattgttctatgcaacatgttaagctataaatggttgtgaatcggacaaaattaaacggagatcttatttaagagcaacccctacctgagggatagcacaaaaccgaaatatagaggggtcccgtaaagcagccatgtatttcaagcaatcttctgcatgtatgatagcattagtgaccatgtcatttaagcattgcactgctttcactgaattttcctcatatttcaagtcctgaagaagagattgtaacagaatccaattcagatagttgttttccagtagtaaaaggggcgttagaaaaaactaaaacaggggcgatcacacattttgattatgaattgacaggatgatcatccaaagtccaaatcacggtgaaagaagaaagttattaacagaatgaagattgtaaaagagatgcacctcaagtttgttaacatatttactccaaatctggcgcggccaaaacatgcgtgactttggtatctcattgatatcctccagataatctcgaataatatttattttctgttgtaatcgcatacagttcaacagcattaggatcagattccagaaatagttgaaactgggaatcaaactgtactttttttttctcatataatatgatatacctgaagaaataagcccattgaattcgaaaggtaatcatcagctggatcttccaaaccagcagcatggaaaagcttggagagccctataccaacaagtcctgctacatagtggcaatattcatcatagtcatcaactgtttctacctgcaaaatgagattaaaagcatgggaatcaaatcacatggaagtgaaaattgcagcttgctttactttattctgactagttttaccctaggcaattgaattttatgttttttttcaaacttttattgggttttttgaacagcatacttcttattaagggacgttatgttttaattcttatgaatctatacatactaaatttctaatttttcataattttatgtttttttttttgtgaatttcgttcaaaacttggctcgaaccaatttaaaacctatgttttgatttgattgaggtccaaaatagatttcaaatgcaccccaaaacaattagttaccaacctccttgcagataaactttgccattccttcacccattctcttcgtaatatcttcaattacctccttataactgcaaaattgaagtacttgatgaatcgacatgtaattaaatgcacaattacaagaaaaatttcaagcattttatttgtaattatctccagagactgagaaatgtgatatgaaacagtaattaactgatgcacatatcataataagtacatttgctttgtacttaataatttacataagaaaaaaataagaacaaacccttcatttagttccagaaatgcagttgaaacgtgatgaaactggtccatgagaactttgtactcctttgtaccacctgaaagcaatatgagataaatataagtaaagcaaattaagaattttgacaatgaattcaacattactcaaaagaagcaatatgtgaccacttcaacttttacgaatggtatgccaaaatcggtacctaagtatcgcttgcttgcttgcacgtgaacgggaaggtgtaaaaattttcttaattagtagcagagttgtatttctttagtcacataaaagcaatatcattggtgttcactttacactccaagggtggttaaaatgaaacctaactaacaaatgagtttaattataaaattatggtctcatgcatatttattaacatatatatgttatattgggatgaatgatgcacaatattctcatgtcacagcaaaacatagagtcaaataaggttctgcagaatcatattcccctccctttcatgctcataaatcagattatttcgaacttcacataccaaacaacactaaaaaaaaatatatgtggtcatccagaagtaaacatgccaatcagaagcatacaaaaagatattatgatttgaaaaatatcttttgaaaagaaccattgaatatagaattctcatgcttattgaaatatagtatatgagttcttaaaaaactcacaagcaaaatgccactcgggatcatatatgcgacgatgaaactccttcaagataggcactttaacatcatttggtatgcttgtatcatcctctgaaaaatcaatcaagaaataaataacatatatatgcattgataataaataccattaacaaaggtccaaagaagttttgtaaaagctatcgcaataaccaaaagtcatgaattttcttttaacacttgaacaacaatgtttattgagatttaaaaaattgcaacactaagcttataaaagctgaaaaaaaaatatggggttactaattaaatcaaattttgaaatgcaatagatcagattgaatctgttacatgcaatatcaggtaaaacttaacagaaagcttaagagcaaaggtaataggaacaaaccaacagtgtcaagggctcggagaaccaaataaaatatacatacctgcaaagacacaaaaatcaacatttgtaattcacatattaaattactaagctaataaaaatcaaagcaacaatcaaaacaaagtgaataatgaacatctgcagaaatatcaacaatcttagtaataacaacaagaaaagtaactattacttatgcaaaacacaaacagttaatagtttttcttgatgctaacgtttttctgcacataatgttataatatagaggacaaaacagattaaacaatattctggtcattttacaaaggattagaaaaatgaactagagatacccaagacacagaaatctttagcatctgtgatgttaacaatttgtttatataaaacaattgaaagtcacatcttctcgaccctgtcaattaggctcctgcctaagcctacaatatttgaataaaaagaaactatacccaaaagggacttgaacttctaatttcaggagagcaaaagacatgcttaaccatttcagctactcctcttgaatttgttactgttctcttatacccatataaaataaataatgagagaatcaaaacccatagaaagtgcccagaattcaaaagcaatgaaccagtcaggactcaggaagtccttgtacaaatagacataaaattgtaaacctctttcatttttcttttcttggctaataaatacaatttccactttccaattcaaaaagaaaaaccagagttgccccatttacatccaaatgatgcacaaatttgcctctcatacatagcagagctggaaagaaattaaattcttttagaagaaaaaactcacacaagtttaagagtttaaagtttcaaccctttttctggtattatgtatttcaacaaattagtttagtttcaaaagctattagtcagtatacaaccaaacttgatttgtgttttggttctctataattacagcttacgtgtaaatagtgagcctatcagtcaattttagcccaaacaaacgtgaaaatttaaaagcctaaacaactcaactaccccttttttcaaaaaggcaaggcctcaattaatatctacctattctactttctcagactcttaccaaagcaatattccacaataagagattatatattacaggcttcaacatctatcaattattacaagacaaaagtccgaatctttcaggataaaaacgtacggacatggttaaaaaaaggttgacctcacaataaatcaggcactcaaaccaaaattctcaaacccattacagaattattaatcatcaaatcatgaacaaacagcatcaaaattagaatgccaacaatgtcataatctacaaaaatcatcaacttacagcatcacggagctcagttccaagctgttgaataacaagagcgaaactacgagagaccttatgaagcattgagtagcagaagccccaatgaggcacctgagggatctgtttctcggcctgcctggctgccattttaagcttcaaaagtgggtaaaagtcatctgggtgtttcagaaacgctcccaaactccccattgtttggttatttttgattctattagatctgaattacaacaactcaaatctcaaatcactgagactacaatggcgtgatatggtccaatgcagcgtccgtccctgaatttatgtataaaatattaatcaatattatatatatgtgtgtgtgaaaggagtattgttgaagaagaagaatacaaaagagagaatccagatagataaaagatttgaaagactggcgtttgaggttgagctgtgatcaaatatatatatatatatatatatatttatttatataaatatatggtaatatcaagccaatgatcttcttcttcttctttctctaaattacaataataccctttttggtgttcaaatacttttgcaatatgtctatgtccaaccaaattaaccacccaaaataaatcaagaataatacaaccaaaatatttaggaaaattgtaagggccattcgatgaaatttcgtagtctaattttttttttataatttataattatttaagatattttgtaaaattttgaaaaatttaaaaaagatttaaaataaatagggttcaaacaacatgttagagcatttgcaatggaaatattatgaaagatgtttgatgatatggatatatttttagtatttttcaattgatcattactattggaatgaaaaataatgctccaaaaaaaatgttataccataatatcctttatatcttcttttttttattttattattattattttataataaagtaagaaaaaaagttttgaatgaaaataatctttattagacagaaatatccgctaatacaaagacctgaagagcaaggggaacatcgctctcagtaaaacgatgacctgac

SEQ ID NO: 18487 - DNA, 2885 bp, Cannabis sativa
gagaccgagaaggtcgacgaagacgacctctccaggcgtcttgcggagcttaaggctagaggttaaagtatttcaatattttatcccctgtaggaggaggattatatatatatgtatatatgtgtaccgattgcaaatattgactgcatttcgagaatttagaactttatgtgtgtattcgtattgcatttggatattttttttttttaatcttctttttcataacaatcgatgaacaatgacatgaaccatttttccgtattggtgttgacgccattgtgaatgttctcacgtgtacatgatttgtcgttgtgatgtgaatgatttgcttggagcatattttatatgagtttcttttcagatttagctatggcgaattgatatgtaatgaaattgtgtactatgtttatcggcatctgggtgttgatgtgtttcactatatatgccttgcattgattgattatcttagacttcaaatttttcctatggctatagtgttatatgctaattctcaatacagattaatatgaactagttgtcttttattgaaattcaggtttgcaacatgagtatatcatattctgcttcataacgtatatagtgctaaccactaacgtatcttgcagacttcatgttttcacattttgtatattatatgatatacatcttctgttttctttataatttttctccaggtgtttttgtgcgataatttctgtctaaattagtatctttatttcgtacatttgtattaagcttttaacatttggagttttaattggatatgtaaatcaaactttattttgtctagagtctgtcaaaggtttgttctggtacggtcacttttaaattttagtgagaatgaaagagagattactctcggatacttagctgtgattttgttgtctccaaatgttgtaaggttatggggtagtttagttaagtttcaaggaaaaggaaaaggaaaggataaaaaagcctagaggaaggccttgtaagaagccattagtagaatttatcgtgatggcgcttggtgatggacttgttaagatatgatctcatattgatgttaggaaaatgaaagatattcctcttctagaaaagacaaaataagcgcgtctgaaaagggcaatcaccaatagtaaaatgtacacatctgatgcaggacctaggaagaagatttcaggtcagcaaatacaaggtaattatcataaaaaaaaaaaaaaaattaaattctggagaggaattcagatatagtaatgtctcaaaaaataatgggctattggatattaggctgctagttgttcaagttccatatatcgctttgctgagagttgtatggtattttagatggtgcccttctaatcatatgatttcaattgcgatcaggcattggattttgaaaaaattacattatactcactttattttatatgttttaatttttaccttcatttctatattccttaaaatatacacacttttatagatatgttcccattatacttaatgtaaattatgtgttaaacttaagtagagagtaagagtgtattagataactcactcacaaaaggaggtacatattattgaaatataatttgagggtatttttgattaatggatacaaaaaaatgtaaatgtatgcctaaatttatcccggatcttcctaagcatgcaaggcctttactcgttaaaaggtgagtcttttttttttttttcaaatggtgcatctagagagaagggtgtcatattcaatctcattttctaaaccacctggcttaatattggagtttaactatagagaatgaggattagaattttgcttttagcttttttcttatttcgaatttttcaatttcaaaattccgttagtttttgatctggtggtgtgtttggatacatcaactacttttgtaggaatgactcttttttttttttttccggtcatgtttttacattttgaagacatttgaacctgaatttttgaaggacataccgcttatctgaccatttgtatagttaaacagacacccagacgtcattgtgcagattctcaataaatataattgtttgtaataagaaaggagttacgtttcagaaaaactgtaggccttgtattaactttcttgggccttttctttccctttatctcaatcagaatatggcatagaaatggctatataagaaatgtttggagagcagtttttacattatgtaaagatcagcttacaaggtggcacgcaatcttgcctctttttctttttcatcaccaacaccaattgcttgtttctggcaggagggatgtattctttttttggctaaaggagtgggatgtattcttgaaggactatattgaacgattctctgttaatacaatcttctatactctggaacacctggaatgcaggtcagcatcaaaggcccatcagtgggtccccaaagaagataaagtgggccaaacccacttagataggaccttctaggaatgtacttcaactcctgaagcaagtccagtaccgtgatgcagaaagagtaagacagcttgttcctagaagaccagtttggtttctctttttattcatgcgcatagataaggaaataattgcttcccaaatcttgatagaatattgtatcaagctaaaatggaaaactttctaaaatagaaatcaagcaattaattcacgattaattgtccacaattatagtacagtttggactaattcagtcgtatcgcctttgcctagtcagaaaatcatactctcgtgggttggacttcacaaggcagcccaaatatgtaattcactgtaaactccccaatagagaaaaaaaagaaactaagtgtaattctcaaaatactataaacccaatgaatcctacagattaag

SEQ ID NO: 18488 - DNA, 2606 bp, Cannabis sativa
tataattagttacaatttttttacaattttagtcataaattttgttgtgactaaaagtaaaaaaaatttgtagtgtaagtcacatttagttacaaaaaatttataccgtgactataaaactgtcactactaaagatgaccttaatttttttagtgttacaacaaattataatactatttttaattttattaatattgtcaattgcgaataatatatttttagcaacaaattttgtgctaagataatttttgcaataaataaaataagcccagcacagacacaatacaatactatatgaagaaatatttgttctcttttattgagatgaacatgatcatgatgatcagctcatcatacaattaatcatgaaattgatacaaaaattaacaaaatatataaataattaaaagatcgatacaagagattgcatgcaaatgaaaattaaatattgaaaatgatatatagtgatgatgatgatgatgatcatatcaccatgaaatgactagttggaatattgacattccttgggaaggccattagggaaacgtttccaatctttgcaataattgtagatcatgtaattgttcttaacccaattcaactttcccatagcaccattggtaagtgatttgaacaacacatcaggactagtccaaaatgagaatattgattttgaaggtggtgagcaagaagcatatcctcttgaccaatcacacttatatttttcagctctgaattctttgaaggatgctttgaatggtgcttttgaccaatcagtcttgatcaaaccacctcttgtggcccaatcatcagcattccaaaggcttgagtaaagcttcatggcttggtctttagggaatggaatacccttgctctccatgttcttgtattctctaattggggtgtcatcaaccaaccacctaattacacaaacaaattaatcatcattatttaacttgaataaaaacaagtaaaggtaactagttactttagagtaatcaaatgggtaatcaattatctctttagatccggcaactagttactttatattgtttttcttatattttcttttaatatttttttaaataaaaattcccccatatataaactcaaattttaggatcattacattggatattagctagctattgtaagcccttgctataaagtgatcatgttaactattagtatagtttatagatatatatcttacatatataatatatatgagagaatattgttacaaaattatatatatacatatatagacttacacaatgtgatgaggactccaaagaatggagtatttgtgaaaatcagcagtggggtcaaaccaaaggtggaattgttgctctcttttaccttctccatcacaaaacacattagtatgaactgtgtaaggttgtccactaacatttcccaagaattcaaaatcaatctcatcatgtccttttccttgtgaagacaactgatcaataatcataattaacaaaagattattagtataatcatttaatcaaatatacataaacatttaatctaatccaatccaattaaaaaaaaacttacgaaaaaagcagtgacagtgccagctgagttaccagagacaagtttgatttgcatatcgatccttgcaaagagatatttgtcatttgactcgaaacccgagcctgaaactttgtcaagcatgacattaagaagctggccattgttgagtatcttagatcgaccatttccccatgtgcagtgaagatcatcaaagagattaccacccaaaacaccaatgcatgaagagctaataacacttacaacaaaaaccaacaaaaccctagtcgacatcttcatggtatgatattgatatccacttaagttgttgttgttaatgttgttgtttgatgagttttgttttgacatattgtaagcttgaaatgtttcatatttataggttataattatgacttgatcatgggctttcactatcgatcgttataattattattattattatgattaattctattattgaagatttttattagttgtgaagtagtagtctaaatgacttagaacaacaactcttcgaatccagctagctatatatgcctcaccactaacttatcatttaatatataatgaattaattaataaatgaaagaatgaaatcctatttaatagtattttacttcatttttcagattaatttttgttcaatatacaatccaatagtgtcaacgacagaaatataatgtgtatatatagataaattaacaaaattctcaacgtggtaaccatacgttcacgtaggaaaacgccacctacttttcatttaaaaattaatatattaattaaagagcatgtatgacaaagaaatttactttgaaaaatgtatgtacgacagtaaaattgtttgtacgacattgtagtttttgtttcgtcaattgggcctggacttgttatagtagggaaattttcaaaaatactggaatttgagtcaatttttacaaaaatactgtcctatgaaatttttttcaaaaatactgagtttttataaaacatcagtaaaacacaaagcagagcaactcaaaacaacagtagaacaattaaaa

SEQ ID NO: 18489 - DNA, 4852 bp, Cannabis sativa
tgcaagttatttaatgcaaataaatatattagttaaaatttaataataaaatatttaaaataacataattataaatataatagtataatatttattgtgatgtaaatttttcattaccttatgattgatttgtattacaagtcaatatattattagagtaaatttttaaaaaataatctatattttacatttgtattacttctttacagctataagattattttcctaataacatatttgtaaaattgattataattaaattatgggtgtttagtaattttatcctaaaatttcataatcaagtttagagatcaaaaaattgatgggccccgcaatacatgcttaacaagagggagattttcttgcctaaacgaggaacgagattgagataagatcaatttcttttccacaaatatttgaatgagattcctcaccctaatatgttaggttgttaatatatattatctcatttttttactaaaaaaattaataaaaaaattcatcaactaaattatttgttgagtgttacgcggtaatgttataactgattaaaactttccttatttttctattattgaaaaaaaataagtaaaactcaattttttttagaaagtaacaaaaaaccataaaaaaaaaaaccaaatggataaataaaaaattatatattaaaaaaaaaaaaccataaaaccaaatcgatccgtaatcccaattttcaagtgaatctcctcattcaactccttcaccttcggcctttgccaccaaaatcacaaaatgaggtcgacccatttctccaccaccggtaccggcaccggcaccggcaccagaacatcatgttttgcagttcaggtattgaaaggccgatggttcagcgttttcgcctcattcctaatcatgttcggcgccggagccacctacctgttcggagtatactccaagcaaatcaaggccaccctcggttacgaccagaagaccctaaatctcatcggcttctttaaagaccttggagccaatgttggagttctctctggcctaattgcagaggtcacacccacctggttcgtcctcctaatcggtgcagccatgaacttcgtcggttacttcatgatctttctcgccgtagcaggaaaaatcccaaaacccaaagtctggcaaatgtgtatgtacatctgtattggagcaaattcgcaaaatttcgctaatacgggagctttagtgacttgcgttaagaatttcccagaaagcagaggagtcatgttgggtcttttgaaagggtttgtgggattaagtggtgctgttatgacacagatctattatgcaatttatggtgatgattctaaatctttgattcttctcatcgcttggttacctgcggctttatctgttgtttttgtatacacaattagaactatggagccagagaagagaaaaggttcgaataaggatgagcttagagtcttttaccattttctatatgtttctctgtttatggctattttcattatggcaatgataattgctcaaaaattgacccaattctcaagagccgcttatgctgggagtgcaactgttgtttgtcttttactctttgtacctcttttaatcgccattagagaagagcgtcatctatggaatctcaacaaaaatgtccctaaccacactccttctcagatcattttggaaatcccaaaagaagtaaaacagattcagaatcaagacattctttcccccaaagctaagaaatcttgtttcttaacagtgtttgaccctccacccagaggagaagactacaccattttacaagctctcttaagtgcagacatgctcattctcttcctcgctacactttgtggactaggatcgagtttaaccgccgttgacaacttgggtcagatcggcgaatcactgggttacccaactcacaccgttagttcattcgtttccttagtaagtatttggaactatttcggtcgtgtcttttctggtttcgtttcagaagctcttttagtcaaatacaaagtcccacggccattgatgatgacatttgttcttctcctctcatgcattggtcatatcctcatagcatttccaattccgggttcggtttacatttcatcaatcataattgggttctcattcggagctcaattacctctgctcttcgcaataatttcagagctttttgggctcaaatattactcgacattgttcaattgtggacagttagccagtcctctgggctcctacattctcaatgtcaaagtcgccggagcactttacgacagagaagcattaaaggagttgacaaggaaagggttggatcgaaattcggtgaaggagttggtgtgtattggaaaacagtgttataaattgtcgttttccattttggctatggtgactttctttggagctttggtgtcgttgattttggtgtatagaaccaaagaattttataaaggtgatatttataaaaagtttagagtgagtgaggaagaagaaaggggtttgagtaataatgtgtcttcttctactactactactgttgttaatggtcagtagtgaagtgaaaaacaatatttaattatttagttattttgtttatttattaaatattgaagaagaagatgatgatgatgatttatcttatgatgttgattttgcaatttggggagtggaagtttttttctttttaaagtgtttttatattatattatattttttttgacttacacatgggatacacatggaattcgatctctggactattaggtcccccaatatctatgaccacttgtactaatttcatagttttgcgtgaaggtataaactatgaaacacctaaattttgaaaagtgcaatttcacttttttatctattttttttttcttttggattaaagttattttttaacctagattaatttatattagtagaataagctaatatttcataaaattcaattttaccccttctatttcaaaaacttaaccctctctcttccttttttcactcactccaagaactccacccacaacctcagccccttctcttcacgaccaccgcaaccattgactcaacgacccatagacctaatgaccacatggaccaacgacttctccatcgacaatattgttaaatgaataaatcatatgataaatgtctattaatagtgagttgatgttagatttggaataaaaatagttgaatttgagccgaaaattggtttttttgccagcctgattatcgttcgataacttcctgttgttaaaatgagtaaaggttgaagacgaagattcgatggtagtccaatagtgaccctctccgatgctgcctataaatgtaactgtaagatatggtccgacagtgaaatgatgtcttcctgacgagcttaatgaatggagcttaacatctataaatatataatatggtctaatggtagtctgatgttatcatttttttgtacaaaaatatacataaaaaaaaaaaaaaagctattatcgagtcactatcgaaccaccatcgaatgagaataggaagtatagataatgaatttaaaaaagaagaaagcaaagaagagtattatgagtattaatataaagtgggctaatttttttaattttgataaatttatattcaaaaaatttaatatatgttaaatatatgcatataaatttaaatttctcttctaaaaaacatctcaaactattatgttttgacttgtcgtgttcatgtctctactatacctatgttaatacatgttgaagttgatatatattgttttaagtgaaaaagaagtctatgatgatgatgatgatgatgatgtattttatgaagttgattttgcactttgcggaaaggaagttttttaagaaaagggcaatgaaacttttttaattggcttttggctttgttttctattacatgttattctttcccttgaatagaaaaagtgacatagttatctatagagtatagacgtattgtttgagcatattctatgtcggactcacgggttgggagcctttaatcattatgcaattgcagccttgtgaataacatggatgatgggctaatcacgggttgatccttatcctaatttactaatatatttatatataaatattaaaatttaaataaatatttgataatataatgtatttttgtttgtatgtacacatttacaatagaaactattagactgtatataaataaatttttttttttttgataaacatatatacatgaattattttttaatgagtattaccatgaatggttactaaacaaatttaatgataaatattaattttaaaaatattaaatcatcaaattttaatttaataaaaaataataaaagagaaatttgaatttttatacttagtttaactacttaattaaaaaaaatatcaaaaaatacctctgtttatactatatcaaaaatatgttcatataaaaatatttaagtgaaacttaacttttacttatctttttcttttgctagaaacttttttttcaattttttttccaatcgatggaacaatctcagcccatatgatgtaaaagtaagagatttttctaattagatagaaaaattaagcataaaaactcaatttttttaaaattttactcattcttgagtaatacccattaaaagtgcacccatatatatatgtatctttattttgtaaagaacatagctatacacatttgatgtagttatttgttttttcttattattttgatggttaaaaacattttcttgaaaattactcatcaagtaagatttttaacattatagatttgaattgtaaatgaaggaagccctagataaaaattatgaggaaaagtgtgtgct

SEQ ID NO: 18490 - DNA, 6646 bp, Cannabis sativa
aaatatccgcactttgcgaatttaattagattagatcgtggagattggatattttatgaacacccctaaacaaagcttagggtactagtaaagagtcagacgatgtccaatgtcgtggtccaattatggatcgaggccgcaatccaagtccaagacaaagtcttggccgagagttggggttagatgcatttgttagaaagacaaatgattacatttgtttccatggtttacacaaattgtgtttctaagttaattttgatggaatttaattcgatagtttactcaaaattcgatggaaatttgatgctttgcccaaaataaatttcacattagtattttgattataaatctatcatagtatgatggcaacaactttgccttgagagagtttctcaattagaatatataaacatatacaaattataggaaaatgcttatgtgcagcttagataacattgtatcattctcaaaataaatattacatttataaattaataaccttaaaatcttttcttacaaggactctgcaaactggggagcctccaagtccagctcttgtctcataatacagttcattagccaatcactactgaatgtcctcaaacctttctttgcagctaatattgtctcttccatgtcttcttcacatgccacaaatatcgttttcgaagttccctttacttggctcaacctactaacaacctgtatttttcacaaaattataataataaatgtaacaaccatctcaactgaagtaatcagagcaaggttgagtatgagaatttgaacatacatttgcgccagcagacctgacaatggtggataggcatttagctgagggttcaacatgggtagccatgcatacgtcataccccttaagcaagcttcccgggttagcttttgctctaagaactgcacttttcaattcggttctgtacttcagtacatattcttcgtcgtttaatatgtaaggcacttcatctgcaagttaagatgctttttagtggtgctaaaatcaatagtttgagcatttgaaactaaaaactaccaagtcccgagactcgcctataaatcttccttgtcggcagctttcttttaaccagttgggtgagactatccaagctctgaacaatggatagtgtactgtagttagtaactatgatatagagctggataataatatgttgagaggcagacaaagatgacaaaataaaagagagaacttgaaaatatgattgcccctatagacttcccacatttctaactaaaacaaagcctgtggatttacacattctgactccaagtgaaaaagaaactgagacagcaattgtttcagtaatatgcccagttacatgatataaataagattataatttatatctaatgaacttgataagcgaatgaatcgggaaaattttgtgagatgattggtacaaatatgaagaactggacaaccactaaccccaagcagagagcagtgcagaaatttaacgtctttctaacttttccggtgataatgtgagtgcttgcacttccatcagatgtaacgacaccaccaaggtctgctattacctataccaaataagagtttcaacacagcatagtgatatgaaaaacagtagaataataagtattcccaatattaagtaaatgatttcataagttgtgtacctttccaagctgtgccttcttactgtcatcagcaatattcatcaaaattattttaaagccttctctgtgtggatgaacttctttcacagcacaagcttctgatatagttttacccattgcagaaccttcggcaatatcctccttgcgaccacaagtagaataatttgaaggaggttcatccaaagatttaccttttgaagcagccaaagggcatgtttggtaagaacaatcatttctactacttcctaaagctaaatctgagctggaagataagtgacagccaactggatggcttccctttactttctttgacttcaaggaagataatgaagcttcccaaatcctctttgctccagaaccttgtgtcgaacaagaacagtggttcacatcaccattgtctcctgttttgaataacttcttaacacaaaccaatttgcttgatatttttggctcctgtctagagaaaagtggtgattctttgtaacaccctcgtgtttcaacctgccactgagaatctcctgtcaagaaagatccaagtttaaaaataactctgattgtaaacaatggcttggaaaatttgctttacatgggaagccacataaaaataaataaaaaaacagacactagagtaattatgccctacaatggtaacaaaacattacaaggtcagctttaataattacatctaataaacaaaggtttaaaggttggctaccttgagcatgttcttcataatgatcctcatgctcaggaaaacaatgcaagaaaaaaataagaaatttcgaaataacacattgtcaatgctacctaccaagtaacttataatcttctcctggacgttcctcatcgtttactagcaattcaggctgggaagtttcagttctggaagcaatctgctttattggattcagaatattgttgccctccattggaacttctgacggggctttatcacaagcagccgaagatgaatttccaataggatgtaatggaaaagtcaactgcaaagggtctgcagagtgatctgaagcttcctgcttaagatgtgaaaccataagtgttgaaccaccaggtaaacataatgctttgcgaacgtcagctttaataggtaacctccttcgagctctaccctttacatcaacctctgcgaccgatacaaaaccctgaagtttcaacaaaattatacagagcaaaaaataaaatcaaagaaaatgtgattaatgttttattattgaagcacatgatatagaaagtatcagggtattataccaaaccaaaagcaccaatgaagacaaaattagtaaattcagctggttatgtttacaattgtgactttcaaggagataaacacttgaagagagaggtgtgactttgtaaactagggattctgttggtgaggtatctcaaaataactgtagtgaatctgcgtacctagccaatattctgattggtcataatggattgataccaaatgtttctgtcgttttacgttattggttcactaaattgcatttggcaaacatgttcttgctaattcatttcatcaaaaaataaaaatataaatgataattatttgaaaaaatttaaaaagaatagttaaaccacctgcttatgccaaaatcctttagattcctcgtctccccaacacaatattgagcaaacacctacactctgaagcctcttccttaactccataaacagaagacgaccaaatccctgcaaatgattaagttaattttgttatcccaacaagaatattccagtaacgaactaaaaaatctcagtgatagtaaaactagaagtagataaacccattcagtgataaacggcaaagcagcaagaaaatatgaaatgatatgtatttttcattacaggtatctcatcacgtcaccattcatagatccttacattattcttatgtacaagaaataatttagatgatccccttttatcaggagtatcagaaaacagtatgaacaaaatacagttgtgatgcaattgagacaaagatattagaacacacaaagacagaaattacaatgccaggggcaagaaaatggtgatagtaaagacctttcgttggtgggctgaactaacagcagcaagaggaatttcagcatattgagtgtcagccggaactatttgatacgtaattgcagctataatctgtatttagagggagcagcgagggaagaacacaattgttacaacttacaactgcaactaatgtcaaaattagtattccatcaagctaaatgtttactgaagcaaatactagaagcaaacaaaaaacacctagctttctactaagaaaaatgttttaccccataagcaagaaacatgtgtagtaaatttacctctcgaaggcctcctacagacacaagaatcaaaagcagcgagcaatatttcctgtagtaaagagctagaattgatcagtacataataaaccatgttttaattatgttaaggctaatgaaacagttgtagtccataacacaaaatgaaatctcccattacccatttgtcacacatttttccaagaacatcgattgttttccagtatttgcagcaaaattcattgcaggaagctctgtcatgtacatcttaagcacatcctgcaaaaaaccatgaattttttccccaagaaatgagcttttcaccttcaataccaaccaaaaatgaagtcttaatgcccaataaacaaactttacctgaagatatgatcgactagagttatcaacatctttcggattaacaagaaaaaataagaattcaccctcatgagagacaactctctccacattctcctctaaacgaaaccaaaatcaacatctcaaaaactcgaattacaaaaagaaaagaactttgatcattaatcaataacaaatttacctccctggccagattgacaagcccttccatcaatctcctggttctttccattctcatcttctctaactgaaacacacaaaaatcccaataagcaaaaatcaaaatcaacaccattaccatcaactaaaaacaagtctcgaccattacccgcgattctaactttaacatttctattaattgagatttggagacacttttcatcggattcataagtgtatttcttagcttccacagtaacctcgcaacctcctgcgaccaaaaacaaaagaacgagtcgctatacaatactcattttcgccattagcgcgattgatttaaagaactagggttaccgattgagattggggaagaaaatgttgccaaagctgtcttctttcttcgcgccattccgtactaaaatttttcgaaaatgaaatcttggaaggagggagacgattatatataggtgggaaaggaggggtattatcgtaaatatctatatttcctggggatacttttgtctatttactatacataaatgaatattttagcgggaagctgaaaaaatagaaattaattagtatttttcttcagataatattcattatattaatatatcaatttaattaatactaatttttgctgtttatatttgagactatactcactttttattgatcattagtaatattttcagatcaaatcacaattaatattaatatttatttttttattattataatttaatttttatttaaaaaattaagtatattgttaattaatttcacttaaacgagttaggtttttacagataggaattttgtttttttttttaaggaaaaggagaaagaatagaaattgcaactcttataaactcctttaattagtgaataattttctgatttttttttttttgagtgaataatgaatttgattcacttaattaattaaaaaatcagccattttgaatcttctcatcaaaaatataaaaaaaaatgttaatattttatatttaattaatattttttttaacaaaatgttaatatttgaaaacttcactatattaaaagttacccaaaatattaacaattattataaaaaaataaattgaaataattacacaataatttgttgtcgggtgaattagtttagttgatcattaactagtttggttttaaattttaaaaaaccatatatttgagaatatttaaaaatccaaaccaaaccaatcccaatttggagtatgaaacttagcctttgctaaaaattccaatatggcatttggtgtccaaaagaaataaaaatagaataaaattaaaaatacataaaaaaatatatatatatatataaaaaactaataaatttgtttatattgaaatgatttttcaaaaaaataatgaaaattttttcatttgttatgctaccttagatttactatataaaatcacacaacaacacattacgagcacaattttttttgtttaaaaagaaataaaatcaaattagaacaatgtaactagattaatacacacacataatttatgtaatttccactactaaactacttcacaaaactcaagtcaaaacctttgacttaacaacccaaaaaaacacaccaccaaaactaacctatacatatacatataaacatatagatacatgattacatagattatatgtatatcaaactcatcaaataggaagaagaaaatgatctaaatatctaagaccatcatcaacactaacatatctccaattcaccacattcaaaatcccaacacaaactttctcaactctcccaccactcccaaacccaatcttcaaatccccaacaatcccactcccaactataccggaaaaacacgccggcaacggcaactccgccgagaaccacccttcacaaccggccaaaaatcccatcttcccttcacaatccatcattgtaaaaatcccattccacccctccaaaaccacattccaaaccacctcaaccgcctcctccacctccgtaaccgttgacttttctccgttgactacgtcgacggagaatttgaaaaccccgtccccgccgccgatcggtttcgatacggcggcgaagactttg

SEQ ID NO: 18491 - DNA, 6587 bp, Cannabis sativa
  modified_base (4456)..(4456): a, c, t, g, unknown or other
tacggaataatgatgtgggaaatttcataaaagaaggcatataatgaatgtggaaattaagaaagtgtacccaacaaccaacataaccccaaaccctatagttataaggaaaatataagaaaatgacatgcagtaaacaaaaacttgtagaagcagcttttggggctgcgggctggtcctaatatccaacaacgagtttcaacacccacacatatgtataggtatatatagcccccactatataccaattaccaccacccaaccccaaaaaaataaattaagagtttttttttttttcggaagaaaaataaattaagagtttgttttatatattaatgtaaaattatgtgacaattaattcgtgcatatttgtataattgagcaaatatatataccatttattttgtatacatatacacatatagttgtagataagtaaataaatatgtattgtgctaatttggtctatattttgaaaagtccgtaataataaaagtcatatcgtgctggttcataaaaaaatataaatcgtgtcatactgtgttaatatattaaagaataagcttgatacaacttatattttagtgttgtgtttatattcgggtcgacctattctttataaatggattagccctttatcttatacgggtcagactcggattttattttcttatatatttttttacaattaatgagttagtcacttgtttatatacaattttatattttcaattatttttatataatttttcacaataatttacacataattatataaaaaattaattataatgattaaaattttaatatttattagtaaacacatatgtattattctttattgttgttgttgtttatcgagaattttaagaaattgattatagtaagagttgaaaaattaaattaaattgtagaaagtaaagattgagattattacgtggttcttgtgttaataaattctagtttacaagcttaagaatcctagtttcttgctatagtactgtttatgcaatgaatttccaactctttatatgagggtataatataatatttataagctaggatttaggtttagatatattcgcgatcctctaagatttgcatgtaatatgacccacactaattgggtaaatacataaaatatgtttgactttggacccataaattaaggcccaacccacggggtgaaggtgatccgtacgtttggagagaccacgcgatatttgacaaatggcatgcctgcgcgccgtctttgtgtactagtgtctgtcggactaatgggggatttccttttggtagtgggcgtactcttagggtttggcacagggaacaatctcctgactcaatggaattcgatgtcagagggctttgtcatgccatcctggactaggttcacggaacgcctcttggaatgcccttttggatgtatcccagatgctcatccggagagtaactactcatttttatttggacaggtcacccttccgaatctagagagatctggtcttgggtgtaattatcttgtgcctcaagtaggtcagtgtgagacccatccttctgtacatatcttgggtacgctatcttaataaggcttttgatcagaccttagatgattaattatgagttgggaatgccacgtgtatactttttggaagcacatattataacaactattattattataagaatttttaacgtgttatgctttcgggttagtctattgtgcttttgtgccgtgttatgcttaagtttattttttttgtgtcgtatcatgccaatttatagtattgtgtcgtgtttaaacttatttttttttatgtcggatcatgctcgtaccctccgaaattgtatcaatttcgtgtcgtgtcaaaaactcggaccgtatttacaactctaataggcacaccgtttatacatataccgccatgtatcatatgtatcgagatacattgcatttgctgattcttattaagaataaaatgttgtcaaaaaaaaaaactgattaattaatatcatcacatcctaatcccactaatattttaaattatttttcactaatttttaatttaattctaacattatacaagttgcgttactcatcctagtgggcttccgagtgtatatttcaattgtaagttttagaagttcaataaaaaatagtgaaatgaagcactctaattaattcttacatattataaaagtaaagcgtagcacgtatgattttaactttttatggatgtttattttccacaaaatatgatattttaattgggtggttgctctaatttttgttgaagcctattctctattcaccaaagaaagagtttacatacatacattgtgtttatcattgaatttaatttagttgttatattatacactatagggacatgcattgtcatttccaatatacttatatgtatggtatatatgcatattggtcatataactatagaagtattttatatattgtttgatttaaactaaaagtgataaagtttatagtaacaatagtacatgtatggactatagtatagttataacttatatgaaaacccttttggtagatacaagaatagcgtcacctttattatttagctgtttagtattttccgaagtgacaaatccaaaagtcgtctacccaacaagaccataaattccactcaaataaaaattttgaaaaaaaacataatataatttatgccacccaacacgtgatgtatccacaaaaccagataaaatctgtgtcccacaaaaaccactgatcccataaaaccacctataaccataaccaatggacttttttttttgtttgaaaagtaaccaatggattttcttttgagccaacttgtatgtatgtactcttaaaaaaaaacttaattaatctctttataattttgggatttgaataatcaatgaatatccaaaaaagcagagtttagcaactattatttcttatatggtatatgctttgctcctttacccaaatcccaaagattaggtcccctcaacaaaaaaaagaaaaatccgaaaggttaggtttttgatttgttttgtcggtgtgtgttgccacgtcagtttttgaaggaattagcttgtctttttttcaatgaaagttatccaccaatttcattgcttgggacccacttacacccaatacttagtttagctttgctactgggacccacccatgttataattatctgaaatcgtaaactgattcgcagtcggatcatccaattaaaaaattacacgtcatctctgaacagaagatctaagtatttctttcgcttcattttattgacgaaagctcaccaagctccgtacattctgaaaccttttagccgtttatttcctttatttcttattcttttaaaaaaaatatatttaatggagtttaattaagaaatagcaaaataaaaaaaaagagagaaaatttgattattagctcaatatgcatggatttgacaaaattgccgctgattatggtgacgtggcggatgtttacaggtttggaattttaaatttcggaaccagaaaaaaattattacatatattatataatatcctacaatacaagaacaagagtgcttcaaattataactatcattttttttttggataattgaattgaataataaggaaagtagggacacagaagaataccgaacattatataagtcaaataattacaagagtagaggctttagaaaaaactagtaccccatttttttttatttaaatattcattaattaaagaattgaagaaaaaaaaaaaagagagcgagaggacaggtgttgtattaatttgacactacaaccataaatattaaaacagtataaaaccaagtagtgtacgtgggactatatatgtagtatatataaaattaaagaaaaaagatgataaggaaaaatgtgttaagcggtttagtgaaaactacactgaaaccacaggaaggtaagagtggtggtaatcattgtttttctagagagagagagagagtggcattatcaattaaaaaaaaaagagagatttgcataatccagtagtagactcataaatagtaaaaagtaaaagaggaaggtggagtggaacatgtgaaaaagaagtgaagtttccacctctcattctcatataaaaagggcctttgcccattgctctcttcacctcatcacctcattcatttcccttcatttctttccttcattgcgttcaacctgtttttagagatccattttcttccattctttctttctttcatttcatttttatattctcatcactaaagccagttccatattttccttcttctacctcctaaggtaaacacttctctttctctttcatctcaactagataatagaattttagtgcaaaatgctctgttttattgttttttatattttcccatttaattaatattataatgctcttaatgtatatatatatatatanatatatagagagagagagagatattacattttattttctagacttgaaacttgggtagtttaatattttcggtctattcacggataggaatcttcctatgggtgaccgaatagcccaatattgatattttaataagagtattgttagcgttcggagtctctactgcctctaaatatgttatttttaagattaattaataatattctctaccacctctaaagttattacataatattttatatttaattaaaccaataataatattaatatataagaaagtgataagtaccacatttctctttaaataatgtatatttggttccagtcatcgtcatttttcttatatatatatttagtacttttatttttcttaggtagtttgacatttacagtggaataaaatggatgcaacatacaaagtaatgtataacaaatacaaatattttgtacataccaaagttacatcattaggtgtacattattattattattattactattattttaatttgggcttgaagaagataagcatgaacttaggtataagcaagtgcaataaataaataacaaaaatgtaagtcatagtttttgatcaacaccagactagaaaaattccaagccaaatatattttcttcagagttttcttcttcctaggtaactatttgaccccacaccacaccatctaaaagttcaagcaaccaaaccgtaatttgcttcctatttccttttccattttttgaaatgtatttcttttttttttttaaataaagcgtaaatacttaaatccattttgtaatattactcaagaaaaaaaaatcatattatgttgtattactcaacacaccacccaaaaaaaaatccactatgttatatttttctttttgtgtactttcgctttaaattgcataaaatagtatagactctagaatgttataaattgcaattatgggtacatttactaaactaccatctagaaaaatagtatagactctagaatgtttatatttgtgtaagaataaacaaatagaaagataatcccttagtccaaaaagaaaaaaatccaaaaacgacaactaaatggaagaaaaaaaaaatataaaagattaggatgataatttaaaactatataattaatttcaaatttaaaaaatacattaaacaatataattatgtttttttttattaataattagtgtacaaatattaaatttaaaaaaccattaaaatattatatattaaaaaaatcattaaaatattatatattttcctttgatgttgtatttattatctccacttttgtcaaaaagaaaaaagataaaagaaatttctcttgtgcttttggctctataaatgtccccagaaaccaagcctttgcaaaccacttctacgtattacttccttttactctcgtctgttctttgcgtttttattaaggtattgtactgttaatgtacccttcttctactctcttcctcttaactttatcttctctttgtttatgttcttctgctttagttttaaaatcccaagttttcttttctctggttttaatgaccgaccctgtttaagttatacgatcattatgctctaaacaatgtttttcaatcccatgtttaactgggaaggtactgtgttttattcatactagatgctctgtttcaatatttcgttaagtaacttaaaattttactttgaccgaaattctgtggattgacgaagaaaaagaacaggtgttttcttttgatttgtgttgctctaacacatttttttcggaggaagaatcattacacgtaacattctgtccggtcaaatctgttgttttctgtcaactttgccttaaatgtagtttttaatcaacgtgtatggcgttacttggtttagaaaagccaaaattgttaatgattgctttcaaatttaattctgtcatccactctgaaagtgttgggttttgaaatttttgtgtttatgattggatctaattgtttaaacatctaaaacagaggttgtgctgcaaagggtcattgagaataataataataacaataattataataataatcaccattgttgtattgggatagtgctctaattttaataattgttatatttttgtgggggttgttgttgttg

SEQ ID NO: 18492 - DNA, 1365 bp, Cannabis sativa
tctctgaaaaatacaagagagaaacaaatgcacaatgattgtttcacttaagatggaagtgaatatgtcggtcctttgtttctcctttttgaagcttacaggaaaaatgttaatggagattattgacatgaaaatttgatggggtgttcctattggcaggaatagccgaatcagtactgaagatacaggaggcagattgctctataaaagatcatgtgtgttggtagggcctctgcataaaccaacacgtaactttaaaggtttatttatcatttgcttatctcaaattcagtcgttctttgcagcaacaattgcagaacttcaattgttgattttcatagaagctgtcctaaatgctcgtataacctttgcctcatttgttgccgggagattcgagatggacacctgcagggaggtggggaggatcttgttcagtttattaacagaggcttggagtacttgcatggtggtactggtttgcggccttcagacagtgtaaagccaacatctgagtggaaagcaaatggtgatggaggaattccatgcccgcctaaggacatgcaaggctgcagtgatagtctcctggagctgaggtgcatttttccggaaaattttttcgctgagttggtggaggatggagaatatatagcagaaactgacagtctaattgacattcctgaaactcttgggcaacagtgtttgtgcttcagtgctaggcctagggatgcgagtgatgtgaacaacgggacagtaaggaaggctgcttctcgagaggattctgatgacaattatttgtattgtccaacagccataaaaaaccaacaagaggatttaaaacatttcaggtaccattggagtagaggtgaacctgtaattgttagtaatgtgcttgaaactactccaggtttaagctgggaaccattggtcatgtggcgagcatttcgtcagatgaatcgtaaccagcctggtaaacatttgcgaggcaaggcatgtcgtcagatgaagtgtagtcagcctagtagagatttgcaagtcaaggcaattgattgcttggattggaacgaggttagctttgttaccgaacttcttttattaaataccaataatgttaccactgaatttgttttgtttctaattgcttattaatatattttccctacttgcttactattacttttgcttgtaatgatttcttaaatgatctaatttttcttttccttttaaaatatataagatctatttttcttacaaaagatgcaataaagattgggatatatgtttttaggataattttcttcttcttttgtatcactaaataattcatcatttctcatcaagaaaaagaatagaaaaaggttaggtgat

SEQ ID NO: 18493 - DNA, 5379 bp, Cannabis sativa
ttgacgtatacatcaaacaaagttaaggtgtttttgttttgttctcacatcaataatttgatcaaggcacttaacctttgctacagaatggtttattttgtttttttctcactctatcccaatggtttgatcaaggtacttgacctttacataatgatgatcatctatatggtgtttgtcatgaaggtactatgtcattcacacttgcgaagcttgatttatatcagaaaacgactttcctgcaaatggtcctgcctcaattaatttgaagcttctttggcattttacttttgtttcctttggttttgtggtttcaatcttattcttactatcaaggcttgcaagagtgagagatccattatcaacttgagaaataaacaaagtattagaaaaagcccctcctatacattttaagtgatcttgtattattcatttagtaatttttatgtaatcacaatgtcaatatataataaactaattaagattcggagtattagtgtatcttgatttttttttgttttactttatatgacaacaatatcaataatcttttgaattttttataatagagaataaaattgaaataaattcagttcttgcacaagttcactaatgggaagctggagaatatggtttagtttgtctccgcatatgccattttcagtagagtatatatagctgattagagaatttatgaagctaaagttgtatatacatgttggttggttgtaccttacattttacccttacatatctctggtagagatttacatctattgaatgtatagtacacctatcattagactaaggtagggatttacatgctagcaaagtggtaaaagttttgctatgattttctgcaattatatggatggaaaagataactatgaaagtggaagctaggactaaaagatggcttagagtaagaaaaggctacttatttattcaaaagcaataacctacttgggaaacagttgcctgcgatgtccaccaaatcggcatttctcactcagaacttcagtgatcaaatccttaaagatcaacctctcaacatccaacaccactgctgggatttcttgttcatactctgacgaatccataggccaatccagactactgcttgagctgttgccttgaagctggtcaatctccgagcacaagtctttaagaagtcgctgcccatttggctttttacatttcagtttctcttgtgaaagccactgaatcaaaaaatttgtctccacaaatttgcgaactagaatctcattgacaacatcaaatactagttttctgttaacttttttctcatatttctgtagttgactcttatcatttctgtgttcattgtgcgaaagctgtgttctagacttgagttgttccaatgcaaagaacatgttggggttgatcatgtggtatgatgagttgaattgaatgtccatccagtctgactcaaattttttgaagacatttgatgctgacaatatatcagaaatgtatatgtggtctggatttgtgctatcacagacaactgcattattggcaatgattcgctccaggtcagtgcagttcatctcttgtttagtttgagcccagatgtatactagtgttttatagtcaacttccgagctgagattaaattttctgtcgttggatggctgatatatatgcatcagctcccagtccagttcatcagggtatggtgtctcatcatctgtagcaagaaatttggggagaatttagtgcactataaaataacgtatagaggacctatgcatgtctaactgcagcagcagtactctctcagtaagcataatgtgtaggtataatttcttatccaaaattggtacatggtctgagcttatcttctagggtttgtaaatagtgagacttacatgtatgtaatgctaggtttctgtttacactgtaactaagacaccatctttaggatggaaagctacagctaggcataaatttcttttcctacttcctttttcatatttgttgcatgtaacaaccactatattttaagatcgtgtaatttactaacccttactggtgatatggtgtataagaaagcttggcctttctatcttaaacaagagaagttaagttgtcctatgcttctgaatatttaaacttaaatacttacattcttcacctttaaaggcatttgacttcttcttcactggggatggcgactcatctctatagaatgcatcaagaacagagactgggcttggttgttctgaggtagctttctctgttcctgtcattgtcctgtttacagggaacccagcagctgtgttctgaaagaaagaaaaaaatgttagctggtaattaaacttcattgtatgactaaatgagagcagaaactcgtacttttggttttaggccattgcgctcgcagtagatgttgtttatcttatcagcttgtatgatgctcgtgacttcattgtctacatctgaggccaagctgatactactttcagattgaagagaaatggtgatgtcttggtgactcaagtctctgctgttggtcctggtgtcacgtaattggccattagctcgctgcatattggaaggctttggcgtgcattttctacctgggctactgcattcaattggttgcctgctgcattgccttcttgtcctgcttgaatcagggcttgccggagcagactgtttgtccaaaccaaacctcctttgttgtaatctagggctcatggctccagagcttctacctgagcttgtgctgttctcttcactgtcactgtgagtcatctttgaattctgtggagatcttgatgtcatcgtgttatttttatcttgggaagaatggtgtcgattcaaggcatttgtgacttgcgtgttccttggatttaaatgtttcgtttgtttctcaacagatacctttctgtgatctgcagagttactggtacgaaacttgctcgagtcctgcaagctgtcaactgaattgatgttgcaggctggaggggtattttttcctagaagtttagttggttttatgaggactatcggggagttataatgttgtggagatctagaccctttggcagttggagaaaatgaggtattactttgtgggtttctctggccactgcccaagtttgagctatgatcacttccattgtcgcttgcaccggacagaaatttttgacctttcttactgtctaaggtgtctttggtcttctgcattgcttcaagtatctgtttaagagctctgagatcttttccagattttttgaactcaagatctgccaaccttttctcaatttcaccataaactgtcaatggtgcggttggggcctttgtgggtgattcgtaacacttgaaagctggaggttgagaacccttgttcccatgtggttgcctccatggagctgtttccattggaattttctgatttgctgcgatctttgctgcagagccaccatttcttatctgggaggtcaggtccttctgggaattctttggggatccagaaaaatgatcatgcttgtttgtgtgggtcgctctcgatgatattgaaaagggatcacttttttcattttccaatgtattgtgccttgaagagagatcatcagtaattggcattggctctaccaatcccatcaactttgctacaacactagatgctcgttttgaactccctggttcttgctgcagggtagtcacttcgacacaattccttttctccattcgaggatcatttaagagataagctgattttgtctcagagttcaaaccccttatgctgctttgtctactgtcaagtgacagcctcggaagttctttgaactttgctgtggatttgagtgtgtcctgtgattctcttccgtcataagagagccttcttaaatcctttggtcgacaaagagcacgatcatccctcccttcgtaagaattcctaggcccttcactactactccgcctaccaaaaactcgaaacgattcattaaaaccagcaattgctggtttgacagatttggctggttctgaaggtctaggggagtctatgtatctcagggtatgaaacgctgcttccttggttgtagttttcaccaataagccgcgagcttctctgtgcattgagtctttaacaacatctcgtagatcaagagatttccggcttaactgtgcagaaccattcagctggttcgcaggcagatcgctcgatggggtttcaacaagatttgcttggatggattgagatggttcttggtgaacagatgagaaggtagacgaacaagaggaagaaattgaaactcttggtgattctgtggagttccgtcgtttatctttaactactttctttgcattcttttcctacaataaaaattttatatagccgttactcttcagcttaccccaaaagaaaaaaaaaaaagaataaaacgtgatgaagttaacgagttcttactgaagtcttttccaatttaacgtctgtttctgctgctttgttgccattttcacctatgatagaaatccaaatcaaatgttagatgttaaaatgaatgattttattttaaaacaaaagcctgcaaagtgaatagcaaatttcccagtataaaagtgagctgttctaaataatcttggaagaatcgtaaaaacttatgcaatagaccagttattatttaccaaaggactcagtgggaaatcaagtaaaccggcttagactttgcataatatgtacagttatctatatatataaatatttatgagtgaaatttattaaaaaaaaaaaaaaagaatcaaaccatttatttacaaagtaaatacaatgtcatatttgctcaacaaagtataattttctttattaattcctgcaccgcgtgtttgatttccttgtattgaaagcacagaaaataacgtacaattataaatttcatcataaatttatgaccgtataaaaaataaaacattttctcaacgaaccaaaaccaacgttgagaaacaaaaaaaaaattacaaggatcaaagattcaaagacactgataaatatacatacaaagacagagaaacagtgtgtctatatatatacctggcggaggcaatctcttctggctatggctattgactcgaccggcagcaaggtagcggtgacggtcaaagagttgaaaaaatccattcatgcacccaatttgcttttgcagatctgggttttcatctgataacgaatatatgagctttgcagacattttctcaaactctttagatatataaatatatatatcttccaacttcacacactcaattgtctatgcttttacactttcccagcttccatttctgcttcttttttcctttctttttttaattataagtaatttcaacgagtatatggacaagtgcttatat

SEQ ID NO: 18494 - DNA, 2626 bp, Cannabis sativa
  modified_base (2501)..(2519): a, c, t, g, unknown or other
gcaaacgataagtaagaaacctgtatgtggtttcaagcgagtaattactcattcaataaatggtaatgaccgtatctttacctcgaccattatcgagtcacaaacgatgataatcatttctcacttaacatgcttagcagtgcaactagctttcttacctcagttcagtaatcaggcttgcgcgtcaacctgagtggaacaaagcttgatgatcctgggtcttatgtcacgacaacaaaatttgataaataacttaattgaattctggaataaaccctaattttgcaaatggacaatccctaatcccctactgacttagaaataggttaaacatcactcaaataccttaaactagattctggaaagcatcccgagccaaaaatcagattcgaagagaaaccttagaattcccctctactggccaaccggttgaccaatttactagtaacttgtagaaccggtcgaccgattctggtaggttggggagattctggttttacaccccgaaaccaatcccgagctcctccaatcctgctcaacttcccaaaacactccaataacataaaatcaaagcatttaaacattcaaaacttagaaacaacttaaaataatcaaatcaccatagttgaataaaattgagttcatgaacccattacaccaaattataacataacaaccattaaattcattcaattcaaacttaaacaactcctaatttaaccctagaaaaaactctgaaccttaaataactccacaacccaaaatcaatcaaaccctagtcaaaacctaacttgaaacttaagaaatcctaaaaaaaacatagagagagcttacctcaaggttctagattgagcttgaaagtgaaatctgctagaattggccaaagaattgaggagagtcacttggtttcttctgggttcccttgagccgaaagaaggagagagagagatagaatgtttgtgttattcttagtttaggatttatctttaattttctaaataatcacttaaattacaaataacctaatataattcctatttcaacataaaacgatcttacaaaagacaaaacctcaacttaatgaaaagactattttgcccctccttgaacactaaagcctaaaatcagacctaggagtattttggtcatttctaatttcatcgaataaactaacaactcaactttataaactagtctggttaattccaatacatcttaactttatcatcgtgacatttctgaccactccgtcgagtttccatagccaccgaacttgaaattattttatttcaaaaatagtatttacaatacccccataatctgataaaatcttcgtaattaataaattatgctttatttattcatttactatatttacattaattaactcacaattagcttaagtaagattataatcttactccaatatctgtataatcacatatttaataaaatatgcctaattaattataattatatttttcagaatattacaactatcccctcctcatagaaattttttcctcaaaatttacctgaataacttgggatactattcttgcatttgcgacgctaactcccatgtcgcctcttcaatcttgatgttcctccacaacactttgactagaggaatagtcttttttcgtaatactttttccttcttatccagaatctcaactagttgttcttcgtacgacaattttttttgaagttcaatatcctcatagcttaggatatgtgtcgtatcagatacatacttctgaagcatcgagatgtggaacacattgtgaactccaaattaagtaaggggtaaggctagctgataagctacctgacctactctttccagaatctcaaacggaccaatagatctgggactcaactttctcttctttccaaacctctaaattcccttcattggggacacccgaaggaagacaaatccctaatttagaattcaatatctctctacgctttggatcagcataactcttttgtctactttgtgaggcaagcatacaagctcaaattttctcaatggcctcacttgttcttcggactgcatcaggtccaaggtacctccattcaccagcttcatcccaataaatgggtgaacgacattttcttccataaagcattttatacggtgccataccaatagtactctaataactattgttgtatggaaactcaatcagaggaaggtacttgttccaaggacctttaaagtccaacatacatgcccgtacgtaacatatcctcaagtatttgaatagttctcttccattgaatgtcaatctgaggatgaaaggctgtactgaactttagtttggtacccattgctcgttgcacactctcccaaaatttggatgtaaactttggatctcgatctgagatgatcgattttggagcaccatgacgttgaactatctccttgacatacagatcagcgtactgatccactgtatatgtagtccgtattggaattattttaccaggannnnnnnnnnnnnnnnnnntatgttgatttaacaacctaaatacgaacttttaaaacgatggaaaattaaacacatataaagtatgagaaatcttacattgtgtgcagcggaatatatgtctcctc

SEQ ID NO: 18495 - DNA, 5375 bp, Cannabis sativa
ggtgaagtgatatagtaggttttgtcattacaggcgagtttagccaatgagaaggtgctgtattctgaccaccgagacatattgtttgaacttccaagtataactgctgcaatttcccacgaggttaagtgcattgtagctaacagaaaatgaaaatatttgctgttttttagtcttgatatggagtaatatatacatcaaaaggccattcttgataatttttttgcttatcagctatgtttttatttcccaagacaggtattttgtgattggtttaagggggttgctgcacacaacacaacaatggacatactacaaattatcagacattatagatgggatgcaaagctggtacttgcagttggatcttttgccatgaactttggtggatttcggctggtgtctgagcttcactataccaattcaattgccaaagcagtggcgctccttgagaattttccagaaacattggagttggcagggattttgaaatcaaagctccaagatatatttcttgtggtcaaggcaatacttgatatgacaaagagcattatagaattatatgagctttcccacaatgaatatttcacccctgaatcacctgaaattatagctgccactgctgatatcccaattgctgtttactggaccattcagagtacagtggattgtgcttcacaaattatgagcatcgcagccatggaccataagtatgttttctatgttcatattaacagttcagagcttttgttgatctgtatgtttatatattcaaatagaggtagagagttatgctaaacttatgaatttctgaatttggtttatctcagatacttatccaagtcatgggatttatcatctttgggccataagcttgagatgataagaagccaacttgtaatgaaaattaatctttgttataaattcattggtgagctctataccttcttaatgtgagtgaacttttgcccttgtcctatttgtcactagtacctaacgagtaataaaaaatcgtttcattcagaaaagaagaaagatgatgaaatattcttttcattcacaagagttttggaaacatcagatattgataactcgaaatccctcaacattattttccgagagaaggatggttctcaacctatgctctatgattgcctccatcaaaatttggtttgctttctgaatctcagattttgttttttcaattttcaaagtatcttgactactataaattccatcagcaggccaatagttgagacatatatgattgtgaactagcattcaaccacatttagaaaacaattataattgcttgatttttttattttaattttgagattgaagaagatgcctaccatgtaagtcaaacagccctgtgatgtttaattttgaattaaatcatctctagtaattttatgtatagaattaaagatctgaaagaagttaagaatcaatttaaaaattcatgaacattctgtgttgaagaagatgcttgtcatgtgtatatagataaaacaagtctatgcaattcacctttaattaaaccatctctaatatttataattatcaaaaagaaactcttaacaaaatcaagcgctcctgtttctagctaattaagttctttattgttgtaacaggttcctattgaagatctgaagggtaaggttgtggcactatatattacagacctcaacattgtctgtgaagattatttgatcttacagcaaatttaccctgaaaagttggatgactacagcagaaaagagaaccagtatgaaatagtttggatccctgttatggataattggacaaaggatacgtaccggctatttgacaaagtgagagatcagatggaatggctatcagtgtgtcatccttctcagttagcaccacaggtcatcaggtacatcagggagacatgtaactttgtaaagaagccacttcttgtcgtgatggacactgatggcagaatcgtgcataaggatgcaacacaaatgatgtgcatttggggaaatcaagcatatccttttagtttggaaaaagaattatcactctggcagcaacggaattggacaatttcccttcttgctgaaggaattgaccaatatttgcctacttgggtaggctttacagccatttcaacaatctttttgacatgttatgtcgtacgtgcatacactcattgaaatttcttataaaatcttaaacttttcagattgaagaaaggaaacatatatgcttatatggaggagaagacatggaatggatccggagtttcacaaggactgcaaaaggagttgcactaagatatgggattgagcttgagatgctttatgcaggtaagaacagatctcgggaaagagttgtgaaaaagttaatcaatgttactcaacgagaaaggctaagcaaagcgcttgagtggaaactcatctcatacttctggctaagaatggagaagatgtgcatgtctgagcccccactggccatcccagaacaggaggaagtagttgatgagtttttcatgccagatgatcctgacttcatggcaccggtgcaggggcagaagtatcattcgatattctctggaatcgttaacatgctgagttttggctccagcagtaaagggtgggctgtgatcagtggaggaactgaggatatgttgtttgaggctgatggggagttattgttgagagctttggttgatcatgaaaagtggaaggagagagcagagaattatggatttgtcagagctctggaaatctactaccaccagctttgcaatgacctcccacactgtattagtgtgatactgcctgacaccgaaatcaagggaatatcttgtgctgcctgtaacaaaccgatggacaagatggtcacttatagctgctgcactgatagatcttcatatggatatgattagcatgaccacactcactatacgtgcagtgacactgcctttgtttcgagtgtcatcaccggagtttttagtgaataaatactaattttacttctgtaattctaatgcaaatttattaattattaactctcaatggcagcatttgtgaatttaatatcatcaactcttagtctcatcaaactggaaaattaaaataaatagaagagtacaaggtatgtactcttcaattatatatagaagagtacacgttatctatagctaaaacaaatgacagatcataaagtgaccagaaactttatcgattcagactacatagaatgagtaatctcatatccagttatttgacttgcctttgcctttgaaatttccttatgaaaaatatccaagtagttacaatgatacatgtcacagagcagcttcactcaacaagggataaaagaattcttgattgaacttgctgaaagattcaattacaagtgtgttaatatgtaaccaattctgcatggcacaaatatgtaaatgctaatgcagacacttcaggaagcactaaaattctcatgcacacatgaaagtaataattcccttaacctcattatctctgaaacctttgcccaatgttatcttggattgtatgtctagtaaacctagttatccttaaacaaaacacagatcttaattgttaaatattacttttttttttcttttttttttccacagtgataccagtgaccttttcaagctctacatgcacaactttttcaaactatttaacaatacagttaccttatctagggtagaaaagaaaacaattaatgttggatgatattatatacttaaaattctaggtgtgaataattaattagtcatattttaaaactattatgtagtttaagagagtgtgcctatcagtattcatattttaaagaaaaatgacaagaagcatattaaagtggcaatcatcacaaatagtacggtacaccgttgtaaatgtaattaagaaaaatgttacaaaaacacaatcgtgttgtgctgatacataatagcaatgttctataatttattatcgggtctcatattttgagtaaataattgtttaccgaaactttcaaaaaccaattagtatgagagttgaagaattaactaaactaatagataatagagatggagatttatatgtagttcgagtgttaacaaaccttaatctaccagtcacttgtatttggtcgaatgaccttgatgtattacaatggagattttacaagttcaagaacccctagtttcttgttatagtattttcacaatgattttacactctaaaatttctcccctttttataggctatgaaccaaattcgggttcacttgtgacccgtcaggttttctatgtcagctttgcctattaatgggataaatacattaaataagtgactatgggctcactagttgagctccagttcatggggttgaagtgattcgtacatttggggaccacacagtcctgagcaattcgtacatctttacaaaattattcatgtgtccacgacaatctggaaggaagactgcaagcctccgtaactctcgagtcctagaagcttggaggtaaatattatatgcatttacaaaagggtgacacatggtgcttccgacttctttcaatcagtccgtaatgacctggcctaaaggccccaactaaaggacaaaaccaacgcatagcccatatggaaggatgggcccaagcccatctgaagcctcgatgacacaccctcaagacggggttggtctgaatccaaggcatcctgcctccctcagatgaaatgattgaacctttaattttcagttaaatactgagataaatccaaagaaggcactctaaaaggcacctgagaagtctagtacaaggtgacatagtagccctctgacatccaatcccataggatcaggagcttgtcccctatgttagagcataagagtatgcacaccaccaaaaggaaaccaccccttgtttgacggcgcaaatgtgacatatgttaaggacatctgtcaaggaccacatggtcccagatgtacaaatcgcctccacccatgaactgtacctcaataggtgagcccatagtcacttatttaatactattatagtgggtcaagttgacacagaaatcttagcaggtcatgcgtgaatccagacgtggttcttagcctataaatactctcatgaaaatggaagagatttcagagtgtgtgaaattattgtgaaaatacaatatcattcggccaaatacaagtgacattagagttcattaacacctaaatcacctaaaaaatttcatctctattatctattaatttagttaatatccctcaactctcattttaatcaattttcaaaggggataattgcggcaaaagtccccaaaaacttaaggttgatacagattagtcctcaacctcaaaaattggcg

SEQ ID NO: 18496 - DNA, 3475 bp, Cannabis sativa
ataatatatatttattatatttgtattaatttttttatatgttaaatttgtaatacttgattgttttgtatatttattttcatgatatgaggaatacctcatattcaaagagactgaatcccaaaaattctgtaatcactctcaaagtaataaagaaaccaaagcaagagactctttccaagagtggactaagcaggccgagcaccaccgtagctacctgccgaaccactataattccttatgttcatttacttttctgttcttattttttgtctgattcttagccaaattacttgactaaccgtagttctgggaggctactcgcagttctgctcgtgaatgttcatatccactttgaatacttgcatattttggtgttgtctaaattcctccgacaacaatatcataagtgggacttatcatattttatttttactacagataagaataattgtatgtaaagatatttctcgacaatctaatattaacaattataaatattctgtttatttgtaggtaaatgtaattacatactcttcaacacaatacaccaaaaaaaggtgttgggttggggtgatgacccagatagcgatccggatgtttcgagtcacagctgtccgttgggtcgaggcccgacccaatactagaaataaactcattttgccatcccattacccaatagcaatgctctaacagaattggtatataattctgttttctttgacttgagtgagctgatcgagataagactatatgtctcagttgtagactaataactaatatgaatatactccactttggaaccaagaagctctttgtttagaaatagagtacacgtgtgtcgttgtgatttgtagatagggaaaaggggaaatgtacttaaacacaaaggattgaatgtttcattccaaagagagagacctcactcattcgaagtttcaatacagaaaagactaatcttcttcttcttcttcttctttctctcttctctcgttcttcatctcttgactggtaagaaagcccattcccgtttccattttcagctattttcttttactgacccaatgtccattttagagataatcatatatgaatgatgtgatcttggctattataatttgggttcatgttaattaaatttttagactattattattattactattagtttttgaaattattgtttacaatagttaattaatgttcttttgcatgacactaattatttgtaagataataaattcaagattatgatgagttctttttttattattattttcattgaggattctctgttattgccttaataatttgatttgtcgatcttgattattttagttctgaatttgggttattgttaattaaatttttgttcatttgggtcttgggttaattttagttataaaattattattgttattatttttgaaattatttaatcatgcataaacgatcttgaataattaattagttaaactttatcattaattagtatgaaactaataacatacttaatacggagaacagacgaaacatggaagacaatgatgagagcttgaatactaaaaaggggaatggagatgattttaaagaatacaatcttttcacgaattctcctcccaattctcctggttttccaagcactgttacgagacaagcaagtggtagttttttctccaccatttctcttcatcatcatgatcacaatcctaatcatgatcatcatcatctccatcacaacaaccaaccacaagagagatctgttgctgagaacaattccttatctgaaggcaatggagttactgagggaaattctccgtctgaaccacagttttctccgcttaatgtaaacgacactcccgaattcccaccactgaccaagggatctgttgctgagggcaattcttcatcttctgaacctccaattccaattcctcatcaggacagttcggctaaactacaagaagaggaaactgttattcctcatcaggaggatatttttcctcaaccagttgaggaggaaactgctggagttgctgaacctgaaccacaatttcttaatcagaactactacttggactttccacccctgcccccaagccaggcccaaccagtaatccaacccctgcccccaagccaggcccaaccagtaatccaacctccgaaaagcaatacatgaaagtttaattagagacccaacaacaaaaacatttatttatttgtttgtgtagtaagtgaatttcatgaattttaaaagtctaataaggtactaagtgtaaataagagtagcatcatcatggtcaatgtcaaatacattaagtttgctgtattgaaatgcttcagaaaactataagattatttctagcaaaatgaggcttgatatcaactgactgtaagaaaataaataaatgaacaggtttaatttttcttttcaattaatgaactaactatgttccagcaaactaactatgttgaaattacgataaaaatagagaaatgaattccataacccaaaaatcaataaataaagagatgaagatgactcaactatcttctcctattgtcaacaatgaagcacctacaaaagcagtggcagaacatgctaatagatctcaagataatgctatgcctcaaatagaatctctagatgatgaaacggaagctccagaagaaaaggttgagctcattaaggaaatgaccaaggaaatgaaacagaaaatgcagtggataatagcactacttgtgctctggtcagatcaagctcaacggtagatggattgaagaggaaaatgcctaacgagaaaaaatccacgaagaggaaagttctggatgtggcagatatagtgaaattaacctaaatctaaacaccaaaaagtacccaaaaatcaatataatagcacaggtaatttgttaatttcattcaaattagaaaatcttgaaactaactacctccatttatgtcaaaattgaccaatcaatagaatacatcaacttacgacatgccgagaactcgagaataaaaatcgagactgagtttgggtagatcacagccgttaggttgccatctccggtgttgataattcgtctccggtcgaccgtgttcaaggcgggtcaactgaggttgtatataaggacaatccgactcttcgtaaagcggtcgagactcgtcataaacccaacgcccgctgaaaatgtcgcaacctgggtcagttttaccgatggcgaagggaaggaccttctctctcttcttctctaccccgaaaactaaactcgcttcagtaaaccacggtttctaatcaaaaactatataaataaacaaagaaaggaagagaagcacaaacgagttaagagaagagagctcacgagttcctgtaaaggatcgggttgagtcggaactgaattgaatctgctggttgaagacgcaggcaacgtcctcgccgtagaggatggagacgaagacaatgaaagctagtaa

SEQ ID NO: 18497 - DNA, 3282 bp, Cannabis sativa
agaaactaaaactaacaaaagaaaaacctatttggaactttgttgtatcagtagtcaaactatggactctagaaagggtagaagagagaggaagcatggcaagaaaggagcaagcataaaagttgtatcagcctgcagccctagtggagggcctcctgacatgggtgcactctgtatttgatctgttatccgtaatctcaaagtatgggaagatgacttgtgaaaacacttatgtactgactctctccttcctgtttactattgtaacatttttgtctatcatgctgttcttgacaggtcttaccacctaacaggatctcatcgctcattcccttagtttctgccatgaaccctgaaaccgaaagagcttattaataagcgaggaactttgcatcccaaacatgaacttgggacagtgtaaaaaagttggaagggaaaaaaatcaactctcagagcatgctcagtccatgaattctccattgctttctaaagtaaggatactttttgtgctggttttttgagtgatttcttgttcttttgttgatttttttaggcgagtcccttcaagacaggagtgaaagagggcaaagctgagggaaaggaaaaagatagatcagtacaagtgtttgttttggttaaaatagatgaaaactacatggggagagagcttctagttagactttgagttgcctgtgagtgaatatacgaatataagcacataattgttattaaatcggcatttatcaattttattggtttggagatttacctcatgtactatttggccatcttgctaacaaactttaaaattgaaaaatcacgcagataaaaataaaaaaattggtgtttggtaacacttttgttttttaattttttaatcacgaaaatgaaagtaaaatttgtgtttttaaagttttgcttttaaaagacaaaatatgtattataactacttgttttttaattttaaaaatagaaaataaaagtgtgttttataatttttatttttgtttttttattttatttaagtcgggtttggggttggagttcaggtcccaaggtccaagttgggatcagagtctaaaatattgattaaaaaaatttaaaagtgattttttaaaaaaaaatattgaaaattttgattttcaattaaaaaattaaaaagtagaaacagttttatagaatatgtttttggaaaataatttcacttttctaattaaaaaaatataaaaataattaaaaaagtattatcaaacgcacccaaaattaacaaatattttttttaaaaaaaaaaataataataagaataataataatgatttgctttaaattctcgttctcaacacatgattcatatgagcttgaagtttctttagtaacgctcagaacttctttgtggctttgttcctctttgatcgtgcaataggcaactgccctcatggaactaaaaaacactactctcatccctctcccgatgtagctatatgtattcgtgcttcttaagtcgatgttgacctgtatataagtcagatgttggaaggcttgcagaccataatatgaatactctttaagttgattaccaagttgaatacccattttagtctttattatagtatagatgggtagttttgtgttcggaattgcgtgaatgaggaatttataggcacttctcgatatattactcaaaaaaattgatatagaagagttgctctttgaagagcagtatgatgaaagttgtaagctgtgttcaggaggagttattgtctatcgctggcctctatggtataattagtcgggggcctgagaggcaatggtttaccctgtagcggatgtcagcggtccgagtccgcttatctccaactcgtgaacttagccgatacaaagctatatgatagcgccctatttttccaattcaggacaagtgatccacaaacgacgaaaagatctcttttgcttacctttatcctgatggcttatatgccttgcgaggggtacaatgcagtactcattaatgagcatttggtatatggggatatttatacttcttttaatatacgaaaaatatgaaatatcgtcggctcccctatcatcaggtcaccaacttccttgaactttcaaaactatcaggcgtcaaccaaggccgaccctagactaaggcaggctaggcttgtgcctagggcccactcattttaggagtccaaataaataaaaatacctttaaaaaaatacatattttttaataatttttaaaaatacaatttatctttatagtaagggcctaaatttttttttacctgtggcccatttcaactcaaggtcggccctgacgtcatcccccatacatgatcaataaaaatatatatatatacgcatgattctttcttgaataaatcttatgttacaaaacagaaatccatttttcgtgtttcgactttgattcctatactatgaagcgaaatcactatttttcaccatcaaacaaaaaaagttgtagagtttattaatcagtttatgggaggtagtatgggatctgtagtgggcgagaaaataacacgtttgatcgagtatgctaccaatcaaaatttatggctcattcaagtgtgtgctcccaaagaagcgcacactttggaagcgcacagtgcttatttatgtcatgatatgacataaaagttaagattcaacttatataataaagtggattccctacgttcatttcttaaaatatcccttatatgtaggcgggaacaaaggaatgggccaaatttatctcgtttaacaagcaactctattcaatgttagtcagatttatctcaaatatgtaggtgagaacagaggaaggggttaagagaacgaatcacacttttaccactaaattgtacccgctacaatcccattattatatataaagggactttttgtcgaacaagaaactcaagttaaaaatgcatcagtaggggagtgttctgcctagagggaagcacctgtgcaagtagtggtaggcgaagcggaagcgagaatgtcagcttgagtaatgcaaatattggtgagaatctaatgtctcgctacgtcaggataatccttctttgaaacactttggtagtgctcctagattggaatgcacatcatgaatcaaagcacgtggagccatctttttatttttctatcaaaaaagatatggtagactaaccaatatttatatcggttaatgaaaaaatctcaataaaaaaaaaaaaaaaaacatgttggttctttgaaacagttcaaatcattttgataataaaaagt

SEQ ID NO: 18498 - DNA, 2342 bp, Cannabis sativa
gagcaaaaatcataattagcctatatttttttaggcttttttataaggaaaatcaaagctagtatagtatgaagtttcataagagcaaacctgcattttccagcacagtgccagaccagttggtaatagtatagactgcaagaacaatggcaccaactggatcaatccaccagtagaatttgtcaccaagaacagcagcaaccaaaccaattacattcgttacaacatcaaagtaatggtcctattaaaacaaattaacatcagtttaattaagcattgtgttaggcaagaacatggcaaaagaacatgtcattgcttcaacaatgatagctttgtttaggcattaaacctttgcataggcgcggacgattttgttgcccgagcttcgacaatacatccaaagaacaagtttcactcctgtagctgtaagcatgatagtgtatagccacaacaactgttctgaagtcattttctcagatggtatgtctttgattagttgttgtaaagcctggatgagcacttgaaagcctattaagaaatcaagcattttcgaaatcaggcaatggggaacttaagtcatcagcttaagaaaaacttgttggaatctatttgaaaccagtttaaggattagaacctaccaagtgttgccattacagctgcaaatataacaattcctactggttgaactctgagttttccaattggatactggtaaatattaatgttcttcatggacaagtgtgtaaaccaaagtataccaccagccataagatctaacaaagaatccaatgttgatgcagcaatagctatggatccactctttactgtagcatatatctacaattatacatttgtaagaaaagtcccaccaagaaaaatcagaaagataatctctacacataggaaaaggggtagtaattaaggtacttaccttgaaagctagcagaaaaacatttgcccaattggaaatattcattgctctctcatgtttggcttgttcttggagatcttgctcttcattattgccatgggatgattgtagagagtcaacttcttcaaaggacctgagtgtagcaaattgcttctcataatattctctctcccctaatatgaagaagaaaaattaaaaagaaaatacataaaattgatcataaatacaaaataccattagagaagtaattaatatgcatggtaataggcagcctttgctaacattataatggtaagagcattcatttgttaatttgaagagactaaatggaagaaagagaaaaaacagaagatagattgtgagttaccttctaataaaccagtagttttagtaaagtcaagattaagaagggcctcaggatcaagcccagaacgaaccttttcaggcagtttagagaaaaactcagacttaagagtagtaacagagttactcttgtgaactctcccattctcaataggagtcccactttcaacacttgataacagcaatggagcttttacattatcaaaccccccaccaccaccttccatttgactcattaatcaatttattaattgtttatgagattttcaacaatctataaaaaccataagacaaacaagaatggacctgaaatgtcttttttggcctctttgtttgaaccaagagaaagaaaaaagaagaagaagaagaagaagaagaagaagaagaggatcacatgaattgggtaaagactgaagtaagtaactcatgacttagtttggtttttatatatgcatgaaaaaacatgttgcactctacgaaacttgaaatcttgttatattaatcattgtttttttctatgcattcttttttctttttcatataaaaagataaaatagaataaaataggacatgtttgtagttcgtggcttggaatctctggctgtgtctgttgttagaaacaaatggcactaggatttcaggtgtgacttaattgtagatgggtttccaatggtagctggttacctaccacaactatgctaaccagacaaattgaaataaatggtgaaaagctcttttttttttaattattttcttcaaggtgaaaatcaaaaaatggcagtagtatacactaacataagtagtgcctaaaatattatcatattaaaaacaaaaaagtagaaaattatctcccagttttttcaatattttaacagtttttttttttttctaataaaaatacagattgttattttttaattacgttagtttgcacaagaacaatataatatgttgttttcacaaactattttttttaataataacaaatggacattatatttctcctcgggcaaacacaaagtgatgcaacttatttcatactattatt

SEQ ID NO: 18499 - DNA, 3347 bp, Cannabis sativa
aaaacaaaaacaaaaacaaaaacagaaaatgagtgtttacatcacccactttcaacgatgccaatatacacttcctgatggtgcaaatgaaaatgtatttctgtggagttggcaactgagtcccgaaagagcggtaaagtaactttcaagttcagttagccacaaagcttcaaactaactggaattttgatggtgtattatggcaaggtgaagaaataacaatctttatagctctctatgttctgagctgtaaaagtcaataagcaaaactcagttggtttctatgttcaagatcatgtaatatgaactcaaatgaaacagaagaatttaatcaaagaagcttagtaagaaaatcaaaagacaaacacaggggattatgatttcttggtccacatccagttttggaatcactatctcaatcttactcaaactcgagctcaatacactttttatctcaatacaatatcccaagaaacaaaataaaccataatttaacataacaaaacaaacccaatagaaatcttactgttaatgctacaaacaaacatctgagtacaggtcagtcaatcaaatctctcttgccaaaaacaataaattttctgtcataagctatgattcaatccagctgattgaatatgtctataatatctataattcacatttaaaattagccatccacacttgaccagttgctagttgagacattaaattttgttttagtacagatcagtcaatcaaatcttctcttgccaaaaactatattaatttttagtttaaaccattgtattacaaaagaacaaataagagaacagaaacaaatagctgctattctagaattcaatccatcatttgttttttactttacaaaatcaatgtctatatcttgtcatatattaaaggaaatactttcatttgttcaaaaaaaaaaaaaaagccacagaagaagtaatacttacaaaaatggcttataataatattattatattattcttaatcaagaaaaggtcccagtatcacattattgtttttgaatagcacatactaacttgggatccaagagccattcatccaggtctgaatatttctggcataaactcatcctatccagagaaacaataccaatgttaattgcagctttgaaaaaaaatgaacagaatgtctcaaaatttacttggcgagctgcttcgattggttgtatgaattctcatgataagggctcagcagagaaggaaggatctcagcacaatttataatcatcagaagacatcacctgaagtaccttacagaagcaagaagagacaattgaaaaataactcatcatagatatataataaccaaaaactaaaaatattgtagccttaaaatattccaagaccagttcttaggttgctcatgaagtctgaagttttcatttgaaatattagctaataaattcttaggttgatatgtttataacaatattattaataagcagaacaatatcaacaaggtcacattagaatataagagagaaatattttcattcttatgcaaagtaaagtagtcaagttcatctcactagtacaaagctaccactaaaataaaagactacactaccattttccaaaactaataaaagactttaacttatattcagcagttacaatattttaaagcaactaaaatatctgcattttgttaatagacaatgtttctaaggatggtgaaatccacatcatcgagtccttcaaatctgatattctttcaggatcactatctttagtaataactctgagatgcttccaattgagcaatggcgaacgacataccctcttcaaattttcgggccaaatgagagccttcatgaaatcattaaaacgtgtcacttcagagatagtaaatcgcttaataatacatacaacattgaaataaggccataaaatcaaataaaaataaaacataatatgagtacctgacatctactagcatgtaggcttacaatattccaagagcaattgagattcaaaagaaaattcaacatatcagtaaaccaagctgcatcatagccacaaaatacataatggcccccctcatgtatcacaatttttccactcaaggaattagacggctctattgataggcttagatcgatagtaccttcgtaacaaaaatatgctaatttcggagttgattcaattgtaatcttgctctcaaataagcaacgattcttaaaattgaaacttttcaagtgttcacccgagattttgaaaagaaagtcatatgtatagcaagtgctcaaagtcaaattctcaagaagtggattattatcaataagagtacgtaataaaagctcgaaatcataactagtatcatctaatgacagatttctaattttcttacaagcagagtgaatcatattgtacacagaagttccagttattaccaaagattcaagatttatggcttcaacttttaagccatcaacatttgctgaatctttcacttccaagaacttgaggcttaaactttgcaatgggagcttaccatcaatgttcaagaatttatatctatgtaaccgcaatttctcaagacaagaacaacccaacaaaaacttaaacaccacatcatcttttgaagtatcagattgatgaattctttccaatgacaaagtctttaagtatggaaaggtaaatgaatgagaagagtccaactttaccctatccaactccaaaatagtcaaatatcttgcattgtctagtattttaggtaagcaatagctattactttcttcaaaattctcttggcctatggatagatacatttccttaaccttattctcaactgcaaaacctaaccatttatctagtaaaccagccttaattcttcgaaagaaaccactcctaatcataagcttaaaactagttacatctgaatcgcccataaagtacgtacctttcttgcggtgttccaaaaaattttcgacataattccaaaacttttctaagccaatttcatcggcagtagtattggagaaaaagagtgttggaactgaataccagatgagcttccaacgcttagaaagaaggcatgtccgaactatttcttcagttgggagaaacgatagaatgtgaaagatcattgaatcaggaagtttcgaaattctgtcatcacaacccaccattgatgatgatgatgatgatttaagccttttcttgatgccattgttatccataagttgaaatccatctttggattgtgaactgtaacagctagacattgaatttgaacttgagaggattgagatttagggcttgggttgaaagagaaacaacaatggagaaataggtaccatgcatgccaataacccc

SEQ ID NO: 18500 - DNA, 6345 bp, Cannabis sativa
tttaatcaatttactaaggcggtcattacactgtcggacaagcccagaaagagaaagttggcactaggcagtctaagggtgcccttcaaccccacgacttgccaggtgcataggctggcactagaaattatacccagacctctagttgcaagaacactagaggaaagtgcaacaataatagctccgaaagtaaaatcattaaaaaggggaaatgcaacacttcttccacgccacaaaactagaatgataaggaggagaagtacacctgcttcaccctcttgacaaagaaaccgagaccatctccatggccacttaagcactatcccatgcaagaagccctatcccatcaaaagtaagatgagcaagagggacatgttaaagttttgccaactttggccatgataacaacaagtgccagtacatgatcagggagattgaattccttataaggaagaataatccccacttgaatctttttgtggcgggtgttatacccgaaattcgactgcacttcagcgagtgacatgtgtcagtcaagtgaaatatgaagcactaaatataataacgattatatcattaaatgcaaaaggaataactcattaaatatagaattaataggcatattcataactcgttgactgcgtagtcttaggcgagataaggatacacagactattaaaatctgtattaacgagacactaacctgccttggaatacgcaatcctgagaacaagattcatttttaagtaaaattattcgaataatgggccatacatagagagacatccacctcgcaatagataaggaaatattgatgaggtgaatcggttgttgaaacacttaggtatatgccacattatattaactaagtgtaacaacttggaaacatgtaagacatgattgttcagtctgtgaggccttatggtcaaagagcagttctatagttttctcagtacactgatgctcatgccattgctagaaggcatgcaagtgtccaaccatcaacaggaaaagcgagatgctttcatccaaatcagcatcaaccgtctttaaagataaggatgatatgaaattatgcggttatcaattgttatccataagtgttaaaatgaaacaggatcattcccacattttattagacgattacgtattttaaattttaaatgtaaatagttgccaacctatatccctataaatagggggagaatcccacaaataaggggacgaaaaaaaactgagagaaagagattactaattataatattgtatcaaatactcaaaaatatcttgaataagatagactcgtggagtatgcagatttaactgtaaaactacgtaaaatacttggtgtacttattattattactatacttatttaactttcatatatatatatatatatatgtgtgtgtgtgttaaatttattacgagaaaggctcattattggttaacaaaaatatgtgttgatagtttagtactttcattgagagcctacgtgataaaactcagaaaaagtccctcctaaccaacaagattgtccatggttgaccataataaaaatgataatagtcgtcctgaagagactacgcatcgtcctaggaaagtaccaatgggttcacagaggccacccccttcaggaacaacacgttcaagaaagagccaaggtggtaataagtaaataaatttacagaatacaattactcatgaaccaaataacacattaaacaagtaatgaaattaaatatgtttctttattgataattgaatagaagagattacattgaaaaaaagttttatttagggcacaaagcccaacaacaacatacaaagtatttagaatacatagatcgtgggattcagacagcttgccatatccctttgatacgatccctgaattgtagggattgctttcgtgcttcacgattctaatcttggaattgctaagtgttgatatgctgctcgaaccatctacccttactatgttcggtcaagcagactctatccgtgcaagtgtatgctgagctctgtttggaatatcttttcagccagatgtaggaaataggagccatgtgtcaccagtatgtgatgccatgccatagtgcgaaaaatggaataacaatggtacttacataatttttgtgtggtggttttctaaaaacaccctcatgtcttcaatggcatagatatggtcacctgggacacttagttcgacatagtttacaaattgaggtcctcctttccactttgggggactttccttccttgttggtgatctagctaattacaaactgtgacaccttgttggattacatcttctcggactatgtcccttcaaactatgtcatcaaggacttcttgatcgtgtccttggagctggggatcattatttttctttaatctttttgagctctacaagtgaattcttgatttgcttccggggctcagccatagcaaaaaacttgaccagtgttttcggtcatcgcacttggattcccttctagagatcagtatgcaataacactactgtaatcaatattaaaaccaacaaagacttgagtgccttctcaaattttttttacttcatcattaaaacatttaaaatagttctatcaagtctcaccttgctctggtttaatgttggctagtgtcgtgtaaggcggtttgtatgtagttgctgcctgaaactgtgttagaaacaggtctacaaatgtctcccacgtcaagatcgctgcctctggaaattggctgaatcaataatgtgtgttatcttccaaagttgcagcgaggataggacacttttcaagttacggtacctggtcaatttccatgataatgttaaacttatctaagtaatctatggggttagtcaaacctttgtatttcaacaactcagagagtcggaagccttttgggattcagtgttgtcacacttcttttgtaaaaggtgatgtctcatgctgcttgtaaattggcttcctctgttgttcgatcacgcgaagagctcacaaaagattcttcttatcaattcctccctatactatgttggtgttgttgacaggtgcaatctaattgtcaggtgcggctacgactactatatttgtagatacgatcacgttttctgtggctatgactagggttgttgttgcttctaggttggctgcattaactacattattaataactgtggcggatgtttggcgagagggataccttgagcagccacatggggatcatggggttcctccttgattcagcaatctcttagagtcggggatcgggcaagaaatgcctcgttcagacgctctcacagatcgcccctattaacatgataccttcctcctagtctagtccagactgaacgtgacctgtcatagaaactaggaaagaggtttttaaacctcaatgaagtggaaacagtgttagggggatttaccttatctcgttgttgtgcacaagttgaaggatggcatcatttatcgtcatcaccttctcccagtctttcttctctacaactacattgttagttcgagtttggaatagtgggtccattctgtcatgcagggtcgcgaagaggctagttcaactcaagcctatctagattgttctcatccgagcactccttttcgttttacatgcgactattagaaacatgggtacggttaccgacatctagtagtgttatttacctatttatcaatgcattgttggctgggggaactcatggtggatggccaacttggttttgattccttcttgcaatttcagttttaacaacctgcatttgttcttgcattaccgtatacttggtggttgttagctgcactatactctcaatttcagggataggcattattggtggaaagtggccaacagtggccactggcattgaggcttctccagccaggcctgaaaattgtgggaaaagattctgggaagtcgtaatggtatgccccactccttcaaatgtgatctcagcaggggcaataatgtcgttgatgatcgaagcaccagtggtgcctccattgttggtcccgttgttctcattagtgttcatctggttcatagtcgttgcgattcttctctaaaatctcatatatattagaaagtcattcccacagacgacgctaaatattgtcagagaaagttagacaacaccaaaaatagcgagtattcgagcagagcaagaacacacactagcagatatgcaatatttactttgaatggcgaatactcaaagaattgactatgaaatagacaaaacaaagacagttactgtaaatgagagaaggttttatagtagttcagtcagaactcggtttgcttagtctactttagcaaatagtttcagcttaatttatttgatttggatcgatcactcctttatatagacagttagtgtcctttgatcttacataaccggtaaggcaggaccgtttattacataatttaattaataaaaacatttaaagaataaatataagaacaatttcattcgttgattaattttctaaacgtgtgcgacatgtcaagttgcaggtttgactttccatattctaaatacacgagattgcgggctttaaggtgttttgttcgcataacaggcttttcggccaaattggttaattgatgaatgtcgtcaagttcttatcttaatcgcatatctgggtattcctgcgttgacaacttagaattgtgagttcctatagggtgtcgtcaaacaaattaatctttcaaaccaaatctatgcaaatatgcagtcttgatgtgtcacataagagatgtatttactcatcgcatatatgatatacgtgcgacttgtactaacttctcttagtcttgcatatcttccaactatgtcgggctagtgtgcgattagatcatgtctcggtcgcaccttctcgcaagtttacgtcatgcaagatcagctttactggagctatttattgacatgtcatcattttttattagggattgggtccatgcatgtgtcaattttttacgagactattctcatatttgtaaacgagaaattcacactataacatgtaggtagattgctgccaagtttttttttaaaaaaaagaacgttaccaagattttcactactcaataacaaataattaataaatttaatacccgaaataagggaacactaactaatattattgaatggtctgctttataatattaattatagctactgctactttatataggtttattttatatttttggaaaggactaataggatacattttttattaagaagtaaaagacaaataattaataagtaaataaatacagtttataaattatcacattaatttgtcataaagtacgttaactgcaaccatcgaaatatattttaattaataagtaaataaataaagtatataaattatcacattaacttgtcataaagtacgttaattgcaaccatccaaatatattttatatatctctcaagttttataagcgctagacttaataataggtaaatactttctagtttctaccgagtgttttataaaaattattaatttaattttttattttactaaataataaaatatattttatattttttaaaataataaaaataagattttgagttcaaatttcaataatttaatttttgtaatataataaattttaaaacaatctctaataccaacaaatacagaaaatataaatagttttatgataatatttctaaattaaatcattattaaattttattttgacaaaaaatcatttcaatgtcatatttgtacaattttaaaaactataaaatttattttattatttaacaaaactaataatttttacaaaaatacaaaatttaaaataatatttacgccttaataatagcacatgcacaaacgtttacttaaaattgttcaactttgattgtttgtttataccccgagtattacttatacaatcattataatttgtatcagaccgaaaatatcattgtaactgttatcacatatattatatatgcatttgacatatatatatatacatatttataaatgaaagtaaaatataactattttttttttttgagagagaaccatatataactattttgataacatatatacttaatttgaatccatttgtataaaattttgtgtatatatttatgctcattattaaccaaattatataacatgaaagaagaatattataaaatcatgtcgcccataataatgtcgacgctcttatcatcagttcaacgaatctagatagtgaaaagataaaaaaaaaaaaaaaaaacaaaccaaagttgtgtacataaatataaattcatgcatttgattttgaaaaagatattta

SEQ ID NO: 18501 - DNA, 5071 bp, Cannabis sativa
ctctctctctctctctctccttgatttttggccctagaagaaccaagaggaccagccagttttctcctctgattcctgtgattttcagcaaataattgaaggggattggaagtttgattcaacggtaaaggaaaggctaaggttgagcagtagtgagtccaaagcttggggatgattgtacatgtctagatggttcgacttgaagagttcaatcgtgggatgccttgggcttcattttgtagtcgctgtgtgatatttttgtaaattgtattttgaatatgtttagcagtattaaaaagtgggatcctgactttttatttggatatttatatatagttataaaagtttagagtataaataaaagttttaatttgacacttttttttgagaaaccctttgattagcaaaggtgagcaataatcaaaaattcactatagcgtgcctaaacagtagggcgttacaacaatccacttaatattacaccaaaagtcaattcatcagtcattactccaacaataaattcatcaaccattccttcaatagccaattcgccagccattgctttagcagtcagcttaaccaacatgattgctcccgaaggctttctaaacaaccaatcccttactagagcaaacaatgtgcctactgatttaacaccctctattgtaaatacaggagtgaatgttgcacctacccaagaggagttgattgaacaaaaaattgcatgaaaattggaaagcatggatgccatgatccaaataatcctaggagtgaaaactcccatagaaaagagcctatctagcagctttgcatattaaccctttgtggatgccattttcttggtcaaaatgtcaaagaagtttgcgttcctactggtgaaaatgtatgatggaatgactaatctcaatgaccacttagctagctataagtagaggatgtttattactgctatacctcgcgagttaagcaaggcattttttgctcaataggcagatattttgttgaaaaatttgctagtaccaggaaactaaagaagctaaaatgacatctagataattagacactaaaggtatgaatcactaagagactatgtagcaaggttcaatgcgaagaaggtatcaatcacggtctgcaacgttgacacaactatcacagcctttcgaaaaagccttatggtggaatttgacctttgtcaagaactaactaaatctccttgttagactatggaggatgttcttgccaaagaatgggcttaaatcaaatgggagaaagacaaatataacaaacaattgatctccaactactcaagttctcatgagtgtcggggtccaaaacgagtagagcgcaagccatcttatcatcccaccaaaaattccaaaccatttcaaggcagtagaagagctcttccccaacggtctcgtgattaccaagagagagggcaatcatcctagaagtttagaagctatcaagataaaataccaattccagagtatactctaacaatagaccctgttgaaataattgttgtaataaaaggcatgggaaataaagtcaagtattctgagaagattcaaaagccaaaagctctgaaggatatgaccaaatggtctgaatttcataacgatcacaaacacaccacaactgaatgtatatcactcaagtttgaagttacaagactacttttaccgatgaaaactacgagacttcctttctgataaaggcaaatcaacagtagcagaatgggataaaagacaagagaatccacttgaatactctcaaaatgcgaggaccgtgaatgtgatcttaggaggatcaaaagttagtgacgttatgtattcagtaactaaatgccattcacgtgaaccaataaacagtcaggaaagctcgcactagaacttcgagccaaattgattgaatttcttagtaagcaccatgacagcttttcttggtctcacaaagatatgactatatagaccctaacatttttatgcacaagttttaagtaaactcgaactttcctccagtcaagctgaaaatatgaaagttcgctccagaacgtaacaaagtgataaatgaagaaattcaaaagctcatcaatattggctcagttagagaggtctactatccaaaatggttagcgaatgtagttgtcgttcgaaaaatgaatgtgaaatggaggatttgcattaatttcacagacctcaacaaggcgtggcctaaagatttattcccgctccctcacatcaacatgcttattgatgccatagctggacatgagctccttaatttgatggatgtttttttttttttttctgatacaaccagattcgtatgcacccaaatgaccaagagaagacaacattcatcacagagcaatgaaccttttgttacaaggtcatgtcattcggatgaagaatgtcagtgcaacatatcagagattggtaaattggatgttcgcaaacattctaaggaagtcaatggatgtatatattgatgacatgctcatcaagtctctagcatcgaaagatcaccttgatcatcttgaatagtcattctaggtacttgaaaaatataatatgtaactcaaccctgccaagtgctgttttggtgtttcctcaactaaatttgtagggtacttggtgacaaagcgtggagtcaaagtaaacccagatcaaataagctccatacaaaacattcaatcaccaaaactaatcaaggacgtccaatgccttaccgagaggatagcaacactcaattgttttattttaaaatcttcggaatagtgtcactttttcttctcaacacttagaaaagtaaaggacattgagtggatagaggaatgtgaagatgcagttagacaacttaaagaatatcttgcctcacctccactcttagcaaaaccaaaagatggagaatcactctagatatacctagaagtgtctaagacaacaaatagcgctgtgctaattagagaagagaaaggatggcaacaacccatctactatgtctcgaagacaattctagatgcaaaaacaagatacaatcaacttgagaaaataacagtagaactcgtcacagcaggacaaaaactcccactaaattatactacaaagttcgcaattagaagtatgggctattatgtagggtaagttattaacaaacaaatcaaagaactcatgtagcataatcaaattgaagcataatcatctcaagattcaaattgaattgacctatggtaaatttttgtgatgtgacttgacaaccaaccatatactgttatctaatatgaagtctagatcagtccaatccaatgtaacaaatacatctgatcttattcactttaccaatattctagaaaaaacaaaacacttgccaagtctaagtagatgatatcatagataagctggtgtgacagtcagtagtcttgtgatcggcaaggggaaataccgcgtaagttgtgtaattgcacatcactcggggaatatcaaatgtgatgattctgagacattgtaggtatgagactacacatttgaagagggctttcatggattgatgggtactgcctgtatcaacaatgtgcatcttgttttacggtgttccgtcacttaagaactctaaagttaagtgtgcttgacctagactaatcttggaatgggtgacctcttgggaagctttcccaagaagcgtgcaagtgagcacaaagcatacttgaaacattcatgttagtttgtatggccagtcgtcattctaggaagcaacgaaaagtgatgtacccgtgtataagagccatacgcccatggagaaaggcctaatggagggttaaagtgggggtgttatagctactaagtgtaaatctagtgcactaactaatcttagaccttttttatcatataatcataattattttctaccgtgatttacgtcacaaaaattatgattgtctaaatgcttgagattaaataaatgtatatattaagtaaataatcatgaaaagaaatatgtaaacaatgcctttaattaaataatttaatttttatttatcttcttgataaattataatatataaaaaatatgaatttttatatgggcataaactcctaaaattatggtgctccaatcgattttcatgaggcatgagaaaagtctacactttttcaagagttaaggattcacttctagaggttatacccgaaacaattgaatcaaatttatgaccaaggccatggagaagctaaagcataatatcttaatcattcattgttgaactagcgactgtaagcgtattacctagtgattgaaccttgtcgacatagtcatataaggagagatttcctttttgaacatgagagagctgccctttgagttggagtaatcgcccacgcgattggcttgaaaacctttgttcaagagctctccttacgacgaaggaggtgttatgattagcaattgagttaagaactccttcgaatattgacaatggaagccaaaaaagaagctgatcgcatttcttccattgagagtaggcgaggttgatctcaatagtgaccatgatttgtatgggagggacactagtaaaaaggatttcatccaattcatgaacaataacaatcaaaaccacctgtgacttccatgctgagaattttacgcgatcaagttttcgcataagatatgagaaaagcaagctagagaacaggttccagatggaagaagaagtggtggtcatcgaaagttcaggcaataggtcttttgcaatggcttttcttgtttgtgctgcatgattggaagatgtggaagcatgaatcgacgattctataagaagtaattgataccatgtagaagttcaagagatagattctatcaaagaaagcttgactatcaatttgagagttctttattatttatatagctttagtttacaattggacaacttgaatcaaaaagtaacaactgttattacaactaatttttaaaattaactaactcaaaaaagttaattaaacgttaagtaaaagaaaattgttattggttaacaagtttgaatcccatcaatgataggttttttttttttttt

SEQ ID NO: 18502 - DNA, 4463 bp, Cannabis sativa
  modified_base (3047)..(3055): a, c, t, g, unknown or other
attatatgaaatgagttttatttaaggcataaaacccaacacacactccaccaacgaccacccctatttgcttctgtccttaccagaaaactggtgtacttaactacacttcaaaagcagatgaaagtacattggaatgggcgctatcctgtctgaatctctaaaaaacaacctgatctattcatgctctcatttggctgcgaatgagacaaggagagagtcctcactcaagagctatggcacttccaaaattatcacattgttctctataagccaacagctcttcaaagtgtatctcctactgatcttaaattctcaccattttgggtacaagtttataggttacctttccttagtaaaacaagaggattggcaaaagccttgggagatatcgttggtgaattcttagacgtatatacttgctctttaaatgaagaatggggccctttcttgcgcattagagtaaaacttgatattactaagcctttgagaaggggtcgtaatattcgattgcaacaaattacagataaattttgggttgaatttcgatatgagcgactgcctgaatggtggatggaatgtggtcgtctgggtcacccatattagaaatgttcaacttttctagaacttgtggacaatggttttgaaccggaacttgcttatggtcctgagatcaaaggggttgcattaccaatttctggttatgatcggtattgcaccgtttttcaaaaggaaatgttggcctctacttacccgattggcaagaaacactctctctaaaactattccttccctctcactaagaaaccagccacagccaagaaaactattcctttcgatcagcagcacattgagaactgaagaaagaagtgagaccacttgtagattacgttcgagtaatcatggccctcacccgaactgtaatgatcgctaaaccttaatataagaattagcagatgattagagcttaatttcataaatggaccatttatttaatttttttatgattttagaaatatatttgaattctaggtgtgctatttatgttatatgtgaaattttatgttttttatattttatgcccagtaacagtggaacgcgacatttggccgatagaatcattttttcttgtggtttagtattttagaaatagcggtgtaatttaaatagacattgagaatgtcaggattatttgtggttttagatttgaccaaaatgcccttatatggcaaggttactttttgatgaagcaagggcaaaatggtcttttgccttatggtggcttttgtcctttagtggattaatattaagttaattaaatctgattttcttttattgaattatattagataaaccataggtttattttcttttacaaaaattagaaaattaaaagattactctctctctctctctctccaactccctctctctctctctcgacctctcaagaaacccagcagaaaaactagggttttgaactcaatttcatggtgtttagctggatttggtagtatctttaagagtcaactcaatgtaagccagctccctctccttttcttttaaattttatggtttttaagtttagatattcatgcaacttttgaggttaggagactgtaggtgcaaattgagtttggttttgttttctaaggttgaattgtagttgttagagctaatttaagtaggatttgatgcttgtggttgtgtttggacaaagtttgagcttaagagctcaaactttgctcttccatggtgtttttggtttctgagagtattgcttggttttattgcatgatttaagttcattatggtatttttaggtactctagaaggttttgtacgatttggggttgatttaaggtgtgtgtgaaattatgcagttcctgcactaaatcggttgaccagttcagttttgcactgtggaatcggccgaccggttccgatggcaacacacttagaaactagttttccagtttgggtccgatttattggttggggaagtttagggtaccctagatttttgtgtttttaatatatttagagtattgccatgttatccatcgataggaaaacttttagtttgattttaagtcccagaaaagttatttagcatatcactcatctgttttatgaatattgtaacttaggagcctgtaaatcatcgagcagcaattctacttaagttgaccggcacacctaaattcagaatagaggtaagattagtatagttataggcatatgtgattacatgtttagtatgcatgtttatgattgcctgttagattacattaaaatagcggtatcaatatacatagagttatattagataccgatgaatgtatgtttggcataagtactggttaacgctatcacattgatacgactagagtactgagtataggctgatattatggtcaatagtactgtcgtacgaacgttctagactcagtatcgtgtgggatgcagggatagagttatgattgggtgtatgagtgcctaattttaatttggtttatgtttataatatacttatgcttttcttactgaatctgtcaactcacagttgtgtgtttttaatgtgtaggtaagggcaaagctaaggctaaacaaaagtgagtgtgagcgaatgaagattgtacatgtcagggcggtaagacctagagtgtacgatctttaggacaacaggctgtattttttatagtcgctaggcaacaacttttgtatcacatttgttaatattttaaatacgggatctcggttcatataaaagttatttattttcaatttaaggataattgggtaaagtttaaattaatcatgattttcaataaacccattgattagcaagagattacacaattaatataaaagcacgataacacgccaaaactagtaaggtgttacaatttggtatcagagctaccaggttgtcttctgaagatcgtcacgacatgtacaatcatcatcagagataagctcaactcacggttaagtaagcctttattgctttagtagtttgctttattagtatgttataagaaaannnnnnnnngaagcatgttagtagcttgatagctaaataggtccatgttttaatttctaaagtaagtggtaattagtaaataattcttaatcgcgatttgaccaggctagttcttggtttcccaggcaattttattagaatagacgccagacggaacacaagaagtagattaatttgattagatctagtggcggttagggagtttagtttcccccaaacatttgtggtagaggcagaggcccgcacgtggtcgaggaaatgttaacccaccacaggttgcccatgattgggagaacatgtttgcagccatgcaagccagaattaatgaacaagacaaagagatcagatggttgaagcagcagggggctcttgcaatgcctgcttctatggtgtaggttgctcctgtcctgttgtgcaggcaatgctggttgttattgtgatggaaccactgtatgaaaagttccgcaagcaggcacctccagtctttttgggaggtctagatgttatgaaagctaaatagtggttgactgttattactcggattctgaattttatgggagtcaccagcaacgacatagtggcttatgcaacattccaattccaggaggatgccctggtctggtgggatacggtggctcttacgatggtagagataaaacgcaaagatagatccacatctcatgtaaaatcccctcattttatttgtatttgtgattattttaccaaactgtagagtttaatttttttttctcctgccatgataccactgcagcatctctgtgaatttgaggataacgattacttatgtgagagaacttcatgatgccaccgcaacatctatatgaaaaaggggcatgatgttgatgatgagaaaggagagaggaaaaaaaaaatagattatatgagaaagataaagattaaaaattggttttttaaaagaaaaaaaaattaattttgattgattgctattttttttaattgggtgtcagatttttttttttcaaaaaagaagttttaataacctacaaacaactacatgttacagattgttgacttttaaaagtcatataaatgaatggttaagagagtgtatgtatagtataggaacaaaaatatagtcaccaccatagaattattctatatatatacatctttaaaaagttaatttcttattgttaggagggtatgatattttgacaattctctaacccttacattgtacataatttatatgataatatggtagtaaagaaataaagtttaatattttatcttttactaactcatcaactttttaaagcacttaactataattaaaaaaataactttcttattgtaacttttattcttattttgttttattattattattattactactactcatgtaacgccctgtccaacagggacgccacgt

SEQ ID NO: 18503 - DNA, 2833 bp, Cannabis sativa
  modified_base (247)..(259): a, c, t, g, unknown or other
gagatcatcgggactaagagggagggagagaggagatcgagatagagagagagagaggagtcaaggtggcttggggtggtcggagaactaccgtagtggctgtccaagggttttgaaaaccctagattgagactaagagagatagagagaggagatcgatagagagagagagtgatagagcgagagaggtcagaggagatgaactgaaaaagaaaaagaaagaaaagaaagaaaaaaagaaagaaannnnnnnnnnnnnagaaagaaagaaaaaaaagaaagaaaaaaattatttttttatttataatttcatttcaaattaattttttttttaatttttttatattttttaaataatttttacgtggaccaataaaattgtgccacgtgtacacagtgtccagtccaacatgacactttacactcgaaatggacggaaatattaaattgttaacaaaataggagtattaggggttttaccacccaaatttaagttttggggtttaagtgaaaccaaaataaaagttttgaaggtttcgcgaccatttacctttatataattgatctaacacatgtaaatatgtataaactcaataggtcataatttactccttataaaacttacccgttttttcttttgggagcaaatcttacttttaatttgaaacttatactccgtaatttactccttaatgaatttttcataaaaatataatcgcaaatctccaacgaaagccctcacgctcttctactaactctcacattagtttgatacctttgtgtctaagtcctcatattttatttttaagcacattcccaaaaaatctcatactaatctagtagtgtccacccttatattatcatgatattttctaattttagtcaatgtaaaattttggttgcacactcaatatttaaaaattaaactattttaactcatgtattaagagtgctcttagctagtcttcatcatgggatagtacaatttcggtccaaagactttataattagtaaaactttaaaataattaaagttaaagtttttggcatagtagatgactattgtttcttaaattggtctctactctagcctagtctagattctacacatacacattctcaaagaaagaaaagaaaagtattaattaagagaaggttattgtgggaaaccaacaatgaggaagatgatcacatggatattgttttctttctaaaaattaatcttgatttattttatttatagtatatatatttcaatattggttggttatgaagggatggaatcagattcagaccacctgagtctggttaaaacaatcaaaataattaagcaatttgcacattcatcatatcattgtgtgtaaaatcagccattgagtacagaaccggcaaagcaatgtggtgtaagatattatatgcattaaaatttcaagagatattctcatcatccatttttcccatcacaattattattgtccattatggtttacactataattaacaacaactattattatcattaaaattggtgccaaatgatcttaactcatatataattccccttttttattgaatccaagtattttttcttgctccacgattatataaataaatatttatttatttattgggtttcacccacatttttcattggtaagtaaaatgcacaccagcaagagtcaatattaatttgagaagggaaaaagttgcatcaaaagggtcaaaaaaaaatagttaataagataaaaaaaatgcctcctaagagttttgtatatgacttgctacaaacttcaaagggtttataatatatgatttacatatatgaacataaatacatggtcatatggaaaagaaatatagaaaaaatgttcctattttttcttttttccatattaaaataaatgcaattgaaagctataaagtataaaaaactatttaggatatattatataatctcttagcaacatacagaaatccgttgtcgtccagcggttaggatatctggctttcacccaggagacccgggttcgattcccggcaacggaactttttattttctaaactaattcttttttttttttttttgggacaaattataaaatgtatgcttaatgttgtctgttataataatctaccaaacactttcaagattaatgcatgtatatatgtaattttctttttatatataatatataaatctaacgtacaaacacaatttaaaaagtattcaaataagccacaagggatgataacatgctgagtcagatttgtggatatatcttcaaatttaataatttaaggcattgggaatgggaggtgcatattccaaaacttaatttattactcacatattattatttatattaattatgactctctaatctctatatatatatatgtcgtttggaataaaattatataaacaaaacaactcagcattaccaagctagctagctttaggccgtactatatcgtccacaagaaaacaaattattattattattattattattattttaactataattatatactaatcacaccaaagatctataattacacataaacatatttttatatacaaaggagggacgtgattcatcaactcttgatattaacttgtgtcactcctttaattttcacctaataataataataaatcatataggattaattgaggatgatgtattacatctggatttcattatcaaataattaaaataagattagactttgattggagtggacctaaaataatcctaattataaagttggacatgcttatgtagaagcacgcaagaaagtacttgttaattttttttttcttacattat

SEQ ID NO: 18504 - DNA, 1519 bp, Cannabis sativa
tttttattttttatttttaaagatttaaggaacttgctagatcagtagttgttctacattttctgtggatttttttgcagaattttcctacatgccagaactaacaagatgattttacattgaaaaggaaaatttactgccaatctataatctttgtcattcttcagtaaaagcaatatacaatttcatatatattaggatacataaacatgaccatttcaaattaaagctaagtttgatggaaatatgagaatgtggatacctttgaacagcttctgcagtattttcaagataacagctacctggatcatatttttttgtctttgtccatcatcttccttttcctctcttccgacagttacatttataaaagaatatggaccaaacattggccccgagagatagtcctgtctttcaactctatcttcattaatgatcttgtcattataaaattttgaatttgggaaagcgcttattgatcgatgcattctgtattgcctatttaggaggtgcttcttcgaaaaattgtttaacaacaatctcttgaataaacttcttccaaagtcagcttcctcacaaacctataggtgtttaatgtaaaatccaacagaaaaattaatcaggatataatcagcagaagttaaggatatgcaaaagtgaaaaaagaaaagattttccaacatactcggcttttaacagtcgctggtaattgccattcatcaccaacaagaatagcatgctttaaacttggaagttgaagaggtatgagtgactcacactctttcaattgtgcagcttcatcaataaccaaaatggttggattaacagctaatttgtgcagccttgatgagttcgatacagtacaaagaattaacaatgctctttcgaaacagaagttctttattgcatgtttgtccttgaaacacgaaatgtcaagtctgttaagggaattataaaaatctctcagcaaagatagacactcacttctttcctgaaagagaaataaatatatttcatccgcatatgaatgagattcatattgagttacttctggatgagaaaacagctcttccagtacttcagattccacattttcttgaagcaatgatgattcaaaagtaacaagtgagcgaacaagggacaccatatcttggaattttttttccgaaatgtaacttttcgcggtatgcctaaatatgatagagatgtatctcttaagttctgaagaagtagaatcaaatgtttctctcatatactcaagaaatgatttaacttttcccttcttttcaactctagttacattgctttctcctctctcttcggttaactcattctgcaagaatgaatggtactgagaaacagaattttccagaagatttatcatggaagggaaccatttcttccagccaaatgatccaaagcactctccaagcttttggactcgatagtccaaatacatctcttgaatatgtgaaccacagagtttctccgtagttccaaaaagaagaataccccccaa

SEQ ID NO: 18505 - DNA, 6564 bp, Cannabis sativa
gatggtaaaaaagaagtagttaataaaaatttatccactttattgagggctatcataagtaaaaatattaagacttcgaaggattttttaccgcatgttgaatctgcttataatcgttctatgcattctgctactaaattctcaccatttgaaattatttatggttttaaccctttgacatctttggatctaccacctttacctgtttatgagcatttgaatttagatggaaaaaagaaagcaacatttgtgaagcaaattcatgagagggtacgactcaacatagagagaagaaccgagcaatacgtaaggcaagctaacaagggtcgtcacaagcaggtttttgagcccagtgattggttatggttacacatgaggaaagaacgattcccatcccaaagacgttccaaattgctacctcgacgagatggtctgcttcaagttcttgaaaggatcaatgataatacataccgtctcgatttacctggagaatataatgttagtgctacttttaatgtttatgatttgatccctttgatgcaagtgaagatttgaggacaaatgcttttgagaacactaaggccaaagaaacaagtgaagttctagttggtccggtgatgagggcgcaagccagggattgttttcttgttcaaggatgcacctctccattatgagtgttcagtgaattttacttttgtgaagttgtgctttatgaaaaatggttgaacatgttgtagatttcaggcattattccttgctcaggaattgggctaaaattgtgatagtgttgcagtgtacttttccatacgaacttcatccataaaagcctaaggccacaaaggcttttcacaaatttgggggtccaattttacacactatgaactttagacaatatcttttaagcaagacaaggctaaaatgcacatgagttcaggcaaggcctacccattttaacgaattcaagaaatttaaaactttaagcgatatattgaaacttttgagaagggattcaggtgagtctttcccttttatggaaattttggctaaaaacgcttctaatttcaaagtttagagttatttcaacctgaagaaggagttgaagcgtatttttccttttaaggaattttgttgaaaatgtatcttgtttaaggtttgactgtaagctacaataaaaattatgcatatgcgtaagcaaagtaactagtcatagcacactgtacatttttggggcacatgtggccatagtaccccctaagtgagctgagaagtttggacttctccaacttcttggtcacttgtttaaaacatagcttgtgacttaaaattgtgaagcgtaaatttaaatgtaaattggttctattttcatttcattatacccaaaggttgtacataaaaaaggtaattacataaaaatttacacaaagctcaatggacttcatcaaggctgtatcatttttgcctatttatagtactaacgtaagtggtttgcattctaggcatgaaggaccctcaatcaatccatacttttgagctaaagagttccttagcccactttctcaagtatttcttaagggccttcccaatttgggccaactacccccactcccgattcttgcaaagttggggatactctccttaagatgagatctccaacatcaaatgtacgactattcactttagagttgaagtgtcaggaaatcttcccttggtacattttatgttggacctgtgactgttcccagagttctttgaataaatccaatgattcttggagcaaggaatggttttgggaagggtcgtaagtgtcccatcgatgagacgggactgtggcctccacaagtattaatgcttcacacgtgtaagccattgcataaggcatgtgtcctattaaagttctctccgttgtgtggtaggcccagcaaagtcatggaagttcttttggccagtgagctttgtaggcttggagtttcttcttcaatgtagttttcaaaatctttttcacggattccacctacccattggcttgtggccgggctacagctaaaaagcctttcacgattccatgatgggcacaaaagtcagtgaagtgctggctatcaaaatgtttcccattatctgagacaatcttgtatggaagtccatatcaatacacaatattcttaatgataaagtccaaggccttcttggacgtgacggtgttcattggttctacctcaatccgcttggtaaaatagtcaactgggactatcgcgtatttgactcctcctttgcttgtggggaaggatcctattttgtctatcataaaactacaaaagaccatggactactcataagtgtgatcttagtgggtcgtgcaagcagaaccttagcataccactgacattgctcacacttccttacatactctatgcaattcttcttcattgtgggtaaaaaacaccccttgtgaagaattttcttggagagactaggctcggaagtatggtttccacaaaagccaccatgaatctcatggatcactgagctaatttctgttcgagcaatgcacgtcaagtatggcattgattcttctcgacgatagagtttcccatccataatcacataacgggagccaactactggaccttcgtagaagttgccttgtcctctggaagctctccagaactcaggaagttgtaaatgggtgccatctaggaataagagttcttaaccatggaatttacccctggacctcaatgcttggtttttccaaatttaaaattgggactattctgtgttgaatgatcgcaggatctgttccaagtttagctagcatgtccacgaatgaattttggtctcttggaacctggcaaacattgtagctattgaatccttgcaacagttgccgggacatcataatgtatgaagccatttttttacacttcatctagtattcacaaaaaatcttattcaccaccagctaggaatcactgtacacttccatctattgggcccccacttccttagcttatttacgacctgccagcaaagctttatgttttgcttcattgttagaggcgcaaaaacaaaaaacttaaagcactctagagctagtgcccttgtgggaaaaatacgaatgactctggccctagctcccttttagttggatgctccatctacatagatcttccatgttggcagttcctgagctggatcttccggaaggtcatttaggcttgaacactctactatgaagtcggcaagggcttgaccctcaatagattcttggggctggtactatatatcaaattagctaagtttcatggcccatttagcaatctgctggaagactccggcttctgaagcacttgttgtaggggatgatttgtgagtacttttatgtcgtgggcatgtaagtatggcctcagcttttgagacaagttagtaagcaaaatattagtttctctaccataggatacctggattccacacccagcaatctttttcttacgtagtagacaaggcactggaccttttcttcctctcgcacaattgcagaactaatagcatgatcagacactaccaagtacaagtataaatcttatccttacataggcttcgatgaaatagcagccttggtcaaaaggtccttcaatttttggaaagaaaccttgcactctttagtctacaaaatcttcttgttacctcgcaataccttgaaaaatggtatgcactgatttgtagtctttgaaatgaactggctgagtgcagctatctgaccaataaaacattggacatctttgtgtttcttaggataaggcatgtcgataaaggctttgatcttctttaggtttgcttcgattctacacgagctgataatgaatcctaaagcttcttggaggagactccaaatgtacatttcatgggattcagcttcatccagtgtttcttgattacagtgaaagcttcttcaagatgctgaccatgatcttcagaggtcttcgatttcaccaacagatcatccacatatacctccatgtttcaccctaactggtttttgaacattctattgaccatctgctgatatgtggttccagcatttttatgaaccaatggcatcaccttgtagcattaaatgcctttattagttggtaagtcggtgtgttcttcattcgcaacgtgcattttgatctaattatacccagagtaggcatccatgaaggtgagaaacttgtatccaaacgtggcatccaccaattgacctattcacagaagtagaaagaaatcttttatgcatgcctttttcatgtcgataaagtctatgcacattctccatgatccattaggtttcgaaacaaatactgggtttgcaagccagaccgataatgcttcttggagaaaatcgttagcgatcaacttgtctacctttgttttcacagcttccaatgtcacaggatccaaaagttgacacttctagtggactagcgttacgtcttctgaattttcaaagcatggaaaatggtgttacgatcaatcacagtcatatcagaatggctccatgccagcatatcttgatttattttgaccgtgtttatgatgctttccctgatggatgagggtcggtttcttcccattccgatagttctcatgcgatcttcctcactaattcctacttcctctacctcctatattggtcctagattcctttcagtctcgattttttgatctaaattgtcatgaaacttttctcgaatagttttaatatccatcaagtcttctattctaggatcaataagggctttttcctgaatcattaactctgtctgtgtcgagacattatagaaatttttggcgctcttgtgacctatgttgaagctacggtctctctaaaaccactcatgaatactatgcaaggttggacagtgaaaagggtggcagcagatttcctcttacgcggtgagaaaaacatgagcattgaagctttgtttttcttattgatttcgtgctttttgtctctagttttcgtttctaggagtgaagaaataaaactaatgtttggaagaaggataaatgacctttatataggctctaattttatttccccccaagaaacagttaaatggaacattaattcccattaaaagcattatgtggaaataggaatagaaaaaaaaggggaaaccatgactgtgtaaccgtcagcatgtttcccagaaagcacacttttaaatttccataatgaagaaccaataattaatagtcagttgatgagatagaagtgtgacagtccatttctgcacggtacaactttcaatgtgttaagcacatgaggaccacatgcctgctagcattggaacatgtatttaatgtcccaatctgtacagatgctcatacgtggacttgggagaaaatgttatcccaatgttttcacagctaacaaggcccttacacgttgcatagtctagctatctcatcgaccctgcagagaacctctgggcaaaattatgcctagcaggtctacataaagggtaatagccataagctacccaaaatgtccgcagcagcttctacccgaatactcaacatgctgaccagataaaatgggacaacaccctttaagggtgattttacaagccaagttcataaagaaggcaagtattaagggatttaacctgatgaccaacatgatggacaaatctagcactttcagggatgctggacagagatatgtgatcctttatttcgtctccatcaagcttcctcaaatatctataactgaatcctacaaactcaaatctagcaaatttatccaagaataaaggagttttatcaaatcataattgtatcctagaaaatagggatatttattgttgaccttgaaatctagactagacttctaagccacaccgctcgctagattggaaacaattacaagtttttgaagtaattaatgagagacaaaaaaatttatagttgttcaccccctatattgcaataggaatggggctatgactacttcgagtttttatttctcaggagatggtaattacagcaagtattttggagcactctctttataggtgaaggaggaccataaaaataggaaaaaaaataaagtgtgttccactgctgatgatgatctaacggtgaaaattagcttcttgtgatgaaggccaaatttttggtgtccaatagatcacgctacgagtttcccaaagcttattttggtaactccctagaagggaaattttacgatgatagctttagaattacacttggtgtatgaaacatcaccttaaatagcttcaaaactcaagtttaattgcaccaatcagatataaatttagtgagttatggctattttacggaaggtagtttaggtcccaacacccaggttgacatccagcgcagaagttgacactaatgtcaacctggatgatgtacaattgtagaaaaatccaagggaagtcctttgaagttatggtttgacacccctttgtctttttatagggtctagcaaagctggtcagcaattctcgaagatgttgctattttgtggaaatgggagactcgaaactcttcatt

SEQ ID NO: 18506 - DNA, 5951 bp, Cannabis sativa
  modified_base (5901)..(5926): a, c, t, g, unknown or other
ttcattacctccaaccaaacgcaatactttgcattccaattgaatccacatcccaagccatgtggcaggatgagaattgttatgattgctgcaaaagctgctgcttgacagcttagtagctttcaacagtcttggccaattgttcatttatctctcttaccaaacaaccatttttgcttttcttacctgggttaccttgttagagatatctcatttcactactttcctagaattggcaatagtgatgctcactccttggtaaaattagtagtgttgatgaaggatcactatgtgtggttgaacactctttttgtattcattgttgatccaacagtggagcaacaaatttggctctcttttggggtgtttgaggatcttcgaaggagttgaaaatggggtatggggaaagatgaaattctgagtggggggtggctacatggttattttaatcgaaaggttttgaggggctatcttttcaagatttaaccagaaaatggagtcttattttacaataagcaatcttagctagctatactacgtttcatgtttgtatgtgtttacttttatgttttacatatgccaattctttggaagttgtagctttgcttgtagccatggttttccttggccacaaagagagcctttcgaataaaatttgggaggagatcagtctaaaggacaagtgatttctgtctctttttcaataataataatagagatattattataagaagctaatacaaaactctgtatctaggttcttatttattaatgatcttgtaattgtgtatcaccaaataataatgcgtaatataattacaaaaatatgttgtcatactcaagctatcacctttaaacaaaaattgattgaaaatcagtacttgttttcatacaccaataattagttcatacaattacttttttcattcttacactgattcttcagatattgtgatctattttttcattttcttgctttgtatatttaccaaatcaacctcattttgggacaaagcaagggatgaataacaacagtgaaaaaaaataaataaataagagagaggagatgatgatttgtaatagccaattacaagggtcctattagtctatacaaaattatataacaaaatacaattttaatgaacataaaagagggtattaaatattaatgtgacttagaaaaactagagcaatgaagtgttgctgctgttgttgcttgttgttgggggctttttactgtttgattgccaagaagacttggtttttgacaatggttttcctcattttcatgtcttatttctttgagcattaatgtaacatctttcatggctggtctttcctctggtgaaggattcacacagaggagagccactcccaacacttgaagcatctcttggatttgagtcccacatcggagaattagttgttggtcgaggactgatgttatctctcttcttctctctcgaacctctttgttaacccaacttacgatatgggatccctccgggaatctactatctgttggttgttttccagttaagacctctagtaccacaactccatagctatacacatcacttttctctgtgatcttaaagctgtaaccatattctgcacaaaattatgatgacatgatcacaataacatttatgtttgatttgtcttataataagctatatgcaaaacatggaaagtgttactactattactacactcacctggtgcaatgtagccataagaacctgcaactgttcttgaatttcttaaactttcggtggagttaacatgctttgcgaggccaaaatctgctagaacagcttcaaactgtggtcctaccaagatgttgttagacttaatgtcacggtgaacgataggaggaatacaatcatggtgaagataagctaagccatgagctgctccaagtactatcttgtaccgcgaatcccaatccaagaagagcttcttttcatgaagcaaatcagccaaacttccattactgatgtaatcaaacaagagcatcctagttatcccattgctgcaacaccccaaaagccttactatattcttatgccttatagaaccaagagtttgaacttcagcagaaaacaagtccctctcaggaacctcgctattgctacttgccggtggccacaacttcttcactgcaataacctgctttgaaggagtctcaatgcggtaaaccacaccagaacaacccttcccaacaatgttagattctgatagcttggtaaggatatcagtgacagagaaattgagcttttgaaatggagtgaattcccaatctaaaccgttttcctcatcgtttcttgtactcccacaaactctgatatatgaagttatggcagcaaggacaagcaagatagtagctgttaggctcaaaagaatagaaacaacaagagttctggttgatctctttccatgattatcaccactaatgtgacactcgtttctcttcaggcagagatttcgatttccagcaaatgaactattgggaagatctttaaagaacttggtatttggaatgggaccagaaagatcattatatgaaacatctaaatagacaagattgtctagagtactcaaaactttaaggcttccagtcaagtgattatgagcaaggtctaagctggcaagctttgaaagatttgtaaagctttctgggattgaaccacttagagaattccagctcaagtttaagagattatccaggctttgtaatagaccaatctcatctgggattgaatcagaaagtttgtttctgctcaaatccaactgttgtaaatctgcacagagtccaagtgattttggaatgctgccactaatccaatttccactaagctttaatttgtacaaggacgttagtttgcctagactttcgggaatgttaccaactattttgttcatggaaaggtctaaaacattaagagaagagaggaattgaaaagataagggaatcactccttgaatttcattaacatgcaagtcaaccatttctagctgagtgcagttacctatttcatgtggaatttctccagagaagcggtttttagacagttcaaggaagctcagacggcgcaggtttccaatttcagctgggatttgtccagagaagttgtttgatcctagccttaaacggattaaactgaggcagttccctatatttgatggaagctgacctgaaatcctatttgagattaacaacaactgagttaagttcttgagattaaatagtgactttggaactggcccggtgagttggttccctgaaagatccaatgcttgtagctttttgcagttagctaactctgagggtatgctgccttgaagctgattctcccaagcaaaaaacagatttagctccttgagttctcccatggtggatggaatctgtcctgttagtctgttattgtctaattcaagttgcctcaaacttgtgatattgcctataaatcgcggtatctctccagaaatctcgttgtcagacaagagaagctcttccagagaaactaaattgacaagagaggctggaatttcaccactcaaaagattcaatgataggtctataacaattaaagcagagcagttacctagagcatcaggaatgaatccagagagattgttatgccatatcaagagtctcttgaggcttttcatgaggccaaactcactaggaatctcaccagagagcttgttctcatacaaaaacaagttctctaaagctgaacagttgccaatctctggtgggatattacctgataagttagcagtgtacactgaaagtgtctggagattcttaagctctcctatgctacttggaatctgacctgacacacctgtatcagcaagtcccagcacaattaggcctttacaattagatatcttcattgggatttctccatggatacccgggttcccgccagcacgaaagatttctaaggcctctaattggcctatctctgctggaatcttgccagaaagctggttgtcaaacagctcaagtttccggagtttcgtgcagttccctatggcttcagggattccatcatgaagtgagtttgaattcaatgacagcaactggagtttcgataattttccaatgctttctggaatatttcctgtaagagcattgacactgaggtctaagataacaagtgatgacaagtttccaatggaaggtggaatgattccagtaaggtttgcatttgagagaacaagagaagtaagatgattaaaggaaaggagctgagttggaaagttggtgggaatgttgattgaggtgattgagatttctgagacaaaaccattacttgaacacttaatataatcccatttgcatggagtttggtgggttggattccatgaagagaaaaatgtagtggcagaggtggaagtggaattgaaagttgagagccatgagagtaaggagagaccttcttggttcagagctgaagttgtgtttgggaaaccaaaaatggtgaggaacaagagaaagaaagtgaatagtactgaattttctatcatggttagaacttagaattgttggtaatactactactactactactcctactactaatgctatatctcatcttagttttgagctatactggtttgtttcctcatttgtggaaaattatgaacttctagttcaattcaaaattgatgaacaagaattatgatctgtacacttgaaaacctttcaaaatgctcctgcttttcatgaacaacatgcctaggaagtgtaaggactggactagggagagacagatcagtttgaggcttgaaatgcagagaagatgatgtgtatatattttttgattttttttatatttttccatagaataataataataaataaataaatacataagggaaattgagtatcaaaagacatgattcaagtttccatgattggggttacaagagtcatgtctacttcaataattggatatgtttaccattcactttcatttctttattggctgcatgagattttttgtttccatttctctttcttacatctcatgcaacaaaaattacaagtggccttttttgttattttatgattatattggaatatctactatggtaaaagtaaactttgtacgtagtaatttaaattagaaaattatataaacctatatatgggatatattctttatcttttcactttaccaatgacatgaaaaccattgccattaatggattttgaaatgtaaatattctccacaattaaaaaaaaaaaaaagagagggtatgacaacaccctctctctttgctatcataaatattattttcaattgatttattatatgttatattggcattacaacacttattttgtacgaaacaaaagtgtttgacaaacatataatattatatcttttaggctttaatacatcgattgcccatctttctgtttttttcgtcaataaattgcatcacaatccacttaatgaaaaggacaaagtagcaccaaaaaagaagaagaagaaacataaaaatatttagatttattattttgaatgaatgaaaggtaggcactagaacttttttttttaatgtgtcacaagtatggtaaggcctcataatcgagtcatatatatttgataaagttgttcatgtcatgtgagttagaagtgattttcggaagagacaatggtgtaggtccatgcctaatttagagaagacccttctcatttctaatgcatgaacctataaatatacacaaaaaccatacataacaatatacatatgatatccacatgaaaataataacaataccataaactcttacaaagttttgataatttgataaatataatgtttagtgttattaaatctaaaaaaaatagataaatgttataaaataatataaannnnnnnnnnnnnnnnnnnnnnnnnnaagaagaagatgaagagagaaagag

SEQ ID NO: 18507 - DNA, 20380 bp, Cannabis sativa
ctttattgataattgaatataaaatattatattgaaaaaaatattatattgaaatagagttttatttagggcacaaagcctaacagtaagtacaagtgtcagtgatatatgatgagtatcgagcgcatgtacgagctcacctgattaggtgatgggattttcctggcgacgtactgggcgtcagtgatatatgatgagtaccgagcgtaggaattttttcaagctggtcatattaaaaaaaagtcgtcaaaaattaagctcatggtcctatttttatcattttagaaatacaaggtctattttgtcatttaataaaacataaggtccaattggtaactttagcaaaatacatggttcaaaatattatttactctagatattttcaagccttatggtatttttgacaagtgttactcaagttttgttgtatttgtgataatttaattattgatgataatccaaatcgtagaaattgtactattttttgcggtgcaattctggtttgaaaaaataatcaaaaactacaccactcgcactgcgaatacccctactttttaaagaaatattaaatgattttttttttttaaaagaatattaaatgaaaattgccattgtaaaagggaaagtagataaggaacgacatgccgttttcttttgcgataaaaagtaagaaacaaattgtcgttacttctcctctctgtctctattctttttcgcggcattgccccctctggtttaatggcgggaatattacgaagttcacttcagcttcagccgcacaatttctagggtttgattattgtcgccataggaaaacgtttcccgcattttctattggttccaccggaagagatgccgacatacaggattaggggcatcgatgttgattttccattcgaggcctacgattgccaactcgtttacatggaaaaagtcattcaagccctccaagaggtatttgaattcagaaatcggaaacttgagtttttttttttggtcttgcatcaaatttgaagtctcctacttagcatttgctgtagtttcatggtctttccatatattttagggttaggcgggatcctagtttaaaaaagaaaagaagttatctttttattgcggttgatttgatttaattctagaaatacttcttttgtattcataattacatttataatccatttgtattgagtatcacaattacatcttgtaagttgtaaattggttgtagcaagagtttgcaagacttataaacataattttccatttgcattgacggtatcacgtgatgtccaatgttgaaagttcagttttatgtgtcagaaatgtaatgcactgctggagagtcccacaggaactgggaaaaccctgtgccttctatgtgctaccttggcttggaggaagagtttgggtggtttctcaactggtgtaaatttgaagagcagtcagaatgccggaggctcagaagaatcaccatcacaatctgggagctccaatcttcccacaatcatttatacatcacgtactcacagccagattcgtcaagtaatcaaagagttgaaaagaagctcgtacaggttagttttggaagcaccgcttctttcaagttttcaattacgtactgcttgaatctgatgctcatgttccatttatctgggagcacatattgctaagttcattcccatattatacttacgtgtgtagttactagttagtgtcagctcaacagtgcactatctcaatgttgatatcataggtaatttcatttgtgcataggaggctttgtttcatttatttattacccgtgtagatcttgctatttttttttttgctggatggtgttcctttgggattaatacaattattctgtcttggaagacataggctgtggactcaatttatggacaatctacttgaattaaatcatggtacatgttcagtggggtagttctaacttctaagaataaaaacattgtctttctttgtaatgaattgctcttttgagttcatatgattgagctcatatgtcttttctgcttttgattttttgatatgtggaagctaaactagctgaacatctggattggtgtaggcccaaaatggtagtattagggtctcgagagcagttatgtattcatgagcaagttagttcactccatgggaaagcgcaatcaaatgcgtgccaaatgcttcgtagaaatcgtcaaaggcgtgaagagcatgaaaaacaagaaaatcagggaagacctcgctgcgcccactattttcatgttgctggtatgttctataatgttcgtgtgataaacacaagtgtgaaaacaaagtacatttaattgaatatatacattctagtcatgttggctgtgatatataattaatggagagtcttatgcataattaaatcaatatgcacagttccagactgtaacttcaatgagatttatttgaaaaaaaaaagataaattttttagcgttttttttttttttttggatgcatctagagaaaacctagatagcacaattgattctgtgtcaaattagaaagaaaattgaaaatttgtaattttgtatagactttcaaaaaatttacttaatgctagagagctgcactaggtggtaaagacaggtactaaccaatgggaaggcttgtaaaaatggcctgaccattgacgtcattcactctactgtaataggtgtcgagtttccattgagagatttattatgcttgtggtaaattattgtattggtgtgttttataaattgatagtgtgaatttcctcttttcaagtctcaatagtgtgctttatatgattttctctttttattaaagctgctctcttgctgacaataattgcattagaaagaatttccttgcttgcactttattaatcaaaactctccccaaagatcaaagccctgtcaattatgatcaacttctgctatatcccattcctctcacttcttattcagccaataataaaagacctaattagtagctacttctttttctttcttctggaataagtaaaccttttgcttcgattcactgtgtctcttttatgtcatctctttacttatggagataatagagaattttcccatggccatatcatatttgtaattatttacatatgcatgtatgctacaaacttgacaagggtgtatttattcaaattttgtatttggaaagagaaatattattaaatttgttattttcttggatataagaaaagtgtgttgagttcactaattctcccaccaaatgttatgcttggattttgctgtaactttgtgtcatttcttacgcgcgtctccatgtacctttcacaatatttgtccctcctgcaatcatattcatagctgtataagtagttatatgtcacaataaaattttgtcattgcatgttaaattactttagtaaaataaactactgtaatctacataagggaactttttcggttgaattcgggctatggtctttggctaacattgaactttgtttcacaactgatacatcttctctttgtggattgtgcactgcactattgtgagtgttattacttccagaataattcagtctcgtaggtttcacatatatttggttattgtactgtagattacttgaagagcaatcctcatcttggagatgaaccaatagatatcgaggatttggtcaatatcggaaaatcatttgggccgtaggttctcttttgataattcttcgtttctattttacgcaatgtatagtctaatcttactgcttttccctttttgatattcctagaagctattgccattattggcatcgcttgtgcgttcatacatgtatattgtatatgcaggtatataatttctttttacctttttcctgcaggtgcccctattatatgtcacgggagattcataaagttgttgacatattgtttgcaccatataactatctcattgatcgtgcatatagaaaatctctaacaataaattggcagaacagtgtacttatatttgacgaagctcataacttggtaagttttcttctgaactctgaaactggtttatggatattcacttttttcttttttaatctcttttaaatgtcaatgcagtacatagatcatatatacctaaatttaatgcaggaaggcctatgtgctgatgcagcttcttttgacttgtcttctaagcttcttacggcttgcatttctgaagcgaaaaattgtattgatatttctgtaaaaagaaggcaagcttctgatgataagtcaaataacccagataattttgcaattcttagaggtaaatattattggtaaatattattccagtagtagtgtgaatagaaggtgccattttccacaccagtacttttcacttttcagtgcctaaacatttttactgatataaatatagatataatattgaaaatatattttccggaaaagttttgtgatagtgaatccatcagtgctagtatgcctgcagcactttgcacatgggtcgctattattctgtactatttgatttacggtttataccattttggactttaggttttccacaattaattgtttggacccatgtttaaaaatattttaattttttacccaatatttaccaaaatattttgtcaaatttggagctcctcaatttttttttttgtcagctgatggtttcttttttgatctagctatattcaaaatattttgaccaaaatcggctccaagatcccaattttaacttttttttccaaaacacatggttcaattttttttttttaaaaacgggttccaaaaaagtaatggtataaaacaaacggtccaaaaaagtattaaaccctttagtttacccgacatctgcatttctttctccttttcattagaaattcttcaggcattttagcagaattcacgaacatacttgtaattagttataaatgtatatcttgtagcactacttttaaagcttgagaagcggattgcggaagtgcctattgaatccaaggatttggggttcactaaacctggaccttacatctatgaattactagctgatttaaatatcactcctaatacttcatccaagcttgttgggataattgatgaagcaactcaacttttggaagaagataaccagctacaagggaaaaacagtgcctgtcggctggaaagtattggcagcatgcttaatttaattttcagacaggacaattctcatgcaaaatactatcttgtaagttccaaatgttgacttggtggttaaattgtgaattgtgttttcttttcttacagtcatacatttagcatgttacaataacctctctctttctctgtgtgggagaagtatgataaagtagttatctgaaaatataagtactttctgtttttaggttcacgtgcaggaagttgatgctagtgcatcggatggtttaagaggtaactttggagacttatactactaatttaggcctcgtttcagtcatgctttttgcagttgtgaagtttaggtatctctttttccattatccaggtaaggcatctaggacacttagctggtggtgctttaatccgggaattgctatggaggaattctctaaattgtttgtgggttctattatattaacatctggtacattatctccgatggattcatttgctcaggaactgaaactgtaagtaaatatttggtcttaaattttaccatttgattttggtgtggtttttatggaattttaatattctcttttgcacctcagagactttcctgtgaggttggagaaccctcatgttataaactctaatcagatatgggctggagttgtaccagttggtccctcaggttactctttcaactcctcatacaggagtcgtgacactcttgaatacaagcaagagctcggtaatgcaataggtatgtagcatagcctttgtgagttttaacagcaaatgatttagttaaatttttataggacacactactcagtagctatttttctgcagaaaatttacttggttattttaatatttaattttggaaagctgttaacttttatttcaatttcacagcttttatgaccattgagatttattcaagtgtgctgtaatggtccaaattaatattggaacatgattgttcatttatattgatgcatagataagcagtccgaggtgtattttatgcttccatgttttagagacagattgaatttgtttttcttctcaaagttctctgtttagttttgctaactgcaaggtgttagtcaacgtacctattttttaaattttttttattgaattaaggacttggaagctgtccaatccaaatcagtagcgcttgaacctgatcgctaatcatcgattttgatttttgatttttgtgttttgacttaaatgttgtcagtcaattttgctcgaattgttcctgatgggctgcttgtattctttccatcttactaccttctggaccaatgcattgggtgctggaagactgcggtaaggaatacaactcacctgaaaagtcatctttgtttgttttagattaaacaatttttgtcattgttctaatgtgtgcagagtcttgctaattcaacaacaatatgggaaagaatctgcaagcataagaaacctgttgtagaacctagacaatcttctttgttttctgagtcaattgaggttacttatatatatttgttccaagcatttaatatgtacagagacattacttcctctacttaatcagtccatctgatgctttcctttcctcctgttttgtcaggattacatggccaagctgaaggacacttcaggttctggtgcaatattttttgctgtgtgccgtggcaaggtatatctggatctacttgtcaaggatcttttggtttatatgttgatggatggatttacaaacagtttgattgtgtttggccatgtcacttccaaagtattttaattcttaacatttatctgcattctgtcatcatggtaactatttggtactcgtgcattgttaatctgacagggtctataaagtgtgcactttgttttattatttatttagtttggccaattgtcacaggaatgaaaatattgcctgaactgaaagacaaaggtaaatgtatttgcatactggttaaccatatattggaattattgtcgttaggatctttacacgacctggtacctgtgattctagcagttacatttgcttatatgcttagcactgtcaatgctattgtttaattacaagcccttcctcaaattccaagagttctcatggatttgtaattggtgaatcttagccttggaaatgtctactttactggcttaagcataatacaccagtgtaaatgaggttttccgtgcatacattttgttagattttgaatatgaatgtcctgcttgagtgaaagcttgttcatagtggcttatcgtaactaattttccaggtaagtgaaggattagattttgccgatcatgctggaagagctgtcatcgttactggtatgccatttgccacattgacagatcataaggtttgatatccagttttcctccaaagttttctggtatttgcatataatgcgcgttacttgaaattttgagttcttgttaatttttgctttaaaagctgcagttggaactttagtcggtttaggcaataaaaataaatcagtttgatatctgattggttggacttaagtggatgcttgcattcatataggtattgttggaggataatttatattggagaagatgttgtcaacagcatggcattcttaaatttgaattttcttgagttataattcagatgctgaaatcagtggtgatattaatagatttcagttcacctaagtctttgagactttgaggtcatatagttgagctctgggttgataaatctggattttatcttttattggcttcttattttcaattctttttgaagatattttagaagttatttgttttttttattttgcctgaatgctgacatatttgcctgtcataattcaaaaaataaaatgaaaaatcaacaggttcgtctgaaacgcttgttcttggatgaacaagcgcaacgcctaagagaagcatgcaaggtattatgtacttgcattttgtgtgatgctactgaaatttatttttttgcttaatagtcatgatctttttctgtctatatttatcattactaaatttgtcaccttttcaaattcttaagacagaagttcttactggggaagaatggtacagtcaacaagcaacacgagcagtaaatcaggctgttggacgagtaatccggcatcgccatgactacggagcaatcatcttttgtgatgagaggtaccctgccctcttaaaaatataaataaccattttttttttctttagaacatattgatacatatatatattttttaaagacaacatatggatacatactgtaacctgagttgataacaggttttcacattcaaatcgtcagtctcaaatttcactttggatccaacctcatctcaaggtgctttttctttggatataatcttctaatgcttatccaaaagatataacaatttgatctttataatctgtacttaagtgatgttcttttttcagtgctactccaaatttggggatatagtttttacattgacccgtttttttcgtgatggaaaaaatttgggtcccacaaagctggagttaccaaaaaccgagaaactgggtaagaaccttaaataacattagaagttatgtgataaaaaggcaagaggaaacttacgagtccgaactaggaaaagagagattttctttaatgttccttttcagacctctaataaatgtgcaatggtagtgccaacagctcaaggactcctctagagactgaaataacctgttcaaattctgctgattcataaactctttatcccactgctacttaggggtctccacatcatggactcaaatggggacaggaaatttcaatctccacagaaaatttccttggtagttagagcctaaaaaatgacgtggactggcatattgattttggcccataaccttagttccttttcttgtttacttttccccacttttgggtgaagatattaattattaatgatttttattttttctctgcaacatgtaggagacttgaattctagcataaaatcagcagcacttaagcagatcagtgaagccccattggataatatatcatctctcttagcctcatcaatgtcagctgatggtactctctttaaaaaagaaaataatttgcaaaagttaaattaaggactctactcagatttcagtcaactgactaattttttaataatatttcttacaaacagcaggaaacgcaactgaaaagttagaagacttcacacgcttggtaacttatattgtttttcttgcataaactcgtatgatctgttaaaattaggttccactttttatcatgatttgaattctggatatcatacttgcagacagcagcagtgggtgaagatttttctattttgttggagaaagttcaacctgcaaatcgcgcatctctttcttgctgcaaagataaatcttcaatattgactagttcaaatgaacagatttgcaatgagaaaaagttgctcatttctgcagggagggctcagtaccaaaatgttaaatgtgattctctcgataataattctatattagacagagaatcatttagaggactattagctccttgtccttccaagaagcggaaatcaataggcacaaagcctagtgtatcgcttcatgaaagttttagtgattattcatctcgtatgagaaattcggagcccaattcttcatcttctaaatctcaggaatgcgacaagggtattgattctgcagaaagaagtatacaaagtgctcaggttgataatgtggaaaccagaggatctgaattcctgattcaggtgagttgaaatcacattaatatgtattatactaaatagtaaaatactgctaggctattgataaataataagctgtctaagagattgttaaatgatttcttgaaatatttatgttgtgattgtccacgaatgtgagagatggtattcgttactagtagcaatttcaaaatgtcgtgggccaggccgaggtcacaaatttctataacacaatgtgaaattgttagtaatacggtaaattttaagaatgtagaactttcattagctagaccatgttactctttttgcttagtttgaatgttgtaattttacaacacagaactcaaccaagaaccaatacacaagtctatagacaatcaactaatgcatattcaaaccagaaatcaaaaacagagataaaaaacaagagaaccaaaataaaacagacacaagttttttatataggttcggtcaaaccaaggacctacttccggttactttctgtgttttcttttccattaacatgatgaatacaaggctttaatggttgtgtgcatcctagagaagagttacagaagaaacacccctgaaactctgcttgagcttagctccaagaacactggtcttggtccagatttcgcaatctctcttctctctgattcagtttctctcaatttagtatgaattgtttctaacaagaatgactaaattctttcaataggtaaaagcaagacataacaactaccggtacactcaaaccaacaaagcagaatgctgtagcattttaactaacataacataaccaatgctatagcatttaactaagttaacagtatgttagttaaatatattaattcccagttttgtttgttctatgaattacaaacaacattgaactttcattaaccttctgattcttatttaatatattttttttcttgtaaggttctttaataaatttttaaatgtatagtaatgactaaatcatctggcttacttagagatgtaaggattccaaaattatttcttccgaatctctgcttacttttaacattttatgtttaaatttcaaaagaatttaagatcatgtgtgttatattgtttacttttaggttggagagaaacttagtatatctgagtataaagaattcgtgaattccatgaaggcacttaaatcgaaagcagtcaagataaatgaagtttttagatctattgtcagaattttttctgggcctgagcggttccctcttctcgtaaggtattgtgtctacaatattgatgataatgagcttcctcatagtggtgaaagattctcagttttgtttctcagattgcttcttagctatcatatgatgtcattgctttgccgtttgaatattagatccccttaatctgttattttgtctacattttaacaggttcaaggattttatccctgctaagtatcatgctctctatgaccaatatcttggagcaaatgacaagacaactaagagtcctggtaaggaacaagaacagtagatatgttttatagtatttgcaaaaactaggactaagttttgcatatatttaggaagtgatttgatttgtcccaattataactatcaaatattctcaaattatcacatcacattgattgaaatgataatttttgatagagatgtactagtacgctcacacacatgattaaattttcactgatcaaagggtttttcacttgccatatgcagaaaaatgaaccaccagaaagaagacaaacctaaagttatagtattatttcttgccatttttgaaagccacttcatttggggatgctactaactagcaaatggtagtgttaattgtacagatctgtacttgaaatagtagctgcactattcgaaggtggccatgaattgaattatagttcggtttctgcatggataagctttccaagttgtaactgaatattggtccaaaataggcgacaaagacttgaatctatctaataatattaataaatttattatctactgatgatatttacacactataaattttgtctttacgagtaaaaactaaagtcttgaagtttaagcaatgtagtgtccgatcaactctagagaggccctgtattttggtgtaagcctcttttatgcacatgcaactcatatccttatcataagaaacataaatatatactgataaaagtaacatactattattataaaagcttgattagagtaaactgtaattttagtttttggaaacactttcaactttcattaaaatacttttttttttttttcaataagccccacaaaaattgcagcctcctcaatatagttaatcttagtattgtaatcagtgccaaagtcaagatatgcttattcctgtcatggtagagattgagtacgttaaggataaaacactatattatatagtacttttccgtttttgtttttttgaaatagtactttttccgttattattatttatttatttattttttattttttaaccatgcttttttttttcatcaacaaacaatgctgctttaaggttattaaaataatattaatacccaataaaaatattctaggaagactcaagtaccggcaacacccacgaaatctcaccaacaaaagctcataaaaattataatattaaaatcataaaataaaagttgcaccctttttgtaataatattatgttatctaaaattgcacactagagataaataagaaaaaaattttactatgtttaacttatgagtaatgtgtctcgataatataataatttttagcaacttttgattagaggtaataaaatagaatagaatgaaaagaaaataaattttattccattcatttattatgctcttcctactattttagtggaatgattattgtattttgagataaatataatttttttattaatttttttttatgtaatttaaattttattccattcctattactatttttatatttttaatccttcaaactaaacaccttaagtattgctagccatagaaggtatccaataacaaaactcttattattctatcagttctcactatttttttatcactacttgaaatttatattatgtaataatttagttacaaaaacagaaattaaaataaatattaaatatttccaaaaacataaataataaagtttattgtttttaacaattcgacactgaactccatgaccgaccgagttgttacgttactgatttccctctctctctttgggttttcttctccagcttatttcgaagtggattcatgactactttccgtgatctcgacggagctggttccgcatctccacgcaaatcgacgatcaaatccacgaaggcactgagtatgtacttgtacgatcttttatcgtttagtttcaggtaacagaacagaagctcctccatgaaactccactcaaccttcttccgtcgccggaaatgctcttccaccatctccttcatcgatcgccggaaatcatcgcaagggtttgctgagttggccaaaacggcgacgcattgatctggaagccttacccattcatcgctattatcatcatcgacagtagttgaagacgaaaacgacgtcgtatcttcaaaaacgacgtcgtttgaattattagtagtagtagtggtggtaatacttgcccgggcttcctcgattagcgagcttgaaattccggtacttacgaaaaatcggtgggacccacggagattcggaagtaataggcgaggagattcaaacaaaacgacatctgggttgtcgttttggctatgaacgacgtcgtcttttgtcgtgtaaagcgatttgaaattttcaaagaggaattggtcgatgtcggttagagtagcggaatcgtcgttttgatttcggactgctgaaaacgacagcgttttggggtgtttactacaattggagattatccaatctttggatgaggatagagaagtgaaatggattttgggaagaaaattttgtagacatttttcgatttttttggccataaattttgtatttggcgttgagctgggcttttcgggggttttataaacagtaactacgtaacatatatatacaataaatggtttagtgaaaagcgtttgaatcttaaaaatttattagtgcattaaataataatatatgcatgtgaaatttcgtgaatgttatatatatataaataaatattaaatatgagtgaactttaagttaagaatttcactcgaaacgaaaaagaattcaaaataatgaaattttttgaaaatttatgacagctgacagaaatttatatgggatgttatttttctaaatctactgtaaattttatgtttaatttttaaggagaaagtttgtatgttttaaaactatgaattaaacgaataatcgaagaattatcgttatttataaataactgtcaagtgtcaacgtatttatttacatttcattattaaatagacaatctttattctaatagcttttatttaatttattaactgaagaaacgacatcgtagtatctatggtatatgctatttttttcttttcaaagaaagaaattgatctattaagatgaaattaaggtagatctagagagagagaaattaatggcaatggagatggagatgattagcaaagaaaaaagaagagaaataatgttaagagaatttgattgcataggtcgtgttcctcctactccaccaccatctccatcccctgctaattcatctatccattctcatcatcatcatcatatatatatatatatatatcatctgtttaattacatgatcttatgatatcataactttgtattaacagattcattttcaactttaattaatgatcatatgaaagagattcaattttatatgtatagatattagattaatattacggtctcattataatatattttcgtattttctgaagatattactaaattgaataataaccatttaattacaatgtaccagccaagaatttatgtggtccatcataacaaattgtaccatttaataatggccttttctcattgattttcactattgttggcagctggtttagaacataaaaattttactcaagaaaattcaggggaaaaaagtgttatcaaaagcacccaacttgaggagttattaatggagaagtgtttaaagaaattagaccatgaattgaaagatgaaaaagaattaaaaccatcatcaattattgtggaaaagccaacaattttcacttcaaaacgacttaattccagcataatagcttcagagactacaagaatattctgtgctcttataatagcattattggtagtgttatcatatgttgattatgcaatatttgggagaaacatagtgagggctgagagtgttgtagcttcaaggcctctttacattcttctactaactgatgtcacaattgtatttgctcgattatacctcgaaaatcgaggcggctataacagtctagaggaggaagaagaaatgatgcctaaggctcaagatgataatggacataattggattcaagctgttaaagttttggagagaggtttggttgtttaccaagcaattcgtgggattttcatagattttagtttttatgcagttgttgtcatttgtggcctctctttcctctaaattatgtgtatttttcattagttgattttaagtcctgtgttttttttttggcataataagtcatcctatatgaaataattttttttttctaacccaactatgtttttattatttagtgagaaatggtttagtgtttttattaggttgggtggataccttattaccatctaccatgttttgtccagttgtaaaggaccatatatatatgatactgaattatgagattcattaaatgaaaattggggaccaattcaaagaatgggttgatcatttatgaacaacccagataggcatcttagtgacaagtctcctaatagaaacaagcatctttagatacgaagtgggaaatgaaacaaagaagaagaaagcttttgaccactttacaagagttgagtttgtatttaatgcattgcacactgcatccatacattgtcttctcttgtattattttgtaccttatacgtgtctcaaagatttgagacttcaaaagacacctagtgtaccttgattatattattattagtataatttaatagtgaattatatatatatatttaatttagtaattaatatgaaaaacaattaattactcaattccatgtataatgagcgttgctgttagaaattagagatagtattttgtgaataattaccaatttttcacaattataagttaaaatatgtaaaattcaatgtttcactaataacaaaatgacaatatcatgaagatgatgggcactacacatgccttctaacactacttacaagtatcatattatttttgatataattagatattaaactctacataatttaatttaattattattataaaatatcattaactatttataaaacgtggtgcgcaacaccagtaatacctaatagcaacgctcaatataaatactcaagcttaaaaagtgtcatttgtgagagcaatggcgttgggatttttttaatttaagcagttaagtagttccagccattaagacatttattgatacaaaaaatgtttcaattttccaactctttctttctctgttctcttcaaagctattactaagcttatatatgattggttcaaattgttggttacactttatcactaaaaccccagaaagaaaaagaatttaaatgaggagagtaaagcttggcacaaaaagataaaacattattcaagaatatggacctaccaaaatgggccaatggaattgcagagataattaatatagtagaaatatacagttgcaacatgaattgtcatgcatatttcccctaccctaccccacaatttagacaaaagctctgttctcaaacaaagtttgtctcaaaagaaaaaaagaaaggacttaaaacaagtgtttttttacatgttatgtttattactttccttctttcttatgtttattcttttatctagaataaacttttgaaccctttaatccagattctggattcataaagaaaaataaaataaaaaagttttaaagaaattctggttttcatttttgcttcctcaaacatttgaatatattttaatcaacttcatttaaatacaaaacaaaacaaaattgaaactttgaagagccagaaacatcccttgattcagaaaaatcaattgaatatataattatactcacaacaatcattctcaaatgctatacataaaaagaaaataacaagtaattaataccatatctcatatctcatatgcatattcctcttgtgagtgaagaattgcttgagtttcaagaaaaaaaaaacaagtaagagaagaaagagaagaacaacaaaacaacaacattaatccctcaaacataagatttgtatcaaaaagagagagaagaaaacatgcttcaactaaagaaaaaacctttctttatcttcccatttcattctcctggaaaatccttgatggaacagcaaatcgagccgagaaagatcgggagacattttcggggtaagtggctggtccttgatcaaaattctgtgaataagtataaaaatcataaggaacatgaacttgagatgatgatgatgaagaagtacactcaaaaaacttcttcttttctttcataatctttgtccaaagcattttccatcttgacccacttggaaataataacacactgcaaaacataatcctctcatagccattgatgtttgtattgcagcagtttttgagctccatagctctgcaaaagctagacatgtcttgttttttataagtcttcaaaattctcttcccattttccttttatagcaattatgagctgagtgtccaaagttactgatagcactttttttaaagtcattattattaatgctatctaatctattagaaagatagtccacttgggtttttttctaaaattatattttactgtttttcagggtaattttctcagaattaggaaagaagtaaaaaaaaagggttacagttaaagaaactgattgaagttaagtgtgcagttttgttaagttaacagttttgtcttattaaaataattcttttgatttactcaattacaccttcagttttgtgttgtttttttgtttattgtttttggctttattgttaagaagtttcttccacagaacattattttggttggtagtggacggacccatttcttaaagaagggaaagagcactgcccaacacttatatatttatatttaaattaaaaaatttgcttaagtgtaccaataataatatgcacactaaatattatccatttgataatttatttcaatctctttcaaaaaaaaaaaaaagatatttcaaccaattatttatttatgttagataagatttattgttttgaaacagcattgtatcaccaccatatactattttagtgcataatttattaccattactcatattctaattttacctaaatgatgttacactattttatagtgtaaggatttattagtaatttacaaatagtgcaaaaacttataaatatattactctgtactattagatatgaaatgaaaaaaaaaattcaatttaattggaagattgatattgttttaaaaagtccatttagagatttgtcctctcgaagagaattcgttattaacaaaatgatatttcctttcccaatttatgtatgtgccacaaacttgggcaatggaaaaattaaattgaaggttgggtgaaaacgaagtgctgatttcttctctaaagcacccaattgtgctttttattcttgagaaaggggtgtagatttgtataaaatcccaacataaaaatcttactaattctaaattgatcaaaaaatgagaaatcacccaatttttcttttatctatttaagccttcctcatatgaaatttttttatgacccaatagttgatttttattttttttaataacttgtttggattctgtaattctcaatttatatgatcaaacaagtgggttaaattttaacatgtgatcactatagtaaacaatgtatatttcttaaaacaaaatttaagagataacacgctataaatgataccaatctatctattataaaaatatataataaaaacgacataaaatttatatatcaaactatacttagtcaaaaatggttctaattaaagtcttctttctacttttttgggttatttttatcttttgttagtcgtaatcttaatatgttactgttcatgaatttgctaagtatgccttacatgatagctgacagtttttttaaatagcataataatggaatgcgaaatgctaaaggacaccagtagtgtctaccatcctcctatgtgtcaatatcgttattgagctaattaaatatcgggtcttatataatttaatataatagtttttaaggagtatcgctagccaatcgcaacgcaacatgttgaaaaagtgctaagcaccactggtgtcttatagcaatgctctaatggaatatatttacatggtagcaattaatatttaataggctcgcgtcaacaaaaaaaatatatatttaataggctgataaatgatgataaataaactcataaatgtatgtacatagataaagaagaatacatgcaataaagaattcaatttgtgaccatttttgtttttaacagcatatgcacattcctattttaggcagccccaactgatcaagcctccattttcagagtttactagctagctcagctgccctgtatcatcaaaaatcagaattaaagtattattaattagggttcttattcatcaatcaccatctatctatacattcatatttttgcatatataataaaagttttattttcgactatatgatttatctctgtctcacaaactataataaatatgtttcattcgattgcatttcatcatttttcaaaataatttgctaataatatatggccacgagccatatgataattataatattagttctaaaaatacaaatatatcccataatttattattagacactatatatatgtaccttttgcctaaattcctaatttgcatcaaattagcttcataagaatatgacatcagcaagtgttcaaaaaatacaactgaattagcacatttgcaattatttctatatttgaggaattttttttttttaaaaaaaaataaaaattatgagctaaattcaaataaaagtgagataaaatcatatttattctacttttttaaccaaagaaaaaaaaagtgtataattaaactgatgaagctgctaaccttaaggctcagggtaacaattttgacgaaatattgtctgatttattgtatttacaattacttcacatgatactcttgcctgcaccattaacaaaatatattataataaaccatatat

SEQ ID NO: 18508 - DNA, 4642 bp, Cannabis sativa
  modified_base (4599)..(4610): a, c, t, g, unknown or other
gttaaagctagcacgtcttcgacaaagcctgaagagagaaggtggttgtacaacgaatatgacaagtacaagcagcggaaacactatttgtctcactctatgtacgagctgacattcgaccaacactcctttactacccatctaacacgctgaccctcatagtacaaaaggaattttgtcccttaacttttgggactacttgtatcttggagccattacaactctctataaatgaagagggggttgaaaaatcgttacttgtaagaaatctcttatattctatacaatatcattttactcaattgatgacagaatatttttaattttcttaagtcttttatcatcaactctttatatttgattttctaactaaaatttagttgacgagctcctaccgtcaacacatatcaatctactcagatactaaattaaatctaatttcaatatttgtaaaaaaagaaaaatccaattcaatatacatttatcactgagtgtgtgagatgggatgctttgcataaggttggaattcccatggtgacactataatcctgaccttaaaagtggcattcctatggaagcaacacgtaacagtttgccctattgggtaaggcatagtttccatgcgtgggacggccaaagctctcaaccaggtaagggattgtgtataagccagtaagccacgactcattccttattccttattggtctttggaattgttatcaagtaaaaggagctgaaaataggatgtgcaccacctagttctctcattctttaataataaaaaatctatattcattcccgaattatcaatgtaattcttattccactttattactatttttattctattacattaaatcgaataataggtaagtaacattcttaataaagacttgagtaattaaattttgtcatttttcaataagctaaaacaaaaatgtcatttttctaaaaccatcttaaaattagccttcttttcaaacatgggccaaaaaaatgcttagaaataaccaaaatcactagagcataatagattttgtaccaagaaatagaatccaaattggattgattttcaattaaattcaattctaggacaaaaaaatagatacaaagatgacgtatgatgacatagacagcatcacgtgcacaagtctctatcacgtgtcaaacaaacaattaaaaattaattatatattttttttaaaaaaaattaaaagggaaaaatcccaaaccccaacacacaccaccaaaggcttccaaacccaagccattagtcatagtccaaccaaagagcaccaaagtcattcagttggagggaaaccccatctaaccgtccatttttgatccaacggtggagattgtctctaaccacaaaatgagaaatccaaaggtgaatttagagagagaaagagagatatatatatacacaaaatacagaaaaacagagtcttctggtgaagataacagagaaaataaaaaaaaaaatcagacacaaccactctctctctctcattttattttccacgaaattactcatctgggtttccttcattttcccggaaaactcatctgaagagagaaagtttcctttttttttttcatctgaaagagtttttttttttttttttttttgtggtggtggtggctctgctactgccgccatagaatgcaactttcaatcaacttgtaaatcatctctcatctctattttctgattttcctttcctttgcggtgtttgtttccctggaaaaaagttaaaagagaaaaatttgtttctgtgaagaaaatcaaataaagagaggaactttctttaatataaactgatcttgttttctgggtcattactaatttcattcatttgcatgataatctgagagaaaattgaatagatcttaaaaggtaagttactctctttcatttcaatatgaaaataaagtttcaaccttgtttttttcttttcttttgtgttttcccgggaaaatcttacatggtttcttttgttttcttagtagagatggaaaaggaaggaaagagccaaaaagggtcgtcggcggcgacggttgtggcggcaccgacggcggcggagactgattttgtgttgcagtggggtaatagaaaaaggcttagatgtgttaaagtgaagaaagatcaaaactttaatgggaaatctccttcagattgtttggatagtaagaaaattagttctcgtttgttatcttcagctaaagattcttcaccattacagcaacgtctcaacaagtaattataaaccttttttttaatttattttattctctaaaatggattgaatctaaagttgttatatttgtttttgttttgttgatttttagtgttttttattgttttgatttttaaagcttaggaatctagaaggagattgaaaagaaaaaggaaaccaggtctgatttttttagttttttttttccctaaattttcattgaagaaggagagagaaatccgtgtttggtagctgagaaagtgtgagaaaatggaaagttcaactcctatttgtatggaagttctgctttttctgatggctattattattagataagttactcttttttttttattagtattattttcaaactaatttcattgaattagcaaagataaacccttgattggttgataggaaaatattcgaaagaaagtagaagaaagtctgatttttgttattagatgaattggtttttttttccccaaattaatttcattgaaatgaaccccttgattggttactaagaaagtgcaggaaagaaagtagaagaaagtttcaatctttgttttactcttttgttgtttggtattaaatggttagcttatgattcaatattttggttgtaataggagtttgaattctccaatgaacaaccgaaaatcatcatcggcgatgacatcgcccgagaaggaagatcgatactacacgacgaggggttcgttgggattagatgagaatgggaagatgttgggattggaacatcatcctcaccatcttcaccattttggtcaaaatggagataacaaggctaagattgtttggccgaaattgttcgtttcgttatcaagtaaagagaaagaagaggatttcttggctatgaaagggtgtaagcttcctcaaagacctaagaaaagagctaaattccttcaaaagagtttacttgtaagtgttttcggctcaaattttgatcttgttcgattggttactccaaaacttttgacattggatttgtgttcgtgtgtttatagttggttatgccaggtacatggctaacagatttgtgtcaagaaaggtatgaagttagggaaaagaaggcttcaaagaaggtacttttgtgtaaagatcaaatttttattttacttttttcaattcaatcaaacttgtttggttcccgagaaaattgatggaaaatgattaattttgatgatgcagagacctagaggattgaaggccatggggagtatggaaagtgattcagaatgagaagttattaggagttgaagaagatatgtttaaagctttggtttttattttgaagagaatcaaaacatgagtggagggaaaaaaaagaaagaaagaaaaagattgaagatagaaaaagaggttataaatgttgttaaatcactcttttctcttcttaggatcattttgagttttgagaaattataaaattaaaaattgaaacaaaatgtaattttattttcttctcctaattttgatatgtaatatgatatgatgtctctacacttttctttgttcttctaattctttaattttctctattataatatttaaatcttacttgaaaattatggttgtattgtatctttcaatcaacatggatgaatggttttcagttgaggtgtgtctacattcatacaaacatattattgtatttgtatatgtaccttaataaggaaacttttgttaaagattccaacttttttttttctaaattttccaaaatctaatttttatttccattattaattattgaaaaataaatgtaagaaatagaaataaacttcggatgttgaaatggtaatggaatcatgtatattgatttaatgttttaaataataaatatgacatagacaacattaaagtgttaaatatatttatgaaaatttaggtttataaataagacaccccaattttaaataaaaatgagtaatacccacctagaaccaaaacaaaaacaaaccaaaattacattagaaccactaaaactataaactaaaatagatcattaatctatattaacgacaaaatttatagcacaaagaattttttaatctaatttcattcttataatcatatatgttataagataaaattttaaaaataaaattcaaacaattacttgctacaaatataataaggaaattactcctatactatttcttttaacttttttaggtttctatacaattttttgttacaattttggaacgctagttgcaataggagattttatgtaaaatttcataaaaatgcaaaaacaaaaatattttaaaatataaaaatgagaaaatcccgatataacatttaaattttagggtaaatactattttnnnnnnnnnnnnttgcaaaagttacagattggaccctgtgtttt

SEQ ID NO: 18509 - DNA, 4202 bp, Cannabis sativa
  modified_base (4174)..(4175): a, c, t, g, unknown or other
tttcattattattaatttaacattttatataatatatatactatatatgtcatatcaagataaaaagtgaccaaaatcctataatagtgtcaaagtgttaatatgacatctaaattcatctgggctttactccaaatactgaaaagaatacaggttaaatcaaactctgcatgtgaaagttgattttggttttttccatataattacctatgattttcccatatatgaaaaaaaatatatatctttatttgtttatacaaatatatacgggtgtataaaaaaagccagtcattttttctttgttgactcttcacgtaactaaatttttcaattatctttctatttatatatttattctcttcactcaccttcttcgctggccattcattcattttctttccttttccttttccttttcttctctctctcattttctctccaaagggtcagtgaatccataaacagatctcatctcatcgctccctttctctcactctcattttcttttctggttaatttcatcagactattgagttcaaaacaccttgctttgattgagaggtatcacctaatataccaaaaaaagccttaaacttttttagttttttttattttattatccctgaaattaagacaattaagtcaaacatctgggttttctttgattcctttttctacatatattatgactatctcaaaaaccatttctcacaactctataattctttcttgtcttctgggtttcctcaagtctaagggaagaacataaaatcttgcaactttttctttcttttactattttcttttcacctcatatatatacatatacatattcatacatacatatgtgttaatagagtctgtgaagataaggatgaataccaagttttggtcttcaaataagagctctgctgaggaagaaggagggccaagtgtggagcattgggagattaagcctggaggaatgttggttcagaagagaaactcagatgtgaatccaagttctgtgtcaactcccaccataagagttagagtcaaatatggctcttcatatcatgaaatctctatcagttcacaagcaagctttggtaacaaattcaaaatctattaagtatgctatgctctcttattttcatattttgaatgagaatttgacattttcttatttgtggggtgagcaggggagttgaaaaaaaaactggctgcaccaactggtgtgcaccatgaggatcagaagctgatattcaagaacaaagagagagattccaaagattttctagatgttttgagagttaaagatggatcgaaaatcattcttgttgaagatgttgagaaaaaagaaagaaggctcttggaaatgattagggatgcaaatgtgcaaaaggttactaaaacattgaaagaaattaacttggaactcagcaagctacaaggacaggtaatcaaaattttggcttcaattattacaacttttgcttttcatgtcgaattcgattacagattgtttatggtttgttgctgaaatttgataggtcttagccttagaacaagcagcatctaaacatgagaaaattgaagacaaggatgtggatgttttgattgaaattttgatgtcaaaattaatcaaattggatggaatttcagctgagggtgatcttaaacaacagagaagaatgctggtactttaatttttacataaactcttttttcactactatttgctaaaatttatatgcagccccccaacgaagttacaatttttgagttttgttttttattaacctttgaaggtgaaaaaagttcagaactacattgaaactcttgaccaagtaaagctacaaaaggttaaaattaacagcagcatagatggaagaacaaaaaacaagacaattcaagacaattcaaggatgcgaaacgacataaatttcagtgtaaggaggccagtatctcagaaaccatccaagaattttgagtctccaatggtatccacaaaatgggaaacttttgattaatttatagaatcttcccaaattcatcttgaaaatttcatggttcaacttaattaatctttgtttctttttctcaattttctttctgtctcaaaatattttctctcattctagcaaactatccaaggatctagcttttatgatgcagtgaagaaaaataatctctttgaataattataaatattctttcttattgtgggggtaaattggagctttgcaaatttgtatataaatatatatagttaaagatattggagttgtgagtttgtgtatactattatgctgttccataagtaaataaatcatatcaagttgtaattcacttgttgcatgaataaattttattgagttcttatgatttcttatgtgtggcataatctaactaataactagtacttttctagcttataacttcagtccataaaaattgataaagcaactaaatcttttgctttttagttagttacagaaatgaacaaaccaaaatctctcaagggattttagttaaagacatttgactttgaagggtgcaataagtgacaaggaactctatttaatattatcaagtacaacatgttataaagtgttgttcataataataataataattctacaaaatcattattggtacttaaaagggcatgttacttgctggaacttgagctctgtaaaagtttgtagtggtctggaatggtcggtttagttctcgattgctaaaccaaagagcacttcaatccaacacaaataaataaaaccaaacctaaactacatgacaaaatccaaaactatgtacatgtgacccaatatctttattgtctataaagaaaaatagcaaaattcaaagcataaatagaatttgatttgcattgtttggcacatatcttgaataattagtggagtacatcatgagtagaagaatagactaagtcagacaaatcatggaaaaaaaaatcagaatttacttgagaaactctctatttctctcatctgaactataaatgcaaagaatagtaactcaaaagcaagaaacagaggaggtcatcaaggtggttctctcactttagcatattatgtcagagacagtgagtgagtttgaagtggtttttattaactttggaggaaagaaaacaaaagggttgtaagttgtactatagtagaagaattaaaataggagtaaaaataggaccatatttggtggtacttgtaacccatttggaagaatctgactgacttacatgtgatctttattggactatcatctcaagaggaagaaaggggttgtttgttttcattttcattttcccattaaggacatggtgagattgtgataagggatttttatcctttcctctggttcccttccctttagttgtaggggaaaaaaatttgaattccaaatattttcatttttttcatagttgaatttgatttcacacaaagggttctttttgttttgttttttttttttttttttaaagaagagggttctttttgtatataaaataaaacataaataaaatgcagggggtgcaacttttgttgtgagggggctctaagccccatccatagttgaatgtgtgtaacttattttatagttattcaattatgtgataagtaattaagtgcggcaaattaatgttttttttttgttaaattgtaacgtacaatatgaacttacaaaatgtgtaaaatgatgatcttaaaataagagttgcaaattttttaagttgatgatcacaaaaacttataactctcatctctattattcttaaaatagtgaatggagttactaattgtttttaattatgattgaatagtatataattgttggagagttatttctattactagtatataagtgatacaatgtcaaatggagaggttttgaacatttgggagtgaagtgcaaaatgctgaaaagtagtcattatattgttttagaatgttttgtgagcattgagctcggtaccaatagctcccataaccccagtatcactagcatatataaccattttaatattggtaacatttgatagctggataattctcattcatgtttaaattagagtgaaaattcaaataggatattgttcacttgcgagacactaataaaaattacttgttatgtgtgaaattctgtattttaatattcccagtttaattanntaattaagtgattaattaaatgcggaa

SEQ ID NO: 18510 - DNA, 5173 bp, Cannabis sativa
tgagaggggtatttttagagttttggaaaagtggtcatatattttcaatgtagaaaagtattagtttaaggaaaaaaaaatattaagtatatataagtagagaatttcaaatttccctttgttaattaccagattatcattatttaaaaaaatatattcattataaaatatcatatgattcaatataattaattgtttatttttttataatttattttacatcttatgcattagagcaaacataatttttttttttgcctcaaatttatttaaaacttgaagatgaactaatatgtactgattaaagcaatcactactacaatgaaactcaatcttttacatttcagcacaaggatttgtttacagtatagaaagtttctaatatgctttgtttaatgcagtgaaaatttctcacaaatttattaccaaatccacaagtcattcaaattacatgaaatatcatatagtacttgtttacttagaaaacttcttttaatccatcccacatttttaacaagtcaatatcaaattacatttttatttaaatataaaaccttgaacacttagttatgtactaaatacaataaacaagtcaatatctttctttaatctttggcctaaaaataatgaaaaaaatatcattttgttcaatcggtaaagttaggataaattttataattaaaactatcatttttttcattcaatttttgtagttaaaagagatatataaacaaagtaaagagatacccaatctaaacaaaaataacaaagtgtgttgtgtgttcaatttcaactctaaattgggtcactcaaaagatatattccaatgaattcataataaatttcagtgtaataactaagcacaacaacacacaacataaccaatcacaaagacttgagcaaaaacataaacaataaaacaaaacaaaaccttgcccattttctcatactcccaaaaatgcaagtttcctaacttccaaaaattaaatccctatcgtctacgcattccacgtccccgaccaccgcggaaagcagctcctccacgccctctacccatggcgcttgcagcggcttctccttgagcactctcggactgcaaacattaaacgtaagaaatcaaacaaattgaataaaaacgacatttgtatgtaaatcctagctaatgaaataaaaaacaaaaaacaaggacttctcgggtgaaaacggatttagaacagaaacaacaatctgaaaagacacgtagagaaagaggaacatgcccggtgaaatttgaagtgcaatattggtttaccttggggttttttactgtctcgtccacgctcaaaacaaggcaagctgcctcagtagcggcgtttatagcattgatctacgaaagaaaaggaaataaaatcatcctcattcatattcatattgttttagtataaactcgtctcacgcaattgctatcagatcatttgagctacccctcatgggtataaactcatctcttaactattgaataacataaaagattaaagaatgattgatacctttacaactgctggctcccagacaaaattggcaaatgaatcggtgattccaccggtgttgatgtccactccataaggagcaccctcacctgttaaaagaaaactccagtgagtagggaataaaacaaatcacaattgtcaccataattatgtaccctactttctggggaaacaagaaaatatggatattcaagtaattttcataggtttaactccaaaacatgcacgaggaaactcggtgatgattttcactaattatttatttattagaaggcaaaattgaaatagctaatcatcaattaaatgccaaccagagggaagcgcgtgtttctgtctcaatttgtttagcacatcggttgcatcaaaaccagcgttgtcacagagttgtcgtgggataacctgcaacattataccataatcaatgaggagaaattttcaattaataaaaaggggagagagaagaagatgcaaagcaaagaaagaaacgtgtgtcgatttaatttctagatttgcataagcatcaatggtctccaattccatctacatttcataacctctcaccaagaatgagaatacactcaaagagaacattagagtttggaactttgttaacaaaaaaaaaaattgactccacaaagagaaagccaaactcaattatcaagtttaactgcttggttataccctataagactaatatgaaattgtaaagtaacacaagattggtcctcaaacggttaaaaggaataatatctaagctacaatttaacccaaagcttagcactcattagaaaacatgactcgagacttagaaatcatagagaaaaaacaccataagagaagctttcaacaaagttgtgtttcaatttccatattttcgtatagatataaatatgtcttggagcaatttaaaaatgcatacctcaagagcttttgcataagagttaatgaaaagctgagactttccagctattgtgcgagcatgctgcctcaagtatcggcttatctccatctaccaccataaagcattgtgccaacatgagctaaagcaatatttagaaacttaaattacttttaatcttttttttgtacataaaagaaatataatcacatacatctatagcaccaccaccagcaactactgtagagttctttaatgctcttctaacaatcatgattgcatcatgtaaacttcgctcggcctcctctataaactggacagaagtatcgaagataaataaaaggtcagcaactcagcagttaaataacatgtcaaacccaagtttgttatacataataatacctgatcagctccaccacgaagaactatagttgctgttctacctgaaggacatccactaaatatattgaacctctcatttccaacttgcctttcctcaaaaagttcacaagttccaaggaccttgaaccagataacggtaaagagttagttaattaaaaacaaataaacaaacagtgaaggctgcactctagctagtgttcatgacaaattcgaggacagacctcatcaatgacattgttaacagatgtctgtacagttccaccagtagcagcagctactctgttcagatcttcttcagttacacgaccagcacagaaaatatcccgatctgcaaaatactggtcaccaaagaaaaaaaacaaaaatccgtcaacggatatgacacaacctcttcagtcttatatgtgaatgaatgctagtcaatgaaagtatacatatagattaccataataaaattacacgaggacaaccaccgttttacaaatatatcatttcaaaccatttataaagcaataattcaaacattcatatgaaagagactaatattgctcttcttttttcttaaaagttggaaggttattaagtgaaagattaagtggggatatatgtaaggatgataaatgaatcaacatttatcaatttggttcgataatgcccaggttgtatttatttaaaagaatgattaaaagagagtccacaatacacactaatttatttcacaagtaagaattgaaaagttagataacatcagcaaagataaatgtagaaggaaataaaaacctgtgttgctaaatcaccaatagccagccgtgaaagaacaactttggcgccactctgtacacacttgtccaacttgtcgtaaataatattccattccgcatcaacaatggactgatactgtgatggatctgtaagtctgcaagaaaagagataaagttggtccttcaagtaacttagaagaaggaaactattgaattttaaagaagataacacgaaagcaacttaccttatctcagcattttccttctcagatttcagttccaattcaatgtttagtagaagtaatttgggatttaggaacttctttggttgttgttcaaatcctgcatatgaaaatgtcttcttaaaggcaacaccatttactaaaaatgagtctctcatgttaccaccaggaacctgcagacgggcaagcaaactttctcgttagaataacttttaagagaatatttcatgaaataatatgctcctctatagttccatgacaaaattagctggaaacttggggagagtaatgaaacagtaattcgaagtttttggacattacgagaggacatgaattgtggggtttaaagccattggtggccatgaatatacctcttcctttttcttcatctttgtaaaaatatatatataaacaaaacttaatcacaactgattaatacaagcagaaagaaagataaattagcaaaaatcagatttacgaaaaaaaataaagttcaggatcacatgatatccaagttaaaaatactactttcctctagtccatttttcacttgagttaatgttttgtaataataatatacaagatatagcaagccaacaagaatactgccaaaacaatagatgacaacaataaataccttcttgattccaatcatattcagtcgatcctcactgccgattgcaataacagaatcaacaaccattgatgcaaagaactccttttctccaccaatgagttttgatgagagtgttgtagcggcacacttcgccagtaggcctttcttttcttctaaacttttgccctctatgctagtggctagttcttttactctctcaattgcctacacatcatacattattcataacattcaggataaaagataatggtccatgctcatagaaaaaagaaaataggtaagctccggtaccaaagtggatgcagcacggtaacttctaatcagaagttgggggtggacaccatcctctatgaaaggcttggcctcctttagaaactctcctgcaagcaggacaacagtggtggtcccatctccaacctacacaaaaatataaaatgaaaataggtcaaattttgtaaagatcgtgcccgcgaacacataatgacacacctaaacaatgttaatgagcaaaggctccacctcaacccaaagaaatttcctcacaagcactactatactattcccgtccacccatacaaccaataaatgaaatgcactggacgcttgcaataataaatgcattatccattaaaattgaacgttttaaaataaattgtatgaagactacatcaactaaacaagcaaaaactgtcaagactacagca

SEQ ID NO: 18511 - DNA, 5163 bp, Cannabis sativa
  modified_base (1781)..(1784): a, c, t, g, unknown or other
ttattattattgttcactaatttctgaatatattaattataaaaaggtttatgtattaattaacgaaaatatacgttaatatttataatggtgtaaataaagatttacatattttgttacacatgtatttatcttatactcgcagtaagaaattatttaaattttattttcgaaattataaactatttagaatctaaaaaatttacaaatatcttaaatatgtacaacatttgtaattataaaaaaaaattaaaactaaaaaactctcatcaatatcaaaacagataattaagaacaatatagtaaaatgatcctagaatatcctctaaggtttactgcataaatttcctataagattagtgaattaggttagatgaacaataatcctaagcaacgtcaccccaccataaacaccacgtggaccactacgaacaaccaaccggacctccgcaaacccactcgccttattgtacttcccggtcccaccaaccacagccaaccgtgatgatgacgtggcactactactttccctataataaactccaaacaagttaatactatctccatactcacctccttccatcaccaccgtacacgtcatcatcaaactactcccgtctccagagcttgccacgtagacccctcgagctcttcccaacgtttgggaccctaactcgggcccactcgtcaccaaatcgtcgaacacggtaattgtcccgaacccaaggctcaatccatcagaacccattacgattggaacggcgtcgtttgggttggggatgaggaggaccccaccaccacggtctgggggatgggagattggcttagtgaatgccacgtggcggctgtagatgctgcctaataagccagtgactggtctcgctgtgggacccacaatgtcgtgcatgtaaaactctagataattagtattagtagtaacagttttggttattattattattaacaatataattaattagtgataattttgtcaacattttttttgggagatagatatgaaatgaaaatttgaggattgctttgaactttgaagttggttctttgttatatattattgttatgagagaagagtgagataatattaagatcgagatgatatgatatatatatggtactactgcatggagttgagttgttgtagtgatacatatataaatatatgtattatataatgtattgtataggagtggagaggttgttgaaaattataagggaagactaagttgtttcgtacgtacatgtataatatgttgcatgttatatatttgttgggttgcatgaaatgcagggggggaatttgactaaagaattagtaaagacaaatgaggtcactttgacttactttatatatagtgttcaaaataagaaaattagaataaatatcaaacttgaaaataaataaataaataatgtcgtgattattcgaaaaggggtgacaatttgtgtttgtttctactcgaaaataacttatttgacaaacgaattagtcgtgttaatccaaacttcatgttatcgtatccagctcattttgctaaggtagaaaatattaagtatctgatgtgaagttgtatcaataactttaactctaatacaggttttccattgccaaatcataatttggtaaacgtatttccttatagtatgatagcaagcaagcagggaagaatgtaattgaacagcatttaataatatatacaggaaccatacctttcacctcaaccaactaagctatgaatatttgttgtttataatacacttannnntacttaaataaaaacctaataattttttttatatttttattttgggcaccaaaaagtatgggccctaggcacgagcctaacccgcctatgcctagggccggccctgacaagaacatgtacatattgttcaatttggcctcttaagcattgtcaagaacactatatatagcatctgaaatccgaccagctaaatcttcgtcagcagttgtaacaacagtaatcgcaacaccgatttttatacaagctctgttaggttcatggacgtgtaccacagaaacattttcaccttccaaatctaccgtatcgccttccactgttccgctgatacccctttccgacaatgctgctagtagagtatctgtactcggggaaccccagcaaagaacaggcctgcatttctcctggtctgactgtttggtctcagaaattaactgatgtttgccgttactaacaaggagctctccctttacccttgtcacattaatgtgttcttgtttcaacttcttgaaatggaattgtgtagccaactccattggaatttcaagttctgagctcttcaaatttggtatagctagtgtttcattctcggagtagtgtaagatcgagaagggtgtcgattcttgaaaactaatccgccttaaatccttggggaactatattcaagaggtagaaggaaacataattattaaaaatagatttctcgttcggtatatcaaggaactgaaaagaatgataggtaccgcaacaattttcggttgcaaaatcttcagcaaaggttgaactttattcaaactgcaaagtgtaatgaaaattcatgtgagaccatttcaatatgcaaaaatattatcaacatgaattggtcttcccagctaaaaaaagaaaggggaaatagttgtgttgtgatcacagtacactaccttattccagagaaaaatgagcactgaagaaccttcatttccatgggcttataaggtgaaagagccagctgagcatcaattccattctgcaataagacaattttgcattgtgcataattgatcaaccccaaaaaagtcaaaaggaaattaaaagaaaatcattaagattagaacctcaagaacaagtagagaatttcgatcaatgcaccaatgctgaagcaagtgaacaaccggaccgagtcgtaaactccaattaggacaaaatactacgcatggttcctgccaattcattctatacacaagacgaaaatttcaatggaatgaaaataagtaatagttaagataatttataacaaacaccaaagtgaccttgaaaccacaaaatgatgtgtgtacttccttatctttcccaactaagtagtcttttgaaaaagttggtaaatcatatatataacacatgtctatggtgccgattgaatcttttcaagttcgcttaaataatatataatatatatatattatacacataatagaagaatatccagacgaacaactaaataagaagagaacgaaaatgagaataacttagcttacaataattcaggtgaataaatggctggaaacacgtgaagctttttctgctttatgagctctgcatgggcaaacgatggctcaccagaaaacagctgaataatcaaattcagaataagttcagtgtttagtttcttagttcacatcctctcaattatataaagcctccatacaaattgtgactagttagacagaagaatatttaccttttcttgtctctcagtgcacagccactcaggtatgacatttgtgaaagctagtaattcttttgctacagaagaaatgaagtatatgggaacctaaaacatggtggatacattataattaaaaaacatggctttgcagtgttgttccatttctttttttctttttttttgctgtccaaattatgcagcaatgggcaaacacaattttttttttcaaaaaaaattaagagtagtgacaacacatcaggtggacgtcatgtatccaattactaaggcatcaatacagttggacattaaagtttaaaccatcagtctcacattgattcttagtaaacattgagcatgtaatagaaaagaaaatgaccaccttatttcttgaatttggtttacttaatccaagtgtcctcttttattcacataacataccttcatgtttgaataatccagtgcagttgatatttcttccaatagctgcagaataagtccaagtcgatcaatgggaataagaacagaaccaccatttttaacagaatcaaccgcacaagagcatacaaaagctagtttgtccctttcctctgaaatatcagcagatgctaaagatctggccaaatattcaagttaagaaaacaaaagaaacacccaaagatacagttactctatttgataattatgcaatttaaggtggggagttgggattgaagtaaaattgtgataaaattcagaaaagatccagtaaaaatgaggttatgctgataaaaaaatttcaaacttcaaaacaaaaagatacctgatagaatccgttactggggcagaattgaatccattatctaggtcatccatggcatgcatgaaattgaaatctgaatatatgattaaatcattccctttaagagcatggtaatcaaaatccattgcatgcccagaaagaaagatggagctggtaataaatgcaatatccccttttggactatttattgcccaattacaagctccaatttctgcccctgagcttactgcctttatgatcaatgtgccgttatagcaggtttcttccaaatattttagtgtttgaacctttttcaagcaatcattcacatcaactgcactgtgaagttccttttgttatatcctccaatacaagagctatttattcaacaatttcaaatcacaaatgtaaataagatatgattgtaaatcacctgtataggggcatccaaccacccaaatcctctccatctttgcctgaagcaatctccttcaatgtgggtaaaagttgatcaagctcttcgaacttcatcccttgagggcaaacagactctttgtctccataaaatcgtttgtattccatatgacttgacacaaggtcctccatcataagtttcccaagtttagcagtggcctcagttacatatatctgccccatatagaaattaacaatgaaaaataaacatccaaaataattatatagaatcagctaaaaagttaaaacaagagcaagcacattatgttgtaccttagcagaaaaacctttcattcgagtaagatacggtaatccaagcatgcccattgggctcgaaataagaacaacatcaatgaaagaggcattccacaagtgtagatttttaacagttttataacaaggctctgcataaacaagatttctcg

SEQ ID NO: 18512 - DNA, 1785 bp, Cannabis sativa
attttcttcaactcaaacaacaaacacccactgatcttcattgtcttctgatccaatgggcgtttctggaaaatggctgaaatcccttattgcttccaagaagtcttctgcagatgaagaccaagtaaccttattttctcatcttctgttctgttctgttcttttttgcttttgtactgaattttcgcttttttcttttctagggttttcaggagaagggaaagaagaaatggaagctatggaggagcgcatcggaaggttttggatcgtctgtcaaaacgggtatgaaaaggaccaacatgacgacattcgaggcgtctgttgagtccttggtttctgatgatgcattcgctgctgccatggctgctgtagtccgagctcagccaaaagattttaaggttgtcaaacgagaatgggctgctattcggatccaggcatttttccggggctttctggtacacgactctgtttttccctcgtgttctctttttaagtatttcatttctttgttttgctcaattatggtgttagagtccttttgtgcataagtagacttaagcttttcagatcacaatgacatattttatttgcacaatttgccaacttgggttcaattataacctaagtcataagctttcaaatataaagaacagaagaccagaaaattgaactcaattacgcttaaaattacgcccattttaacttgaacgagccaattatggaatgtgagaagtaaattttgttgcccatttcggagaatttgtaatttggtacgcacccttgttcaatgattcctgtggattttgatgaactctatcatttgttattaggaatattgttagttgggttattattttctgttagttttcttttttatctaactaatttctttcaccgaccttaatcctctatacaaggattatgactcttccattgtaaggttgactcattttggactctctttgaataaagatagaagcatttcacctaatatggtatcagaattgtgtaaacaaacatgagttttatatgctttatttctcctctttttattgtttttgttaatagatcatgtaatacttttttcaggcaaggcaagctttaagggccttgagagcagtggtaaggattcaagcaatatttcgtggaagacaagtgagaaagcaagctgctgttactctaaggtgcatgcaggcacttgttagagttcaagctcgagttagagcacgttctgcaaaaatgtcaccagaagggcaggctgtggagaagttacttgatgaaaatagtttcgaaacggatcccatcaagcacgccgaggtaattgttggtgtagtacattgaaattgaaatgctgttgataagttttgagaaagacatatataatatattgaccaagaattgggtctttcttgtcttgaaaattggcagcaaggatggtgtgatagtcctggaactgtgagtgaagttaaagcaaagcttcatatgaggcagaatggagccatcaaaagagagagagtaattgcctactccctctctcaacaggtaaatttttggtcaatctgctaatgtctatggcttgtttggtgattctgagttaattttgaatgcgttatggttttcttggccacagaaacttaggcccaatgctagcccatatgcaaggacaaaacagccatctaagtcagttaagcatgagaagctggttaacaattcagattgtagctggttagatcgttggatggcaaccaagccatgggaaaacaggctaatggaagatatgccacc

SEQ ID NO: 18513 - DNA, 4324 bp, Cannabis sativa
  modified_base (2838)..(2845): a, c, t, g, unknown or other
gtgccaaaacaaaacaaatagtgatattaaataatcttttatgaaacttccaggcatgtccacaccccattcgtacctttgttttcatcgcgtgaatggaaggcacacgactagacgacattgtgtaaataaatgcatatttctacttatgtaataatggtatatttttatttttatctctataaaatttatactttttattttattaacactaatattccttttatttagtaacaaaaaaaaaaaaactaattaaacatatgtgggtggctgattgagcgtaattgtaaattaagaaagtcccataacccttgaatatatattacacgtgtaaagtttaagatgtgaatttttagcgttagataatgaatctatcaaatattttattcagttgaggtagaattatttctatgatccaaatatccaataatcccaatatgttataattataagatgtcatctttagatctagatttgagtatgtctcattgtatatatatagaaacgacagaacataataatgatgataataatgaagattattagtggttgagcatatagctgacctgtatctcggaaagaatgcagccatgaagggccatgacagtgaaggcgcagtgtctaacggcgccgctcactttgacatagttctcccaagggtattggtacatccggtaacgaccatgaggtggttcccatactgcaaatcctagctgacattatttgattcattgcacataatgaattttctcactaaaacttcatcacaataattaaaagaatttaattaaactcattaattaataaagtagcaattgtatatatattctttcttctttgttctgtcaaatcatgaatatgtagatgagaaattatttgtgggagacaatgttgtagtgtagtcataccagtgtttcctcttggcttgaagattgtaccacagttctgtagcccttgtagagtgggtcctctgcagcttggtacgtaagaatcttggaaggtattctttcatactcaatgcactctaagtacccttttacacaccctaaattaataacaaagcattggattttgttaattaaaaattaatatcgattatgtgtgcttcaaatgcatacatataacatatatagggaatatgatttttattatcctcaaatctgtataattttattttgtttcaaattgacatcattttatctactaaatatttcacttatactattctactacaacatactcatcattatcacaaaatccaaaatgatggtaaataattaaaataagatttttctattttgtaaataacctcaaaattagtttatacaaataatacacgtgcatgtgcattttgtgttttattaacgaatgtaattggtcctagtactattaatatttgtttttacacatcatatttaacttaatcaagtagtaaattactgtttatttgacatctttttaagatagaattaatacgtatccacattataatcactactatttcattttaaaatagctaggtggaaagtcattccaatacatgtaaaaaagaaaactattaataaccctatatatcataagatctttgttaattaaataaatattattattacttttttttttttaatagaaataaatattattttagtactgtaattaaatttatcacaaaattaaataattaatattgtttcgatacaaattaaaatttattttattctatttgtgtccctatacattatcattactatagcattgacctcttttccttcttttcaataacatattcatagttttacaataaaataaagggtattgtaatatataaacgcttaaataaaaaaataaaaaaaaaaagactattgaccttttttttttcttttttatcctgtctgacacatgtttagttattaaataaacactaaaaaaatatctttatacaaataaacataaatatctttaaaattaagtgtaattgtaaacctatttgtccctccaaagaaaatcatttaaaacaaatactaataaatgaacaaaaatatagataagaatctggatatggaagatgtatagtaagttaaatacactcaaatatacacacaaataactaactttgactccataattaagtgacattgttcttacttaaaaatattagataaaatttaagtatgtatctatatagccttatttagtatatgtatttttgttttggttttacgttatattttatatacccttgtttgaattagttgatatttaacaatatatattattctatatttataattttaaagtattgttattagagtattttcttgaatttgttgacgatattccttcatggttaatattttgttttatataactaaatacttaattatactaatagtaatttaaaactcaacaaaatacaccataaaaaataataaaacaattataagaatgttgtagccacacataaataaaaaaaaaatgttgtagctacacatttagctaagtactactattcattaggtaaactttggagtaatactaactttggagtaatactataactcttctattggatgtgtattttactaaataacttttacatctgtcactattttacattagttattgtgtttgctgttaagaataactttattagaaaccattaagatatttttggttgaactttggatatttataacagctttaacctactttcatcttctttgaaaagattgtacttggacttattaattgtttttttttttttttttgggataactaactttatcgtttctattatatataaatgaaaaggactatatttcttatttcttttttttnnnnnnnnaaaataaaaaaaaaaaactttattgtaaaacattttcaaaaatggcctcaactttttgaaaaactttacggaattattttggaatgtatctactgaacacatttgtagtgtagtgtagtgtaaagtgtgtaggtaccttccaaggaagaagcaacgcctttgaaatttttgacgaccaaggtgtgcaaatcttcgccagaccaaatcggaaatatacaaacattaacaacaaaacaaacaccagctcccaaagcaatgagcaccaatcgagaaattactgcctcattgtactgcccagttctattcccagcaagcattagtatacagaacgttatcacgaacactcggtaaccatagtcatacggcttcattgttgggtacaatctcaaatacgacgcaaaaaatgctgatgaaaaacacgctactataattaatcaaatattagagctagctgttaaagcctaatggtatataataataacaatcaataatactaacctactataaatatgcttatcacaattacaacgtcaccccgcttcccagccagtaaagacagctgagcaaagaggaaagccagtattgcagccatcaacgttcccaatccacgattaaaccctttaatcaaagtggcacctgtgtaattataaatgattagattattgaagatatattattaatggactatttattattagttactttaattaattacctatgctgaactcgaacatgacaatgacggtgaggattgcccagacagagtactgatctatattatgataggaatctttccagaaaataagcaaggaaactaaggccattgctaggcccattttcatggcgtaaatggcctttcttggatcggtcctgcccatttcccatgccttaccggcgaaatcaactgaatctttcaacaacttgttcatcgttttgttcatcgactggaaacacgtacagcatccccatcttctttcctcatcgattactacgtcgtcgtttattcccttaaagctgcccaagaagagaagcctctctttgctcttctctgcaaaattatgcccaaacattggatccatagtgtatatatatatatatatatatgctttcttgattatctcttgctcagttcaccaatacattctgcacagaataaaataatttgtacgggtatttaataagatcatcactactgctatttatagagtgaaacttttttaaaaaataaaaatgaagacaatactagtaaaaaaaaaaaatcattattggcgtatactttaccttagtaattatcatcattgatattatatggtgtgtttgaaagaagatatttataaagggaaaatttttctcttaaaactaaaatactctatatgggtaaaataggataagtgttataaatattaataattatatggatgtccaaatcttttatttattaccatgaattgtaatgaacattcctcttttccttagttt

SEQ ID NO: 18514 - DNA, 7286 bp, Cannabis sativa
  modified_base (7253)..(7259): a, c, t, g, unknown or other
ttttatatgcaattatataattaaaaatgtgtatgttaaatttaaaaatattaatataattatatcagcacacacttaaaaaatgttttggtgtgtgtggatatattattaatattttttaatatgactttatattataatagtgtttttgaccgtcttttaaaataaatataaaaacattatggacataataattaagaaaaaaagaagaagttttttccctaacaaatctgtaatccatatcaaaccacatcatttacctactaatttgtatttataatgacaattaatagaacgaaaaatagaaataatattttgtcaaaaaagaaaaagaaaaagaaaatagcaataataataagtttacagtattactttttcttattctgggacaccgaaaaaaagagaaacaaaaagggaagccaactaacaccaatttttgcgcgaatctttgctgtttattgaataccatgtaggcattggttaaagttttattttttatttttgttttcttggaaatactttcggtataattggtgtcgttttctctatcaatggccgactttttggcagtgtcggcttatatttcaaagctaattaagattaaatgtaccaaattatttctctaaatttttaaggtcattaaaaatattttttaaattttgagattgttaaatttaaaaatttttgtatactttcaataaaaaaatttaacatggataaaagttcaggaacatgatttagtatacaaataattactaaaatagtaaaattatataaaattacaaaaaaaaatccttaaatcaaacaatctcaataatttaggaaaaatttctaacggctaaaaaaattcagagacataatttatattaaatttagggataaaaatcctaattaacatatttcaaatccagcactatttatttatttatttttaattttcatttttataatctaaattgtgaaaactacgtgcacatctgtgttggaaagcttcaacctttcggttgtgcttttatttcttttcctttctatttttcaaactttttctcattgtaacaactttggcttatttgttaataatcaccaatttggcaaatgggtttctctgatttgaagcttctttgcatctgaatgatcaagtttttctcttctttttcacatgaacaggtaagttaagtttcttctttttgaaataactagttttcttctaagtaattaatatttgtgatcaagttttgattttgttatctgttttgtattgattgctttgagggtttttgttatacatgatacctaagtttgaatattggcactctttttttcgtctcaagtcaacttccgaatttggcagttagcaattttaatggctagtgatcttttaatgctattgcagttgcgattttcaactgtattcttttgtttattgctggaattttttcatgggtttttcagtgcatcgattatacaaagagaatttactttgttatgaattttttattgttcatcggagtttttgatccatgaagatccgattcaataagtctaagattctgtttgactcttccttttcttacttcttgataatatttcatgttaaatctcggggtttctgttttttactttttcagaaacagttttagttattatatattttggttttgtaatttagctgccatatttctttccctgaagtactgattcattattggtgaggctttatttatttcatcttaattacaaatctcttttgtcaaaagtacatatgttatttgggtgtttctccatgatgaaaatttagttatgttagctgtgtgatccgtacttgtttgttgtttatgtccttaatgatttatatctgtgcccttgtgtatcttttgagttccccctaatgattctaaattttggcttcagtgtcgcgtttcacctcaaattattgatttcatactgggaggactggactttattctgttccaaacatacaatttgttccatcagcaagaaaaagcaatcaatctcttcttctgaagtcacttaagttcctatgccatggctgccacggggactacatcggctaaaccacagagaatccacggtttgatcactactttggtttcagcttttcttgaatggttgctgatcatatttctgttcattgatgctgtgttttcgtatgtaattacaaagtttgcttgtggctgcaaattgcaaacaccttgtctgatctgctcgagactcgatcatgttttgggcaaagaaaaaaggggatattattgggacttgatgtgcaattgtcataagtcagagatttcttccttagtactttgccatgctcataataagcttgtagatgtacataaaatgtgtgaaagttgtctattctcatttgcaactattaacaaatcaaatgccgaaacatatagactgttggtgggaaaattgggtgaagatataaactctgattttgatcaggaccctttactcagggatcatacgatcagtagttcaagcacaaggagttgtgcttgttgcaatcagccatgggctccaagagctaatgctcaggtgttgtatcagtcaaagctagttggtttggaggctgctgagcttgagaggtctctttctggtgccactggaggtaaccaggatggcgtggaggagacatcttttgtgtcaataacagctagtcattctagaaatgacgggatagaccctttacctcatattcaatacacagagctcaatgtagcttctgatactgaatctgaaggcattgaagagaatcttaatgtcataaaggagagatcaattgtgtcaatcacagatagtcattctagaaatggtcaggttaaccctttatctcacatcagatatacagagctgaaggtatcatcagatactgagtctgaatctccattttctactgatgaaggtgtgagtgctcttattcgtggagaaaatgagtctaaggaagaggtctttgttcgatgcgtagagcctcgtgctgtcactctggatgctgatttagcctttgatgaaggtgtgcattctctgatccccgaagcaaatgagtacaaggaagagctctctgctcaatgtattgaacctcgtgttgtcactctagatgctgatttggcctttgatgaaggtgtgagttctctgatccccaaaacaaatgagtacaaggaagagttctctgctcaatgtgttgagccttgtgttgtcactcaagatactgatttggcctttgatgaaggtgtgagttctctgatcactgaagcaaatgagtacaaggaagagttctctgttcaatgtattgagccctgcattgtcactgtagatgctgatgtggcctccgataaactcatagatccagcatctgggccaaaaccttcaattttgatctcagaggtacaagcagacgctgttgagccttttgattacgaatctctagattctaccgttgctgctgggcatggattagaacaacttaactggcaacaagatgtagagaaggaaaatatccctgcacaaaccgaaacaatccctgttttattatcaaaaagctgctgtaagtccagtgttttttttctcttttaagcatgttttttatttgttctattagttggtatgttttgtgacatactcatccaatccttgctgcatatgggtcaatacttgaaagataatgccttttggtgtgtgttgtgtggaacttgtgaacattattttttgtattgttctccacagaaacttctgcatagaagacttcattattctctctagtcgatttactttactgtcatttctcatgtttgtgcttaattgcctcagtggataacaggagtggtgaagttgaggaggcatctgtgaccagaggtggtgaggtctataaggaagtagctacaatgaacacaacaaccgagacaggtatagaaagaaaccctattgctagtgacaatggacagcaagcaccaaatttattggatcttggtgatgcttataagttagctgttggaaatagaggaaaacaactctctggtttacttgcagagcaatggatagggaaggatgcttcaaaagttagtgaggatttgaaatttttactatcacacttatcagtcactcgaggcactgagcaacccatgaatgaaattagtcctaaattttctttaaatagtgatgatattaagactttggattcttccagttctattgggatgcatatacttcaaaagaggatctcacttgaaagaaatgaatctggattgtctattgatggaagcattgtgagtgaaattgagggtgagagtgtggcagaacggctcaaacgacaggttgagcatgataagaaacttatgactgctttgtataaggagctggaggaagaaagaagtgcttctgcaatcgccacaaatcaagccatggccatgatcacaaggttgcaggaagagaaggcagcactccatatggaagccctccaataccttcgaatgatggaagagcaagctgagtatgatgacgatgaacttcagaagtcaaatgatcttcttgctgagaaggagaaagagatacaagatctagaagcagagcttgagttatataggaagaagtttccaagtgaacgagtgataggttctccttcagagtcaagctgtgatgtgataacagatattgcaattgataattcaaaatatagctgcattggtgataaaccttgtatatctgacaaagttgaagattcaggcatttcttttgagaatgcagatggagggaatttgaattcttcattgctagagtttgaagatgaaaagttatatatcttggactgtttaaagaagttggagaagacacttcatctgctccccaatggtgaggatgatatctcagaagagctaagttgcaaggatcaggaaaatagtacagcagaaacgaatacgttgtcaactcaacacaatgaatcagtatccgggcaggatttgcatactgaaggaaactcttcctcacttgagaaacatgagactcatggaatagaaactgatgaagtttgttacagcagggaaagccctacagctatcccgagccacagatcccacttctcttggaactattgtttctgatctaaacaagagattagaagcacttgagacagaccggaagtttcttgagcacacagttaactcacttagaaatggggacaagggtgttcagttcattcatgagatagcttctcacttgcgagaactacgaaacattgcactgaaaaatgatcaaaccgtgtcttgagccgtatgcaactacataacaatgtgagttcttcaacatttattctattcatgtcaccgtatcatggattatgacttgtacatttttgctttagaaaactagttgcagttgttgaaccttgatttagtagagttttcagtttcagaataaaccttaacatatttttgtagaaaaattgtcatgtgtttcttgtgtcattgtttaatgtacttgtcttcttactcttcaggattgcaagttgagaagatcattatatttcccagaccatacaacagtttgaaatatgtatcttattttggcttgaattgtacaggaaagaatggtgacgacaagcttactataaaaggaaaaaaaaaaaaaatttaaaagaattttctttgttcccctccttttttggggtctttgttacagcttacaagttagaacattttgtattttttcataattacaatagagagagttggtgttggtgaggatttttttaggagttggagtttgcttatttaatgtattttttttatataaactttttcagctttgtgacgtgcacgagtgatttgattgtaatttaggagagaaaaaaagagtgattcaattgtaagaaagtgaataattgttgtgtaaaaaaatatttatttgaattggtaaaaacagagtgaagttcaatttaccaaaaaaaataaataaaaagagtgcaagtatttcttttcatccattgattgatatttactatggagagaatttcaatttgtattctgttaagtttgcctacggtatgttgcagctgccagtaatttgtcacatgtttggaaccaaatttggcaactcaaggttccttctaaagttctgaatcttttgtggcgagctactgctgcttgtcttcctacaaatcatatttgtgggtgaagaaagtggagctgagtgtgctttgcccgacgtgcaagattggaattgaaactacaatgcactgcttagctgtcctcttgcgaatggtcgttgggagcaactggagcagctgagttttttggtgggtaatgagagaatttttttggactgggtattgagaacttggtcctttttagacaatacccgtgcgactatggtaactacgtagcaagatcactccaataaataacagagatgctttgaaaagagatagctactagctaagtctaatcctaatatgagtacacgtgtttagaaaaaaccgaagactctaggtaaatctcttttagagcattttaatattaaaaatttagacatgtttgttgagctcaacatattaaaagataaaatattaagatgctatactattaagaaggatgaatgttattttagaaatttaaatgaatgctatacagtagtattgatgctatttatttttttaataaaaagttaaaactaaaaagtaggatatatattaaataataatgtgtgagattataattataatatttttgaagagtgttatattagtggagtatttttaaaagtaagagtgtaacaaataatatagaaataaataaaataaaatattatatttttgtatgatgtagaaaattttaatattcttaaagaatactaccatttagggttgtgcagaaatgatctaatccaataacaaaccgaccgatccaatgtcatccgatcgccaaaaattaaatatctaatcataattaaattggatcagataatatttttgaaaatctaatattagatcggtcgtttttttagatgacatgtaaatcaaataaatctaaacgaccgaccgaatccaataatcatctaatattaaaatagaaaatatatattataaatttataatattaaatatattatattttaaaaaccaaaataaagaaaaaaaaaacaaaaaataaagggaaacattaccatcacacgcatcagacccctctctatattacatttattttaggctaattaataatttttctccctgaactttgacnnnnnnnaaatcatgccccctgaacttttttagc

SEQ ID NO: 18515 - DNA, 7884 bp, Cannabis sativa
  modified_base (7652)..(7652): a, c, t, g, unknown or other
ctcctgatgagctccctcagcccagccatcactggatttcctcttcttctccttcataggctggggaatgaaatcctttgggtagagcccgtacgccacaaagttgtcctctgagatcaacaaagtgatattccgagcatcaccaagcagctgagtgattctttgagctctatccctgaaagctagtgtgaagggtggacgttaatatatagggatctgctggaactgagtaaaggtggtgcccatgccttccaccatgtaatactcatcaacaaaattctcgattttgctcacggccttgtccccggtgcctgtcaaccacttgaagtctggctgggaaaaataaaagtatcccgacctgccctacttgggtgtagacttcaagtcaaaaaactagctaacctcgtgtggggatggcttaccccacttctaggtggcgtagagaacgaacagggcagagaaatacttgatgcccttgggattgagtggggccggacagagacgagagaagtctaccaccttcctaaagtacggttgcaaaggcagtaatgccccttgtttggaatgagcacccactaggcacacatccccttcttcggttttgtgactcgattgtttgaggcagggacataacaattcagctcgcccagatagcggactggtccagatcccttaggcgtgtctaagtgaccttagacagatagctacccacccggcacccaaggcaccttgccttttgtgagcaactgcagcagtaagctcctaagtgacatagtccactctttcaaccaggacatcgccgtctgcgtctactggctccccagcctcattgtatcccccaaaatttggaggtgcagcctcctcctcttcttccgccttggaaggactgcaaggacggacatcgccatgttcctctatctcttggagtttagcgtccccttcatgatccctctcctcctggacgcgttgatcctattcgccgctgggtaaggtagcgtgctaggccacgtgtgggtcagacgcgttgactttatgcattgtttgtttagtttgagccatcatcctgtggctagacgggaatattgagttaagatgtccattgcttgaagagggcagattgggacaaagacgagggtaatcctcgtacaagagctgaagcaaatcctagttaattcggtttttgcttcccaaaaactcaccagggttcatctacaaaagacaacacgcgagatgagtgtttggtcgggatatcgaacaataaacaggcaaatatgctgaacaggagtactcaacagattaaagaatgaaaatattcgacaataagtcaaaactcagaagtttgaaattttcgagagttagggaaaaaatttcacaaagctttgaataagcaagaagaaagacggacattgtgtagtgaaaaggcaagcatcatgaatcgtgaattcgcataaatcattgccaagaaaaatcgcataatttttgaagctagggttttctacctatcttctacagcaaggttaagattgcattcagaaacaaaatatgcaatgtaaaaggagaaggaatcggaaacttactcactgatcgacgtctggattcaatctaagcgaagcttctcggatggttcttgtgaaaatttcacggcagagtcgaagcgaaaacctcgctttttgctctgaacttgcttaatggagaagttagagaaaatgaatttgtgaacaatgctcagtcatatttataggcagaaaaacaaaaaggcgtaaacatttcaaatgcctcagatgcctcggttccccccaaaagcaaatattggaaatcaaacataattaagtgtaaccgtcaaacgtggtgagagaaaatcggatttcgaagaattaattgtgtcaaagcatttattagccaaaaaccaaagagaagcctagtcagcctcatatcgaattacgaacagacgcacctgacacgtgtcacccatacaaacacaaagacaactcggatgaagtctacacgcaacttcagaagtcccgtacagacttgggggcaaattttatcccaattttggcactctgacatggaatcacgcgatggtgacacgtggaatcaactctatgtacctgctcgcaagaaatatgtcaaacagggcaccacatacactcgctcggacaaagtcctctaaaccgggcagtgagaaattcgtgcaacacgccaacacttagcaaattcagctttcgcatcgtgagtcatcaaagaaatccatataactttgggatcgaattatagagatatggcaagttgtccaaatcccacgattagtgtactctgtatttactatgcaatctgtatacttatctcaattgtatccaaaagggaaatactttcctcctaagcttatattcactgggcaaagggtcgaaacatttgtctaagaattcatattcagagatattattgtaagagctctaagaaaaggaaccattctccttgttcttaagtcaatacaaataacaaggattaggctattaccgaactgcttggggctgaacctctataaaatttatgtgtctttactctctttattatattacattcatattaaactacttttcgctcacaaattagactcactgtcattggctaaaagcgaggtcaacattcccaatctatacagtaatgtgcagggggtcattgtgcgggaaactcacctaagcagcttcttcttcggtgaaggagattatgggctctaggcttttgttgtttaaagattaaagattcagtcttcgatagctaggatatcacttttggcctcgtgacgaaatgtacgcacatagcggtccctagcatttttactttcgcctgcaatgtagagtttaccaataatgacccctagatgtcctaccacagatggtggcattggatatccattttgggcaccttgtgcctgagtttggttgtcttgcacataatgacacaggttgggatttatgccttatgaggtattcaatctcccttttcaaattctgacactcataagtgtcatggccaaagttggtgtgatgctggcagaactttgacatgtcctttttgctcatctcccttttaatagggaagagtatttggtatacaattgttccctgagttgccatgaagatggccttaggtttctctgtgaggaggctgaagcaagtgtacttttcatccttattcttctgtggtgtgggagaagtgttaaacttccccttattgccacttctcctcctagagttgttggtgtcacgcttgtttctagtgtttttgccactagatgtctgggaaaagttattggtgtctgcctgtgcacctggtggatcatgagactggtggatgcctcgtgactgtctattgctgacatgccccgcctgggcttgtcgtatggtttcttcaagtttgatcaagtctccagctctatcaaggaactccttcatgttattgatagagatccttcagatatctttccaaaagtcactcaatgggagaaggccacctcgtatggccatatatcggccttcttctgtaaggcatttgactttggtagcctcagccataaacatctggatgtaattcttcaaaggttccccttgtcgttgtttaactttgataaggtcttctagatgcgatggtacaagtcttaaggacaagaattatgtatacaattgtagtgaaaatttggcccaagagttgaaccttcctggggtaagtttgaagtaccattgttggactatctcagataacatggctgggaatatgctggatcgcacatcaacaataaccttttggagatctcaaagtattttatgtgagccagtggatcttctcgcccggtatacatcttccatattgacattttgaacttaggtaagggcaaggaatttatgtatgccgagaatggtgatcccctcaactaataaagttcaaggtttgaaggcttcaaaccagctatgccttggattatgtccttgagttggtcgaactgtggttgcatagaaggatcttttgttgtggggacttgactgactgacccttcttgggtaagcaatagattccggagagatagggctagccggctataccctatgtgagggtatggtgaaggtcggccagacttctgctgaattgtaaaccttggctggccattcttatgtacgggagctcgccttggctagccaggcctagtcctagctgttgtggttggtcagtcagacctacattgggcagggtctggccgcccattatgcctccatggtcggccagaccaacaaaaggcagggtctagccatctacaatacttccatggttgactagacctgaaaagggaagggtctggcctcacgtgatacttatattgttgtctaaaccatcaaagggtagggtctggccgcacgtgactctgtgaccgactgatgttggttgtgtgttgacaagggtggatcacaccaatttctagagtttggtggatctagatgtctcaagtgatcaatttgacttcttgaattgctattttaggtgtttccacccactctcgatccttgttaggtgaagattgtcctctgggctcctcgctcccattagggaggaagtgctgtgctctggtcggccaagggtactattgttgatggttggccagctattggttgtacaattggtggtgtcgctcagcaagagatccctggccaaccccccatgtcgttggctgctacgatttggctatttttacctttagaccttcgaggtaaggtttgtcctccctccgccaagggaagatctatcctagttcctcaagaactaggttgatcagcatgtgatagaccctccctaatctatcaacaagtcttccttgaagtggatctttgatgagatcctggcctctaattgattctttggttgaaccatcttatcaaatcgctagcctctcagttgtagcaatctaactctgctttgtgagattgaaggatgtactcctagttatccatccatcttaggaatttgcatctttactgagcgaaaacaatgcaatcagtagcgcgtggttctttagttaggcatgcatggcttacacttctttgagtctggctaacttgagatcttctctccaatccagatggggctcgccaactactgggcctgtctctccagcgtagaactagagatgaggtccagttgttattctaggggttgtatcagtttagctaactgtagtggccagacttgtggcgcctgaagtgacgataggattcaccagatctgtagagtttatggggattttagttgtgactggaacttgagtacctagatctgcagtatgtggatcttaagggagacccgaagatgcagatggtgccatagaggttcttcttgtgttaaccatggaagttgattccttgaccaatttcaaacagcagcccaacaaaagcttaaaagctttcattcaaaggatgatggaagtggccgcaaatacaaaggtcagcgacaatttgaagttgatggctctccaattaagattgcttgtggcttctttattgtggggagagatgcaaaggaaaagagctgaaacaccaagtgagtttatgtccaaagcaaaggacataattagccttgaggatgcctacatccaggcatttgggtccttccggtaccaacgcctacagtagacgctccaagttttacctctcagactcctgcttcatctttttctctccccggatctcagttctctccaaccatttatggatctaccacgtccgacctcgtcccaacatagaccgatttctctgggtacgggatggcaaaaactaggtgtagtgcaggcccttgacagtctaaatctgaggtccaagactctagtgcgagggttcgtggggaaagaggggagaaaagagccacaatcaaaatgattcgataaaaaaacaaaggaaagtttacggtccaaagtacaccgagtatacaagttgatagacacttgagagaatgtttacaaagccacatgcaacatggtccattactgaaagcccgcgcacatgtcaaacggtgggaggaacaggcgtgatcaaagcaaacaatgtgaatatcacagggaaatgggccacactacgaatgagtgtgagtacttgaacgagatcgagatgttagtctgagctgaacacttacggaaatgggttcgtatccaaattatttatcccgaacaaggggtagtctagggacacaccgtaaggccctgactctcaggaatgccacgtgtgtgctttacaatcttattatcactaatctattaatttacgggaaagtgtggtttaattaaaacctttagttaaatttaaaataaaactttcattcaaaattctatcataatatggggatcccctgctaataaaattctattacaattaattataaaactgttattccaaaagtaggttacatttccaatcatagaaaaggattgatcctacttctcaaaagccaagactccacggctgatatgtacacagatggaagacctctgaatcgtggctgagcacaacttttaacctttttacctgcaccatgaagcactcgtgagtcacaatgactcagcaagaaaagcgattaatcaaaagcaataaaaataaaagtattcttatcacaacataacatacatacccgtgattcattatcattcaacctgcatatgtagtataacgactatacgaacccgtatattacccaatataaaaatatcatagcatcttgccgcaaatagctttatcattaaactaatcaaatattcactcaatacacagtcacatattttcagtgcctcgtaaagaactctaatcttacatccctgtaaacacgtattcttacatcccgtgagtcacagagactctgcaagaaaagagactaatttcataagcaatataaaattcattcattcacattataacaaagatgtatccgattacaactcatcgcataataacatgcttaattcattccacaacatcgtaatctcacaatcatggtacttcataaagtacccttaccactcgttcaccacgagctacatatgtcacttcgttgcccgatacagcaaacgataagtaagaaacctatccgcggtttcaagaataattactcataacggtaatgaccgtttccaatcctcaccactcgttatccacgagctgcgtatgtgactattgttgcccgataaagcgaacgataagtaagaaacctaactgcagtttcaacgagtaattactcataacggtaatgaccgtttctaaccttgccactcattatccacaagctgcatatgtcactatcgttgcccaataaagtaaatgataagtaagaaacttatccgaggtttcaagaatgattgctcataatggtaatgaccgtatcttaattcattcacaacaacggtgataactgtgttcttacctcaatcataaacaattaacaaacaacaataatcgtttctcatcattacctcgattaccatcgaggcacaacatatacatatcgttaacctcgattaagattaagtcacaataaacacataccgggatcttgatcataatcgagactgtaaaaatcataacattaccatatatggtgcttaatacttttcttacctnaagtccaaagtcaagtatgtgggccgacctgagtggaatgatgctcgaccatttcgggtcctagtcataacaaaggtaaatcaataagtgtctattccaaaacactgtctaaaccccacataaaataacctaggcttttaaaccgaaacttatggtgaaaacaccctaaattaaaatacatattttggctctaatatatgtctcataatttagagctcttcataagcttcga

SEQ ID NO: 18516 - DNA, 9823 bp, Cannabis sativa
accatttactgatctgatttgaaagttgaagcatgctcctatgctctgttgttgttgttgatgtatagttttagttttttttctctaattatcagttatgtttcaggttgacgctaagaaggccttatcaagagaagagcaacaaacgtctgcacgatctggaaatcctaatcctggtagaaatgctggtggtggcggtggtggaaatatgaggaccaagaagatttttgttggagggttacctcctactttatctgaagagggatttcgtgaatattttgagtcctttggacatgtaactgatgtagtagttatgtatgatcaaaatacaggacgaccaagaggttttggatttatttcttttgattctgaagatgcagttgatagggttttgcataagacatttcatgatttaaatggtaagcaagtagaagtgaagcgagctcttcctaaagatgccaatcctagtggaggtggccgttccatgggcggaggtggcggcggcggctatcaaggatatggtgcatctggtggcaatcaaaattcatatgatggacgtatggattccagcagatttattcaacctcagaatactgggggtgcttttcctccttatggctcttcagggtatggtgcgcctagctatggttatggtccttcaaataatggaatgggctatgggggttatggaaattatgctagtgcaaatactggctatactagcccagctagtgctgcctatgggaatcctaatgccgcaaatcctgcttatggaagtggtccaccaggtggccgaagttcatggagcggacagaatcctgctggatatggtgctatgggctatggtaatactgctccttggggcgttacaggcagtggaactggtgcagggaatggttctgcacctgcaggtcaatcaccaagtgctgctggatatgggactcaaggttatggctacagtgggtatggtggcagtgacgggtcctatgggaattctgctgggtacggtgctgttggagggcgttctgggagtggtccaaacagcggtagtggtgatctccaaggaagtggtggtggttacctaggaggtggctatagtgatgcaaatggaaatgcggcatggaggagtgatccatcacaagcatctggaaattatggagctccacagaccaatggtcaatctggttatgctggtgctggttatggcagcggtcagccccgacaagctcaacaacagtaattttaatggttggaagtttttattgaatcttcattaatggatcagcagcgtgaggtcgtggtttctcatggccagctgcagcagcctcaatttggatgtcaatactctttgggactggttggattgcttgaatcctagtagattgcagtatctattttgctagtctataataaatttatagttttagagcatcgtagatgctcctcttatttagtatttcctgctgagtgtagtttcaatttggcgtgcttacaattgtctactagtatttcttcttgctcctagtgtttaagctaaagtagcttatataactttatttatgtttgcttaattacatatgagtattttgctgctgaaatcttgctactaattacttttgttgtctgttcaaaatcttagaattatttaggcattgagatattcgatagttatgcctgttttcatgtgggagtaggaaagcagaattgtagtgagggtttttacctgtagcaatggagcttatcggctgatcacttcgtagtaggtagctatagctatagcgatagcaatagtggtaatggtagttgacactttgtcgatggcataatcattttccccctgtatttgcccttgtgttgtacaggaggagaggtgcacgggttccaaagtgaatgaagtgtccactcatggctgaacatgagcttcgcagtgggtgcatcttcactggggttgtgttcagaatggatggaatattgaggagtttgttcagttgaaattatgctttttcatgagacaattcattccttcagccaggccaacgttgtgaaactttgcatattcctcggcattccaagtcactaattttcttatcacgtgcttttctgtttgcccgatggaatttgcgaggacaacagcctacggtatgttgagtaaagcaaacagcaaaatgctgcatatttctagaatttgattgtataagacttgtctttagttcctacctagagctatccttggatatggatctaaatgtttagactatcagaaaggtgttacaaacacttgtcataaaattttggaatgaagtagtagatcttctgatatactctattgttgtaggctaaaatgaattctgcttcttggctctcttgctacgccttatctttttcgactgccattattagtagtagtgctagttttagttaaatcttcttgtgaagtgaaagacataactgcagtttttcgggttgattaggtgaaatcaagaaattatattcagaagttgatgaaagaaagattgttgttctgataggattaactgtttaatcttgatttcattattatatcatgttatgtcttctcaactccatggattagtttctcatgtcatataagtttagttggtgagaagaagtagacttggtggtgggaatggcatcatagccataggtatgcaaattgggttagaatattttgctgatttggggcttggaataatgtttagttctcacttgtttattcagattgacaaatacaatattattaagctcaatctttacaactttgctatgtgatatgtagttttgacaagtttgatactttgattgggtctatttatactttgaaaatatgatattcatctctctttcctttttcctcattctccaaatcctttcacacacctatgcatggctctatcctttacatggatgatgctacttatcatatttggagtgttaaaagtgttgtgtgcatatacatattttagtcaattttctaaattttaatagtggtgtataaagtggtttaattttaacaaatgttaaaatttttgtcaaatttagtacaaaatatagtaaggtttaaattttacatctcagtacatattattttttatttactcttttctcactcactcattacatgtaataacatatttaaaaagatttatattcaataaaaatgtaatgttgttgatgatttttttacatggttcaattttatccttaacgtattggaacactattataaaatttagaccaaacataacattgaaatatattttttttagagccaaatttacctcaaattatggtattacaattcacaagcaagttccaaccatatcactataatttttactttttattaatacattataaatattaaaaagatgagacaagaagagttctaagatcccaattagttatcaataacaggtcttcattactttactatactgttatgtggtcaaaattaaggcatattaatccttctgtgttgaatattgtaatatttggttccattcattttgtttgaaaatttaagataacatgcaagacaaaatctttctaacatttaccatcaaataaaacaatgtgtctctaaaaaatgaggttcatataaagaatgaagaagcttttgggtaaaaaaacaaaacaaaatgaaagaaagagaagaatacaattgcaaaatcataatcaattatattcatctccatgtgcagaaggaaatcctttatatggattgctaaatgcagctacattgcctggacgtgaaaacacaatctgcaatcaaaaaataaaaaaacaaaaactcatcaaccagaacaagtagtactctgaaggttcaaatctcattgaaaaaataaagaattcaaaaaatgattccgaaatagaaaaacaaaaatggtacagatttccgaaatttcggtgtaggatgagatttgtacctgataatttcctagagtgtgagtcttgaaacctgctgcacaataatcaaaatagtactcccatgtcctaataaacttttcatcgaatccaagtgccatgatttcactgtgaaaattcactcaaattaatgtcttaacaccaaagtcaaattagattgaacttaaaatacatactcattactcatttactaacctttgcttatccaagaaacttttcctccagtacctcagtgtttggtagtaatgaattccaatattttcaatgtgctccacactggtgttccatttataataattagtgataagaattaacaaaataattgtgtcatgtaatctttaccagagtctagatgcagcagccatggcagttgttactctacttaatgaaggtaaacatccaccaggaaaaatatactccttgataaagtctgaacttcttctgtactcatcgtatcgttcatccggtattgatataaactgaaaacaaaaattgagaagagagcagattacaacaatgcttataattacctcaaaccattagaactataagattcattacctgcagaacaaggagtccattctctgctaatacagactcacaacaaccaaaaaagtcttccataaactcatgaccaacactttctaacatctcactacaaaaatacaacatttcaactcattaaactaaatcaaattcagaaagttattgtctgatcaaatgttgtttgacatgttacaataactcaccaagatatgattctgtcacatttatagccagcaggtaattgtcgatagtcacatagcagaaatttgatgttttcctgttagaaagtcattgttatatttctccctaaaaaaaatatcacttggataaaagttatataccaccaaccaatcccatacttaatcgatgtgggatcctaacaaaacatgaagtattcagataacaagatcaaagatcaaggttctgcagtaccttagatatcttcaatatataatgtgtgctataatatggaaatttgtttgttatatttagtacctgaagaccagcatctttcactttcttttgtgctaatttcagttgctcttctgatagagtgatgccggtgtacttgcacccggttcttttaacaacttcgatcgccaagcttccccaaccacacccaatttcaagaacttcatgattcttaccaattttagcctggaggaggataaaagagaaaagaatttcttacagagacgaaaatcgaaatgtaggcaaaatttgtatagaaagacactaaccttttcaattagaagagagatttttctcagttgtgcaaccttcaaatcttcatctattgactaaaataattcataatagcaattagtacaagtttaacttccagcttttactatcaaatcattaaggaattgtagttcttaccttaaatacagcagaggagtatgtcattgtctcatccaagaacagtgcaaacagttcattactctaaaaatacaccaagagacaaaaatagttagcttcttctagaatttcacattaatcattgagtttgttatcttattgagaggatcataaactctatttcagaaacatggtaccagatcataatggcgagagatgtttcttcgagcctgtgtaagagtattttgcctcgaaacatgctgaaagaaatactttgctgaggctatactagctgtgaacaacaatggagtccaccatccccttaagctaacaacaagacaattctagatgagttttgggaggtaataaaatagtatcaaacttatgctaataaatgtattcttataaaactatatttaccctttattgtttagtttggaggctgaagagtttgaatctctactagcaataagaatctacaaaaccaaaagttagacaagaagttattgaacctaaaaagaaccaataacatgttttgttaattttgcttaaaactcccatacgattcttatttcttaccaagaagagatttagtaaaccttcatctttgtcaacaaaagtaaaatctccattgatataagcatcagcaagacctaaatcagcttgcgtcataacctgacaaataaaaaatgtaggcatttatagtaacaaaaaattgtgtcataaatactcaaagttttgattttgtaaccggtataaacccaataattttttgagcgacataagtactaaatgttagtaaagctacaaagtctattagtgtgttaaacacaaattctaaatcatcgggtctaagttacttcaaaattttctttcaatgaactcaaaaactaaatctggttacaaatttaagacactaataaagttcgtactgataaaacttaaaaaaaattacagttttacaaatattgagtatttatactgttaaaaaaatcattgagtctatggtaccatattttatcagtgtgggaaaaaaaatatacataccttccagtaaaattgtgggctgtgaactctgatagttgttttctgagaacattttttagtgtttccttcaaaagtgaacattgtgcccccttcctctaatatacttttacacaaccaagtatccatacataaattatctcacatgaaacaaaatgtacacatagtataaaatcaaacagacttttctttagaaaaatttcaacttcagaattgcaattacttacattaaacatcctgcagagatgtactgtccaagaaatcgagtaacaaaaaggcgagcccctctttcggttatagatggcaccatgtgatttggattagtatgaaggtcacaattttttccaagtaaactgtatgcagcagccattccagcctgcaaagaaaacataattattcacaatttttttcataataaacattcttctctgtatttagtaagtacctttaatccatcctcatgaaatccataacctgaaaaagaaaaaaacatatagtaaaaatactcacatagccaaaatttataacacaagtggaaatcttacttaccctgatatgcaccacaaaaccaaattcctctttttccttgaattcgatgaagctcgagtgaagctttcgatgcagcaacagatgggactggatgtccagttgaaaacttaagcagggtatgtttaggttgttgatctggattgagagttacaagaaaagggagacttgtttcaccaagattctgcatattcaatgattcaaaactttagaactcaaatcctttttcattgactaagatttttaaatttgatgtgtgtactcacctgaagaacattaagccagtatgtcaaacatactttcttgtctctacttcctaagaaattccatgcactccatgctgctgagtttcggggcattaaagttttgtcacgatgaaggtaaatatcactgccagtagagaacagagtttccattcatttcactaaatataaagccaaattcatagtgactgatcagattcatatttgggtgtttttgagatgagaaaatacctataaacatattggaaagcgccaagtactctgcgttcatcaggagtagcttgatctccaagtaatctcatagcatcaggagcatgaacagccaatatgcacttattatacacttctttagaaccatcttcagagtgaactatgcaacctgtttataattaacacttttaagataattagaaagtgtttatgttaaatgtgattagtcataattagttatgagtttttatattagttttgagtactaaccctcatcagtggttgaaaccatttgtacctttgaacatgtttttatttgacatcctttactctctagcacctctcttacctgtttttcatttttattttcttcaaaattaatcataataaataaataaacaccattaattattttgtttaataaaaaagttagtagttacttactttcttcacataacaatgtgaacgtcctttgacagtaagccattgaggacgaccaaatagcttcatttgccaaaaacaacaacaaacataatgtcaaaacaaaaacaaatataatataggaaattcttgtagtggaccccctaaaagttccttttggtagacttactatctgttttgacatttaagagagttttttagtctaattttttttctatgattgcacacgttgtagctatttaagattatttgtaaatattcaaaaaatttcgaataatttacaataccgaatataaaatttaaattaaaccgttatttactacgcatataagaaaaatagtcgcgcgtgcaacaaaatctgtaaattttattttcagtattgtatattactcgaaactttttaaaaatttacaggtggtcttaaatagttacaacgcatgcgatcatgagaaaaaattagacttaaaaaactctcctaaatgcaaaaacatataaaaaatttactaaaacaccctttttagagaaagtaggcaaacttatcatataatatatacatgtatttatatatgaaaattttatagttggggagatattttgtctcatcaataactcaattgtcataaattagtattgacaacaaaatgatagtaagttgatgaggtgcttactataactataatgtatcatataaaaataaaaattagcttctaatttctccacatgacgaaaatccctatcagtagaaacaaaatgattgctaagctccccattataatatatatatatatagataaataatatttatacataaataaagtttattattatatgtgtaaatatacctgaaggagatagtgattgcgacaaaaggaaagaacagaaaaggcagagaaactcataacaccttctgaagggcaagaccagattgaaccacatattggaatctatattaatattataaatgttaataccaattaaattagtaatacatatacataaatgcacaaatacatatgacttattagaaagagttaaatgatatatgaatctcactagataagcttttagaaacaagtcggagtaaccatgagacttggtgaactcttctaatgtttcatttcgatcaatgtccggattatgctcaagcatatcaagatagctaattatataaccatgaaaaagaaaacataaacataatataaatatattaaaaaaaataatggaaaaagaaaagatgagaatggaatggaatggaacctgataacatcatccttaaacttgagaatttctctaatcatttggtaaaagtaaggattaaagaggttggttttttgagcaaataaacttgagaagccatttctactaccccactcacacccttttcctttctctaagctcactgagaatgacatatctgagatttccatctcaattccaagcttctcaaaaaattccatcatgtttggatatgttacctgtccaattattacatcatcagtattaattattatcattaaaaatgtaaatttttattttattaaaatacacattttacttaaattattttagccaactcaatagtattcaacacatgtttcaattttataaatcaatttttttttattcctaacaatgattatacatgacaacacaaaacaaatggattttttttattactccttatttattttatttgcataccacacaacaagtttgtcctatatttgatgtgtgctttaattgtttgtttgattctattattatatttataaattgggtacttctatacaaatcattggagaaaaaaaaagaacatttgtaatgatatttttattaaaccatttgattataatcttattttgtttttgaagatatgaaaaattaacaattcaaaaatcctattataatgattaattctaaattattatgagctattcaaaatcattcccttcacttcaagaagtcaa

SEQ ID NO: 18517 - DNA, 3765 bp, Cannabis sativa
acacatgataggaatataaggatgagttttctgattacagggcttataataatatttgcatgtcattgttttaaccgaggaatatatttaattatacagctcaaacatctcttaatcagattttaaaataaaacttggtcgaattttgtacaataaataacaaaaaaagtcaaaactcaactcgggtctccaaaaaaaagagacaacctccgtcgatcattcttgtttattatagtatcaatttggtctttaaaagacaaaatcagcctttggagctagtagctatatttttattgttattattttaaaaccgtttcataaaagaaaaaatatcttttattaaaaataaaaatatgcgaaagagactttattatataattaatatcatttgtactgatccataaatgataaaacattaagacgaccccaataaataaatttggtgagagaaagcatagcattttcagttactcatcatcatcaactgaaatgttacaaaaagcctaagttatataatatgatgattttgtatgattaaattttggaactttgtgattatgaagacttttttttggttgagctattctaaaatgtggaaaagatttgtaattattctttagggtcgctttcgttttgtctcagtcccttggatttgggaccccacaaagccgtgtatacctctgtggagctttctcctatgatctcattgagatgtttcaagaatcaatattggctgcaaattgggaaaggcttaatctttgaacaagtaaacgactttggagaacaaggtaagagatttatgggaattcttccatttggggtctctgctttgcttttcttaccatttttttttacaagggtgtttgccacatttggacactgaagatttggactgttcagagccagatgattgatggaaaaaatttagatttatgtttttacttttgagtttcttgatctgggttttgcttgaaaacggttatggtgatccggatttggctgttggaatgatgccgtgatcagctcaaaacgagctaatagtgaaagaagttagttatgttcaaaagttgttacagtgatttgagtatttccttctaaggaaacccttctttgagttttctcccaaaagagtactttttctggcccagttaagtttttcctttttccttttctttgtttaagtttgatggattgaattttcacattttgagatattagaatctgggttttgcataaaattgcaaacttgacattgggatttgcccaaagttttggtttttgtattgacattatgagggaggaaggttttaatgaaattgaatgaaagcttgatgtgaaatggtggtgagtgagtgagtgagtgatccattttttattttgattttggatccatggctgccatatctccctctcaaaattcacctccttcagccgtgccaccggctcctagcaccacttcaactccaccacctcagatttcttcatctcctcctccaactcctcttacatctccaccactttctcagcccaacgcaaatccaccagatacctcaaactctactgctacttctccaccacctcagtcccctcctcctccagccacacaattaacacctccatcacaaccactcccattggcaccacaagcagcatctccaccaccttcatctaatgccccacctccctcaacttctggttcttcaccttcaccaccaccaccaacttcaaatccaccagtaagttcacctccaccacctcccacaagctctagtccaccagtaacctcacctccacctgatagttcacctccaccaccatcatccaacccaccagtgaattcacctcctccatcaacgtcaaaaccacctgaaacttcacctacaccaccatcagcaaacccacccaaaacctcaccccctccaccatcatcaactaagccacctgagagttcaccctcacctccagcatctttgccaccccagaattcatctccaccaccgccaccgccatcaaaatctgttcctccaaaaagttctccaccaccagcatcagtttcccctgaaaaagcaccccctcctccggcatcagtttcccccgaaaaaccaccttctccaccttcatcagtacctccaaggaatgcacccccaccttctcagctaactccagccccacctagctctgatcaaacaccacctcctgagaattctcctccagggacatcacctcctccctcctcatctatctctcctccaccaccttctcaagttccaatttctccatcagataatcgtccttcaaacaattccggccctagtgcatcagatagagtaaagtctaatgacaatggagggattagtactggaggtgctgctgcgatcgctgtaatggttagcttgattgtgcttagcctcattggattggcaatctggtgtttaagaaagaaaaagagaagggtttcaggaattagtggtcacatcatgccatcctcaagaggatcttcccccaaaccaggtaaagtttcatgatacgaaatgtatgcattctatgtttgcccaccacttgaccttcccacacttcttttgcttgttcgtggtaacttttagcatgttgagatccaattggagtgtctcatctttagcttttagccgcacattatctaattgccataatttattaccatcattatatctgaggcatagtattctacagtagcagtaatttgatgcttctggcaagtgatttagaagcttgaatatggttggctaaatgttggtgaattaccataggttggactgtaattgatgaaattcagtttcaagcttttcataataaactatatagagggtatgtcgagctgtagacaggtgatctagattaactttccactgttgacatacttcttttcttgattgtgtttttaaaatagttgtcattgaaagaactaagctaggtttgtaacttatgtgtacagagtcagccttctttaaggcacagtcttcagcaccccttataggtagtggttctagcagtgattttgtggactctgcatcagaggctgggctaggcaattcgagggggctgggaaattcgaggccattgttcacatatgaagaactagttaaggccacaaatggcttttcagatgagaatcttttgggtgaaggtggatttggttccgtgtacaaaggatgcctaccagatgggcgagagattgcagttaaacaactaaagattggtggaggtcagggggaacgagaattcaaagcggaagttgaaatcattagtcgtgttcaccatcgtcatctggtttcactagtgggctactgtatttctgataatcgcaggctacttgtctatgactacgtccccaataattccctttattaccatcttcatggtaaagctgctaatgaattttttgaggattaagtttgtgaaaatggataatttaacttgattctcgcttgttttttaggtccagataggcctgttttagagtggccagtacgagtgagggttgctgctggtgcagctcgtggaattgcgtatcttcatgaagactgtaagtttgtagactctgaactaattttcacttgcattgcatatggaacgatattttaccttgatattgtatccatgaaagtgataccgcagatgttgttacttagctcttctttctaatctctcttttcctgtatttacataaaagtcccaggaagagataagcattattcttccattgtatagattaactggaaaataact

SEQ ID NO: 18518 - DNA, 3915 bp, Cannabis sativa
  modified_base (3723)..(3730): a, c, t, g, unknown or other
  modified_base (3853)..(3864): a, c, t, g, unknown or other
cacatgtatatctatcttggtacttaacaaattaaagtagatggaacagtagaaattacaacagaactatactttaaaggaatttattctcaaaatttcagttcaaagattaattgaaccgaacatctaacttaatgaccaaaattacatgtaaaggttttaattttgaaaattttgggaacgaagtattctataacaaagaaaaggatgcaaaacagatttatcagatttatttatcattgcttattcaaaaaacaaaaaaaagatttatttatcattgctagcatttcccacacgttatagtgtaaatgacatagatcaattaacttggattggcttaaagctcaaagaacagtctttatttagtgcaaaacaataatctgaaacaaacacaaatgataaaagattacacaatgaagcttcatgtatgatggcaatgaatatcactacacttgcaggtctctgtaggcgttctccgtagtggtagattcgaactccaggctatgaatcattggattcacatctccaccactggcccaaaagacctaagatagcagaaaaacctgctaaataaaacatatttttattggtaaagatggaggattacttgaataaagatgacaaaaaactatataactagcaacgaagtttgttatgttagtgtagagttaccagttatgaatctcacaactgaggagataatggaatagggaaacatttctcagtaactgacgaactgatatggttcacgccagtgtagaaatcacaccttttagaagcagtgactattaagtcttttggtatgttgggatgggtactcctgaatcttctgtcagctttttgtaagcttcttgcagatgttgggtcacaggccccactttcccatctccaattacacgcccatcaatcttcacaacctgaaaaatgtaatccagaagtctttaagattttatttcttattgataggaagaaattgttgcatggtttaaacaggagaaaaaaactgcgtattttaaagacaaatgaatctaagctgttttcctttgtaggaacctgtctttgtcactattcaaaatcactgaattaaatggtgcaaatagaaaatcccaaccttatctgatcctggtaatagtgaaatgtttttcttaaagaatagcaaatccaattaagtaatacaatatgacaagaatgtgaatcataattacattttcaaaaataaagtttgatgaatttgagttcataatgtattgtctacatatatttataaagatactacttcgattaattagtacatactaatgttgatggtcattttcttcacactaaatatgtttctgcattgtaaattgtggtgagaacactcatttataaatgtctaaaatattaagggacttaccggtgtgagttcccccatagtccctgtagtccatacctgcagaacacagagggatgaaaaggagcaacaatattctcacaaagacagcaaataatttaatctcagcagtccagcctatattataaattggtcagtgattcactctataatgcactcgaagaaccagaggttaacatattcaagacatgtcatccccatcttgttcatggcaagagatttttatgtctgaaaaaagttactttctacatctggtcattgctcaatttaatacacttgaaagagcagttagcaagagggatatgtagatacttgaggtaaaatgctcgtttgatagaaattatctgtaggtacatttatataattagtatatgtaatacgtattgatgaatgcatacctcatctgcagtatggaactctgaaagactgattctgcgctcctctaacacaaacttttccttcactacaaggtccataacctacacctccaagaaaatgaatggatcattccagaccaaaatttacttttgctatgtggacttaaagcacctttattgacattcataagtgaaatattaaaattagacatagatagcttaatattcttgacctactcatctcttgttattaaatattatattaaataagcctcagtcagtggagacgctaatgcaatctgcagatggaaagttaaaacagcttacagtagcacgggtaatgccaggaagacagtaatcagcatgaggtgtcgaaacacgggctttcttcactaaaaactgcacaccaaaacaattggatagtcagaaattaatgaccaaacttttcgcattacaattatatacatttgatattcataatcataatcataactatccacaatgggaatgctttccataatttaacaaatgttgtctggaaagtactaaaacaaacactcagataataattattagttaagcataaaccttacaatatttgtagcatttgtttcagacacgaaaccttcataatcaagcatgattgcatcaccagcatttccattatttccttctatctgcaccatccaataaacatgtttaaattaaaacaagaataaatccatgagaacaacacattagtggcatagaagaatgcaaatctaccaggctgttacagtgtcactgattttaccaaatcatgttctgcacattcttgcactgaaaatctcaccttatattctaccctagaactttctagttcattatattacacagttatgaacccaacattcaatttcagcaaatttaggagcagtcaacagtatatgtatcaaaagaatgatcagtcattacacaacaacacattatcacattctatggatttgtatcatagagaataagaaattacctttgctagaatattattaagaaggttgttgtgatgaatctttgagtccaaattctgttaaaagacaatgtaaaaactgagccagcagaacagaataatttattaatctcttgcaattatgaaaaaaagatactgtgcaatatattagcgactgaactttataccattgtaagagaaaattttactgcagagacttaatgtaagccaccaaaaggagaataattgataatgtctctaggtatcagattgttcaataaaaacttattaatttaatattttaacactatttcctgtagaaaatggttaataaattgactatattattcatgtaaatgtaattagcttatatttatacaacttaagaaaaactaatatagaaaagtaccaaagcaaataggaaaaaaaataattacaattgaccctattttttagctaatttacagctaatattctaactccccttcaagctggagaatagatgttaatcatgcccagcttgttacaaagataatcaacccgcaccccattcaaagcctttgtaaaattgtttcctaattgttctccagttttcacatatcctacagataagccttattgaattttctcagaaacaaaatgacaatcatcttcaatgtgcttagggcccgtttggcacaggctaaaagctgctttttgaaaaagttgtgataaaaatgtgtttggtaaacagttaaaaaacagctttttgaagaatttttagagaagctacagctagaagctaaagctgctccaacccaacttttagaaaaagctgttttatttaaaaaactataataattttttttgtactaaaaccatatttacttatttattacatattaaaaaaaataattaaaataaactatttataataaaataaataattgtttttgaagaaaaaaaataattattaaatctcttatttnnnnnnnnaaaataatttatattttattttattattaacaaacaacatcaacctataatttttcttatacagtttctaattttttttaaatttgatcaaacataataaaaaatattataaattatttttannnnnnnnnnnnaaatttatatttgaaaaaaaaattaaaaaaatataaaaaaaatatataata

SEQ ID NO: 18519 - DNA, 5883 bp, Cannabis sativa
  modified_base (5022)..(5022): a, c, t, g, unknown or other
tcttctcatctactttatattatattatattattttataacaaaccggaaataattgtacaatttgatacgtttgtcccttgtaattaaaattaatagagagataatcatggttggaattagatttagatataattacaccataattgagttcttgaaaataaataagtaatttcaattacacttttcaattctacaaaattttttattttaaatattaattactaaaaatattatttttattgtaaattaactattttatcaaatgaatttatatatgtaattatccaaacaaaccttctatttgaaaatgttatataattactagtacttaaggtaataattactagagtaaataattacaaacaaactctaaatatccaaaataatgaaaaatattttgaaatttttatattgtcatgttttactgcagcttttatcatttgcatcattgaagcaggtccaataactcctttagaaagaaaaaaagggaaaatgcaggtccattaatagtatagggcttcaaaaggactacacaagcaacacaatcaagaattgacaaattttccttttggtgtttgtttattggattttctttatggcaaaattcagttgacttttcttcttgaacacaaaactcttgttctaaaggcacatgacatgattattattattattctctttaaaaattaacttatataaaaccataactcctcaagtaaattattcaaagatgtagtgtagtgggatacaacatttaaaggggcatttaatctcaaatgtagttaccattcaagtacgctatctagatagctagagttacagagatgtactgttcatacacgacagagagggccagaggcagataaggtccactattagtgccattactaaatggcactgtgctataaggttggtggccctatcattatgaatttctgtgaagaaagagacttttgtgacaagaaagaatcatggggaccttgtgtagtcagtcctttcattggtggtctcaaccaaaagcttcaaacagcggcataagataaatagatataaagcctttacaaaagctaacaataattcttaattatgttaataacaaaggtgagtatcattcacaaaagaaaacaaatcttatatatattaaaaggtcagagaactacatcttaatcacaatctcaaactaaaaataaaaaaaaaattagtgaaaactaatacatagttatagttcttctctctttaagaaaaactaatgatgatactaatgattggtgaagatgtgagtttctgtcacaaaaggcaacaattttctaaaagactaaataaacccgatcgttttggtggggtcagaaaactacaaactaaatcacaatcacaaaactaataaattagaaaaagtggaaactaacaagtgtcgtattaacttaattttcagagctaattaattttacctgagccatcttcttagatcactagttgaagaaggagaaatctcaccaccaaagctctcagtgtaacaagatgaatagttagactgttgttccactccacccaaatgtgaaccacttattacgctcttaaagcttggactcctcaagctattatggccataaccccctcctccatacaccattccaccaccataaggatccggaactgggaaagaaagtcttttcttcgccgcagacccacccccccgttccctctccggtgtcgaaggtctctgcctcggagcactctgagatcgaacccgagctttagctgactctgttgcagccatgtaatttggcactggcgggcaaacattaccactagcagtgcttgttgatgttgatccaactcggccattgtaatagtagttggaccttaagcttggtgtttgagatgtgtggaagcttttgtcttctctcccacaacgagggctggctgatcggacttgaataggcctggttttagatggtgaaggcgttacaggggaatgatgatgctgattttggtgagatctatggagaggtgaattgggtctttgtctttgttgttgttgttgatgttgctgctgatgttggtggtaattgggatttgaccttctaagattgggagctaaatatgaataaggctgggaagtatccatttcgactgtctttatggggtctctctgatcagttgaagctcttgctcgggtctcccatggttttgcagccatccaccggtctagccattttggtttctcatcaagctcgtcttcgttccccattgaagggcttctaccatttctccatgccttttcaattgacagttagtaaaaattgcaccaggaatttgaataaaaaagaaacagagaaaagtagaagaaaaagagagttaaaaaataaaaataaacctgttgtgatgaggactgggatgaattcttgtcacgtttcattgcagcttctcttctgtgttgtaacatggcttttacttcctcaactgtgtgaggccgttcgtcccaatcatctgcaacactacttccctctctcgactgtgatacatgacaagaagtaaaagccaaagccaaagccaaaggtactttaggtaaggaagaaaagtactgattaaaactagaagaggtaccataaaaatcaaagctcatttaagtttgtattgaacagtcagaacacgacattttttactgcttttatcttgaagttgaagagaaggatgttgttggttttccaatgaaacgaaacttaataactcaccatggattttctgtccgagatatcttgaaggtatcgggaatcaaaaacgctagtggtgtcactgaatgctgactttctactaccgtcatgggagagcctcacgcgttgatccaggatccgagcctgaactctaaccagagcttgcatgcatttaagggtcatcttggcttgctttctcacattgtgacccctcaccaaagcctgcaatttcactagccctttaagcgctcgaagagctcttcttgccttcaaaccatacaaaaacaaatcaaatcaatttcccatattttaaaaaccaaaacaaaggtttttagatctatttatttattcacttaccaaataccccctaaaagccgtttgtataacagtagcagcataatgttctctagcttgataagtaggcctagatagccgagctacctctaccgccgcttgagccgtggccattgcagcctcggcagtggccaccgccatagcaagtgcatgggtttgctgatcattcgaaactgacacatgggccgtcgtagtattattactctgttcctgttgattttgctgtggcactgtttcttgttgatttgttggctttctgaaaatccaccgtcgtttctctcttttctgcacaaaacccagaaagaaaaaagaaaacttcatatactgatctgcaagggtaagttcataagtggtaaccaaaagatattggctttcaacgaaaagaaagataagagatataaaaacaagaccttttctaaatcgtcctctttattaggagatctgaatgctcttttcacagcagtcaaccatgaggagcctcctttcttccccatcagaaataagaaaacaaagataaacccagctgcatttacagctcttaaacaatggaaagattacagaaaaggcagaacacagtatagtaagagtcctgtttaagatatatcatgtagttatcaagttttgtaaggtagtgcacagctcttgaactcagtgaaagagaaagatatttaatacaagtgtgatgagagagagagagagagagagagagaagaaggctgtgacgttcaactgtagagctgtagctaaggtaaaaactataatagattcaatcaaaagcatcaaattttattccctctttgagaagattatatagatataaaatagaaatagaatttaactaaaggctaaactctatggttttgggtgttcttggttcgtatttgtgacatggaaaacagtggtggatggtgtcagaaagtacgtcaaataactattgcttattattaagccttttttaacttataataaaaaaaaatgaaagagtggagagaaaaatgtgaggcagatttatgtggtggggttgggtattgagtcattgattttgatttcgaggtatttgaaagccacgagagagagagagagagagcacgttgaggagctactaaaaagtgctacaacagaggcaaaagctgtatccttttaccattcttttttctggataaagaaaatgaaaattaatgaggggtttgggttgctgtcattaccctttttcgaatatattatattaacttttttgagaataaactaaacaaaaacataaaaaacaacccagcttggcaaaccacctctcatggattcacgtggctgtagcaggagtgtaggggaaaatatcacgtgcttgctggaccacggtggtttttggggttctcttcttataaatgtcaaattatgaagtggatttttccattttcctttttttattaatgacttaattactaccgtagtcaatgagtagaggatgcagctttgatgggattggactctactgtggtacgttgtatagtgtccttcctgggctttgtttaaggctcattgcagcaatcaaacaaacacgttgcactcactcaacgaagactggtcaaacctccttccttgcctggattctcattttttattattttctaaattttgatgatctcattacgagaacctcttgacagtgtgtactgttacactaaaatacatacatatgtatgtgaaatctatacatttttttactataaagagggagcagaaaataatccattggaactaaattgaatctcatggagaaatatagtttggttggtagtatacccttgtcagacaataaggttatactcccaagaaatatgatataaaaaccataccaagttattattattttgagcatggctattaagcacagtagtttttagcacatacttaacataatgtattgtgattggctaatgatactctttaaaaattantatattaaattatataggacctgatacttaattagatcaatagcgatatttacacataagaatgtgctagacaccactagtaccttttagcatttctctattatttttaagaggattgatattagtaataaaatctgtagtccttaatatttttttagatatatgggtattttttaaaaattattttattaaattatgtaagatttaatatttaattatattaatcatcactaataccttttaacattttttttatttttaataaataaaattaaaatagtacaaacactacacaattttctaaaacatctcttaatggaaaattttataagaacatctgtaacataaaattatgtcaaatttagttttggaaaatactcaatattatatttaactcaatttttgtaattgtactcaatatattgggactaatttactcttaaaaaactttaaaataattaaaaatgttttagttaaatatataaaaaaaattattaaaagttgtcaattattttttccaaacgcaaaaaagttgtcaattaacttaattagtaataaataaataaatttaaattggaatagttcttctgttgcaaatttaacttataaattataatttatttttaaaaaattctataatacacagagatgcacatacatctctatctattttatattttagtattcgaaataactttttagtcaattttttttcatagtcatgtaaattatagttatttaagacatcctacaaaattcaaaaatgtttaacacgacgaaaactgcgttcaaatagtgtgttgcacgcgtgactatttattttatgcgcgtgtaaaatagactgtttgaatattatttttt

SEQ ID NO: 18520 - DNA, 3457 bp, Cannabis sativa
  modified_base (2412)..(2412): a, c, t, g, unknown or other
ggggggggggggggttctgtttgtatttttaggttagggaaaagttcattatatattaggattttagttagtttaatgagccttatttttggattatttttcatttattatttaattgtgttggtttaaaataaacgatgcattaggtttgttataaacctcaacacaaattttaaaaatgttagttataaattgatgtaaagtatatcatcgatcagtgtggtttttgcatcaattttgagttgatcaatgtaaaaagtagtatatattgtcactggtagctgttgtactcaactaatttggcttaacaaaatgctcactgattatggatacccacaacaaacattgaccatcttttgtgacagtataagtgtcataaacatctctaaaaacacagttcaacactctcgaataaaacatatcaacatcaggtattatttcattcgtgaactagttgagtcaaatatgttgtcaatatctcatgtgctcacaactaaccaacgggtagatttattcactaaagctttagatactcaaactttcactcatttaagaacatgcattggtctttgtaccatctaaactgttctcagttgcatctggttacatttttttctaactctgagtaaagtagtttcaaattcatgacacaagcatactttttttgttcactactatcacctactccctagttttatattgtacaaaattgagcttgtgtcttctctagataaaaaggctacctccttcagatgtaatgggaagagctcttttaaaccatatattaataagtagtaggatccttctatattagtacttgtggcctaaagaatacggctacatctctggaagagagtgaaagccatgtctgggtactatagaaaaatctagagagtgtcataggtaaaaggcataaaacaaaaacaaaaaataacaacaaaaatatttgtttgacggagtggtctagaagatctttctcttcctgcaccccatgaggacactttacacacatttatgaagatactggctcttgtgtggttattctcattagagtttggtaagcttatgtgttacgaaaatttgtttgctaatgttgtgcatttcttattcttgctcagtggtttaattcacttcattgatcagatgttaactgtcctgttatcactgtaagagattgagtatctctaggcttctaattttttttatctctgttggtaaggtatgggaaattgttaaattttgttggcatatttgtagtcattagatcttcatgatctcattaactcatgtcaatatatttgtttcgatatatgtgccaaaacttacggtgaaaacaattctatttgggcgtgtatatttcattttgcaaagtatagttcaaaaaaaaaaaaaaaaatcatcattgctttttatctttgcatggttaaatattgtcagggtatccactacttaaagccaaaggagagtgaatcgttttctcactttactcttttctccaacaaaccctaaagtctgaagctctcaatacattttgtccatccaaaagactctctttctcagtctataatggagaatgttgtttccatgtcgatctccactgatgccatcaaccttccaacatctgtatctcttgtcgcatcagaagtcgtgactagtccagctgaagaagtgttcaccgacacccatccatgttcagctattgtcccttctcagtatacgatcaatgatcctcctagctccccaaggtctacatcccctccgtcttctatgtcgccaccggtcagccaaaagcctcgaacctttcaaggtaaggctcctcctctttcaaaaaaggcttctacttcttcttctctcactaagtcaatttcaaaaagagtcactcgttccacctcgagctcaaagtttcttgtgtcaccagtcaagcctgcttgtctgcctaaatctaagttgataggaccacctcatcctccttctaaggtttcatacctctccaaagcaaagaaaaaggtcagtcaaaaactaatgcttcaaaaagaaaatcatctagtgatcccacttatcaaccatctcccaaaaagaccaagcccaaatctattcctgtcccatcttaaaagcccctagtggtccgtggtcctcgacgacatcgacggcaactgggtggtcctgagattgggtaatatcaggagagaaagagatgatggctgatagagagagagagaggggggatcgagattacctgggtcagtggtcctcggcaacgataacgcctggctcggtggtcctgggcgccgacagatgatggtggtcttgggctggctacctacataatcgagagagagagagaaagagaagagggtatttgcaaaaatgaaaaagaaaacaaaggaaacgaaattaaaaaaaaaaaaaaanaaaaaaagaaaaaaagaaaaattttgatggaagctgtaatttgctaaaggtattgtttacgtgggctaataaaattgtgccacatgtatactgtgtctacgtggacaatacaacctggcaattaacagctaaattttgatggaagctgtaatttgctaaaggtattgtagttttggggggtttaccgcccaaatttgagttttcggggttaattgcaagtaaaataaaactatggagagtttttccgccatttactcttttaaaaataaaataaagaagttgatgtgagtctcctaaaattaaaaaatattaaactttgtctctaataccaatatgaattatgtacaatgcaaaatgttagaattgtcaaaatatcataccctcctaacaataggagtttaacttttcaaaaacgtaaatatatcacaccattttacattttacactattgttgtaagaggtaaaaaaaatggtatggcaatatcacactattaccacatttttataatagtaagatataaaaaaaattatgaaacaaacaaaaatttttttaaaaaaaaatataaaaatatttcaacacacaaaaaaattttatttttactccctgaacttttttatttacaaaaatatctcttcagtaaaaataataaactgtctttttagttgtttaaagtttatttatagctgtagtataattgtaatgatattattttttggttgttttatagtttatttataattattttataattatcgtgagtttaatttttagttatttttttagttgtttttttactttttgttaagtgaagtgtatttttgtaattttacaattttaaaagtatatttttataaataaaaattttaggttgtaaaattaaaaataaaacattaaaaagaaaaatattattgaaaatttccccaagatatatattcatatggaagaggtttcaatggttacatttttattgtaaccatcatagttacatttttttaagccattagattactattaaatggctgtgattaaattgaaaattaaata

SEQ ID NO: 18521 - DNA, 9914 bp, Cannabis sativa
gaatcgacgaaatgcatactgtttgactatatatgtttggtggtagataacatcttgtggatatgacataccaaatggccttgtgggagttttaaatctcattattggtcacactacatttacttttttaatagcttttcactcttaactctcttttttctcgagtgaaaattgagaagtgtcaatttttatatagtaatgaaaatctatgttgcctatggttggctgtgttaaccacatttgtgatgtgttcttaatatagtttttaccatatgattagtcattgttggtttagagtgtactttttaatgttcattattagcaaatagtcatttttgaatcaatttgtgtcttgagataaagattgttatggaaaatctctgtaattgttttgtatattacatttgtaaattatcttgtgaataacttctccattaagagtaagtaaccaagtctatgtttaactaaatatgtagtacattactaaacagattgattttataatatattttatttattgcatgtgaaatagattgttgagtagctttttatattgtaaattattttgaattttttaaaattttgcaacatgtcttaaataattataaaaaaattatattaaaaaatatttttagatgtagaacgagataagactagatttttttcacttaataatttttttttactcaaacttttttttttgaatagaatagaaactttattaatcaatgagttcttccattacaattgataaatataaagttcagcaggagcattactctcattaaactgaagaacgggtaaaagtaaaagttacgagcaacataatgagcattcttattttgtatcgaactacgaatgacatagatagcctcacaagacaattcgattcaacaataacaagctttattgatggcttggttttaatttttcttaattataactcttttacaatcttctattataattttttagttaatttttacgtttgaaattatagtttgaatttttttttcaaataattttttatagctatattcgttatagttataatattttcggtaaatttttaaataatttataatgtccaaaatagaattttttatactctaatttatgttaaaaaaaaaaaaagttgtaagtataattgttatgaaaaaaaacattcatacatatatttttagactaagagattgtaatagcagtatcactcttaaacaaaaattaaaatagaaaaataaaaaaataaaacagaaaaaattatcgacttctcttccccaccttcttcatcacagacaacaagctctgctggagctttgaaacgccggcgccggcctcaaccatcttccttctctccattctcacgtacgtttccctgaattttcacatcaccatgctctgctcttcttcttcatcatcttcttctcctcttcaccatggtaacaacaacaacaaccgccttcgtttacccactgaacaacatcttcatcttctccaaaccttcaattcaccatttgagctcaaacaactccacacccatttcatcaaaacctctcttcctctctcactcctccctctaacccaggtcgcttcagtctgtgctcttacacccaatttcacttacgctcagaaaatcttccaacgagtgaaaaccccagaaatctttacatggaattcttgcttgaaagcattcgccgaaggcgaatccccaaacgacgccgttttgctcttttaccagattataaagttcggtcttttacctgatagtttcactctgtctttcgttcttaaggcttgtttgcgtttattggatgttgagaacggtagaatcgttcatgggtatgtggaaaaacttgggttgagttcgaatttgttcttgaaaaatacgattcttcatttgtatggttattgtggtgaatttgatgatgcgttgaaactgttcgataaaatgtctgaacgagatgttgtgagttggaatataatgataactcatttgattaagagagatgatattgagagagcttttgatttgttttcacaaatggttgtgagaaatttgaggtcttggactttgatgattagtggttttgttcagtgtgggaagcctaaggaagctgttgatttgttctttgagtttgagaaagttgggttggaacctaatgaggtgactgttgtggctgttctttctgcttgtgctgatttgggtgatttgaatttgggtaggaggattcatgaattctctaacaaaagcgggtttggaagcaatgttcgggtttcgaatactcttattgacatgttcatcaaatgtggttgtttagaggaagctcgaggcgtttttaatgagatgaaagaccgaactgtggtttcgtggtcggctatgattcagggtcttgctatacatggtaaagcagaggaagctttgaagcttttcgatgagatgattcgagttgggatgaagccgaattgggtgacatttttagggttattacatgcttgtagtcatatgggattggttgaacaaggaagagagttctttactagtatgactagtgattatggcattgttcctaagattgagcattatggttcaatggttgatttgttaagccgagcagggttgcttcaagaggcgcgggaattcatcaagaacatgcctataaagccgaatggagtagtgtggggagctttacttggtggatgtaaagttcataagaacattgaattagctgaagaagcaattgaaaacctttcggaattagatccttttaatgatggttattatgttgttttatcgaacatttatgcagaggccgagaggtgggaagaggctgcgcgagtgaggaagttgatgagagaccgaggagtgaggaagactcccggggcgagctcaatcaccgtggatggagttgtccacgagtttgtagccggggatgagagccatccccaagctaagaagatattcgaaacttgggacaaactagttgagaaaatgaaggtgatggggtatgtacctaacacttctgttgtgttgcttgacattgaagaaaccgaaaaggagaggtttttgtatagacatagtgagaaacttgctgtggttttcgggttgattaacaccccggctagaacaccgattagggttatgaagaatcttcgagtttgtgaggattgtcatgaagcttttaaattgatctcaactattgggaatagagagattgttgtacgtgataggaataggttccattgtttcaaagatggtacttgttcatgtaaagattattggtagtgagagaatttttcacttgtgttaatttcaattatttttgtaatattcttttttattttctttgatgacaggagaaaattttattaatcaaaactacaaaggtcatcatttataaaacaaccaaggacaggtttacttacatgttacaaacaaaattaaaaataatctcgctttaaaatcacttttaattaaattattaattataattttttttgcttaaatgtataaatatttcgattctaccaaataaaataaatcgtacctgcaaacagccacaatgtaatatttttcttaataaacaaagtaatatatattttttttacttagttcttgactttgaatctctataaaattgatctaatatcgaagtttggaaatcacttcttaaatggattttttatttatttttgtaaaagaggtttaagtgaattaaagagaattggaagaacattaaatttaggagagaccaaatttatttttttaaaaaattcaatctttataattcgatcataattatctctaaaaaataataaatatcttaatgagatgaataagaattaaattaccccttcctataattcaattaagtaaagtcattttaaatattgtttttctattattaatttaagttattgataattttttaaatataataaaggaaactattattattattattattatttctactatatataaataaatgaatcttccacgaaatgggtagtcaaaatggtaactaatttctcaaaaaagaaggtaactaatctattatattacacataactaggtgaaaacctctcgattgaactattccatctctatgttaagaacaaaaaaggaaaaaaaaaatgaaaactattccatctctcaatatgaaaaactctctttgtttttctactaagaatattattatgatcttattcttcttattattagtagtactacttctaagtaatattatttcaactcatgatcgtgatgtcattgttcataaaacgagttattataactttaaaaaaattatcattgatggcaatggcgaacgtcgtatccttcgtggtggtcgctcccgccgtggtggctctcccaaatttcgagggggagcgggagggagagggaattgttcaacatcatcggctaatgtaaaatcacctaaatatttacatatcaaatgctactctttcttggccttgtttttttcccttaggttcttataatattttttttcggttcttattattagtttttccttttttgtaagtataagaattcgatcaacatattactatacaataaacaatgacccccccttaatctctcattatagtagataattgtcttcttggagaaaggataaatctgttaaaatgtactattcgaatcattgtcaaattccaattgaactaaagttctatttactcattttatatttcataataacttcacaattacatatttatagtgattcatactctttaaaaattactaataacacattacaatcaacctaaaccaatctaagttaacctttacaaataaatatattgtgtaactaattaaaatgtatatacatttctttctcgattttttttatgtgctttatgattgcattaacctaacaacaaagacattacaatgaaacctgttttatttgcaacgctttatctcgagtcttaagcctcccaaccactgttaaccaagtcataattttgattattatttttgagcaattaatatttttttagaactatgtcatgataatatttgttggtttagtacattttttttattataattttctgaaaattattaatatatggtttagtacattttttttattataattttctgaaaattattaatatatatatatataacaagctttggaacttacttatgttatttataggcaaaagggagttttaaatgaatttttatttattttttttgtttggtaaaaaggaggtttaagtggattacttaagattttttttgtcgatttaactaataaatacatttaaattgtatttttttttataattattaaattaaaattgatatttaaataattagatcgatctaataaataaaaaattagaaaaaaatttatttttcattaaattaaatttaagtggcaaaagtaaaattcacgggccttcacttggtgaattcgaccttggaatagattatgagcccattgggcttttgtctagcccatctcattctatcctaaatctaaaaaaaacctatataaagagggataatttcaaaaaaaaaaaaaaaacccaaaattaacaaaaataaaattacaaaaatacgatcttgattggtaacctatattaataagatacatcttatttctaatagctcatcatgaaagaactcttaaacgtgcttgacctgtagtaattttaagatggatgatctcatgagaagttgcttgaaacatagatgttatagagagaaagagagagagcgcgccctaaatcatcacaaactaataagttagttgtatttatttagtatgcctaaaataaaatttaaataattactaaaattaaaatttaaaaattttcttaaactattgagattatttgatttaaggacttttatttaattagactaacataagtttgacgtaaatgaaagtttaggggtgtgatttggtacatgataaagtttgggggtacgatatggtagatagacaacctatccgatccgattggattttcaaaatttgcacatgattctatccaattatgattgaatattcgtaactattggatcagttggaattagatcgattggttgtaattagtttggatgactttctgcacattcctaagtaaaattgaaaggaattggacagaagtccttgtgtcaaacaatctcaatagtttaagagaaattttaacggtctgaaaagttcagagggagaaaacctaattggcaaaaaaaattgttttttttttaaataaaattagctaaaataatatcctgcaatccaatcgagacatctctttcgttgtagtcacgatcaaatttagaattagaaaaacgagccaaataatcaaccacctattttttaggtcgtttgacaaaaaaactaaaactaaaattagattaaaaaggttgcaacatcacaattaactttaagaacacttatattcagtttcatttatcgctcataatgcacaatagtagaaaattgttcccgcaggttcatgcaacctcatatcttgaacactcaattattgtacaaggtacgtaattgcactactaacaatccgttcagtcacagagaacttattattctcaactactaacaacgatttgatgacgagccatcgaagaacgaagaaaaaccaacaacaaaataacaaaacaaaaccatatcccacaaacaagactaaaacactcaaaactatatcacaaagacaagactaaaaatcgaatcacaataacaaaatacaattacgaccaagccgcacctacacctcagggaaagataacttcatgtaactataaatttaagaataagaaaccctaattttttaaatttactaaaatttaaattaattagacgaaaccaaaacgacaacgttttaaatatctccaaacaaaagattcttcttcctcaaaaatctacacaagaaaaaaaaaaaaatactcaaactttggactcactgcaattctctctctactcggcgattcatcttaaggtcggactcagtgagtcatgggtggcgagttaaagtacgagatagcacaaaacgcttacataaagctagtgcttcatgccctaaagcacaaagcttcctccgtcaacgccgtcttactcggccgcgtttctcccggaaacgacgacgttatcgagatcaccgattcagtcccacttttccactcccatattggtcttctacctcagcttgagatctctctaattctggtaagcctaaacccctctttttcttaatcgtaaagatctaacctttaggtcaaatttcgatgtgtgattgattgaatgaatttggggtcagattgaagagtattatgctgcgaagggatttggtgttgttgggtattttcatgccaatgagagatttgatgattttgagctaagtggtgtggctaagaatattggtgatcatatctctcgttattttcctcaagcaccaattttattggtatgtgatgaaattgatgtaattcttttttgttaattattattgctttaatggggtttctttgttgtttaatttttgttaattattgtggtgattttgtagttagataataaaaagcttgcatctttggaaaagagtaaagatcgaagccctgtgatgcaggttagtatcaccattgttattccttgtttggttttgttttttcattatgtttgtacttgtttatattaaggttgtgtttggttggaattaatgaattgtaatggaaaggaaaagaatcaatttttattctaatcctttgtttggtttagtggaatataatggtaatagaaatactaatggaatgtaatggtaatagtaatgagaatggaatgatttgtgtattgacaattttgctttattgtgttagtgtaagagagagaagggtagaaaaattattttattgagatatatgtatgtaatgagaattcacaaaaatcattttgtgaattctcattacaatggattatggagtttcatcacaaaagttaaatgacaaaccaaacattgtaattgtaacttcaattccattacaattttcattctagtgaaccgaacctgctcactgtcattctaatggaataacttttttattattttggtggaatgaccattccattttgaaagtgatggaaatactgtctattcctatttttatttccattctcattcggtgtttctttcctccctaccaaatgtactctaatttaacactatcatgtttgaaaagaggattggataatattttgttagatattgaaaatagcaatccaacaatttagttaattcagctatcgtgatgagataataacttagtatcattgaaatactttagattttatccaattgaaatctcaattttcatgtatcctattacaaaagaaattacagtcttgtatccaattttctttctgacaatttattgtttggaaatgatcaatattccttaaactaattcaatcctactttctaaatgtgacctaaggttcttttgatgttactcttgtaatataatgaacaaccttactcgcgtgtcctattgttgaaaaagtatgtgccaggaattttccaaatgcttttgttcggtatcttaatcgtattaaaaggcgtttgtcatgtcttttagtacgggaatggtatagtagtagctctatattgtattgttttacttatcagtatagtgttatttaaacatttgacatagtacaaactagaaattattgataattgcccaaatgataggcaagaatattcttgcaaagatgttattttgagttggttggttcatgaattagtcattggaaatcttagtgcatgatgcctttcaaatctcctagatttcccttgaaagtagccggagttttagttttgttttctcttttcctaaacttccagctttacgcaaaagatgcatcgaagaattggaagcatgttggatcagacggaggctaccttttgacaacaaaagagccatcggcaaacgtggtcctattggattatatctcaactgaaaaatggcaagacgtggtagatttcgatgaccaccttgatgacataaccaagtaagtcatgcatttttttccctcttatgtatgccaattgtagatttggtttaaactctttacccttctgaccaatctttgtgtgtgtaatttccagagattggctaaacccagaactcttcaattgatttggccatgttgccagcaattttcgttgcttcgccaaccgtttaaagtatctgggattcatgttttaaggctctatcaagcttgacttgattgaccctattatgggaaatgattgctttgagataccatctcttcagtgatctcccaacttgaccttttttctcttttgttatgattcattaaagcatttgaagtaatttaatagctgtagaactggaatgaattcaagttcaatgatttttgtgttttgtttgttaaattcctaggtaaaaatttctgtaagagtggttagtaaatgaacaataattttatcatgttcaacaagagtttgaagatgtgctagcatttggatttaggagtattaaagcaaagtaattggtccaattgtaagattctttgttttattttcttgaggacattataatatttgcctttttcttcttataaccctaatgatttttttaataatatgacgagttatgatatgtgcacacaaaataataacacggtagcattgtagtgttttttttgggctatggatttcatttgccatgtcaatttttttgcaaagatttcacaatgagatgactaaacaaaggctaaaccaagcccatctcaacctgtacaacacaaggaaaaataacaatcatcttacaagggacagaacaacactagggtgcattgtcctagagggagacctcttgaaaccac

SEQ ID NO: 18522 - DNA, 4389 bp, Cannabis sativa
actcttttttctgccttttgaaatgccagaacctttctgtcaagctcttttgcaagcccgtcaactttcctttttcgttgctgctcctctccttgtttaaccaacaaagcctggacatcttttcgaaagcatttcatggcataactcactcccttatctggaagcttattaaggtaaaccaaccagtcatgacacattaaaagtaatggtggcgcactggttgcactagctgacaccaagggcctgctgttcgagtagtgttgaatttcaggtgtaatgaacttggataaccaaccattaagtgcttcaacataagctttctgtgaagaaacatatgaagcaaagcaagtatgccaattttgaagctctgcatcgagctgaagagtggcaaggcgatgtgagtcattgcaaaattttccataggatggacagtgaaaggatttcacttcatacatgattcggttttgggtgtcatgcatttcctgcattgtcttccagttcctcgttaagctgcaaaagttgggaacattaaggttacataacacagtactaaaagtcaaattacaagtaaagattactacattagctttcttacccttttaacagttcaaggagttgtggttgtaactcttgatcccttagcttgtgaattgtttcagatattgattcagctctacttattgcaaccaagatcctagaatataaagaatcaacttcagctgcagttttgtcatcatgtctaaggttgccatctcctttggccttttgatttcttaatagagagcacttttgctcgtaaattttccttgtttcttcagcagactgaacttatagattataaaacaaaaaagttaagaaaaaaacaagagaaaataatcaaatatgtctcattttaaaaagttgaaaaattagaccataaaactgatggggggtcattgtatttttcttttaataccttcacttcctggtaaagtttcttttcccaagcataaagccttcctagtgtaagagagtgactcccagcttccattcctccatactcatcaaacatttcactcttgaattctgtccatgttgaagagcttttggagctagatgtaagcagactcttacatgaaggagaccaagataaggtggatgaggttgatcggcttcgagtaatagaccgaatgagcttattcgagttctctgcaccccaaaagtaattgttggatccataatggaactaaaactaaagattttgcactaacaaaagcatgccttcaatcaaaattataggctccattatttggcaaaaggagtattgtattgattttattagttaacaaaatttataacagaacacctcaaccattcaaacaatatagagacatgaactgcagtaacgaaatgaaattcacacacaggtcaataattcaaaaatgaagacacaaacaaggatattaaagagaaagaacccacctttaatttcctctatggcagattgaacttgaaccatattggtctctagcatcctagaaacatccaaaccagaatcataggccctaatgaaaaggtccacaacatccttcaatgcctccaacaattctctcccatcattgggtgtgtcaatcacactcaaacacttttgctcttcctggctcactaaacaatcctcccctttggccaatgcctgacacccaccaccaccacccctagcttcatcagtacaaacaaccccatcattcacatccacaactttcccaacactagttactttttcaccatcctcctccaaatctggtatcccctcttgctccctcaccgcactcaaatcctcatccaaattctcaccaaacccacttgccacctcctctgttctcaccccatcaaaaggattgaagaaatcccactgaaaagcactctgtggttctggcattggtggggctgttccaccataaaagtggtcacaaacaaaactttcttggcttccactttcttcttcttcttcatctgggtttccttgttcttcttcttcatctactttagaagattcagataaacaaggaactgttttatgggtgggctgggatggtgtctgttgaaggaacatgggtttggaaagaaaggtctcagtggtctcagaagttgtagcattagcagtattagaagggaatgtaatgagaagtggtgaagatggagaagaataccgagaaacaaacaaccttatagcagctgctactgcataaagcgaattattgtacttgcattgtgcatccgcaagctctgacctgctctctacagccattttcagcaaacgttttctctctttacagagcaaaacgacgccgttgtcttcttcttcattcttcttagaagtaacgcaacccatcttttctctcacttctttcaactctcactcagtctttaattcaagactagtacttcagcacagtcatgaacagagtactcatgcttaaaatgccacaccatagcagtggatgcctttaatgaatcgggtaaaaacaaaaagtgattattatgcaaaaaaagctgttaaagaagaatcatttggtatcttgcatacataattgcgtaactgatattaccaaagttcccacctttggttgaaaatggagatgggatttaattctttggcagatattttctgggaaaagaaagaaaaataaaaaatggaaaatttttcacttagaagatgagacaacattctattaaatcacaaaaagcattggcctttgttctgtccaaaataaagacttgtgactcgtcctttattattttttagatgggaaagagaataatatataaagcaataatgtaaaaaagcaagtcattaattaaaaccaaataatctaagtccagagaccaaagcaatcaatacaaaactctccgttcatttatagagtttatgttctttttccttctttttctttttaagacagtacgtatgtaggattgttgttacagttttcttgcttaattagtctatagacgcgccattaggaaatgaacattcctattaggcactcctctcaataccctcatgtttgggttagtaatattttttaaaagtatataaaattcaatatttaattaaattaactttttagcattttttaaaattagtgctagtactgtgttgtgtacgtaccactttctgtgcatggtgtttcttcatatcccaaaattgcttgcttttttatttatttcccagctaagcatcaattggattaccattttctgtgcatgcatggtaattggactaactattatctaattattaagttaaaataaacttatctcatcaaaacatggcatagaatgccaaaaagaggaatcatacatacatttggcccttttgttttgtatggcacgcgctgaatatgcatttgagacatgtaattcctgaaatgggtaaatactgtacaataatagtgacataatttttttttttttttgaaacaaatagtgacataattatagtaggcctttttcatttctctattaataacaactcaatcataaatttcactttttgtcgtttttcactatgaattgagtaaaacgacaggagataatggaaactgaaaccccaccttttgataaagattcctcggtgttagtgaggtcccatcacaaccgttgattttgattggcctatagagctgacttggccagtacagtagtattacatttttgggttaaaatattttgatcactaaatgtatttaatttgtgacaatttgattaacatctctatgtaatttaagggaagaaatctcatatcaccacacaattgaacacttggttagatagtgtaatagtggtgtaatttaattttaatgtaagagtgttctaattgtacatgtgaatacagagttagactgatttcactctatgtttggtatctaaactataattcatgggacaattttgtaaagggagaaaaataatctccacatggactattttaaatcacattgaataaaaattagtatatacatatattttttttttttgaaagaaagatatatttcattaaattaaatcagctgttacaggagcactaataaatctaagacaagcatctgtccacaaatcaattcctacagaactagtaacatactttgctagtgcgtgggccacaccattcgcaacacgcgaaatggcacaacaagaaccaccaccaacaacagctaagagagaaataatctcctcaataattgatttatactgaaaattagaattcggaaaagtaatccaagaagaaacaacagaagaatccgtctccactctcaccaacctgtaacccagcatagatgtccaccgcagccaacacgcatagccaaaagctcagcaactgcaacctgaaactccccaaccccaccc

SEQ ID NO: 18523 - DNA, 4757 bp, Cannabis sativa
taagataaccattaattgttttatatttatcagtgatggaaatggaaactgtataattttataactctccatgagacccattaaatttatataattgtagttgacaattgtttatatttatcacaacacaagtaattatgagattaagctcggtatattatatatataattggtatgccaaaaaaaaaatgtattagattaatataaattattattgatgttaaatctcagcatcaagattcaagaagatctgtttatatatcattatattgactcgtgtttcagatttaaaacatataattttcaatgtatatcatatcaaaagatcgatcgacttaatttgatcatatatattcttccaaatcaaatcaaatctagcaaagcgagagttgggatcagatcaatgcatcacatatatatatatatatatatgttaataataataaaggtgatacatatagttaattattattattattattattatatgtataaatatgcttacagttgggtagggccactttgaatgttgttgccaccaattcttcaggaccgtagttgtgtccccaggcaactttcctgctcttctttttcttagtatctcttctcttacatcttcaattcttgacttaaaaccctatacatacatacacacacacattatatatgtatatctaatatgagctagtatatactatatataatcatatatatgtatattataatgaatattgaataagatatatgcatatatctatatatacctgcttgagttcaatctttaattcatggcgaactctctccattaaagacctctcagactcagtgggaagtaaaggaccaaatcccatcatcatatcattattattcatatgatccccatgaccaccagaagattgatctaagtaatccatctgacccattaataattcatcctcatcgtctgacattgttgcacccgttccttctcccaaacttactcctgttcatccacaaattattattattattatttccgtaaccaagaaaatttgataacaataatatcaaaactatacaaaacaagggccaacgcaagaacacactggcgtatatactaaatgtacagctactttttaatcaatataaagggaataacagaaatatatctgtgatgtttaattaatattaacgactgtacgcaaaataatatatatatatatataatatatatatctgtgtgcaagtgtacatattgtcatcgaaaaattcagaatatacttatcctatatactatataatactattttttgttataaaccaaaatatataatactacttcaaatcttatatataaatatattgggagctatcaaaacactatgattgtttagtatatcaatttttttaacagcattactattaggcaccagtagtgtctagcacattctcgacatgtcacgttgcgattaattagcgatactccctaaaaattattatattaaattatacgagaccaataccacatatagtagggtgctaagcaccactgatgccctttagcatttcttttttttaatcattataattcccacactcaaattacatacactttttatacccacataattaataacgtgattcttatttaaaaatataaatagttaatatttaattagcattattcatcataagtcacagtagaattgcttaaacaatgttcataaaagtatttaattagaatttttcaaattatagtgaaatgttttactatgtaaaattatcattatatttaataaaaaataatgaatttcttcttgataaaaaaaaattatcattatatttaataaaaattgagttataataatcgcattccaattacgaaaatctctaaacctatatataagtgcatactatgtgtatatttatattataatcgtttaaggcttgcacgtatatttatttgtctatggatcctaattccaaagatacatatgagatagtttctttgaaacttaaacaaaagtatatggtgtctcaactatataattatactgataattaaacaatagcgtagtactgtccaaaaataaatttaactaaaaatatatcttttattaaaactagaatccaatatatacacacaccaaacactttttcactaaggaataaaaacgtttaatatacctttatccaatcaaatttcgtgtgtaaaacctaaattttatcaataattcattaggatatatgatcaaatcttctagctatatttagtgttagtaccccgacacctagctaataccaatcttctaagataatatatatatatatatttatattaatgcctaccaataaccaaagttcatgcattataggtagctttaagaaaattaaattaaaaaaaaaattatatgaaggaacactaatcttctagacttgccccaaatattatactgatacctatattggttggtaagtccaaagaaagaaaacattattatcggttgggttggtagtgtaatgttggtggtaacctctattctatcaccgaactagctaacaaactatatgtaatatatatttaaatatatatatatatatttctttatatatatataccttgtttgaccctacaaccacaacccactgaacacaaaatcaccacatcattattattttggaaaaagaaaaagtctatttttgcctaagttacccaactcatcgaaaatgaaaaaagaacaactctagctagctctttctttttttcttcctctgaaattaattcaaagtaattatttagttattattataattataaactctttttattaaatcaattttaaattgcaactaattattaaatagcgattatatatatatacctgtgagagcttgtaaggtgttctcaatttcacggcaagccatgactgcttcaacggcatggattctcacatggttgttgaagttgttctttaaaaagtacataatactatcaagtattgtgcctaaataatataaataaaaataatatatattaattaataatcataactatggtggtgacttaatatcattattaagttgtactagtaatagtagacccaaaagtttgtcaaaactactcaatattttttttttatgtgaaaaaaaaaactactcataattattaaattaaaaccacacaaaattaattttcccaagctttgtaataggaacatgactacaaatttactaagttataagggtaattttgttacgaattaatggttataaataaaaatcaacaacatatataatcaaactttgttatgtaagaaagaacaaaaataatttatagtttagctcttgtgtaagaatattaaatgatatgtttaaaaggaaaaactacttaattagaatatatatgtatagtattgtgtaaaataaaaaccaacaaactttgatgaagaaaaaagagcaaaactttatccaaactaattaagcagagtagtagtgaattaaaaacatgagatcatatgtatagacttaattactttttaattatgtatatataaaagagaaaaactttatattatgaatataaaataaattaattataattaccaagaaattgtcgaggtcttgacggtcatggtgggaaaggttgttagaatgagcaagggaagcgtaagaacggagcaagtggtgggactgagctaactgagcatcgatcaacggcaactgatcgatgggtgtggccacgcgcagacaagacacgtgagccgccaacaactgctcatacaaaggatgagtcacgatctcagccttgacctgccgatcctggtcgccggagatggaaacatcaccaccgccacttgaactaatattaatgttcatattgttcatcattccaagcccacctgcttcttgcattattgttaggcttcaaatttgaacaagaataagcaagagagagaaggggtttattatggttataattaatggcgtaagagagatgaattatgtaatatattgggatctgagacgcaaaactttctgcaccaattctgagagactacaaggatttttcatacacagagaaagagagagaaaaagtgagaaatggggcttttttgttttttttgggttttgtttcgtttgatgtttttgagagagaaagagaaagagttatagaatcattacaattaaaggggttggaagcaaggtcagaaaaagaaagaagataaagctgtttctgtggcctgacaatttgattgctttttgttcttttttttttatatatattttaataatttaattattttggactttgttaagaataaaccatctatacatgggtccatatcttattattattatgataagggatatcaatatgtctaatcctgattaggtgtggaaaaagaaaatacaattttggaaggaaaaacaaataatggggtttgtaatttatttatttaattttgtttgaattgtttggtgtttcctttaaatattattatttatttcaactaactattaattaagagagtgtgtggacacatctcggtgtagatttataaaccaagcacacttctttcaaatcggctatttaacctaatattatgagtattatagtaccttaacctatctaatattatacttacatagtggctaatgctcagggttcgccttgaaataggcctatagaaaaacaaatgggaaatttgattttctatacttaaaagttttcaaaaaaatttttttgaaccaatacattttatactatgaaaaatatg

SEQ ID NO: 18524 - DNA, 5759 bp, Cannabis sativa
  modified_base (104)..(117): a, c, t, g, unknown or other
cctaatttatttcaaatatttcaaatcataatcatttaatatcttaatatcatcgtaattggaatcaaagggtatttcctttaaataaaaggattgtaattaannnnnnnnnnnnnnaatcttggatggctcgaacttaaactaataaattcttatgctataattcatcataggtgaaattgtgttttgcatttatttttaatattttaaatgtgaaattttcgcttaatagaccctattattaaccgttgggaatagctcattttgtagtagtagataatggggaccgttttgtaccgtatggacgcgtggcgatccagtctttgtcagaaaaagcataaccgtcacttgatgatctggcatgcgtaaaaggtggacatccgcgacactctaaagtggtcgacatccacattagggcctttgagtacccgttcaggtataatctaggcaagctttcatgtttagaccccttcgggtctaggaaaggcaattcaccttctgcgttcgggaagccaaggcaaggttgagtaggcttccgtatactcattcatttgaccatatttctgattccaggaggtgataggattgcatcagttttaatcaaaaaattactaggctgatccccctcattgaatgccagtgtctcacgttcgaaatgcgaataacatttatgtatggagataatgtttttgagatttaattatttatgaaaatacaatgtttttttttttttgaagaatatgaaaatacaattaaacatatgtaatgcggcaaaaaaaaagtttccgatacagaaatctctatacaagtagtactattctattattataactaattatgtaaattttaggtatgctttaagtaatatattgacattttggcatcactaacaacggcctatatgtgcataaagttatgaagtttaacaaccatgaccgtaatatcatccatattccctctgcttgaagacatatctacaagccttttgcaagccttcaatgttgacttttctcttagaacaatatccaccgcttcctggtcatatatctgcagatataattaataatctattatacataaaatatactattatatttatatatatataaatctaagatcttctaattatatataaatatataccttgtcccacagtccatcagaggccactatcaaaaattgacagtcagaagttataggaatagttttgatttctggttcagaaataacccattctttcaaatgttgatccccgattgctcttgagactgcaagtgacccttgaactctccaaactccattgcgacagtgaacaaatccaccctgcaacccttatataattagattagatgtatgtaataatatacaattaagcaaattaatatataataagatggtgaacgtacggaattctcgatacgaagacgctcgtcctctctggtggtcaaacgatggtcgttggttaatacatgagctactcctttcctactgagaattactctacaatctcccacgttagctacatgtaattttcctttttttacaagcacactagctgcacaagctccactacttactccctgtatgaatttgcaatatttcattcagtttcaatcataatcatgtattatatataggaacacacagtaaatgtttcgtaagaagcatacacatcaatatttaccattttattaaagaatattttgacatataatgtgacactatatctattattaaccgatataagacatcttatatatatggtgattaatttgatttaaattagctatattcaagactacatgaggtagcattttgtatcatgtttccaattttttataatttaatatataaggtgttaggtatcctaaactaccagacataaaatattacatatataatgcatctcggtggattaatctgacatattattgtgtggtgcaattctaagtaaaaaacaatgtgcctaaaacatcactatatatattaattataatatatgtatacatatcatattgcatgaaacttggtatcttcaaaatctcatgatcatttagaaaaggtcggcatggcgaacatttcaaaagtcaaactaattaagtataggatcaagtttgtacgtaagataaataacatttataataatcataaaaaacaaaaaagagtcaaactaattaaagaagttaagccgtgccaactcaaattaggagaggttcataatagtaagtaacgagatccaacccctagctataagttattcagaatttttcacaataataataatagtaatattgagagaaatttataactttgcatatattatataattttgttatactatgtaatacaaaataatttatttaattaatacataaatctaaatttatttttctataaatctatataaggtaataaattttgcctaagtcatatataaataaataaaacacatacctattttatttataaaactatatatatcaaattaacaatttataaacattatcaatataaaatataaccataatatatgcataatgtcacatttagttactgttttattttttaaaaacacatttctgaataacttataaacataagtttttttttttaaaaaaaaaaacataaatattttatttttaaacttatttattattaattttaataaacaaattatattaattctattaaaaataataaacatattagattaattatagaaatattttaacattaataataataattaaatatataggtggcgtttggtaacactattattttttaatttttttaatcacaaaaatgaaaataaaatttgggtttttaaaattttgtttttaaaaaataaaaatgtgttctataaccacttttgcttttttaattttaaaaatagaaaaaaatgtgttctataatttttattttttttatttatttaactcgggtctaggtccgggtctggggtcggggacgtggtttgagtccaggcctgtagccgaggccggagaccgagttcctaaaaaattgtttgaaaaaattttgaaagtgattttgttttgttttcaaaatttttaaaattttgattctcgaataaaaattaaaaagtcaaaacagttttataaaatatgtttatggaaaatatttttacttttttaataaaaaaaatattactaaagacaccattaataaatatttatatacattgtttataaaatataaactaaatttataaatatcgcatatatattattaattttgtatttaattttagtaaatacattaataatatatcaaaatataaataatgatttatatttttatatttagttttatgtattttttttttaatttaggaaattaattaaaataattaacatgttaaaaaattataaatatttatgtttatttctatattatataatataaaaataatgattatttgtaaatatttataaaattgtataaaattgtgtaattatatttttatttttcacattttttgtcatatagttaattttgttgttgcactaatattattaataataataataaataaaagatatatatatatatatttatttgtagagagaccaagtcataaggaatacagatcagtagtagatggtactagccagctagctagactatggataacagtttcataatttattacctgactaagaaactccttatctgtgactaagtatccttcacgaatagcctctgctactttttcttcatcgctattcggaacatcttcgactcctttcacaatgttctttcctaaattttcagcaacgtaatcagtcgctgcacaccctccatgcccatccattactgcaaaaaaggcctgcgtaccgtacgtacatgattaattcacttaatttagtcattaaatatatgataattaatgtagttatcatatatataaatataattatatttttatgtaattaattaatacttacttgctttgaatctcccataatgtcaaccaaaactccatagccatcctccatagacatcctcattccctttttagctgccaaaaagaaatctctgccttcaactacctcaacttcttccttatccaacctccttgttctacccgccttttcatcacaaaattcttggccttctccaactgcagggtattccggcacaaccaacctcgaaggcctctttcgtaacctgcaactaccggagtttttattacccttccaatcaccgccttcgtttacgttcatcatttctgatcttgcactcttatcatcacgaattatgaccttctcttgaagaaagaaacgacgtcgtttgggatcatcatcatcatcttcttcttcttctttatgtgcctcaatattaatgttgtattcatcatgatgaatatggtcatcatcagaattattattagctaatagaggtccaacgaagagtgggctgacccatgagagatttgaaggaggtggagagtttagggttaaagccatgcaagtgagagggtataggaaaagctaattataataaattaaagttagtttctagcattaacttcttctgtctttatatgtatataaatacataaagatttcgtgaaggtgtattgttgaattgtatgagatgtattttgttgaagaaaaaaagtgtgggctagctttagctctctgattttcatatatagaggactatggttataatatctaggagcctttggaagacggcaagaaaaggctctctatgtatacatgtgacattaatcaaggaaaagaatatttgatgatgatgattgccaagtcaaaggaaaattctttatgatctaacggctgagactgagacccttgtttacatggcaaattattatatacagtgggatgagagagggagagagatgagttttgacactttcaatccttctatgataaggaactagtcacggattattaggggtcggacggtaccgtccaagagaataatgtgaatggatgtgattgggcttctcttattcgtcaatttagttacccaaaaacggaaactaataacattattataaatgtacgttgacttggtgaataccatattttatatatttatatataatatcattatacgatcatagggatggatggatccatggtattttagtaattttaaatcggaaaaagtgtatatttgtattttttttttttttttgaggaaatgtatatttgtatgttgacaacatagttttataaaaatgtttagcaaggaaatgttatgtttataggtataagacaatatgtatatcatgcattatgagatataatattggcaagatgaattgatcatgaaattatggtcatctttaaattacattttatatattgtttaaaaaatggctaaaacgtaggtaacgacaatgtatatgtaacgttccagatcagaaagaatttatatattttttttattttttaaagtgttattaatatattgactgctaaggttaaagagttggaaaaagtcgtggaattattaacgggcaagaacatcataaaaaaatattagattacggtctcttttttttttttcgttaatttatttttacaatggaacatttcaataataattaaaatccatttacaaaactgaccttgaccatattcaatatagctcataggagatacaagtacactcttattatgagggagaccaacccaggcaccgacgcgtattataaatataaatgcaccattttgatttacgtggtgtgtttgtttataaca

SEQ ID NO: 18525 - DNA, 2770 bp, Cannabis sativa
acaaccaaacacagtttacacatttccctataatcatattctccttcataatattccctataatcaaattattttgaacacctcgtaccaaacgccccctaagaacagattggtttggttcgtaattacagtttaaacgaaatttataattaatcattttataagtatttctactatttttataaaaaatttactttttttaagtatatatttaacatgataaaaaataggtctatataaataaaaatataaagtcaaaacataatataaaaattcaaaattcatgcaataaaaaatttgacacacaaaaagttcaatctttagtcttcttagttatttattatgaatcactatcgaaccattaagtgatgagcagtctagattaaccatatcacaaaaaacaatctcgacgattatagtgtacagcagttcagattgtcgcggtccaaatttaaattacggtttgacgatttttatgaacagagtaaaataaatattaaaattactattttattattttaaatataattatatattttattttgaagagtaggaaagtcattttgtatgattttttttttgtctgtttcttcaattttcccattttttgagggattagaaattgagtatttgaaaggaaagggtctccctccattaatcatctcccttccctattccttcttgccaaagaagagaatttattacttctgttatctctctccttccctctttctctcccctatcaaatgtagagtgtaaatcatgtatttaatagagagaaaagagggaaggacaaaaaagatggaaggataccttctccctcctaatgtataaaattcaatccttccaaaagtgaaaaaaaaaattataaaataaagtatattaaatgtcttaaataccttttataaagaataaataatttatttgaagaggataatatagtaattttaataattaagtattttcttatcatttcaattttacttctaatatataaaacaacaaaaatagacttgttatcttctccatactctccatctttcttaaattctcactccttcctaatttccttccctcttaccaaacatagtgttatactacaaatagaaacttaagtaaatatatcttctttactgtccttctaaactacaagtcgttttctgtttaacgacacagaagtacatttaaatgtattgaaccatcagctttgcttatctctatatagaactaaaacacattatttgcttgttaagcctaatgagcttagttttggtgttggctttctaaatcatgctcaattcatgtaacttactccattttattttgttacatttcaacgcaaaacaacgtcggtaaaattttcaatgtcgttttaaattaatagtcattctctagttttagtgaataatttttttttcagcttgtattaatgttgttttgttatatggtgttttgatcttaaggtaatattactatttatcaagttgaaacatttattttctggttggcctaaacattttctatatataatcaactttattattagtattagtgagagaactcgtgctacgcacgtgaggtatttttaattattttttaaaaaataattattttgaaatgagacatattacttgttataataattaaataaatattttttaaaaaataattatacatatttacagttagctacattcacatttcaatatagaagagtttatattatttttatataggtttagttattaagctaatgagttaacaaattattaagcgaaaagattaaatatactgctatacaaatttgattaagtattggatgttttgctctttttaagttgtaaatggaaaaaaataagttatctcgatacttgatcataaaatagctctgatgataatgtacttgcttataaaacaatatatacttttatatagtctaagaaaaaaataaaaatagtatacttaacatttgttaaaataatataactgaacaaatatacttaaataaaactaagaatattaaattaggcaaaatacttcaaattgtacataaaattaaaataaatcttcataaaaaaaaattaagattaaaataaaaataacgataacttaatttaatttttatatgttaaagtttaaactatatgtattaattattgcaagaaaaatacataaatatttcatctaattattaattaaaaaaatcaaaattacaaaatattaatttaaaaatattacgtacattcatcacttataaatgattttcttaaagaaagaagaagaagaagaaaaacatataaaattaatgaactttgaatatacattaactctaccaatatttccaaaaaaaaggcaataatttaacttttatatgtaaaagtttaaattatattacaaaatgttgtaggaaaaattgcataaattagttcataaaattattaatttttagaaaatagaaataatcacaattacaaaataataattttaaaatattaatactattcatcacttattaaatatatatatatataaaaaaaatgggactaaaatttcaaataaataataaaaaaaaaagtatatattatgtaacctactttataaaaattattttttcctattctattttatattagacagtagagatttaaataattcaatcttaaatttttattatcatagatgaaataatgtatatttatatatgtatatatatatctattctatataaagtgtgcctatataactgaatgtttatgagaaattcatgggt

SEQ ID NO: 18526 - DNA, 5978 bp, Cannabis sativa
agtctgtactgacgaaactgaaagaaaattacagttttacaaatattgtgtacttataccgctaaaaataagcattaagtttatgccgtttacaaacttcaaacattaggtaccgtatttactcatattgttattcttcatattttatgaaaattaatttgtatgctctatctatgttcctttgataaaatttccttttctaagctatgatgtatgaatacattatctatttaattattttttcttataataatgaattatatatatattttgtgtgtgttaacgttccttaatatatcctaaaatatagaccatatagcatcacgacactagaattttattctgaaacaataatttatacattgttttttcgaataataattatacattttcttagcaaaaaaaaaaaaagaataataattgtacatttggtaaagtatataaatgtatatattcacgaaacaattatttttgtgtgcattatatgtataacgtgtagtttggtccagctttttagcacaagcccagcagcgccaatttactgaaaacagctagctgagaaaattggtagtagggtcacaccccaagagagtctcaaatctcatgcataaaaattttttttttttttttggttagataataataataattattaaataaataaatatccaagttgtaaagccacctcaattatctcttctcaagataatgcataatgtgtgtgcatatatatatatggcaactacatataagataatatgatagaaaccatcatgtataggctgtatctcatatatatatttattgatatgaaagataatttagtaatggaaataatagtttggtaactgttgaccaatattcctcattcttcacatgcatatatatatgaacataactaatcatgatttcatcaaaacaacataactaatgatctctggaatttaattcttaatctaacataaaaattaatatacaaaacaacaaaataattgatctctagtaaataacaaataatatgtacattactccaaaatcgtatcatcatttttattttactaaaacaactttaacttttattaataaaagtacattactaactttaattgattagcattaattaagtgcaaacttattaactaatacatggacagttttattacaagacctaaatacatgcaataattaaggtgtgtttggaaagttaatttgaagtaactaggtggactttgtggtatagttcttcaaaataaaaaggtctccataagtttattttaaaaatggaaagttatctgtctctcgaaagtatgttctcgaacagctaacctgtccatctagaagaaatctcgtatgtgaaatgatagttgccatccgggagggagttcctggatgactatcatgtctactccaagtgtagtcttcaaaaaagctagtcctcctcaagaagggaattccgaatggctagctgttcctcctggaagggagtcccgaatagttgactctaaccagttctatgctatctgaaagctcctttagtgagtacctttggtctgtgtttctggaattctcatgcacatttccggaagcacctatacgtatgttgatgtagagatctcgctcaaaggagagttggttattgcctagctaacttaacaacctcgctttttgcagccaccaatacttatcattttgatacataacgatcaaattgagtttcgaaatagaaaaaaaagattgagaatagagagagaaaggtacagaaaaaagagagagattgagtttgtgttttgtacgaagaatcttttgtagataaaaaagatttttggataagtgtgtgagagttgaaatactttgagagaactcattacagaatcgatcttgactgtattgtattttgttctttctcaatcaatagagaatatttggtagtgttctaaaattggagtagaaccatagattatatcgatctttcagacttgaatcggtatattttctgtgttaatttaattatttcttgctttgttttcatttctggttttatactctattcatacttatttttctctgattattaatcgtaatttattatttttatcattactaattatttaattatttaaaatttaattattttaattctacaccattagttataattttctaacaattgcgtacgtagttgtggcatcattggacagtcaaagatgtttcttcatttcttctatattgaaatctttatatttatatcattccgtttttttttttttgattgcagtcacaaattagtcatattcaatcataattataacaaagacaactcaactgccattgattgcatctctaaggataaaggacccatataactataattatattatatatatatctattaaattcacaaatgtgttttttctttcatcaatatgaattagttaaacaaaaacacttttatttatatttacctgtttatcaatcaacacaaacaaaacagtcataaggtttgaactagtaccataaaagaaaatataatcatttatattcaagccacctctttgattgctttcgtaaaaatgacatgaaaatttataaacgaactacattgtataaaatatatgtacaatatatatatatatattattaataaggtattaaagtcaattgaattatttgaatgaacattaattgaaccaattgaaactatccacatggtacatttctatattcagttttgtagaacaagttattgtatgatatcataaatgaactatatgctatgagaagtagatagatatgatggatgcaaatatttatgaactttgttgcatacaaaccatataataatcattatgtataacacgtatatatatatttatagttatattatttaaatgaaaaattgcttaccttcttgttggaaccagaaaacagaaggttggaccagatctacagctaaaaagtagattcctctgtaaaactgtaactaatgtttaagagtaaagatagtgaaaacaatgcaaattttattttaatttttttgttttgaatctccctcccaagtacaccaacttaatgaaaccatcattcacacagtgatttaagcaataaaaaattagctacacccaccttggaaaaccaaatagccagctcttattacaattataataataataataataataatagttattattatgatcctttcacatttctttcttctcaaaagttttgactggtctttctctgctcatgttttaacccaaactcatgtgctgtcatgctttcaaggaagaatctatctgtttctgtgaagtaaaaaaagaaacatttaaaaccatactccaaaatctgctgaaaaatgtttttttttttttcaccatgctttgatagaaagtaaatattatcttccgaattttctaaaactttataggtagtctttaacaactagactatgatcaggaaaagagaaagaactaaaagacaaagttcatttaggaagtgcactaaaaacttaccctatattttatagaagtataacataagcaaagccacctaggattcaaaaaagttgtcattgtttgaaagcagcaatattagaatagtattatcaatcaaaaaataataagaaaagaaaatgaatgaggaaaatccaggtaagtaatgggaagcagagttgagagaattgaatataaaaagggtagttattcactcactctcactcactgccagtttggaataatattttaattccatgaatgctgccaagaacatatctggcaccatctgtggcttcattcatcttgtgactaagacctctcactctccccatgttatagttttccctctcacacactttaattctcctccaaaatttctcatcctcatcttttcacccactcttcttcttcttttctctcttctttgtccaagtttagacttctctttgagacattttgtcaaacacaaaaactatgcaagacccaataggaattcctgcttgtttttcatcaactgagaagctgagtgatgatccagcagcagtaaccaggtcaggtcaaagtgttgttatgtccatttacagaaccaagattgctaatcacagccgcttaattacagtcacttggtgtaagaatcttttactccatggcttatcagtatcagtagaaagcccagataaagaaacccaatacaactgcaaagtggagcttaagccatggtacttctggaggaaaaatgggtcaaagcgttttgtagtggataataaaccagtcgacattttctgggacctgaggaatgtaaagttcaatggtgaaacagagccaaattcagattactatgttgcagttgtttgtgaccaagaagtagtcttgcttcttggtgacttaaggaaagaagcttacaagaaaactggttctagaccttctttgatcgatcccatattggtttcgaggaaagaacatgtttttggcaagaaaaaattcttaaccagagctaaattccacgaaaagggtagacttcatgagatctcaatagagtgcaggaacagagctgtcaacaatggcaatttcccaagtggggttgagccagaaatggaaatcaaactagatgggcatcttttaattcatgtcaaacatcttcaatggaagttcagaggtaatgaatcgattcatatcaacaagttaagagttgaggtttattgggatgttcatgattggcttttcagtccaggtttaaggcatgctttgtttattttcaagccaattatatcttcttctacatctctatcatcactttcatcatcttcttcttcttctccacccttgtcttcattggcatcaactccattgtcgtctcagacagggagctcaggatcattagagagcttaaacccaactgggtcatctgagttttgcttatttctttatgcttggaaagttgaatgagaaaaaagaaaaaaacaaaaagaagacaaattctttcatatcaaaacgacagtcgttttgctcccccaatcaaaaaccagaatcaccataaaggaacaagattggtcaatggagaaagtgggtcccaatggagaagggatatatttggaagagaaaaagttatacagctgggacttgaagaggggttgaacaagtgggcatgattggaaaagaccgattgtgatcatatacatgttcctaataataatttcattctttctacaatatctactggaatcttcttatctgtttttatgaacagtatatatataaaattatataaatatataaatttgatgtttcttcttgatctgatatcgataattgagcaataaatatattttaaacaattgtatctaaccaatatataggtgtctgtactgtgtctaccaaagttttaattctagtttatttattataatatagaaagatattgagaaatattgaggatttaagttacatgggtcactgcatgtctgtatttggccaaaaacaaatagtcaatcatgtgcagaggaggataaggaggactatgctgttaagttagagtttctggtttgcaatttacttaatagaatattacttcattttttaaatttgggacagagcatgcagttaaacgacaaaagttagattaagtcttcgtttgtgtaattaattattatgtaattatattataacttttaattaaataacaatattaatgcatacctcttccaacacaaatatttttataaataccaccagcaaggccttaaaatttagtgagctataggaaaaaagtgttttggggtctttatttaaaaaaaaaaatataatatttttcaatataagtaaaaaaaaatatataattttaaaatgggacaaatttttttgagactctaagctaggtaggcctaaatacaggcctagctcgccaatactcagggccggccctgactgcgagtatgcctctagaatttggggtatattgagaaatacctcttttatttatcaatt

SEQ ID NO: 18527 - DNA, 4637 bp, Cannabis sativa
  modified_base (26)..(63): a, c, t, g, unknown or other
taatagttttagaagttcatatttannnnnnnnnnnnnnnnnnnnnnnnnnnnnnnnnnnnnnctggtaaaataatttcgaacaacatgtaggatcaagtgtaaggaaagtaggtggccacccataaaaatattcaattttacctcagggagtcgctttaggagtgtaggcaactttccaagtaacataatcacgaataaacacgactcaagcaacgcaatcttgtttttcttcatctctctgaactgacattgaattccaagttgaatactttggaacctttacatccactgaagattggtctgaactgagaaagccatagttcctaaaatgtggttcgtaaaaaagaaagccagccgccctcattgcacatggcaagttaaccaactgttgatggcatattgccacagcttcagttgaattaggtttttgcataattattgctcaaaagaaaggataaattcataaaatatgtccatagaagtataagagcaagaataatttcacaaaaagtaggaataacgagacttacgaggcttctaaaaagttgtatgcacataagggtaaagtcctgtcgtctaaaagaactggtctttgaactccttcttgttcggggaggtcgactatgattttatactcatcagaatatttcacgagatagaaaaaacccctagaacaattcttcctcttaggaatcgctttaagagtgtacaagcatgtgatttcgtatggctcgagcccactctatcccatcatatgatataaagatttcaggaaagccaacattctatatccattcataattaattggaacagggatatacccaaatagttacagtaatctttaaaataatcctttaatgggaggatgactccaacatgtatgtcctatacactccaagctccaatcctgaagaaactacttgtactacattcagagtcattattaaaaagaccaggggaaaaataacttttctcgtcgtgttcgacagatcgatatacaaaaccatccccttgttttatgccacacatcaacaagaagagcccaacatacagagaaatagaagttactttagactaaaaaaaatcagcctcgaattgcactgatgggtcatgggataatctaggtttacgagctttaggagcggccatgatttgaaaatcttggatccctggtgaacaagcaacattaacgggaggtaaaaataaaggtttgttcaagggatatttaattaggtgttgtagcgtaggccaagccgcatctcataggtaacgatatttaccctcaataatctcatctataaagctcctagaatgagtgaatatgtcaactcaatttagtctatcgacacattctctggttctttcatcattctcctcaagttttgttttaaaatcatgagttttggctcaaaggatctaaagcaagtaaatagtggatttcttattctaaaaattttgaaattttacattcagactcaaacagaggcattttttctaaaaatattgtataaaatctacaaaatttgaaaactaaagatttagggttacaaagagcataaaaaccacaaatatttacctaacttaacttaaatccttatagtgccataataaacctaaaggtaaaaatgtgtcagagaattcaacaagaaaagaaatttcggttcttaccagttttaaggacggatgacggtttggatgaattgttcactagaagaaaatataggacggataataagggcgtacacaaagtaaaagagagagggggtttttcttttttacacaatgtaatttatgagtaaaaatggcgaaagtggttatgtagagggaaaacaatattttataatcacctcgtgagaactatttggtcgcaatgataattaatcaacgatagttaactcatgagtcagttgaaaagatgaccttaattgcatatagagtttttctcaaaaaaatacgaccactaaaaaatgatccttactcaataagcataaaggacgacttagctccctagtgatgatcaaatatctctttttgagtttaaaaacactttttaggggtaattattatacacatatttcaggcagtaaataataggtctagttgcatgacacgtgtacaacaaacagaatacattaacctggtgaatttaagagccgaggtataataacttcctcacaatatgaagctcatgcatgttcttctcgtagtaaatgatatttacaacattaaatgtgaagacacctaacatattcctgaggatgctaagcttgtcaaggcatttaggaatattcctgctgttgacactgttaacaatgatatgcttaatttgcttaagcttgatcctattcatcacctcgaaaatacaattagtatgttatccgatgaatatgcacctaaggcatgcatccaaaggttgatgaatttcttgagaaccttacatcaaaacatataagtgactcggcaagactaagtcaaataggatagatatattatttaaaaataaaagtggttgcatactatttcccacctattagatagaatatatgaaaaatagggaatgttcacgtttcatagtcgttgtacaaattagataaaaaataactgatatcctactcctataaatagcagtgatcacattgtaaaaaggacaaccaattttttaacttagaggaaattctattagattgtatctgtaaccaaagaacatcaaaaataagttagacttgtggagtgtgtataatttaacaacaaaattacgtaaaaaaaattattttctcatgtaataaatatataatatttattaagcattaaatacagaatatatatacatatagattattaattatcaactctcaattattaaagaaattttgagttaacaatgaatttattagttaattaagacactttgtaggtctaattaataaatatatttaaattttatatttttatgtaattataaaacaacaattgatatttaaataattagatgagataaatagcaaaatcggtaaaagacatagtgtttcattaagttgaaacaaaattgtaaaaatcaaaaccacgggcttcattagttaattttggccatggatgggtttttaagtccgttagtcttttctctagcccatcccatctattctaccctagtgtgttggctattttatttatggacagagttgagagttttgccattaacctaatttttatgtgattcaaagtgaaatgacaagaaaaaactctccttttctcttcattattttaaaaaataacagcaataattctctctcaaatttcgttccattggtgaattgagtaccaaaccacaatattcaaggtgcaatttagatctttgtagaagattgtgaagaattgtcgcttatcaagtttaaggaagcaattcaggttcatcacttggcaatagcctgctacagaacgggaatcgaaggttagagtgattaaacaaaagaagtcattagtttcccctacaaccaatgtaagaattatattccttttatgtgtttaattatcgttttatgaatttcatattttaggatgttagattataatgtatataatcaaacatacttgttagtaaattaagattttggtaaaataagttccaacacatcaatgggatatatctttgctccaataatatttctctcgattggatgtggagagaattttaacattgtctttaagttattttcctagtggagacactcttatttggcatcattatgacacggggatttatacagttaaaactgattatcatttggaaacattacttgaagctgatgttgaatcttctccctccacttcgccagcctcatggtggaattatttctagtcgctacagttgccacaaaaggtaaagatttttgcctggcaagtagttcacgatgctctctcagtcgccacctctttgttcatccggaaagtaattactgattccacttgctccctctatatttgggcttgggaatctataggacatgccttgtttgactgtaaatatgcacttttctgcttggtgatattcaggtttagtgtttgattggaattattcccattcaatgaaaaaaagatgattacctaatgcacctttcaaatatttacaataaagctggcatggaattaataatatgcactttgtggtcaatacagtttgaacgaaacaaaataacatgaggggggttgcgaaaccaacaagggtatttttttctcgctatgaattacttgtagaattttcattcagctcaagccaaatatcaatcggatgctagtgttgcaccacgacttcctccaccaacccaagcacctataccgtggcatcctcctactccaggtgagttaaaattgaatgtcgatgcgaccttagatataaatagaaacatcattggtgttggagctattattcaagattcacatggtagtgtggttgctcttatttcaaagcccattatagataactttgcatcacatgagatggaagcaaaagctaatttctatagcctgaattgggtttacaaatgcagcaaccaattgcacaagttgaaactgatgctttgatgggttcgaatgtgaaaaaccgtgttcttgcaaaatgtcagttatataagaaaata

SEQ ID NO: 18528 - DNA, 3843 bp, Cannabis sativa
  modified_base (2734)..(2735): a, c, t, g, unknown or other
cttgcccttgtagttatgactccaatgtcattgaccaagtatttataattgtggttgttgagcttcttaataccaccaattacttgagcatatatcactcatcatggtttggcaaacaaactaccaaacgagcttaacctgatttgtaagcttcacaaaactcaaattgtgcacgacaacgagaagctcttctaccactacgaacttgacgaacctggctctaatactacttgttaagtaaaaaaattataacactctattattattgaagagtactagtacaaacttagaacactttggacacaatgattctaagacactcttatacttttacacactttggacaaaatatttttagatttttttaatttactaactaattaattacttattactattttctaaataactttattactgtctaatcttagttcaagtaattcaaaattttctttaaaattttctaaagtgttcttggttttttttctaaatttttcaaaacattttaaaaaaaatttaacatattgtagatttaataatgactcttaacctaaattacagttttatcaggtgctttttttacaagtttttcatattttgctcaaacattaaatgattttctccttaaataatataagaagaataaatttattgttgttagaacttctggtctaattaattaacaatatctcttggaaagtttacattatattattaaataaatgtagagcaaagcaaactttcctgaaatgaaatgatccatcattcccttatatactaatatgttttatttatatatattatatataaatatttaggtaactctgtactttggacacatggggtttgagttaagttaagctataagtttatttttgttagaatgataaaataaagttggcctcatgccacaaagtaccaattaaagatagagagatattctcagtattctccactttggacttagagatattgtatagtaattagtagaagctcagaactccttttttaagttatattatattatacatacataatgggtcacatatgtatatttatatataaatatatacacatttatataattaattaattgtgagacctctgtccttacgtgagttaaagattttgtttaaggtatttgcgaattttgatcaaatgggttgaatatgtggtaccctttcggttaattaatagattccataaattaattagcaatatcaacttaaccgctgaaaatattataccacattttatttgaacagttgtaaaaccacaaagcaaagtaataatataatctttatatatactttgtgtcatcaaaattactctgctgagaaattaatatacttaatcatgacgctggctataattaaagaaattattaatgaaggttgaaggaatatttcatgagtgtacgctttaattttattttcttttctttttttgagggtcatcatgtgtgctcatgacttttaattatatatatatatatatatattaatattttggcaatgtgtctttagaagaaaattaatgagatttagattttcagtataatatgctttgatatatgaatatttttctctcttttttttttcttttttgcctgtttttttgttcatacgattcaaaagaccacttaatgaatcatggcattgttataaaaatgctgatctatcatatcattcaggaatatttttcggaacccattgaacatattaatcttctttggaattaatttattaaaatcatattagtgacaaaaattaaaatgaattatcatgcgtgttacatttgaagagtggtgactaagagcgagctctataatattatgtacgaattactaaccgaaagaaagtgcggttggtaaaggccggttagtgtttctgccgaaatatgagagaaggtacgtacgtactaattatattattaaactaaatgatatgctaattattatgaattatatattaagtaaatatactttttcacttatattaagtctacttaggaaataaaaaggttaagtagagtgtgcttgtttttggcttcaattttatttaccgctgtctttgacatgtagttatgctttgtatgttaaaaatgaaattttatttctttgtcaaatattctttgatgaaccttttcaagaaagttggtatatacctttacattttttgtgttttattacaagaagtagttttccatatatatatatatataatatatattttgtagttatgcctctaattatagttgtgagaatttgtaagtgtgattaagaaagtaaaatatatatatatggtggtgtatggtaagatacatggtttattatatctcttatatggtgggacactgttccacataattaaataaatataaaaaattgagtcatataagaaataaactaatttagttattaccacttaattttaagatgaatctcattataaagtttctcacacattaatattttcatttttttttttttttttgatattgggaaataggaggattcaaacttgaaagctcctctttataaggaaaaatgtataataatcatattaatattctcaactttcacaaacttttggctttatatgattcaaactgtagctagttagctaataacacatctggatcatctgactatcgtaattcctcacgtgataatatgatgagacagtacgacgggcagaaagattaattcttacgtatatatatatatatatanntatatatatatattaatatttaatatgtataaatataattgtgatggttctctatatctcagacgatgactaattacatatataaagatgtagtacgtacgtatttccatatatgtgttcaatattttatcgcgcatgtatactttttgagcatggctattggcaccacactgccttcagttactaattttttatattatatatttatttaattaaaatgtgaagaatccaatattaatgaaataacaatatgttagaatattagttttgccatgaaattagaaaatatatatagtacattaagattaatttataatattttccgtaatgataatttttcaaaaatatatattaatgtagtacttaattaatgatttttcaggagatatataattaataatggtcatttgtcaaaaatgtattaatattagaacacacatatgctgataaaaaaatattttatcaaaggtctttccattccatatatatatatagtactagactctagaaacaatgattagctgaaacatatataagctataaaaagaacaggaattaataaactaaaatgcaaatacaatcaatatatatacatatgtatatatatatatcgtgtataataaaatgcgccaactagttcttaatggcgtgaccgacaccggggctatggccaggagcggtgggcctgaagttgctggcggtgtggccagctggaggcggtggcggtggcggctgagattcaccgatgatcacagcctgtccatcttcactaggcggcgcagccggagttgcattattattattagcaataattgcattattgttgttgttgttgttgtggggtctgttgttgttatttatcaaaggtcttccatatatagatggaattccttgactcaatacaacaatgaaaagaattagtactacactacagctaaacaatttgcccatattaaatatatgtgttaagataataatattgttttagggagggcaaaagagtaaaaatttcaagattaagatccgctgttatgtgtatatatatatagagagagagagagggagagcgagcttggcaaatggcaatgtaaaataactaagatagcaa

SEQ ID NO: 18529 - DNA, 6005 bp, Cannabis sativa
  modified_base (1973)..(1989): a, c, t, g, unknown or other
  modified_base (3149)..(3162): a, c, t, g, unknown or other
aaggaatggaatgaaaattgtttcatttccattccattccatttcattacctccaaccaaacaaagttttaaatttgtaagcgtcataaatccaatatttatttttagcggcataagtacccaatatttgtaaaactgtaatttttctttaatttcgtcaacacaaattctgttatttttttaaacagaccacatataaattccagattcttgattattgagtataaacagaaacatgtagtatcatttacttccaaatgttcatttaataaattcaaaacggagtctgtactgacaaaactataggaaaattatagttttataaacattaggtacttatactgctaaaaataaatattgaatttatgtcacttgcaaacttaaagggtattttggcatcttttaaagggtctatcatgcattgacatttgagaatttttttaatttaatttttttatataaattatttatgttataattatttaagatattttagaaaattttaaaatgtcaaaaatataatttaaacaatttattatatacaaaacccttttatgctatacatttataaaataaattatttgatgtaaaaatttctaaaaagtttaagatgtgctaaataactatgctttcaaatgtccaaaatagatttttttgaaaaaaaattgtccaaaatagatagtttactcataatgataattattattccattaaaaaatgataataatgatgattatgatatttattgttaccaatctttgaatgtgggctagctgaactgaattgacaatgacattataactgaagaaggggttttgaattagtagttatttaaattaaggacatctaattattgtttattaaatattaactacttgattagatattatttaaaaataatcatgacagttaataaaacaaaagagtaattattaaaaacctgtaacaatgcaaaacagtaactaatatgtgaaaaattagaatataaagaagacaaaaagaaatcacctaataaccttcaacaaaaaactaaggtaatagtaaaggcacttttagaactaaaaataaaactaaaatcaaatttaaaacacaacttattaaataactaaaaccaaaccaaactaaataaaatatacactaataaagttaataattattaatttgaatttataactaaatattatacactttcaagcattattaaaaacaacatataccatagtaaaattattttctttaaaaaaaatatactccaatataaaaatattaattgatatgtaatcccattacaaaatctaccccaacaaagtataaatgttattattttttttttctgtgggcaggtgtgtttttttttttttcctaatttctagattagaatgctcattgagatcttatcaaaatttatttatttattttttgaattgatacatgtgaggtaatttaactaaagtaatattttaaagttctccaaaattattatataaattgttaattatatagaatgttacatgtgacccataatgggtcccttattgtcttcctttctacaaaaagtggtccatgtatcattattgtaccttaatttgaagacctttatagtaaattaaattgaccaacctatataatatatatgttaaaaatagtttatgttgaaactttgtgaaattatataaaaatgaaaaagtggagtgtgtgagtaaataaaattttatatgggatagaaatactttataagaagtatgtataatgtgtaagtttgagatttgggtttgagtttcaaggggtatcgagttttgtgtgcatggatgaggaccaggaccggccatgaaacaaagtgggtcatagggaaaaaaaaaattggacccttatgttagaaaaaatgtggtattttttaaaatcagtaaaaaaaatgtataattttaaaagaggaaaaagaaaattttaggcccctgggctgggtgggccctagnnnnnnnnnnnnnnnnnctatgcccagggccgggcctggtgcggactcacacaatgatccgcttttcactgtcatgatccacgactatattaccgttttcttaccattttctcttggatcaacttctctatacaagtcgtatcagaacaacaaaataacacatctcttcaatcacaaattttttttcttctttcttatgatttttctcagagcaataatttagggtgtaatcgaacgatatatttcagtgcagaacatatcgtatacagaggctgttttattctagggataccgtggttactagactgccgtgcacacttcgagcagagccgcaaaagttttaaaaaaacgacattgtctgcgactcattcaaaaatttgtatcagtaattcgtttaattttattattataaatttggtataacagttcataatatatcacttccaataataataataataataagttcatatatcttgagagaattgtaggataattaaagtaacactaatacaatattcattattcacttacatattgactatggaaaacgacacttactacggtatttaatgggtgacgaaatgttttaataattaatgtgtatccttttaaattaaattcatatataactcaaaactcttcaattttattttattagcttaagtttaattattgttttatgaattataagttatagtggttataccttacattattggatattatgatcaatagtgttcatactttaaatttaaatatgataattaacaattagggtgaagccgttggtagcaataaaattagtggtctcatttatatataaaaaaatatatatagtattttttaaaaaattattaaaaaaatatgtatttttatttttaggcctcaatgttggtggcccttggccaatgcctagcccgcctttgcaaagacccgccaacaataaataatcttataaatttatattattgaattagctacaaccccctccattttcttcaagacatataattaaatttagtatgtaatgagttgttagttgttacacactttctaacaaaaacgtccaacttctttgtggattttattaggtaaataatgtgcttatatataatttattaattaaaccaatatatgaggttagtaaagagtaaaataataataataataatannnnnnnnnnnnnnaataataataataataataatcgtatcaaattaatgggttaagtggtgtggccaaaagactcttgattaataatgtgatcataacttataagattaaaataaacatgcaatgaatcaaattaatgggtttagtgaccaaaagacttttttatcatatgagttttattattttaaagatagtgaatttataaagaaatatatgtatttgtacttgtatagtatcccacctaattaatcacaatattattattgcgacttacataaatttatataaaaaagaacatctaattcatttaattaagtagaaaaaatagaatataagcaaatgatgtggttttgaaaaaatcccaagagtaagagtttatagaggtgtgattatccaatcctataatagtaatctccaaaattaggaaaaaagttggacaaagatctcttattttactattgttattaattattaatatttataaattaatctctataaagtaattttttagaaatggaaatctttgattttttttttttaaattatgtggttcaaataatcatatgagtacataaatctacctataataaatgaaaaatatataatatattctccatgtagctattataccatgcatcatcatatagcttgttgatcatttcttacttctgattcttgggtctacaaaatcataataattgcaatataattttttattattttattttacatacaaaatatttactatattgggtaaaaaataatacttctgatggagtacaatttaataaagccatttttaatatttctcccctcaatttgtgtttatgaaggtatttattatggttatagaatcaaccttctataacaattaaaaaagttctagataatctataatatctaaattaaggtatatataattattttgtaggtgcattataaactgtttgaaactaaaatgataaattatttgaaatttgttaaaatttgtaaatactatgctaaattgatgagtactgttattgatttattttaagtacattattatgttgtggcagatttattattagaaaataggtaatgacatctttataaactgaataacttgtataatcataatacaatttgtgccattttggtaaggggaaagccatcaaaacaagagaggagtagttaggtttggactaaagaaccaaatagaaaattctcaaccaaatcaacttttttttacaagctctcgagagagactaatactgtcatgtcgctccttatttatagaacaaactttggaataacaaaatgcttgaacgaaatgaagtgcattgatggagcattctatccaatgcacttccaatttaatccaaccttagagaacgaataaatattgaagatttctcttgccctttttgtgggagataggaagaaataatggagtatcttttttatattcattgtaatatggcttctcatctttggagagcgtctccattcatgtttaggaattggggactaagatgtgggactgggataaatttatttggaggttgcaagtgagagatgtgaattttgataatatgtttttatgtgcgtttatcatatttgacactatatggaaagcaaaaaatgttaaagtacataacaaccatctgcataacatccattattatcttgactctttactctttgttatacaaaatatggtcactcttttatactaattacatccatccactgctatcactgagtgggctcctccgcctatggactagatcaaacttaactgcgatgtggcagttagagtgagggctatgataattgttgttatggctcgagaacatgttgggaggatgatttgggctagtacaaagtggatgcattttgctaatgctcttagtgggcagttacttcttgtttgctggcataggaatgtgatgttgatatagttattaaaactatcaagggatcaaacactaggtggaaaattaataactatattgctcattgtaaaagctttataaacttctttttgggatgtaattttcaaaatttttagatcttttaactttgctgttcataatttaactaagtagacgtttatcaaaataaaaatggtagttttggagttgtctcgataccaaataacattatttataatggttacagttctgggatgatggatgataaggcacctgtctccttgtagggaataggtttaatttagaatgagatgattggaagattttggtcgaggtttagtcatattctagaattgatagaaagattctatatagttagagtcaagagctcaaatctgttatgatgtgagaccggtattgtgtgatcttcgattgtctgttattcctgttgttgtaggacactctcttgtgcaggccgagactcgtctatcaaaaaaagtttttttgcggttaaacttttttaattatcatgacacttgcacttaatccttcaagctcaaattttggtggtaaaatcctcaaaaccacttaattgttagcaaacttaaggtgtcatctatttttcaccgttaactgccaacatggactgtttatgtgtacagtcttgtagacatgacacgttagcaagacatgacatgtttatattggtacacataatattattatttaaaaattataaaaaatttctttaaaatttataatattttttaggggctttttcatttttacactttagaacattttttttttgtgtatttttacagaattctacatagaaaactctattgtaactggcgccgcaacctaaattgtaacaaaaaattgtatagaaacccttattgcaactagcgctgcaaccactttagaaacctaaaccgtaa

SEQ ID NO: 18530 - DNA, 2712 bp, Cannabis sativa
gaatggtgtggcccacgcactagctaagtctgttactagttctgtaggggttaatatgtggactgatgcttgtcctagatttcttagtattcctatataagctgatttgactttgaataacatactttctttcaaaaaaaaaaataaaataaaataattttagaaacataatttactacacttaaatttttttttaagtaataaaaattctaattcgcattttctatttaaccctcttaattacacataataccaaaattaaccacaaaatatagataatatataaacctgactacaccctcatctctaattccttttcgctgcaactttctacttctaccgctcttacgaaagctcgccacaacaatggagagggcgactctacttcgctcttccatagcctgcaatcgaattttctcatttcgttccgctactaggcgcggtctctcctcttcatctcgctctggttcatcgccattttcatcttcttcttcttcttcaagaaaccgctccattcccaatatcaacgggcgctctcttctccgccgccaatggagattactacgcacttccacctcgtcttcttcatttcgtctccacaagcacttctctactctctctccgcgagccgtcgccactcccactcaatcttcttcctcaggtacagttgaagctcgttttttaattttattttttttattgtttttatccagtcaatgaaagtaaaatccctagctttgatgccttacctgctgattattattcatgaaagagttagctgtatttcattttggaaagtttggggttttagaatttatctgggattgaaatgaatggtttaatgttgattttttttttcaattgttggttggttcagaattttctggggtccaggatgaggttgtggagaagcttggttttgagaaagtttccgaagagtttatcggagagtgtaagtcgaaagctgtgctatttagacataaaaagactggagctgaagtgatgtcggtgtccaacgatgatgagaataaggtttttggcattgttttccgtacgccaccgtaagtactatgcagtacgcttaacaatgcttcaaaaagatgtatattattttgaagtagatagagaatgataacattgtttgcaatgtctacaaaccttcttgagcaactcatatcatgaatatgcaggtttttacttgttgaatgaatggtgtgagaaactcttgtaattgatcaagttgtttgcttacttttttaatctaattgttgatacaggaaggattctactggtattccgcacatattggagcacagtgtgctgtgtggctcaagaaagtatcctctgaaagaaccatttgttgaattattgaaagggagcttgcatacttttctgaatgcattcacctatcctgatagaacttgttacccggttgcttccacaaatacaaaggtggaaaaaatggaaacaaagttgcttctagttgttgttatgtatactacatttaatcctaaaacatggttgttgtttgcttataggatttttataatctcgttgatgtgtacctagatgctgttttctttcctaagtgcgtggaggattttcagacattccaacaagagggatggcactatgaactcaacaatccttctgaagaaataagttacaaaggttgacgggtttccttatgcatcaagttctcgttttgttatttcttgggttactcttgatctaagttatttctttgtatcttatggagttcttttgtttacataaaattatattctttgtattttaggggttgttttcaatgagatgaagggagtttactcccagcctgataacattttagggcgatctgctcaacaggcaagtttcctttcttcttcaatttttggtttgtacaactctaatttggatcctttacggaacacttcaaccatatttaattagattgtgcaaggaagatggagaaattataatttatatgccattgagtgagagtttttggataaattgttgcttacagtgcctccaagtaaatcatgtaatatagttgcactcaacaaaatcattcaccggaagtaaacattgaactgcatttctcacttcacttgtattccaatcgcttcacctcaacattttctcgtattccattacacaccattgtctaccacattcctacatattccaattactccttttttactcatctatgtttcatattggggccttgcattttgtagtttcttgaagtcaatgatttctatttcattattgtgcttgctatccattttagtatcatctcgagctgcaactattggtttatattgctaattggatattgcaactaattggctgacatgtcttgctgtactttctgtgtgcaacaaggattgtagtactactagagtactagattatcatgtgattttgtcctctttctcttgagttattgtttccttccaaaatttcaatacaatttgttttgtaggctctctgtccagacaatacctacggcgttgatagtggaggtgatccaaaagttattcctaacctcacatttgaagaatttaaggtttgatttggtcactaaaatgaaaaatgcttgttgtaatgcattagattaaataggctttcaaattcaagctataactgcatagatgctgcaagtgtatttatgcttcgttttcttcttaatttattattgtt

SEQ ID NO: 18531 - DNA, 5361 bp, Cannabis sativa
aggtgatacaattatgtgatatataggtgcagggttttggcacatgcccacctaattaggtgatgcgattatgtgatatattggtgccaggccatggcacgggcttgcctgattaggcaatgcaatataagattattagatttaagcatcaactttcctgattaggcaatgtgatgtaatgaagatagttactttatgaggtaacatatataaaattaataatattgcatgaatatgatttctattattggtataatagttttgtattaccaaatatatgtatactgatgtttattcgtatcagatgctaaaagtgatttagatttcattttatgtgtaatgcgtgattatttgattctgattgtctaagtacaaatgataatattcgaataataaactatatgattattgtttttaccttttttactgaattcttgtgactcacgggtgctatgtggtgtaggtaaaggcaaaaaaagctagatcaaccatgaggtgacagtcttctctagctatgtatatattaaccataccggcctgcgtgccgagttgccaagagttatttttgggctatatctattgtgtattttgatttttgtgttttgagttattttcatatatagccttttagtaaatcttttataacaaggatacctggaacacatttataatgtcgttatgatgcccaatttaatattactcaaattttaatattatcacggtttttataattaaataaatctattagtattaaactagtttataaaattatacacatggcgtccttatagattagagcgttacagttcaggaagttgaaagtagtgaactaaggcctattcatcgcatagtgacaagatccaagctaggaatctttaaaccaaatgtgaatctcagtaagaaaaaattgaaagagagcatagcagaacctagcatagtcattaaagctttgaagcatgtaggatggagaagaacaatatctgatgaaaacacaaccttgataaaaaaaaaataaaacttggattttgattctaccttcacttgactatagcattgtaaagaaaaaataggttttcaagataaagtacaatattgatggcacttttgaaaggttcaaagctcggttggttgctaaagggtgccattagagacccagtttggactttggtgagacctttagtcctgtaattaaagcttcaacaatcaaaattttcttgacaattattgtaagtaacgagtaggaagtaaaacaacttggcataaataatgtattcttgaatggaaagcttgaaaaagatgtatacatgacacaaccttaaggttttgaagagtcaagcaaaccgaactacatgtgtaagctaaaaaatcactttgtggcttgaaataggctcctaggacctggtttgatagcttgaaaacaaactctggtgtagtggaactttcaacactcacatgagataccactttcttaatgatcaaaacatctcaattaattatgatgatgcttatctatatagatgacatcatgtttactagcaaaaaacctaatgaacttcaaaagttcattataaggctaaataaagccttctctattaaagaccttgggcacccaaattatttcttggacaaagaagttttccgacacactattggcatgtatcttactcaagctaagtacattggagaattttcgagcaagtttaacatgttgaatcttaaaccatgtctaactcttatgaatggagggaagccactgtctttatccgatggagaagcccttgaaaatcatcatattataggagtttaatatgagaactccaatatcttgttcataccagacctgacgtagcatttgttgtgaagaagttaagtcaattctttaagtgtcaaactatagttcattttagtgctactaaacgaattctcatgaggtacctcataataccatggcttacacttccagcacagtgacaacttgagtttgaatagatatttagatactaattaggcttgttgtccaaatgatagaaagtcaattggtggttatagtatctattttggagagactctagtttcatggtcatccaaggaacaatcagtggtatcaagattaagtactacaaagtaaaaatacagggcattggcacatgcttcagcagagataacttggcttgaatccttacttaaagaaatgaagcttccttagtcatccatctcaatgatatggtgagataacatgagtgcacgtgctttgctctctaatcccatttacctagagacaaagtcatccaaaggtagcttgacatttgctatgtaccttcattagaccaaatagcagattatttgaccaagggactttctcattaacaatatcaattccttattgagaagctcgaagtgaacgaatcaccctctcgcttgaggagttatgttaagatatgtctaattcctctgtctaatgactctgttttcagtgagttagtggtaatagagattagttggtattattgtggtcctttcaataatttgctttgtcttatacttttttgtcttgtactttttttccttttgttttttggttcaagcttgtgtaaaggtgacaagtagctctattagttgtaatcattcaaggcctcactgcctttatataataaattgtctcctgaatctccttcttgagctgagttttatctagcgccggccctaggcataggcgggctaggcccgtgcctagggccacacttttcggggatgtaaaataaaaaaaataaataaatttattaagcttttatttaagtaaaatttaagtgcattgtaaataataaatatttataacttaattggttgagtagtatgacatagtatacaaggtcatgagttcaaattccataacactcttctttaatattttttttttatatatttttgagggttccaaaatttaattcgctttagacccatatatttttagagccgaccctgattttataattttattagtgaaatgttactttccaaactattgctatttaattctaaccttaatatgaacatggagaaaattaatatagctttatttatatataatattagtattgatattttttattgaaattaagaaacctatcaaatttttaattactagttgattttcgagctttattttcatattatgtgtaatcactatacacagaaaattaatacatataaaaagccaacgtgctaagaacgttggtcgtgatatatatctatatttaatccacgaccagagtaaaaccaagggtatgttctgtccaaataaaaaatagaatacaatcatgcttaattaattatatatttgttctaagtgatcgttaataaataaattaatattatcttaaacccaacaatattttgttcatatccggttgtggaaaatattaccataatttcgaaaaccatattaattaaagctagctagttctctttgttgcttaagaaaatagataaactcttaagcaacctgaaccactctccttcacatgcgtaaatatcttagtaaagcagacaacaagaaatgttttcagtgtatattattcttgactaataattaataataattagtttattatttacatatatataaatatacgtaccacattttgtactaagggggtaattttaattaagctagatttgtgccacgtatgtgcttttattctaggttaaatgattggcaaaaataagaacaccacaccatgcattagagacattttcatgagccgtgatttgtttttgctaaaaatctgacggaattacgagatcaattgccagacatatatatcttacgacaagttataggttacctacgttagtcgatattagggaattagaatatgttacgtacaatttcaactattatttcctatatatatgtgtgtggatgtggtcctagaactctacatatttatataaatatatatatatatatgtatacatatacgtgtcaattataggacataaccaggcacgtaaaaattattgattaattaagcggcttgaagatcactactcatcgagtgtgattacattaattaggttttttttttaatttttgtttctgatcgataaaaacaattaatgtaagatgttggtaagctagatataatagtgtcgggggttgttaaaaacccttttacttggttttttgacttttatctcttggcttaggtgaacacatggtatatacaggaggacttttgtttgtttttctcccttgacatctgatgataatttgtttattttcactaaacagtaattaaatcatcatcttcattgatatatgcatgcatgtgggtcgattcgaaattacaaaaccctatatttatttgtcaagatcaattgtacttatcatagttatccactctaattcatcgatagttattaatatatattcgttaccaacaagttggtcgctttggaatatattattatttgatccaaataattagatttaatttctcatgtaaataatgcattttcatgaagttgttcgtacgtagtactactgccacgcgtcacatatataatatatatcacatcacgtatctataaattataaagttttcattgtataacttgcaagccactataagcatgcatacattcacaatgtatacataatatatatatatgtgtgtgtgtacgggtggttagtgtattcttttttgttgttttgtggttgatgtacgtatttaatgagaaattgtttaatcattatgagaaacatgcacatataataagtttcccataatataatgaaatctgggatttcaaggaaaagcattattatacttcatttgactatgcgtatagattgtactacttttatactatgtatataaggcatacaatatatatttatatatataactaccaaaaataattatctttagtgacaatcttttagtcaaattttataactaaatataagttttagtcacagcaaaaaattagtgattaatacgtaatacagcaaaacttcaattcaagaatacacttgggatcaagtaaattatattctaattaaaaggttatcaataaatagagttacattagaaaaaaaaatcaaaatactaaaataatattattaatgtaataataatagtaataaataataattaaaattatatattataataaaattatatttgagtaaatataatatttatacatatattacaatttaaaataaaattactaactctacgtaaataagtttacataatatatgtatatattttattaaaatgtaatttttcttatagatgtatactttattaatacggaacttaagaaatgtataattaattacaatttaaa

SEQ ID NO: 18532 - DNA, 8181 bp, Cannabis sativa
tcatccatgaagtttcctatcttacgcacctcagaatctgtggtgcccgtcaactatgtccctttgatttaggaaaaatagaagtaccccgacctgctttgttttgggcttgacttcagatcgaagaaccagttagtatcgtgcggggacggctcacctcatccttttgaggcatagaggacgaacaaggcagacagatatttgatgcctttcggagtaaatggggtcaggcaaaggtggtagtagtcagcaatcttcctgaagtacgaaagcaaaggtaacatagctccctggttggtatgagtgcctgaccaagcgcaatagccttcccttggagtagtttccaaaaggttaggagagcgaaggaagcattagacatcccctaggtaaccaccgttgagaaaattcttcatctttgctctagtcaccacgaatagaggaaaaacccaccgatctcctaatgtactcttcctcctcagaggaatagcctcggtgtattcgtcgtgatgtaattcttaccagcctccaagatttccccatctcagacacatgtcatccttctttgttaaaaccaccaaagggcaacctctgagctgcaccttactcctcttcatcttccgaaggggtgccaggatagacctcgccctgatcctccatctcttggactttaatgtccctaacaatatcttcttccttagtagcaggccaagcctgttccacactcgccattctggtgagacgggctatgtgtgggtcggataaggaagatttctgtacaatttgtttggtacgcgccatcatcgtagacctaggcagagtctggttgatgtgtttggcgatcgttacaacgaatgtagcaatgggtttacctgcaacagcatgatttggatgccctacaggcaaggtatcaacaatatctagtcggacaatatatgtccagttggatagtagataggccctctacacttttctaagttcctagatgaagcattcgtagccttaaccttcgatctagccgggataaaaatggtgttgcactttaggttttggagaagatgtgtgttcactacttatctcccaatcttcgaaactagacttggaatggctatcactggatgaggacaaactagcaaagaggcgaggatgatcctcgtgcaagagttgaagtatatcctggtcgatacgatgttcactccccaaaacacactagggtttatatacaaaatgtaggacacaagatgagcatttggttggaataacgaatgaaaatagattaattatactgactaggtccaatcggaaaatcaaaaatagaaattttgcataataatgaagtttataatccagaagttcaaaattttgaatttaggtttgattttcactaagccttaaatgggtaagtgaaagtgagtatcgtggaatcaaaattaaaacatagttatgatcaggcaatgtgtttaagcgtagttaagatttcgaattcctaaacctaaattttctatggttctcctagaataaattcaagaacaatcaagttttgcaatagaaaccaaaaacattaaacatgaaaacatataaaaggaacgaaatgaagaacttactcactgatttgaagcttttggtctggtcagaaaacgttggccagtgctttctgaaaattcttcgaaggaattgaaaggtaaaaagattttttactctgattcttcaagagtgaaaatggataaaagtgattgattatggttttcaaccctatttataagcagatcaacgaagcaaagtaattatttcaaactttaaatgcctcgaattcccccaaaagtgtacgttatgcactcaattatatgaagaataaccgtcatcaagtgctaattctaaggcgtagatcgaggtacatgttaatgaacattaatgagccaaaactaaagagacccttggtcagagtcatatcgggtcatcaatcgacacctcagacatgtgccacccgttcagacaaaaatctagaccgagtgaagtccacgtgcaacctaaaaggtcctgcgtagacttgggggaaaatgttatccattttttttgcataatgacgtggcagaaggatcaagtgacatgtgtcctacatttctggtacttgggcggagctgaatgtctcgaacagactctatattgtacgtctgcatgtataacctttgcttacccgagtaagacaaaaaactgatcatccgagaaggtacaaatccagcttgccaaattgctcatcaagagttaattacttcaaaatgatgttgtggagtccagacatgaaggcaatccctacaatcgtcagatcaaattcgagaaatatggcaacctgttctagtttcctattttgtgaattataattatgtaataaatgtaatttcctattttatgcattataagcaaaagggaaacctaccctcatgtatggaggccctataaatagtgacttagccttattgagaaagggatcgaaagaattgcttcagagagaggtgtgtaagagaattactcagagattcattgtaagagctttgagagaggaaaacactttgttctttatctcaagttaatacaatctaaggggagtaggctattaccacactcaccgggtcgaatctctataaatattgtgttctttatttcttatttgtttttgctctattttaattatattcttaatcgtttattaattaactcactatcgttggctaaaagcgaggtcaacaaatccaatactactatactttactaatgccctcgaaaggacattcaacatttcattgtgtaagtaaactttatagcttattatcacgtcaatctaaatccagtgcactaataaatcataggactaaatagtttgaagcatataatcacaattaccttccactgtcatgacattactataatcgtgagtaactatatgttcgagatttaatagaacttatatgttaaaactataatcatgaaacatgtaaacctaaaagatttctaatcatatattgatagaaaataagattacattgtaatgggttttattcagggcataaaatcccaacaaaaatcccaacaaactcccacttgcactaacattaaataagaagtgcatttcaattaaaccattgtgtcaatattcatataaagtgtagtgtgtttgactttacccaagcaaaaaatctataaggtcataacaagaaataactttttccaccattacttcctattgtgctcacaggacattgtggaatgccatttttctatatggattgctcgtcttgggatactgatttctttactgcctgataagtgcatctgaatgtacagaagacacaattttcatcctatccaaaaatagaatagagataaaacagtcaagaacttcctttagtttgaataactttctagtgccttttcaaagcaacatagttatttagtttcactagttgaactaagatattaaagatgggtttttacacatatccagaataatttctctacctctagaataatcaccatctcaaatattaaattttgagttgatttagatttacgggttcaaaaaaaaatatcacccctatcatctaatatataggtaacttttaatctagagattctttcttgactatatccctatgttctcttgttggattacacttttgagggttcccactcaacaataggtgtctggtttaatgcatacacaactgtgcatttaacctcttaccattggtactaagggagatcctattgtgacatttatctttttctagaaacgataaattctttctagactaactcatccacataacgtcctagtattatattagtgtagaataattgtttaagaatacttaattaccagagataccataaaactattttgttgtaagaaaattcataaggattgggaattgtgtttaactcttttgaatagacatagaaggatttcctatcttatcctcataattctaataaattataactatctatgtaatggtttaactatccttagctttatcttaaattttctttcttgaacatatcattgtgagtcatcactagtttcatccaaataataacaggatggattccttgaaatcctcccactatgataagtgttaaccctaaaaattgaaagaatggatttttgaacttagtcaacaattagtctcgacggtcgagagacatcgcctataagtgtcagccaaggaatgactgaatagctgcatgtggcctagggttcatcaatatcaatgatcaatgcttgcaagtcttggggaatatccatgcaacttggaggtcaaccccataataactcacgagtagagctaataagatcaactactatgttacaattattagaggattctcatatggactcttatggagttagatcttctcttagacataaagtccatagatctcttgctcatttttccaacgtattttgaatcgttaaattccaatatatattgaaagagttatggctaaaatagtatgatcgctaaattgtgataattgggtgtgcaagcccatgagccattgtgcgagaccatgagcttttttgcaagcccatgagacattgtgtgagcccatgagctgttggacaaggccaaaagcatttgggtgagctgtggagcctttacgcaagtgatggagcatctgtgcgagccacagtaatgagaggcttgcatgtgaggctgggaggttgcaagacaatgagacgaggcctcgcgtgcgagtggggggcttgcatgtgagttgtgtgtgttaagtgcaagtgtgtgcaagtggggtgctcgcatgcaagaccatggggcgctcacatgagaaccatgtgtgtgtgttgtgtttcgtgtgtgtgttgtacatttgcgggctcgcatgtgagctcgggtgggggcctctcatgcgagtcgttatgtgtgtttgttttgggggttgtaagtgtaaggtgagaggtgaatgcatattgacgagaattaaattagaggaggaatcaaaagacaaggcatgtaagggaaaagcatacaaccacgcctcttgaagactccaaaagttaaaaggtacgagtagtggtgacaatggacctgtgaagtccaaggacccgaccaagggtatgctgcaaccaccctcatgaaacctataaccggggaccacatgcctgttactagggatcacctgcatgcaattggggaccaccctcctataacccgtaaccggtgctcacatgcctgtaattatggatcacctgcctccaaccaaggatcaccctcctgcaacctgtaactagggaccacatgcctataatcaaggatcacatgcctgtaattggggatcacctgcctgcaaccagggaacaccttcttgtaacctgtaactagggaccacaatgcttgtaactaggcatcagatgcctacaatcggagactatcctcttgcaaccgagtaaccacttgacaccagacaagggtacgaggtgcaaggccacctcttgtacctatggcatgcaccgtaaaagtgacattttgtccccttgggaccattttgtacctcaagccattagagcctatacatacccctttctcagatgttagaggggattgggaaatcatacttttaaaacagtatcaaaagcaatagaaatttctccatttcaaaagagcaatttgagtttatatttcatctttctcttcatttcatttcaaaacttgaagcataagtttgttttttggacagaagtttgttgacgagttctcactattaatagtttggcgccatctatgggaatgaaaagctaaagccaagtcgtttctttacacataatagatacaaaatgcctagacgctctcgccaccttcacgacgtggagatttgcctggaagataacatgttggttacttcagggcaatacctccctcacccgtcatcagagtagaaggtgctaatggtcacaaccctcaagtaagaggagaaaatgagaacgttgttcagctacaataggaggagagggcgcgagcaggtcagaatctcaagcaaagcaaggagaatatcaccgtgtaaagcccctagtggacgagcagcgtaatagagttaccacctctatcacaaccgaaggtaaaggcatgaaacaaaggaaggaggtcccattatcaccaaggcaccctttaccaccaacactacgagatcctggtaccttacaataatgctcaagaaaggagaagtgagctaaatctatgagcccaaaatcctgaactcacaactatgaagaaaaaataaatgatctttgctggaagaaccaaaggctagaaactatagtggtaggcatgcaaaaagtactaagcatcattcttgaaggcaaaactcaaactttgaactttttgtacaaagtttgccaacaagagtgtgggatcttaatcgcacacggtgatagggagaacttaatgccatcaacagatgacaccccaaaggatgcgagcgaaatgggcctattacataatgagaacccaagaggttgctcagagtaacatgaatgtacctgctggggtaagaccataatgggagaaacatcatgtagtcttatgaaggaattttggccaaagaatctcgtgctaggggataccgtgcttgcacctcttgttcaagagcaaagcaagtacaaggcgtcacacctcaatcatgatggagagtcacacaatgatgggatgagtggagtactacttgtaggctccatgtgaactgtagggaaaacccaagttctattctccaactctcgagcaaggatgaaaaagggaatgaaagtgctaaaagtaaagatgcaagatctacatcaaaggatgcctacaacatcaaagggagatttagaggatgatgaattcacgaggaagcccctttctcaaggaaaattcaaatggaaacacttccacccaattttaaggagtctcgcatgacgccatatgatggtacaactaatcgaaagtaccatttatgagctattaatgagctaatgaagatggaaaaggtgtcatgaaaggcaaggtgtcaatgctttgtgattacacttaaaggggtagcatataaatggttcaagaggcttggaccaagagcaattacatcttgaaaacaacattttgaggaattccttcaacatcatcaagctgcttaaggagtatcaccaatgtaaggaaaggggagaaaggaggcttaaggaggtatatccagcactttaatgttgaagtctccaaggtgggaagaatgaccaacaataacataagttttccatagatgatggaatacgccctgggagtaaactatggagtaatatgttgaaaaagcaattcgatggcattgaagacttctataagaaagcagaaaaatacatctgtgtcgatgaaggaaatggagtcttggagacgaacacaagcaagggtactttcaaaatctcgccagacccctacagggtctattagatagaagccccaatgctcgtaagatgatacatccaagttaagtctcctctatacaacccaaaaaattaaatgtccaagatattcctctaattaaagtcctactatacgagaaaaagctcttggagataactagtttgcttttagtgtgttgtaataaattaaagaaggcattcatgtgggcctccaattcaaactgaatgatgctacacacttgggggccacacataaaaaaaagagagagagggaaattttttgaattgacaaggattagctacccttagtcgacaagagaaatgcacctacctctccccacaacagttgctgaatgagagggacacctcttaagagtaagcatatgattgtaagttaagaaggaagcatagtcaagtacaataagctcccttccatctgagtaaaaggatgaagaaataaggaagaggatcagactgctcaaggagccatactccctcaaaataaaatcctacttatcacaatggggaaagttaattggccacagagtaacactcaaagtcactaagccaatgttagtaaaaaatctcactcagccccaagagtcactcaaagtaacttgacctcgtagtgactagagtcactcaacccaagagcgactcagagtcacttgacctcacagtgaccacagtcactcggccccaagagcgactaaaagtcactcagcctc

SEQ ID NO: 18533 - DNA, 3349 bp, Cannabis sativa
ttttttctctccgtacgattttttttgaaattccttcgtactgtacgagtggtggtctgtgcgacgtagtgggcgtcggctgtacgcctgatgatggctcagggtagctttttgctaccgttggacaccgtacaaggtgccccagggtattacatcccttcctttttggaaccatattgcataagcaatagaaattttacccattttagggctctggtgcaaaatacatcctgcatttttctctgtcttctccctaaaaaagcttccccctttagtttgaatatgaataccctgtctggttctgtggtggaagagatgatcgaagaggttgaaaatttcagtctggaggatttctcaatccaggttcaagcggacgacgaggcggctcgagcgacggtggcgtctacggtggtgggtcgtttcttctctaagaagatggtttccaatggcacgttgaggaaagccctttcgggtatgtggaagctcagccgtgggtggcgccttcaaagccctgctcctaaaaccttcatcttccgtctgaaccacccacgagaggtgaagtatattctggaaaatggcccgtggaacccgtgtggtggttttatgatggcggtggctctaccggaggatgggaaatgggagtctgctgacttctctggtctagagatttgggtgaaggcattagggatcccgatggcttacttgactgatgactgtgtgaagaaaatggccaaccgaatggggacccttgttcgtgcaaacaaggtcaggcataacggtatcatcgtgaaggattacctgcggtttcaagttagaatcaaccttcaagcgcctctattagcaggtgtctcgctaccggacctcgggaacaaaaaggtatggagctattttaaatatgaacgtttgcctctgttttgttataaatgtggtgtgattgggcatgaagaggaggtttgttcggggcgtaagagaatggtggctgtccatgacggacggaccattcccatgtatggtccttggctaaaagatggctctaggctcgataatggttttgctttacttgaggttgaggatcttgaggaccggcgacgtcttgaaaaacaagaaattcatgctcctaacaatgttgtctctccaaagggggttttgccgcgggtagatgggagtgatgatcttaatatggggttggagtctcgacctctagttggtgacaatggggggtcaactcgggttgagaaggaaggaatggaaggggttgtttcacaaaggtccgataattctttcgatgtggtttataatgattatgtggattgctctcactttccgacccaacatgtggttcatgtggctaatatctttaaggagaaacttgggcctattaagtttggagctcctagagaagatggagattcggttggaaccaaatcggggatttccaaaaagctcaagaagcctcgggttgtgggtcctagaggcattcctagacctccgatttttggtagatctatggatgagttggagttggccaaaggaaacaagaggaagaaggcctcgggtagctttgatccgaagaaagactttgtggatgagagccaaggtcaggtttgcttcattggggtcgataaaaccggagtaaaagatgtttttggggaagtaagtggtgtgaaccaaagcattgagtccgatagtagggatgaggggattgaccaaagtaagaaggcgagattgatcactcaagccttacgttcggaggagagctcctttgactcagctaatgattcggaggctttgacccgtggggttttgggagttggagaccatgtgatgggggcctctcgaggggagagccaagtagttatcacagaatcggccccggcacggctagggggtttggaaaaagtggagtcatctgcgatttcagatgctagaactcctttaattctgaataaaatggacaatgatgtgaggagaattgctcaggatttttctatggccgaggaggcgggccgaaccatgccccccaaagccccatgaaggtcctttcttggaattgccgcggactagggagtccggcggcaaagaaagctcttcgagctttggttcatagagaagattcggatgttctgtttcttatggagactaaggttaatagtttgcgtatgaatggtatttggcgcggtttgggttttggaggtgcggcggtctcggatgcttttggttcggctggtggtacttgtctttgttggaaggttggggtggatatccaaattcttggggttgaccccggggttgctttggccttgtttgctaatgttctccatggcccgaattggtatggcctcttcgtttatgggccccctactcgggcggcaagaaaggaattttgggaggaaagaacgattgagattcttgctctaaggcacccctggctcttggtgggtgaccttaatttgattcttagccaagaggagaagtttggtggtcgggttgtggaggagtccgatagccaggacttgaatgattttctagctacgacaggtggggtggatttgggctgtgctggtaattttctcacctggtcaaatggtcgccgtttcaatgaattgattagggagaggttggatcgggccttatgtgatccggagtggctggtgggtttcccgaaggcgggggttcggtctcttgccattaaagattctgaccatgcccctcttgttcttgatctgctctcggatcgggaaagatttcggacgcccttccgttaccttaatgcttggtctcgggatgagacctgtagggacgtgatccgtcaggcttgggccattgatgttcgtggttctagaagctggcaattggttgcccgcttagataatacccgtatttgcctttcgaaatggaataaaacacactttggaatgtgtgaagagaaactgaggatcctcaataagctcctgattgagatccaaggtcgtgttccttctgatgccaacctgaaattagaggcggatattgttcttgaaattgaggaggtggaggctaggcaatccgagatctggaaacaaaaatctcgggagctttggtatcgcaatggcgatcggaatacgaagttcttccacgctgccacggtgatcaagaggaaacgtaacttcatttctgcggtgtgtgtggatggtaactcctggcttgaaggcagacaacacgtaggggaatattttcgctctaagttcatgtccatgctctcttcgacttcccctgttgccccaaacttttcagacttgatatccccttgtgtgtcgatggaggtcaatcaagcgttggttaagattcctacggagaaagagatcaagga

SEQ ID NO: 18534 - DNA, 3182 bp, Cannabis sativa
agtaaactcaagcaaaacccaagtcttctttcgtacatatgcgcctgttcatttcaggtttgttccctttcctcgaagactttctagtaagaaacaattaaacaagtttgctatacctgtgtctggggattttagaagctaaatttgcttagataataatgcagaggtggggattggaagaatgggggaaactgtcacttagagacactacctgagctaggatcctcattggtaccatctgaaagttgggttcagttccagataccaaacaatgtattgtcagctcacccaaacatattagaggcaatgaaaatcaacatactgaatgtaactcgaatgacatcaaggagaaaagacgggcattcgtctttatactatcttggtcctgatatgggggcagtgtctctccatcgccaggactgcagccactggtgtctgcctggagtccctgatgcatggaatgaacttctctatgccttattcttgaagcgtgagacacctggttcatggaacttaacaacaattaagaagggtgaaatttgagatttgaagaaagcttctcatttatattgtacagcatacaacaaaagtagaaaccactatgttgaagaggcaatctttctagagatgtcttggaaaggaaagaaagaaagaaagaaataccaaagtaaatggtagataagaagaattttgctaagagcttttcattttcagtggtgaagcaggtctcaaattttggtgccaaaggtagttaaaccaacatgttcatagaattttataccaaattttagagaagctggggagattattatgatttaaattatgaatatactgtagagaagagggtttttttttcttggagaaatggggtaattttgttattattatactagttagtttgattctattggagggaaactaggaaactatatgtaattagcaaagttgtatttgaacatttcattcaattttaacgacgaagttaaaaataataacctttgagtctcatcaaaatattcttcctttttcctgcaaaaactattagataaatgccacatttacaccagctccctttgtgttgttttgaagttgaattttggtgaagggagaagaaaagaaaaatatagaaaaaaaaaattgtgaagaaacaaaaattatgtggactttttttcaatccaattattgcaaacatgataattttttttatttattttctacacatttttccaacttccaaacattttctttttgtgtactaaatattattttaaacccaaagacaaaaaaataatgcaaatttatccaaaatacaaaaaatataacataattcattttttgaaatattaaatattatttctaaaaaactcctcaaaaaacctacaaacccctttcaattaaaattacaaaccccttccgattaatataacttaatccaaacaggatcggaccaccattctcattgaattgggcctaaatgtttaaactgaattggagaggggccgcgcgaacgcaggcccccactgccacaaattatgacgttggctctcccacttggggagaccataggtgggcacccctcctaagtgcaatggaggtcaccaacctaggccatgggccttcttgatcacccatagaccccgtccaggtaagtatgtagcccaatcctactcacacctcttttatagccctttcctcctcctaaattttacccatgcccaatgtgggactaaatcccaaacactatttttccaagaacaaacaccttgtcagctctactctacaacactcttttaactcttgcactatgttttttccgattcatatttcaatatttataatgcttttttatactaactatatatattagtttcaatctactaatccaaagcaaagtttaaagcaattctttccttatatttaagtttgttaaaccaaatttagttgagtgttgaaaactaagacaaaaccaagtagaaatggagtttcatggctgctacaatatttggttttgactaagagtgaagtttaagcatcggtaagaatttttacatgttataatattattttatgtagtttcatagtaagtataaaacaaggttatattagcttaaagagagccattcaaacaaaaaaaaaaaaaagcttaaaacaaattgagagaaagttacacattttatgggattggattcgtggggtacaagttgaagagagctgtgagaggaacaataaaattgactaggcagcttttattggctcctccaatagatttaggtcaaatcttatgaattatgataaaagtttgtttataattgcattttgttattatatgagcttgctgttctttgaatcttacgggtagattggttcatatttgattctaaatttaagattttaaaaacaaaatccaaataaaaaatcactttcacattttgacatgtaatttgaaaatagcaaaatgatgtttgttaaggaagatttacggagggatggagagaaaggagtggaaggataggacaattcctttgtttggtaggaaggattggaggagagggagaagaagtggagggagagtactaaatctacttaaataaatcgctcaaatctaactaaataaattaacaaaaaaaactacaatccgaataaagtaatgaaaaattcaaacaacccaacgaatacattgaattggttgaatatattatttcaacctgcacaaataacttgaataaattgaataaatcgatttatatatttttactaatattatttcgaatctattatataaattatgtttaatagtaaaattattttatatgtaaaatttgtactttataatgtttaattaaaaattttgactttataattgataattttaattgtatttgaattttgaaattgatatttagaatctatactacattaatatatatttttctttttctatttttaaagattgttgtttaataatttaatattatttaatttatatttgtcttatgtttaagtttttaacattaatgtaaactataacacttttaatctagaaatatatatactatacatttatttttaaaaatctaattttttgaacaccaaatattatcaataataacaaaaaaagaaaataataaaaatcggtttggacaatttacccaaacccgaccgataaaatcattgagcggatt

SEQ ID NO: 18535 - DNA, 2596 bp, Cannabis sativa
atttagtagatgtcaaagtttaagaggcataatttaataaatatcaatgtcaggaaagcatagtttagtacataaacaaccactgaaatagtaaaattgaataaaattaagcaaaagtctttaaatctaacaatctcgaaaaaaaatttaacggccagacaaatttaagaatatagtttaatacatgttaaagtttaaggagcaaattcctaattagccttgtatgtaatactgtcacaatatttgtaaaaatagcctgtgagtccgtgactcattatccttaaaacagagatttcaatttacaatactcaattcaaacgttttacacatttatagtcaaaacatggttttttaattgaaacccacattcaaagaaaatgattacatttgtaattcaattttctcatgccaagattaaaaattcatccatcaagcaagattgaaagattatacacaccgagaaaaattatttcgcatttatacagtggggattacataagcttcttaaaaactttaagctaatacaagtagaaagcaaatatataaatatatatataacggttttggatacaaagcaaggattgacagtaaaaacataactttaggacatatggattgggtgattatcacatcaccttgtttttgtttttctttttctatctatttccacagcaagaatatcgtcttttgctttatcgcaaagtcataacaggccacggagctactcctgtggctggaagtgaaggtcgtataatgggaacacgtctcaccacagaaaatgcttcgttaagccgtgcagcacgactcataaactgggacaccttctgcaaaataaataatcattccaattttaaaaagtagttcttgcaaacatcgatcaaatacgtaactaaagaagctctatcaattaatttttcagcatgaacaatcccagaatccgttttggtgagtggataaatgttagtggtgtgattatatctatcaaaaacaaaacttgtgtgtttcgagataggattttggtaattagataaatgctactggtgcgattaaatttataaaaaaaacaatcccataatctagatgctattttcacacaaacatccacattgctactgataaaatcagcccaattaagcttagagattgtttcaaacatttgactacaacacatcagaagatatatacaaatttcgatcaaaattactgacatagaaaaatgaatgcaataactgaccttgtcatccatcgtcaccttgagctgcaagcttcgggtcttcctcttcatcttatacaatctccttcccaacataacgatacccaacatggccgccgccacagagaaggtccaaacagggctaaccctgaaagcacaatacttcaacacctcaaatggaaccttccaccaaaccacagtcctcttctctacctcaccatcattcgatttctcctctgatttcacttcatcaattgcagcactttcattcgaaaaagcagctccttctccttgcaactcggtggtcgaatcaccaacgctcataactgtttccttggcaaaatacccaaatcccgtagccgaaataccatcatctccaccagtatcagaccagaactcgcgggtctccttagttagggtttgaatctccccaattccttcaaaactcacttgacttttcgcattttccaaaaattccagttcctttttcgcatcaaattccgtgattttacgatcgtcggacccatcactgcccgaatcagaccagagctccccaggatttatactaccaaagcgagtatcaggcgcaggatcgatccaactcgggttgtccgactcaaccgagtccgaaacctcatcgctaacagcagcagcagcagcagcaactcttccttgattatcgagagagaagtaatcagacctgatcattccctcagaatcaccgtcgatgccatcgaaattcttaggggcgttgtcactagagtcgggtgcagcggtgtcggagttgtgaagcacctcccagtcgttgaactcggtattgtctccgtccatggtgagtttggagtatcgaattgagcagtgggaaccctaaccctaacacaaaaaaaaaagaaaaaagcaacaaggaaagcaaaggaaagcaagcagaggaagaaaagtagtttttattggtataacccacagggaaatacaactgatagctccacgctacaaggcagtcaatcactcttttagtaataaataattataataataataataataatagaatccaattccataactctccctccattctatctattcttctctattttagggcagaacatttgtacccgaaaacccacccacccacccaccaagaaaactcagtggattctaacctaaaaatctgaaaaagaaaatgagatttaaaaattggttaattagcaatttttttccctcaaactttgacttgtactaaattatgcccctaaacttttttggccgttaaaaattcccctaactgtattaagattgttaaatttaaggacttttgtctaattttagtaaaataattctaacatggatgaaagttcagggggcatgatttagtacatatca

SEQ ID NO: 18536 - DNA, 3138 bp, Cannabis sativa
gaaggtttggaaacacactaagtttaccattgactattattttgctcaacaaatgaacatgggtgattacatttttcatctttcatctttacactcaaaggaggatttggagctaattatatgtactatgtgtgcaatttgaattgaatgaaatagagtctaccatggtgaaaagaatcgggatggcacaaccattgctgcttatgttgccaaatatatggaaatgttcatagcagcaagaaatcgttcaactgctgctgcaatttccacttctagcaataaaataccaacagttcatgtgctgccacagtaagaaatagcagcgacaacgatcaggttccatggaggcgaccacgaaggcttaaaaatgattgttgacgcaacagttaatatggagacaaagacactaggcgttggtgcaatagtacgggaccatttgggataagtcttagctgctttttctaaactgatacaagggtgtttcagaagtgacgagatggaagcgaaagctctttttcacagcatcaattgggctcactaactccaacttccaattacacatgttgaaactgttgctttgagtctcaatggctctttcatctacatttgtagatttatttaattttttagatctaattttagatgctcgctgtcttttatcttttttttttagagttattgttatacatgttcgtaggcatgctaatcaagtagctcatagactgactaaatatactctagagttggatgcagatgtctgttagatgggtgaaatctctcatcttatttttactgttgttgtaaatgacctctatttttaataatagtgataatttcttaaaaaaaaataagaaaataaaatattatttgtttaagtgatgtaaaaatatttggggtagagtatttctactttaatttttttttcaaaaaaatattttaaagaatctgatgtgctctcaagctaaagcacgtgaacatatctctcatctccaaccgagattatcacacgtgttttgcttctataacacgtgtgtaactgtgaagttgcaagaaagaatagagtgacttcacttactactggtatactaagttgtagcccctaaaaaaagcttcttcctttcgttctttctttctttctttttttgtcccccttaatttattagtaggattttctgcctaattttcagtaattttctcctttagccatttcacactcatgtctcattcaacattaacaactattttctctctttctcccagtctttgccattttctcacgcattgctccaaaatgatttgtcttaatgcagctaccacgaacttactcatatagtttattgattcttttctcattatatttgacacatttggattctgattactcaagacaatgcaaccatgagagaaggtgtggtggtttcttctggtctcgttcttcaatttactctactgttgtttttctgtgagtgcttttgcttctttctcttttcaatttactatcttatcttggggctatctcatttttctgtgattattttgaaattatcaactgggttttcgtaaaattatattattttgaagacagttgccactagtttttttatatgctctgttgttactttggaagagtttgagttagtgtttatgtgttgcatttagtcaaatattgaattagattttacttcctgaccaaaccaattactatgaaggttttagcaaatgccagggcggttcacttggtgaaataaaagcattcatggctcctcatatctctccagccccaagtgaaaatccccaaccctttcttcctgtgttgggcccttcgccaatgatgccattgacgccattggccaatggtaacgcaccaccattatcaggtatgttaattttataccaaataaatgaagtcactgcacatatcatgaattgttggataagaaaacgacatttataaaggaattataccaattttcttatgatgaagctaaagggtcttctgaaaaaaattgtactggctaatgaaagcttagatgtgttcaaaaataagcaattatggaagttgattgtgaaagatctcacgataaaacttgaactattgactttgaagaatctttcttaatcatgtagttttcaatgcctttaatataaaatagtctcctctaaaagtggactaatgagagttacattagccattaggttccaaagttctgcttgtgcacaacaagggtaagcacttaaaaatcaatatttggctttgtaatgatttatataattacattcattggtcatactctttttttttttcttcaggactctgtaaattaaacttttcagctgtggatactctacttagcataacagcaactgactgttggacatcttttgcgccatatttggccaatgtagtatgttgtcctcagttcgatgctaccttagtgaatcttattgggcagtctagtaaagacactggaatgcttgcactaaacttaactcattcaaagcattgtctctcagatgttcagaagattctaactagtagaggagcaaatgttaagcttcaaaaaatatgctcaattcgagcagtaaacctgaccgaagcatcttgcccggttatcagtactgattcatttgagagcatagtagactcttcaagacttcttttagcttgtaggaaaatcgatcatgtcaatgagtgttgcgagcaggtttgccaaaatgccatatcagatgctgctcaaaaaattgccttgaatggtatgtcaagtttgagtgaggcggctatatcaccagcgcaattatcccagattgatgactgtaagaatattgtccttcgatggctggccagtaaacttgatcctccttctgctaatactgttcttagaggactcacgaattgtaaaataaataaaggtgagaatgctttattatgtgtgtaaaaattaaaataactatggttttctaaaagttcagaaaatgtttgtaaatctctagttttcattgttgcttgttaaatgtttcagcttgtccactagtatttccgaatatcacacatgttgttgaagagtgtggagaagtgatacaaaaccagacggcttgctgcaaagcaatggagatttatgtatctaagttgcaacagca

SEQ ID NO: 18537 - DNA, 2719 bp, Cannabis sativa
agtagtctatataaatttatttattatttttaaataaatatatactttttataatattcaaacatataatttaaaatatttataaagagctgcacgcaaagtgcaacctatttactaattttgatacttttaagaaaaaatttaaataaaatcacactaaataatatattattggagatgctctgagtatttctttatttgtttaatgaggttcttccctataaaaaacaaataatataagttccatcaaaaattaaaatcgtagataatattttgcaacttgcccatggtaatgtttgtctcattcactctatttatttataactgaccattaattaaattacaagttaattatatatgttacatctaggaataattttctttttgtaaggaggtacatctaggaatttttaagtcttcgactattattattattattattttgacaaaatatataaaagatatataatatataggattatttaattactcattcaaagaaggaaaaaaaaaatgcccccaaagaaacagaagagaggagaataagagtaatcctaattctatgtttaacagtaagaataagaagagaggaggatagagagagagaggagaaaggaaacaaatcataaaacatataaagaaaacaaaaagtgagagagaaaatggtgaccaataaaattgaatcgattactggagtgagccaagatgagaacagtagtaataattcaagctcagtgtcagggtcagtgttggttcaaaggattttgagaagaacagttttaattggagctgtggttttgggctgttatgttctattctcctccataagccctcatcaatttctcccttctttcttttatccattaacttccaattcctcttttccggttagtaattattactcaatactcttctcttcgttttatatatacatatcatcacaaaattaaaagttttgcttttgtttttttgtttttcttttcccatatttttcttcataaatttttcttctttattatgtacctatagtttgtacataaaaaggaatcttacatggtttcatttcattatatgatgaggtgttacatcgtttgatctccttcttcttcttttatataagttcaatacaagtgatttgtttgcctttaactttaaaattgatagaaatctcaatttcttggagaaatttcaatggctttagaaaccaaacaaattgagataataagatatttaataatatagtatatttaattaactctcttgttgtaacattttaaattatatattactttctaaataattagtgaatatcaaagaaattaatatgagagagaacagtagtgtatgtccacaatagaacgtttcatttagtggccgacctagcattaaaggttacacactagtcgtcaggtttctattgctgtctttttctggcaaaactgtcaattgaaaaaggaaagcttatatatatttttgccaaaaaatggcaacccactaggataagaattttcaactactccctctcaataagttctaatgaaaaaaaaaaaaaaccatttttgataaaaagaatcttttttggagggtatcagatcataatcacgttataaaaatatttaggccagctgtttcaatttacatgtttgtttgataatattattttatatattttttgaaaaattaatggtaataattttggtaaaataactaggaaaataaaaggaagaatctgtgtgtaagtatatataatataagctttccttttccttatcgatttagacatacaactactgtttgtttatttattgaaaaaaattggaatattcaacttgtgtgtaccatatgatggctttcgttaaacagtaagcagtaggcacacatgggttccatcgatattaaagtctaatcacttatgtaatttatttacttaatttggcagaactaattaattaaatgattgagtttaggtgccaccgttgacttaaaaagtacatattattactcttgatttcagtacatggttaattaaaagtgaatttaattccatatgcactaatttttttttttttgaatttccataaactattttgttcatattttttttttttttggatctaaaaatgccaaaacaattcaacttcattgttgattgaatattttaattttagttcggttatttttgtagtattaaattatttaatatttcactaaattatattgatttagaccggatattttctacactttactattatttagattacacactatactagattatttactgcattagcattatttagttcaagatattaattaagagaaaattttagttggtaggatactagctaacaataaaataaatagggaaattgcaattcaaatgaatcaaacatcaattaattttagagtattgttagtagatactaataattttcattaataggtgatattttgtgaagagttatttttatattaattattaaattaaaatatgtaatactaacatgacacttggtgatataatacacctaccggtattttaatatttttattagctttatgagatggagaaaatcatagaatgtaaatttcttgtttttttaataattatctctttaataaataatgaattgagatgaccttcagcaaaaataatgaattgagatgacgtgtaaatatagtagaacccttctgatgatctttttttttttttttt

SEQ ID NO: 18538 - DNA, 3275 bp, Cannabis sativa
ccaaaaactgaggcaacagctgattttggcttccttgcaacactaccaaatgacatctgtaaaagggaagaagaaagatgttagatgggtgatatttagccaatgtccagttcttaatttcttctgcttgaaactgtcaaatgcctgaacaggatttggaaatctcagaatatctagcatcatatttgtttagaaccagtgttaaatgcttgtatggaaccacaatgaacctagactcttcttagcaggtacataccttagaagtgccacccttggaagaaaacccaaattttaaagtcttccgctgatcttgatctgcaactacagatgcattttttagttcagaggctactgcagcaaccctagattcctcttgttgctgttgtagttgctgctgctgcttccgggcatcggcttcagccctagttggtattaaggaaaacacaataaagaaggtgacaaggcagcaatgctaataccaaagagaaaagaaaacaagaaaaacacaagggaataaatgactgcatacatttgagcaaacttggccatctccctctcttgacgctgctgttctcgttttaggcgatcatcccgactgcttgtaccaagcatctctctcatctctttaaaacgctgcatatcccatttgaataaaaaatatcagacaaaattgacagaaaaataaggcaaacaagattttgcatagtcaaatgatatatttatacctttctgtgattatgatcatatgagctaaggtgggcttcaaattccatggccaatttgtattgtttgttgcaaagatcgcaatagaaaaccttgcgtatttctttcacctcggtttgaattttctgctcacgttctgctagaacctggattttcataatgtgcacgaagcaggcagtagaagccaccaggtaataaaaactgcaggaaattctcaagaccttccaaagttgatggtctcctatgataaatctttcccgacaaaagacatgcatacaatctatatgcagccttctgctatttagatttaggttccagaaaaagtaaagcatcaacctcaacattatctaatagtcttagaagcctttagtatctaacagtttgaagtacttaggttacaaaaatttaaaaagcatacctcccgcttctttgcgtcctcctcagtctcttctagctcaacatcaagctttttccgttgaatattttcttcagaagtaaaatagtcatcttcttcttgtttccccacccctaattttggatctcttatcccagatctaattggttcaacaatccctatacagaaaacaaagaatataaacaagaagatttaatttgggtccaagactacggacattcgtgggtatttgccttatcatgttgagctgcactaaagctacatcagtctaaattgtagtatatatcaggtatattttggaaaaaaaaaagttcaaggcaattctcagtttattgaagaaaattaagttcaatagtaggaaagaaaataaataacaaattaagttcattagaaacaaacaaaagcagctttgtgacagcatgaaataatgttgaatctcaaattttttcacttgaaaatcagcaacgatgaagacggtaatataatggcattagaagttaaaatttctatacaaaataaaagcattgtgagaaattgaagaaaaaacagatttttgtgaagtatatacaagttttgtacatcgatttagcaaagcaataacataccctgctcatccttcccgagaccttttcctttccaccccattttctgaagaagtctatatcccacattagatgaactcaaatgtctatccagtgatgcttgttccacattgtccagatcaacattttccgttggcctttggttaattggcattcgaaattcatcagcaaaatcttctataagagattcctgataagcctgacccacattaagttgataaaattgtggcgtgaataacattgtaacataaataatagacatacaaatccataattggttaactacccaacaaggaaccatcaccatcagatagttttacatacttcactaagagagtcccttaattgacaaaccaaatgacccaataatctattccaaacaagtataaaaatttgataataactactacgggatacctgctctttttcatagtgcagcttgtcccgggaacctgtttcttgcctaccaccataaccacgataatccattctgcctgcttcatcaagtagaaaattctaacttaaatagaatacttccatctaaaagttcataacagaagagtggacatgaaagtaaacacaattttaatttcttaaaaaaacccaataagattaagttgtatataacacaatttcatcatatttacatagtcacaaattacttgaacataatgctctctccaaaaatataaacacaagactagcatgatcctccatttcaaagccaaaggcataataaaatcaattctagaactaaaatcccataataaatacaagctaatcttttctcagcaaccaagcagatcatctacatcaacctatcaactatcttcaaaagacacagttcccaactttcatggataattaacatcgaggacagttcccaaatgggttttaagggaaacccagattttcaacagagaaaagattttcttgtacacaaatatagacacaaaaacctaaatctaaaatatttcttaagaattagcacagaaatatatcaaagcagatacaatactgaattatgggaaattgagacgaaaacagatctgaatagtggagcttagctagaaaaataaatttattgttagctgtgataatccagagttaaaatatagaatgaaatcgaaaagaatcaaacagttaggagatggaagagaagaatcgaaaatgttaaatctaccttagagaaggaaaaagaccaaatccctgtaatgctccgcgatctcgaactcgcgcggttttgtgttgttggcatttgtcaagagtcaagaccagacttgtaatagtcaacgataaggcccgagccagacaaattttccatgggctggaccaatacttattggactagcccaatttgttttcacaaagtattgggccagcgcaattggaaaatttttatttttatgatttttaaggaataagttacaaaattatggctttttttgctagttactctaggaaaagtaatggttacctttaattactttttcctatattttttttggtgaccttttcatttttacacttcaaaa

SEQ ID NO: 18539 - DNA, 9140 bp, Cannabis sativa
ttacgccaagtattacaaaaacctgatgcctctggacaattactcaaatgggtagtggagttaggccagtacgaaatctttttccaaccccgaacaacaattaaaggacaggctttaatagattttgtagttgagtgtacgggcaaagatgaaagcatttcaaaaaacaatctggagccagtacaagaacctcagccgagcaacaatgaagacaaacctacttggaagttacatgtagattggtcaggtacagatcaactgtcttgtgcatggattgcccttgtcacacctgggccaacacttacacggggcaatcaaatttgggtttagagcatccaacaatgaagcagaatatgaagccctcattgtcgacatgaaacttgcttgggaactacatgccgagcatattgagatctgcagtgactcacagttagtagtaaatcatgtatctggggagtacaaggctcgaggagaaaaaaagatagcttatttaagcaaaatacattacttgcttgcccaattcaagagctatgtcctcaagaaaattctaagagatgaaaatacaacagctgacaccttagcccgacttgcaagcagtaacataactgataaggctaaattactcccaatcgagtttcttgaaaaacctagtatcacctgctcggaagaaattaggatgattgacacatctctgaactggatgacgccaatagcagcctacctcaacactgaggaactcccaagtaatagaaacgaagctcaaaaaatgatgagaaaggctgcacggtacatcatcttagatggagtcatgtatagaaggggattctctatgtcgttactcaggtgtgttacagaagaagaagctgcacaacttttgtctgatgtactcgatggattttgtggcaaccatgcagccgggcaaagtctatcaaagaaaattctaaggcaaggatatttctggccgaccataattgaagattcaaaggcctacgttaagaaatgtgacaaattccaaagatttttgaagataccttgtgcactgcccaatgaaataactttgatgcaaagtccttggcattttgctatttggggaattgacctaatcgaaaaatttcctaaaggcaaaggtggggtacaatatgcagtggttgcagtagactgtttcacgaaatggacagaagccaagccattggcaacaatcaaatccaagaaagtgcaagacttcatggggaaaaatataatatgcaggttcaaactaccgtacaagatagtctcagacaatggcaaacaatttgatagtcaatccttcactcatttctgtgcaaaccatggaatcatgaagagcctctccgcagtagcatatccctaagagaatgttaaagtcaaagtaggtaacaagacacttaaagacactttaaagaaacgacttgaagatgctaaaggaaactggctggaagaacgcccagaagtattatggtcctaccgcacaattgaaaaaataacgaccgacacagactccatttgccatggcatatggttatgaagctatgctgcccgtagaattagaacctccatcccaccaaagattgacatataaccaagaagttaattatgcactccttacagaatcacatgacaaaattgaagaaaaatgaacagcagtaaacctaaaattggtggcccatcaacagaaggtagctcagtactttaacaagcaagtgaatgcacgtaagttctttgtgagagatatggtcctcagaagggtattcttgaacaccaaagacaacacgataggtgtgcttggacaaaactgggaaggaccatatgtggtggttaaagttctagaatcaggggcatacaaactgggtaagtacgacgaaaatatgcaactcgttttggtaccaaagtattggaatggggaacatttaaggaaatactaccactaaaagtaccaggtcggatgaccatcttaagtatgaaatgaaagaacatttactcttaagtaagtgaccttattggcagaccacggccaaaggttttgataaaatgataaagtacttaggtcggacgaccacctatgaaagtaaaatttctgttttatgcaatttgttttgtttcaattaagctaaagatcggattacattagtataataacttttatgtaagttactacggtaacaaacgtgttccgaccaataaatgaataaagatgtctatttaaattcaaattgtgtcaattctattagcaacttatcaatttaccactacgtgcgtacaaaggtctgctcaaacccatagttccaaacagacaaaaattatacttgttaaaatgcaagtaaccaagcgtcgaaagtctgctcggtcacttgggggcaactatactcgtacaaagcatcggtaaaaacaaataacaagctcaaaaaaaataataaaacgaacacagttgcacaaatgatcattacaaggaacgaaattaattaaagataacaaagcatgtaaacccgggattaaaggctgccgggtcagccagttgtctaaaagatgaaaaatatattgcaagtttaaagactgcttggccggtcatcttatctcaaaagaaggcctacaggccaaacagacatataaaaaaaagagaaagagaaaaagaaggcattcagacagaaggattcccatgctctcggtatggatcaattgggtctaaaggagctggaggatcatcgatctacacggcgggaacttcggtgttctggtcggtaggaacaatagacgtggtcacctcggggttgtcgttggccgcctaggccgcgtagtaactaagatacatatctttggaattgccaagataatcaaagttccctttgggattggccttccagaactcgtagaaaaccttgagaccagttgtctcctagacaaccacctccttctcaagctcctccaccctggacttcttgtccccaacctccttcttatgttctccgacctccatcacaagttcctcctcccaagtcttttttctcttaacatcctcctcaagtttgttaagaagagttcagagactctccatctcatccttgagactattaacctcttaggctaggcaaaccttgtccgcctccagctgcgcggttgagggtatgtcttgcagttccttggttagctcatcgaccttggcgttggcagcaagaagcttcttgtttacctccttaagttccttcctcacgacctcgagctggttcagcgcatcttcagccttcttcttggccaattccatatccctctacatcgtgtgggtagtggcaagattcttgacagcagctgatttggttcgagagtaagcgtaagccactttcacaccagccttcacagtaaatgtgttaaaatctgaactactcaaaggagaatgaataaaaaaggaagaaagagatttacgtgagaaatttccttcagaactcctcctaagactagttccaagggcaactcgctgtccgccccggacagctggtagctcacctcaggaagcaaccaggtcacgtagtgttgaagcatgtctttgcctctcctggcctccatgcacaatgccagggttgtcaaaggggccctaacctgttcagatccgaccctagcttgttaagatctagccctggcttgttctgacacgtctgaactccctcctaaggaacttttggacttcgtgaccttatgggttgaagggtccacagcgggtcgctcctcgaagagatcaatgaccacgtcgactggcaccttctccttggacggattctcaccacccttggctagaggagacaagaccgagctatctcttactctcttcttgaatgcctagatcatcttctgagacatctctgcacagataaagcaatatagttagaagaagatataaaatatgtgcaagcatgaaaatcagagaaaataaatgcaagttgaagtacttagcacgctagcagcggcattctcccgaacaatcacagacagagcatcatcatctaaagagtattcttgctccaccaaaagggctttccgttttccctctacaagggctgatggccgagcaggcataggttccctaatcctaatagtatgttctattggtgctcgcatggttgggagagttttcttcttcttgctcggcctctcctgctctaaatattcttgagcatccttctccttctctgaatattcatgagcatatggtttggctccagcacctcccttcagcttagcctcgcgctctagttgaatgagctctttctcctactcgacatcctcagcttggctcgaagcggacttcttcttcttctccttcacgggctttggcacaaagttcaccagatagagcttgtacttcaaaaagtttgcctcattagtcaacaaagtgatatttcgagcatccttcggcagttggagaattttctgcggcctttcgctaagccccaacatgaaaggatggcggtagtacgcatgaatcttctggaatccagtgttaacggtctccatgcccgtcacgaaataatactcgttcacaaaatgacctattttgttgactgcagggtctacggtgccgtttatcaacttatcatctagctcggagaagtagaagtaccccgacctgctctacttggggtctactttaaattaaagagctagttggtgtcgtgcggagacggctcaccccatccttgaattgcatagaggatgaacaaggcggataagtacttgatgcccttgggtgtgaactgggtcgggcaaaggtggttgtagtttgcaatccttttgatgtacaggtgcaaaggcagcatcacaccttgctttgtgtgagcacccgaccatgcacaatatcccgcccttggactagttgcccggtgatttggagaagggaggaagcattcgacaccgcctaggtaacaatccttctccaaactccacaactggccctcagttacgatgcacagaggacacacccaccgagctctaaaggcaccttacttcctgtgaggaaccgcctcggcatactcctgggtgacgtaatcttctccctctactaagccgtcgccatcggacaccggctcccaagcctcgttgtagcctccaaagtgcagaggccgagcagctccctcctcctcggcctgagaagggctgttaggatggtcatcatcttgatcctctacctcatagtcttcttcctcagcagcaggctgggcctgtttggcgctcgctaacgtggcatgccgggccacgtgagtgttggttgtagcaatcttccgcatagtctgttttgtgcggaccatcctcctactcctggacgattgttggttggtatgccatgccaaaatcagagcaggagcagcaatagaaatgccaaaggaacaaaaacttgggcggcccacaggaatggtatcaactacttctggtcggacgatatatgtctagttggacataagataatgtctccaccctttcctaatttcccaaataaattgctcgtagccttcgcctgcgatctgctcggagtaaaaatggtgttgtaccttgggttctggagtaggtctaccttcactactcattttccaatcctcgaaactcaagttagaaagtctgtcactcgaagaggacacactggcacgaagacgaagatgatcctcgtacagaagttgaagaagatcttggtcgatatggtgttctcctccccaaaactcaccatggttcatctacaaaaggcaagacataagatgagtatttggctgggatattgaacaaaaataagcaaaatataccgaccaggtctaatcaaaagattaaaaagccgaaaaaatttcgtgtggattaggttcataacccagaatttcaaaaccttgaattaagggttaatcttcactaaaccccgaacgagcaaaattagaaccgaacatcgcgaagttaaaactggagtgccacaataatagtgttatatgatctactacagtcaaagtctcaaagttccaaacctagattctttataattttcctaaaataagtcaaaactattgaattttctacaatggtaacccagaaaattaaagattcaagcgttaaaggagagaaagatgaggaacttactcactgttcgtagctttgaagttgttcgcatgacgctgatcggctctttctgttaattccatgaaggattcgagagagaaaagtgttatttgctttgagatttcttaatgagaaaaatgctaaaagtggtttattaggattttctgccctatttataagcagattagtggaaaggtgcaattaattagaatttcaaatgcctcgatttccccccaaaagtaaatattgggaaattaaaagtaattgagtgcttggggaagggtaaccgtcaaaagcatgcaagtaaatggcgtgtctcgaggtatgattctattagagcattaattactcaaaaactgaagggacacttagtcataattatattggatcaccaataggcgcatcaaacacgtgccacccgttcagacgcaaggtcaatctaggtgaagtctacgtgtgacttcagaaatcccgtgcagactttgagggcaaatgttatctaattttttgcactatgacgtggcagcacatactagtgacatgtggttcttatttgctatatctgactgaagagatattccgaacagagctcagcatacatatgcacggatagagtttgcgtgaccgagcagggtaagggtagaccgttcgagcgtcatatcaacacttagcaattccaagacttgcatcgtaaaggaagaaagcaatccctacaatccaaggatcatatcaaagagatatggcaagctgtccaaatcccacaatctatgtattctaaatatgaaatgtatgttcttagtaattatagatattgtaagtaaaagggaaaccttccctcaagcatttatccctataaatagtgatccattctcactagaataggggtcgaaagaattacttcagagagatctaagaggatacacttagagatttcattgtgagagcttcaagagaggaaatactgtattctttgttctcgagttaatacaattcaagggggtaggctattaccaaactaacggggccgaacctctctaaaatcttctgttccttactgttcattagttcttactttatcttaattatattttctatcatttattatttgaatcgttgtcgttggctaaaagcgaggtcaatagccaccatctttggccaagtgtacaggcaggtaccaccaacttttcccaaacctcagatggcaggaaacttaggggtcgacattggcagaccccatattgtaggtaagacaaactaagccagagggttctatgctcaaacactctatcacaagcccaaaagtgacttcttggcaggcgaagaatgaggctctaagcaaccaaatcttggcgagcccatgatctctttctcaaaagaagatcttgtccaggacagtttcccgcacagcgaccccttggtcgttaccacaaaaattgggaatctaaccatagcaaatacatggtggacaatagagcttcctccaaaattcttttcaaaatcaacacatgaaaagattaggctccaacttgctaacttagcaccctgcaatcgagtgatgtatgggctctttggccaaggcagcgcacccatcgggtatatcagataatcgactctcaatgaagaagaagtcgcccacaacaatcaaggaattacaaagccaaacaggacgcactgctgcactaagtagatttgtgtccaagtatacaaacaaatgtgtacccttcttcaacatgaagcagaggcatcaacaattttgagtggacaaaggaatgtgaaccgcattccaagagctgaagaaacaaattagctcagccacctatgttgcataaagaagagctaggcgtgcacctagtagtcacagaacatgctgtgagtgctgccctcacaagagaagatgacagtgtacaaccggtaaactacaccagcaagagactgatcgacactaagtcagttcccactcatggagaagctgacccacaacttgcttttggcttcgagaaagctaaggccatacttccagatacaccctataaacgtgtacaccgatcaaaattgaagtaggttctacaaaaacctggagcatcaggctaaatactcaagtgaaccattgagactcggccaacataaaagcacctcacaaccaaacatggccaccaaagccaagctctcaccagcttcatggcgaatcataaaagtatatctccccaaatctctcagagttttgaagaaaatcaagagatagagaagaagcgagaataagaatccaagagctgcattgaccacttgcccgatgcaggcctggcccccaaggcacctaggggcaactgatgcacgaggcaacaaggtcaatttcaaagcttctaacaaagaggatgaacatgaagcttagaatgttggctctaggctagaacacgaagcacgggctaaccacctatacacgtaccacgactctcagctagtcgtaagttatgtcttaggtgaatatacaactcaatacaagaagatgatggcctaccggagttgctaagacagcttaaaggctatactagaaggcaagcccccaaagacagcacaacagctgacgcactcgttcaattagccaattgcgcattgacaaccaaggaaaacttttatttctttaaagaactatggcttgtttcaaaaagaatagaataccacaacagatgcactttcctgcgtagtgagcagtaccatagctgacaaagcaaacctgatgcccatccagttcctagaagaaccaaacattgttgtcctagaggaggtcgacatgctggatgacactccaacattgatgatgttgggttttgtaccctaaataaaactcatttcaatataatctgatttactagttaataaagaacacaaataacattttatgttgcatggttcacgtgatttatttcatgattgtttaatgtataaattctattaagtcgagaacatatgtttttgttaataattatagtgttctcagcacagtggaatatactcttgattatatgttcgaaagtttaattccctga

SEQ ID NO: 18540 - DNA, 7744 bp, Cannabis sativa
aggttgaggactaatcggcatcaacctcaagtttttggggacttttgccgcaattatccctatttttttaaaatttttattttagagtacatttattttataaaatattatagcacactcacaaaaggctctgtataagattctttaaactttttagctaaataggataaaatgagcttccatcagctcttttaaatgagatacaattaatacaatttgcattgtaccatgtgaattatatattttggttcattaccagtttagaccatacattttttaatttacttttcatttcttttgtaagaagttagagctttaaaatcaatttagtttaaatattaaaaaatttaaaatgagctccttttcacaattttaaaatttaacactttatcaaatattatccttctccatcttcatatcttttcttaaggctagcaatatggtttacaaaatgataatacaatttaaaaacgacactaaatggatttgagtgacgcatttaatcgtattatgtctgtgtttaccttaatcgtagtatgccacatttaataatcatatcatattataattgtattgaaatgttaaaactaattaatttccataacttaaaatttttttccatatatgtggacaattgcgttatatcatgttttcatattgtgtcgtgtgacattccaattaaacatatcgtatttgtgtttgagctttttatatgtaccttaatcatgttacttttgtttgcctctgttgttcaactcattttcctttagggttctccacttaaaaaaaaaaaactgagactaagggatacttgggcagttgtttcccttattctcacattttcccctaaattttgcaaatgatttcacaagttttctatggttatgtgtacaagagttcttcgaattcaaatggattagttttgttttataattaaaaattataataaaaagagatagatgaaaaggaaaatttgaatttctatacttcatgttgctctctaattaaaaaatatatatattatttaagatttttatttcccgaacactactaccaaattgtgctttttgaatttttttgtccgttaaactttttttctaaactaatcacaatactaaaatataaaatttttgttaacaaagtattaatgtgttgatgtgtcattgcaacataagggccaagtatcttttcttatcaacaattaaaaataaaatttaacattaaaatttatctttatttattgatagttaataagataataaatttgttaaatattaaattgcacatgtgatgttcatatgacgatgacatagcaaccacatcaatattttgttagtcatatgagataaaacttaataaaagcttaatattttagcattgtgaataatttaaaagaaattttaacaaacaaaaaaattcaagagacctgtttggtagctaaaatagttcaagagtaaaaatccttaatagccttcaaaaaaatcccacattatcataccactctatcaaaagtttgttattgtttaactagtacaaaaactagccctcccataattttcttacctattcaaatatctctctttctctttcaaacgccaccacaccaaatgatagcacaacctatcagattaagagcatctccaatggtaaaatttttgagatgcttggtgaggtggacatattatatggcaaaatattgagatgctataccattggagagaagatgatgtcattctaaaaatttgcatggatgctatgttgtagcattgatgctattcattattttttaataaaaaattgaaactaaaaaattattgtagctaataattacaatatatattaaataataatgtgtgagatcataattatagcattttttaaaagttctatacatttgaatgtttttaaaagtaagagtgtcaaaaataatgtgaaagagaaataaaataaaatattatatttttagatgatgtataaatttttattatccatcgtagccactacgccacagtccacacccaaccatcccactccctatccctcgaaccttgaaacctaaactcgacccccaaaatctaacccaaagactcataaatattgaagcgaaccattcgccccggccctcgcccccacctttgccactgcaaaactacaactgcaacctccagagaacacattgaaggttaaggataaattttgagtttagttataaatctctatgaaatttgcccccctccccacttcttttttttttttttttacattttttgctttatgttcgatagattccatgataactcaatataagatcgatataggctctatgaggtttcatttttctggaatgtgtttagttgaggttaaagtcgataagttctcgattcgggcatcaagttcaaagcaaaaatgacacattaaattcttatcgaattatttttgagccctcgtcaagggcatcaagtctttggtaaaaataacactgattaaacaccccccgcccaccctccctggagttattgtcaagccctcattgagagcatcgagtttctggtaaaagatgacaaaaaatggcagagatctgggttcatttgtttgaagatggggttttcactcaaaaaggcagaggcatgggtcttcatggttcgatcttcaactgagatgggtcacgaaggcacggggtcgttgaaggcacaaggttaacagaaggaacaatgagagaaagagagaagtgatcgatggagagggataggaacaagagagatagaaagaaaatgaaaagttagagagtgggggaaaaattatgaggaaagcatttttggaactagagtgaacaaatagcatatttttgatagagtggtattaaatgggattttttttgaattaggagaattatttaggagtccacatgaagcacagaaactcaaattcccctacatcacgcacttaagccttaatttaataatgcggtactgtactattggccaacaaacacccccacacatggatttttttttcaaagacacacagggatgtttttggttgccctgtacgagaattatcttgaatacatatccataaatattatatatttctgagtcccaaacgaaagattacatagcctttatgaagattcagaaaaattacagaaacgaagttttgtgccattattagcataatccattgcgaaagcaaagtagaaggaaaggagcctttatttaggagaagaggaggacaacacctcttcaattcgctatacaggcatctcacatatacaagcatattatgtacagaaaaccatcaagtatatttaccaaaaaatatttcttctaatgctgtacaccagtactctttaccagcaccacttctttctctgcggaaaaccatgtgacattgttaggctcattctcaaatatattacaaatcaaattaatgccgcattatcctcagcttacccgaagttttgcctgttctcttccatctatatattcaagtagttcatcttgcttcattagagcttcatgtaaagcctaacacaccataaaaagcaaatacgtaatcaacacttgaatgttcaaaacagctgacacagcaacgaaattttgcagatgcatcatgtatttaccgaaaaaaaagattactaagttaagtgaaatgcataatcctttatgagatgtggaagaataaccttttttgtagcaattaactctgcttctaaagcatccacacgataaacagcagcattgagcagctcttctttctcacaaggcatttcaaatggcttcgcttgtagcatactcaccttttcttctagctccccaagctttatcaaagcagatgaaagaaggtctgcctttggaaaccctggagccggtgaagggggctggaactccactggagctgattcagcagtcatctcagagacgttgttgccagaaacagaaaatgagtagtgaaatttattagtaacacgacatgtaactgattggatgagagtaatgagagtaacaaagatggccagaagcacagcccagtaatgagcaaagaatccctttgtagtttcttctacacttgaaacagttggtggccctgcaatagattccaaaaaatcagattggtcatcagattcatattaaatataactaagaaataagttattctctatgatgtcgagctataacctcagatagcccaaagctcattcacagtcctcgtggttttgttaaacagaattaagtagttttgtttggttaattgtttttgagataaaattataaatgattaataaaggagtagaaccgccaatatgtcttgctttccacaatgccaccagagcctctcaattttatttctcattgaatttcatgtgttaaaaattagttcataattggaaaaaaaatgtgaaaatttcaaatcaaagtccacttaaacattctcaccgccagaaacagatggaatttgctgggatttgcgcttttcccagccaataacagccttatcaaccatgggaacatattcatcatactcagagattcccccagtgttgcttgccttaccagtgactctagcctagacaaacataaacccgattgagtataagtttattgatatatccaacagaagtggtctgcatattgtcattctaaatcagtacacttacttcctcacagacaggagtcaactttggttgtaaatagcttttatttaatttgggtgaagccatttcttccacttcagatcctgattctgcagcagatgtatcactacttcgtatctgaatccacaaagaaaaggccagaattgatgtaaagttaacaaagttaacaaaaattacatgagcaaattatcgacagtaaggtggtctttcagataataccattgaaatccgggacttatcacaagaaaccaacctcccctcgctgttggaaactgttactatctgtctaaaacactgtgcttcaccactaagtaccacctgcaagaaaacaagcatttcatttgagcaatgtcacataacaaattttcaatagctaaaagattaaaaaatcacgggaaaaaaaacctttaatatactgggatcattccatggtcccttatcagacctcatgcagcccccctgatcaacacagttacagcttcctccaagaaaatcaggcaactcactagaaagagtgcagagatagcaaaagaaaaagaaaactcaacagttagccgatgttaaatagaactaacagtatatattcaaggaaaatgctaccttgcatcaataatttcaagcaatttgctctggtacttattgccaagaacctggggaaatccaataccagtgaaccatcagttgacattgacaatgagtctgcaattgaaaactatacaaggaaagcaaaatgtattgaaacatacatgaatcttttttttttctgaaagtgaaacatacatacatgaatcttggtagttgtttttgggtcaagaaatgatttaactgtactccatagcagcttaaaaccaggaccagcattaattataaacattcggcaaagtgtctgcaccatcacattagagggcatgcccttaaatttagaccctaaacattactgaaaaatattgccaaaattaccaacacaagaaattagatgagaatgttaaatatgaagaccaggtcacctcagggtagttgtcattatcaattttctgcaagcgcgtgatgagctctcgtgctgacttggttaagtttttaaaaccctaaaaaggtagaataatttgaaattgggatgagaaacataggatactgtctaatgccaaaggaacaggtaatagaacatgaataaataattcaaagttagcagacatactacgccttgaacatctaatattgttgtacttgaatcaatgtgtctcttagcagcaacagagcatgctggaaacttaatggaaaaacacttctcaaactcctggacatggtatctcacatatcgatccatagtagtcactaacataagcttgttggcatcaacttttcccaatctttcaatgtaaacaggtcttccttctttgtccacaccatgataaccctgagggtagtagttcataacttcgttccgctcattaaactcaaaatcctgaagataatagttacaagtaaacacttaattcgcaatcattttctttgtaattcaaacagaattttaacatcagcgtatccagatttagacttgtaaacattaaacaaaataagacaatcggttaacattacctccaaaattgtgtccgttccaaagtctttcctccattggatcatgttgctccacatttgtttggctttatcgatatcaaacttccttgctttcaagaatctgcaatgaaaacaactggagaatgagaacaaagaaagcagcagcacaattgttccaattgtatctgtagaaaaagaaaaaaggtacctcaacaacatatgatagtcatcatatcttggaggtagcaactcctccaagatgagtgcttgtcgaaatgcgtccacagcctgcaactcctcgaaatcacgaacatcctcaatggaaagagaatttctccggatcccactcccactcccactcccacttttccttctttttctcttaagagaatgtctaaatttactagacgcattaattgctttctttttaaggctcccaattctcgtcctcttgtcatcttccgagatttcaaaatctgatttcctttcctttctttcatcatgcccagaatacccatcaaagcctaaccaaacaaatatttgttctcactcagaatatatgcaatctatacatacattaacaaataaataacagaggaacaaagataataacagctacactattatcacaccaaaaaaaaaaatctataattgggaagaataaaaattcacagcccggagtataattatggtacaatacaagtcgtaataaaattgtctaacaaaaacagtcgaatttaaagcaaatcaatagttaaaaaaaaaaaacaaaaacagaaccctaaaacttcatcgatcaagaaaagaaagatgcaactcacaagggagggcgaatctatcaagcgggccagacatggtaaagattgtaccggtccggcagatgaagattggagaggagtcagactgagaaagttaggattggaatttggaatagtataagttagtcaaaattaggatattttagttacaattattggggtttcattcaatcagtagagaatagtgttttttaaattcaagaattaattgattcaattatgtcatcgaattaaatgttgtgttgggttggattgggtgaaggtggagccaagggaaatccaaagccaacgaattttgatagaagaagatataacggtgtgattgtggtccttctccttctcctcctggtcctacactgccacgtggacatatggcgcgtcttggcgggaacttgccgacgttagttgacttcttcacaatctctttgacttttaattactaaagtattagatttctagctttttcatttttaagcaagagagtccggagatataataagaattattggtttcttaacgtcaatatttgattggtttttgtgttttgttaaataataaatcaagttccatttttataaagtaaatcaaattgataaagactaattagtaatttattccctgaattttgacatgtagtaaatcgtgtctcctgaactttttttgctattaaaaattcccccgaactattgagattgtt

SEQ ID NO: 18541 - DNA, 2369 bp, Cannabis sativa
gtatagcatattagcatagtatgatttttcttattaatctcatttccttttataacttaatgaataataatttggtaaatattttcatacatttaagacttgtaattaggacacatttttttatggaaatagtcatgtgggaacccaccccttatgggtaagaatttctgtttaaatgaaaaacgagacggaaacaagagttatttttttcctaaatgttaaacgggacaggaatggggatgatactccctctcgacggagacccatttagtattttattttatatttctaataataatttataatttataatttatatttgtatttttttttagtatattaatatcttttttataaattttaagttgtgttttgaataataattagtttattgaataataattaacgtttaatatgttaatttttatgtaattcaatatttttatatatttatatttttattataaattttattttttattaggggattcttcactctttttctgtctttattagggaattttctgctccatctcccataaaaaataagcgatgaggattaaatccttatcaaggatgagatgggaggaacactctccgttaatttttcgggccgtgtgcatccctacttctaacttctaatagtgactcatatttgaatatcaagtgttaattgctctaatagctgttgtggtctattttatttggtttaacaaaaacctatgcatttttttaatatagttctttcacaatgttgtgaacaatttgtagtgctctgagcttgttttaactttgaatgtgatgatgttgtttaattttacctaaaataatcccgaattatagtatttataattaattgaaccactatatatatttatgaatcatgcaaatgatttactcaacacaaaatcataatttatgtttgtatattaacccaaaaaaaaacaaaaatgtgttaataagttttgttatttgatttggctcgcttgagattgggtagccttaggagaaaagattattgagcctattatttaaaaaatatgtggtattttcaaaaattattaaaaatatatatataaaattttaaataaaaaatatatttttttaatccttggcttggatgggccctaggtacgggcataacctgccttaatccaggcccaactttcttaaggtaaggtgcttaaaattattaaatttagaggtaaaattttatgattagtgagtaattaaattagtttagtttacattagaaaaagaaagtttagtaaaaaagagtattattattaggtactcgtatctagtatctctagatttgtcacaaaaatttaaaatttaattaaattaatagttaatagtttttagcatttgtgttaaaaaaatattttgtggttggattagattaggcaaagagagaggagtatgaatgagtactttccacttgtcatttttccaagatgaaatttatactattaaatgatgaccactcaccactactttctcaactacccccaaaaattattatcataaatatacatacacaaaattatttaagcaattctctagtcaaaactgtcataattacaacttttaatttcatgtattttataatcttcaaggctagctgttagttaatttcaaaaaaaaaaaaaaaggctagctgttagttaaaaaataaaaaaaataaaaatccaaatagtttattattattattattatgtttaaaataactaattcaattttcttggtgggagggtaatttagtcttttcaagtgaattattcaaaatgaatcatcttcaattttttctataaatcaattcatttcctctctattagcttaggctgccaatctcttcacagcagtcttttttgttttttttttcttaaagtaaaattttataattatctatattttaagctttcttctatggagttcatcagtaaatagagtcattttttgttatttatttaattaaagctcagaatcaccaacaatcaaagcttcatcatcactgaaatcatcctcaaccaggttcatcttttaatttttattcacataataattatatatattattagatctatattaattaggttaatattaggcatgttttaaaaaaaagtaaaatattattactatagtttatattaatggtaagttttattttttcacaagtaaaaattttacaaagaagaattacttaaaaataaaataaaataaaattgcagaggttgataataatgatagatcgttgctataactaggcacatgcattttttttagtttttattatgtcataattaataatgagaatataattggaaagaagaaaaaaaaaatccccaaatattatattattaaaaaaa

SEQ ID NO: 18542 - DNA, 2794 bp, Cannabis sativa
ttttttttttttttttttcgaacacagggaacatttgtttcaagaagtgtaaactttggttgggttatctttcagaaataaaaatgaaaaaccggttgcgtaatcttcctaaatatttgatagtatgaagtagaattaattttgaagttatttaatagtgcttattctaaatatttaatagaagtaattactcatggctttccaagtgatcatggttacttattattgtgtttagatatggggattctcaaattctcctgttttatggttcaattttattagatgggggtgcatctaaaagagttctctgatgaatgatcgacatcctttgttattggattttggagtttttgatgggacgttggtgattcggagttggtggcttcacggtggagatctggggtgcttctcctcttagtagtagggttgatttgtgtggttgtggcggcgtctcaatttctgatgtgttggtctttggtgatcccattaatcttatatggatgtcgttgtttttattttgaatgaggtttctctactcaatggtcaaatttggggcattcttagatcgttattaacctcctgttctatggattgatctttcagtatatttgtccttagcttggttggctttgttattctctattattttagtttaaataattggggtgtctctacctaatttttattagaagatctttggttgatgtgctattaataggtgcgatctatcacatgttcatttaggattaaaatttagtattctttgcattcttttgatgcttcatagtggacgacatatgggtcatttgtgacaatcaatagtcccgtgacccgtaagggaaaataccgagtaagttgttcaatcccacatcacatggggaatgtgataattctaagactgtgtaggtatgagattacatagctgatcagaagatttaaatgaattgattgatattacctatattaacaaagtgtatcatgttttttggtagctcatcacaaaaaactccacaaattggaaagttttgccagaaaatgtgagagtaaggacataacacgctaaaaaattagtgttggtttgtagggtcagttgtcaggaagcagccaaagtgatgtactcgtgtataagaactataaatccgtcgattatgtaaacgattattattgttaattctggtcaatgagcaatatctacatgtaatatgtccaatttgtctattaatgaaaatttccatttacctttcaaaaaaaaaaaaggaaaaaaatctatatatacttcttttttaaaaaataaataaataaataaatgagttttgttcaccactttgttcttgagcgctagcaacaataatatccaacaccaccatattgtaaataattaattaattttcaccataattattaaactgaaaaatcacactaacatcttgtcatcaacactactgaaataattaaacatttttggtataattaattttagattattatttggcaccttaaagtacttaatacactaatatagtgtcctacaattaattaataattttcattattttttaaataaaaatttgtaaaagttgataaatattaaatattctaataataataatatgatatttttttcttaatgttgaggttgttcaaagttacgtttacaactcaaattaattggcgtgcacctaagttaacagtcaacaaaatagtgaagtaaagcatgacatttaatcattatcaagaaaagtccaaatatatatatatacaactagaaataatattctatttatatttttattttccacaataaataatattcatttcaaatgaagatgatgagaatgatattagtaaaatataatattcattttgaatctcatgtgtgtatattctgtatatctttagcaaattgcgtctgtaagatgaagatgaatactagtcatgttattatatattattttaatttttttattaacaataattattatttgttagaatatataattctgattattaattatataaataatcagtcattatgtattcaaaattaaatattatagataggagagaagaagcaacaatattttattgaaatgtggtgttaattaagaatatacaaaaatttatacatttgattgacacttacattacataagattcttattaagatttcatggattcctcgattaaaaaatatagttagaaacatatttacattacatgatcatattatatattaaatatcatttttgtgtgttctaataattaatagcaacatgcatatagtagatatgaatatgatcgatgttcaaacaccattttctatctctttaaaaaagatattagatcactaatatcatttgaagatcatatctaatatcttctcttttcttaaaaaaaaaaatcgaaaaatgatgtttgaagattatatatctaacaaaacttttaattgtgccttcccattccactaatagaatacttataaaataaagataaaaaattgatcagtatcaaatatttatatataaaattatcgtcacataattcgtaaaataaagacttatcaatgtttatttttatgaccaacttggctataaaatcaggctcaactctgagcataaacgggctagtcctgtatttagggtccacttaacttaggagaccaaaaaaaattcttttaaaattatatatatatttttttaaatgagagctccaaaatattttcttccctacattttactatatttcaaggccgggtataaaactaaaaaacaaatcatactgaccatgcaaaacc

SEQ ID NO: 18543 - DNA, 3442 bp, Cannabis sativa
gccaactaacttgacacgtgtacatttggtaactaactaacattttacatctaccactctaatattaaatttatttataattttattatttatacctaatattttcaaacaaaatagtatattccttaaaaaatatagccaaaatttaaaaaaacaaaacaaaaagaatcaaaacttcaagtaaaattaatgatacgtggcttatcaacctaaatatttttaaaaaaagagagttatataatgttaagagcatcccatacaaaaggcatatctcaatctaacattaaacttgtattacatacataaagctttgttttttattttttgtagacttgagtcgacaaataaaatgtgtaaggtgaaagaccaccaattattgaggaccttgttgaaactgaaagtgaacaacacgttgttcaacaaaaccgaaactgagtgttttgaagaaacatgtttgaggattgtttcatcatgcaactcacagtccttggaacaaggtttgtgtgtccacaccccacttatcaaactgggtcttcaaggtaacatgcttttaagcaacaatctcttgtctctttatgctaaatgctttggaccacaacaagcacactacttgtttgatgaaatgccttatagagatgttgtaacttggactggtttactttctgcttattcaagagctgacaaacattgtatgacccttgagttgtttgattccatgatagcttctggggaaaccccaaatgagtttactttctctagtgttttacgttcatgttctgcccttggtgaattctatttggggactcacattcacaactatattgtaaaacttgggttagagaagaacacagttttgctcagctccttgattgatttttatgccaagtgtggttataccgaggaagctcataatgtgtttagaaatatggataagggtaatactataacttggacaacaatgatttcttcattgctccaagctcaaaaatggagtctggctttgaaacattatattgatatgatcaatgcccaagttcctccaaacgagttcacttttgtgaaacttttagaggcttcctgttatctagagtcacattatgggaaactgctacatgcccatttaataactcggggaataaccttgagtttgatgctgaaaacagctcttgtgaatatgtattcgagttccaagaggatgaaagatgccattaaggtcttacatctcacccctgaatatgatgtcgtgctatggacctctgttatttccggttacactaatgatttcaaaatcaaggaagttgtttctgcaatgcaggagatggagatcttgggaattaagccaaatagtttcacgtatactaacatactaaaggcttgtgcaactgttttgttattcgaattgggaaagcaaatacactcgctggctttcaggactggcttggaggctgatgtttctgttggaaatgcactagttgaaatgtatatgaaatgttccaacttcgtcgaagatggttttagagtctttaggggaataacctcaccaaacgttatctcttggacgtctttgattgctggttttgctgatcatggttttgaacgagattcttttcagtttttcctgcagatgcaagctatgggagtagaaccgaattcttatactcttgttgtcctccttcgtgcctgtagtaccgataaatcaattagtcgaatgttaaagcttcatggatacatacttaaagctaaagcattttctgatgtaatggttggaaatgctcttgtagatacttatgcttctgtaggtatggtaaatgattcatggaaagtaacaaaaagactgaagcacagagacattatcacatacacaaatctagtggcccgaatgaacaagttgggaaatcaccaaatggtattgaatgtcatcaagcacatgaaggacgacgaaattgagatggacggatttagcttatcgagttttttgtctgcgtcagcggccttagcagcaatcaaaattgggaagcaactccattgttattcaataaaatcgggtttcagcagctggacttcagtttccaacagtttggttgacttgtactggaaatgtggttatgcagaagatggttacagagcttttagagaaatttcagatccagatgttatatcatggaatggattaatttctggattggcatcaaatggatacatcaactctgctctttctgccttggaagacatgaggttagcaggactgaaacctgattccatcacattcctgtctgtactttttgcttgcagccgaggtgggttggttgatttaggccttgattattttcattcaatgagaaataagcatggtataaccccagagctcggtcactatgcttgtttagtggatctacttggccgagctgggcagctagaggatgctttggaagtcattgacaacatgccatttaagccagatcctttaatatacaaaacattattgggttcttgcaaactccatggcaacttgactctagctgaagatatggcaagacgaggtcttgaacttgatccgtctgacccagttttctacacagtccttgcaaacttgtacgatgaactgggtcgatccaacttaggcaagaagacacgccagctgatggaagatagaggggtgaggaagaatcccgggcaatgctgtattgagaatggaaacaaggttcatatcttcgacgcaggagatagatcacatccacagatgacagacattcatgacaaaatattatcacttacaaaggaattgaagaaacaaggttacacattacaagacacagaaggttcatcttatcatagtgagaaattagctgttgtgtttggtcttctcaatactccatctaaggctacaatacacataagcaaggatattcgtatctgcagtgaatgtcatgacttcataatgctgctaactcgatttattgatagggatgttatttttagagatgggaaccgaatccatgcttttaagagaggtgagtgctcttgtagagcctgctatcaacatagttttcatgagaaaaaaatgtacagtgctgctttgattggatagtcacctctcttgagatcatgaggtcagaattcctcatattttgagtatttcttatccttatcaatacattgcatacactgcttgtgaagggttacaatttacaaaatgcaagaacatttttcaacaagaaaacaagagtttattcttttcaatgtgagaggctcactgttaacaatatacttatattttgtacctggaaaaaagataacatagatgtatatggaagaaaattcttggataacacacacacatatatatatatatatatatatgtttggctgattcctaatctgtaatccaaccaaagtcactaaccatttctcttttctttgtttttttttcttttcttttttt

SEQ ID NO: 18544 - DNA, 4405 bp, Cannabis sativa
  modified_base (1758)..(1759): a, c, t, g, unknown or other
ttatgtatttgacccctttcattttttttataatctttaggccctccttgatcttagcttctgcctccattcccaaagacaacaccacacagacaaaacagggccaaaacaaaaaatttgctttgagttaacatttgtgcctaatcccaaccatgctccacacataaatattttatatttagacatgtatgtaataattaacatatttttcatgtatataataattaacatatttatacatgtatataataattaacaaaaagaaaggcacatttcagaatcttttgacgttatagatttttaatgaagttataaagatttgtgatgagctaatagaagttttagaaagcagaaagtagtatgatcttatcccctggctgcacaatttataattgagcccaattgagtaatatcccctttctcaaagtccacatattcctctacttaaaaggcaatagatatcatggctgatagaaaagcgaaagtctggccatttaaacaaacccaatatgaaagcccatgtcaacgaaacatttctcatgtcatttttgaaacaatctatatacttaaatattagtttcaatgacaagagaattgcatacatcccaatggctaactcagttgtagaaattcatgattttataaaataaaattaaaaaaatgtaaataacatatattaaaagataaaaaggttaattagaatagatcgataagataaattagggtcaaaagctttacgtgcagcctacttaaacaaagagtggtggaatctgcagaggatgtggacaactactcacaaaatgttatatacttgctttcaatgataatgatattatggggccctttgaatagatttcattacggaaccgtgtaaactaaactcatagcttcatgggtcatgcaatgcagacaaaggtatgaacatatatatccaaaatggcccaccaattaataatatttcttttaagacttaaaataaataaaaatgacgttttatgaacatacataccggaatatattatccatctttaagagatccgtagacttttgtactaattaaaatatatatgtatatatctatatgatgtaacttgacttatggaagcaaaacaactaattgcaatataaatctcgccagtttgagtgtcttactattaatgtttcactgcaaaggaaattataattttattcactatatcttttttctagtgccttaaatggcaaaatataaactatttcaattcaattttaaaactacagcaaaagaaaaagaaaaaaagcgagtaaaaaagatatacaaaaaagaaaaagaaatcgtgcttgtaaagaaattaatctcatatcctatatactagaaactaaaacaattaaaattctaatatctggataatggatatacaataatcaagtaaaggtattatttgaccataacaaaatttgtccatcaataagaaagaatgatggtgatcttcctttacctttgatttttatcgttgacacttaatttttttctttctcaaataggtctttcctattcacataagccatcacaaatatataaacaatttggtgtcaaatctatctatctatatatttattatatttcagatatggcatacaactaatttggtgtcaaatctatatatattatatttcaaactaaaaaaaatcataaaaaggcgaaaagttaagtaaatatgcaccaagaataaaactgttccaattaaaaaaccaagttgatttcaaaaaaaaaaaaannaagaaaaaagaaaaaagaaaaaccaagtctcatcatcacacttttgcactatccataaacttagctagagaatgaattaaaggaattaaagaattagtcttttttttttaaaaaaaaaaaatcaaagaattagtcattcaaatggcgttaatgtgctactttccgaaaacaaatgtcgttaataatatgcatatacaaaattggtacagaaaatatgcatatacaaattatgtgccatataatttatttctttagcaaaaaaaaattatgtgccatatataaaaagtcattgaaaaaaaaccaagcaacacaaagtgccaaatcaagaacggttacattacacgagtccaacaaatgaacaaatatggtccccacgtacacgctcttaacgataatttcactgacacctacccgtgaatgtaatcatcgtcccaaaatctattcacagcatactcatcaactttttttgttgtttaaattcttacaaaatatatcagatcataaaatatccatatatatatatatatatatatatgagtcctcaatctgggaccacaccaatatatcctaggagtataagctaattccctaactaatttcatagcatctaatacctatacatttcaagtaggttgaatctggtaaccaaattaacaaaaatatattatttttaatttaattttttattctaaaaaatgatttattatggctggttatcatttctcctgcatggtcctcatcattaatgtttttgctaagtttataatttactcctcaataggtacctaaaatatctatattttaaatattaaaataattaataaaacttaactacaccgttagaaagaacattcaaaaatcgccttttctttctaactgacaaaagaacaagcatagataagatgacgtgtccactcccgaaaatattccaatctttcgcggtacaccgtaacgaatggactactgactttaaagcaatcaaaatcaaattggtcaacaaaacaaatcggattcagaaagcgacaccataagttacggtacacccgcgacacagaggataagatttcagtgggcgtacctttttacggccacagtccaagtggtggatgagagcttcgaccatctcacacccggcgaaacagttcttaacaatcttcatcttcatcagacggtcctgaatcggcaatctctgcctcaaaacccttacgatccagacaatctcctccgtcgattcttcctcttcctcgggatcatcgtcgaatccgtacaccggcggtgacggtgcgtcgtcgggacactttgatgctaccatttcccgtagtctccgatcgaaatctccgctgtttctcagtgagttcagtgcgaccaaacctccgaaaagcttctcgttgaagaaaatctgaggcactgacgagctccccgttctttcaacgagctccttctctctcctagggtacacgtcgatgttaatttccacgaatttcagccccttctccctgaaaaattgccggacggcagtacaatcacgacaattagacctcgagaagaagctgatcctgcctttgatgacttccttgtcttttttattgtcgtcgttcttcagcttcacaacaactctaagtccagatatgttaaactcagacatcgccggcgacttcggttcatcgagattttctttaaacgacgagagcttcttagcgattgcagccgagaaactattgcttctctccctgataaatttcccaatcgctggaatatcgacggagaaattctccagcggtaaatgatccaaaacgatgtcgttctttaccgaaggagagtcaagaagccccgggggtgcctcgggcttcgggagcagagaatgaggctggagaatctcaacatcgcaaatcattttcgcatcgctcatcttctccgattcaaattccagggatttttcagaattagaatcggaaaacttgtttccttcttgtccgagggattggtcctctgttttgagaacattgatcggtgaagaatccattttcagagaatgtaaagtaaagagctcagaaacgattctatataatatgagtgagtgaggaagaaaaggacaaagtatggtagaagcgaagaaagcaaggggagaatagaataggagagacgatgatatcggaggaggttttatggaaaaaaacaaggatctttgatttgaaagggtttaagttttgacaaagggaagaggtcaaatccagtactagtagtaccagacgttttgactgttttgttactaatgggcctaaattgtgcctcgccggcccatattttgtgcccacacttcacttcatcttaccgtcttatgcgcaaataattgttattattacccttattattattattaaataatattaagcaaatccaaatttacaaaaatctcctgctagtttttgttatattttttggtgatttttctttctaaaactaaatcaagaatatttactaacaaattcttttaatatttataattgttccacatataattttaattaaagtgacactaaaagtactgtataattttgttgattgttgtaaaacttatattttttttgatcattaagtgtcaactcaaaaatacgtggagatatattattagactatacattaaat

SEQ ID NO: 18545 - DNA, 6427 bp, Cannabis sativa
  modified_base (1360)..(1364): a, c, t, g, unknown or other
cacaagataatgctacacatcccctatgaggaggctcccgtgaggagatgggcacaacacgcaataatggagtctcgccatctcaaccatctctagctcctagggatattggtgttgatgaggggggaagagaccatgctcgagaccctcctccactaattaggttctcccacaaccaataaggcatcttgagcctccacgtactaatgcaccagcaccacatcaaccaacccagagagaggtcacgacaaagggaggcacctcccagtcgccttgcaagtcaagacttgcctcagccccctcaaacgggcgagaggagacaaccatgctcgaggggtacctcaacttaggagacatggacgggaaagacaaatggtatttttaaaaatatgtatatcttttaaaagatattttttttttatttgggccccttaaatgagtgggccctaggcgcgggcctagcccgcctatgcctagggccgactctgccttctatctattttggcatctaaaattattttttagtctaatttctttcatgatcgtatacgttgtagctatttaaaaccacttgtaaatttttaaaaaattctaaatagtttacagtgtcgaaaataatatttaaacaactcctttattaccacgcgtataagaaaaacagttgcgtgtgtaacaaattatataaattttatttttcgacattttaaatttaaaattttctaaaaaattaaaagaggtctaaagtaactataatatacacgattatgaagaaaaaaaaataggctaaaaaaatctcttatctaccgaaacagatagaaggtctaccaaaacaacactttaggagtgtactatagatttatctttaaataaaaatatattacatttattttatgaaaatattagattagattaaattaattttaatttatattttataatagtaatttttgattgttgaccactttagatgaatatttcattacttttgtttaaatgatattcaaaagtaattattttattaatttgtgctaattttgtttttctgaaccaagagagagatataaagcttggtatttttgattaattaatattattttatttaaataatatgttatttacataattaaatattattataataatatataaaacttaaatggaatacaataaaaatgtacacccaacatcataattaccaattaccacatgatccaaactcaacagctaaaaaagtttccactcaacggctaaaatagcttataatagtcttgcccaatatatataaaagcattcttattaggcactagtggtgtgtaacaccttctcgacatgtctcgttgcaattggctagcgatactcnnnnnaagttattatattaaattatatgttacctgatacttagttgaaccaatagcgatattgacatgtaagaaggtgtaaatcaccactattgcctttaccatttctcaatatataaatgtaagttttttttggaagaatactagattcattggacaggaaaaaaattggggatcacagggggatcaccctccccttgacaaaatcaaccgaattgctagagattctagcatttttagctaaatcgtccgcataagaattaccactacgattgatataagtaaaactacagctaattaaaagtttagatagactaataatcttcaaagaaacattaaaatttttccagtcaggaggacaaactccctttgacaaagcttgcgtgatactctgtgaatcagaaagaatctgaatttccttccaattgttttcgatcgcccattctagtgccattagaatcgcccggagttccgcttccatagcagtcgaagcaacaatactttgagttctaaagaaccatttaccatcacttcgattgaccattatagctgctaatccggccttcccttgtttccacgaggcgtcagtgaaaattacatggttcgctttcagctcttgcactggagtctccatctgggttgttatgccctcggtacacagtaaggttcttctatcccactcatttatgccttctttaaggcatgcatcagtcatttctgagaaagctttcaaaaccttgtaacgagcctgatcaatgttggcattaacagtactaaggagacaattgtttctctgcctccaaatctgatcgagtatgcatccgctataagtaatcatctcggatcttttacagttcgggaaactcttgatcaaatggcagagaaaatcgatcatgctttcccctggatattcctcaattctcatagggaacggacctgagaaccataaagcttttgcaaaactgcattctttgaacaaatgtagactagtctcgatgtccccataacacaatgggcattccttttccgtaacaaacttcaggcgtttttatgtgggcaatgcatcgtagagtactctccacagaataatggtgattctaggatgtatgtccgccttccaaatccactgccacacttctttcttgctttcgaatcttactctttgatctactccataagctctcttgactgagaagaccccatcctgagattccttccaaattatcctatctctgtagggaaaaggcaatctagggatatccattattttgttgccaagctcctccccaaagataggaattaccatttccttattccactcattgccgatagaaatatcagcaattgttttgaccgtgaatctcttcagtttaagtctgtccatgagttccttgaactcattatgatccaaccaggggatccagggttgattccagaaatcaatcgaactcccatccgcagccaacgtgatggacccctttaagactgtttctcacctctagaatgcaattccaaaggtaggaatcacttggttttttttgtacctgccagaagttatcagtcgaacaatatttgtgcattaaggccttaacccaaggcttgtcttccttctttgctatacaccaagccaactttgtgatgagtgctctattcatgtcttcaaagcgtctaatcccgagtcccccggcagattttggttggcatatcttgtcccaagactttaaggcaagatatttatttttttccatgttaccacaccaccagtactttcttaggattgcatccaagcccctacaagtggagattggtactttgttagttgacatcatataaatcggcatagcagccgccaccgatttgatgagtgtaagccttcctgcatacgacaacagcttcattttccagccttcaagtttttgaagcatactctccttcaacttaacatagttatcccttttgcgtctcttgaaaataaacggatttccaagatgtttttcttctccattcacttcgtcgattgaaagagcttgaaggatttcttttttcttgtcagctggaatgttgtttgaaataagaacacttgatttcggcttgctgcattgttgtcctgaccacgcttcataagtattgagacagagtaaaaggttttccgcctctctagtgtttgcccgtgcgaaaagaattgtgtcatccgcgaacatcaaatgagaaatcggaggcgcattcctagatatcttgatcccatgaatcatgctttctctttcccttttcaaaatgatctttgagagtacttcttggcaaagaaggaaaaggaaaggggataaggggtccccttgtctgaggcccctttggggggttatcttcttcaaaggagatccatttagaatatataaatgtaagttgactattataaattctttaaatacctatctggttccaacttacaataaattatgcgcaggcccaactgttttggaccattccagtagaagagggtgaatctcactacagcccaaatcagtgtcaaactcaaacattaggcaaattgcccaaccacaatgaaaagtcaaacataccacaaataaaataaaattcagtcaaacattaggcaaattgcccaactagaatcaaagtcaaaaacatgaggcaattttacttgtgcaatccacaatatgaaacctgaataagaaggaaatggaatcacatcatgcaatcacaaaaattgatttgcactaattgtttcattctcttttgagaccagggaatatgcttttaagcatttcaactaccttgttttttctctattggggaggaacattttggatgaatattatttacatgcatatgaagacacattttttttaactcaaccaaaccccaacacaatccctctacttttatttgccactattagagggaaaccataatatctcagcataaattcaaatcctataaaattttgccaccctggtcaacaatggcaaagttgtctcctctcatgctgtaacaggtcttggactggaagaactcttcaaactagtagttgcatactctcgtgcccacgagtcatagtggataatttcatcaagagaaggtgaaatcaccatctctgatcgatgcttgtcgcatgttagctcaacaactttgaagatttcaagataacttatcctgaaaacatggatggaatataatttggaatgaggaaggtagaacacataacaaaatgtagtgatagataatgcaaagttaagatttgaagtgacacaatcttatcaatgaaagatgatgatgatgatgatgatgatgaaatagaaaacctacttctcatcaataaacatctctacagctttctcattggctgcactgagaactccggtcatggtgcccccagcacgtcccgcagaataggcaagattcatggatgggtactttttgttgtcaggactcttaaaagtcagcgaaccaagcctgtatcaatgtcaaattccacttatgcactcgggccaaaaaaaagcaggaaaagaactaaaaatatataaaaatgaaaaagacatctacgtagaataaacatgacttttcactttagatgtttatcttttaaaaataaataaataaataaaagcctcaaaaatatgctaatttattgaatagttatggatgtcaagaaaggggggaaacgtgtgagttcacattggttctgaaagtcacaaattacatgtaaaagctgaagtttggcttattgtgtaggcatatcattcgataaaacatgtggaaaaagattatgggaaaagtgaattacttgcaaagatcaagtcgaggccaagttacttcagaacagtatattctgtctggccatgacatggtatagagaatcggaattcgcatgtcaggccaccccaactgagccagaacagaagaatcctggaagacaaattgaagaaaccataattttgtattatagactctccattttgtaatttacagtcctattacaaactagcaaaagaagaaccaagactactagttttggctttatacctgtgtttcaatcatagagtgtattatagattgtggatgaattacaatgtcaatattgtcatagtctgctccaaatagataatgggcttcaatgacttctaaaccctgtttcagaattaagaaaaaggaaaaacaaagacatcatttttattactgctggcagttgaaaatgtatgagaaaatacatcagaaaacaataaaaaaaaaaccaagtatcaaaccttattgaaaagggtagcagaatcaacagtgattttctttcccatactccagtttggatgtttcagagcatcagcaaccttaacatcttttagcttttcaaccggccaatctctgtcataaaggagttttaatataatgctataacagaatcttaacaaaagagcttgggttgaaaaaaaacaaacaccaaaattggcagtcagactagatagatagtaattagtgactactcatatccaaggaattttgaaaggataagacgtatagatcttatacaggagaaactatgggattttaactttctttttcagagaaaatccaacaatctacaaagcataattctaaagaaataatttaggcaagtctttttagttcataatgtaaattagagtaccaaaataataaataaattaaatacttatgcagtaatacaaagttcatgtcctatcaatgagcttaaacaatctattccctaaaaaattcgatccaaagtacttatttcacacctgaaagctcccccagatgctgtcaaaatgatacgccgtagtgcaccatcaggcaagccctggatacactgaagaaaacagatttctttaaccttcacttctagtgaaccatagtgaaaatatgtggcacaatgatgacaatgccataaaagtattagtcctggtatttaaccaatgcttcacataatgacaagatggtctaacaaatgtgatagaactaatcaatatgatagacaagatccattgaaatttgtttgtatatgtacctggaatattgccgaatgttctgaatcggcaggaaga

SEQ ID NO: 18546 - DNA, 2467 bp, Cannabis sativa
tgaaatcgatattcaaagagtcattacgggaagctcttggacatatgatcataaacaattgattctcgaaaggctaacgaagggagataatccaagaacaattgcgctgaataaactcgacttatgggtgcaaattcatgatctccaaaccggattcaagatggattgggcggttcgacaagcgggaaattatatcggtacgttccttgaaaccgattcaaacaattttcaaggcgtttggagggaatatttacgtgttagagtccgattaaatgttgaagtccatcttaagagacgaataaaatttcatacggtggcgatgctttttatgcaaattttaaatatgaaaaactgctcatgttttgtttcatttgtggaatcatgggcttgtgctaagctttatgatacaccgatagatgatattgtgaaaccgtacggattggagatgaaagcgccatcaaaaagacagagttttctgactgcctcaccatggctgcgaacccgacaacccgacgccactccaccaggcaccaccacaccaggcgcaagcactgctactccggccgaacgatcatctgcaacaacaccagcagtcaattccgtcttcaaggtcgctgctactgtcatggcatcatcttctcaaggtgcggcagcagtcacggcttcagtcgaagctcctccagtcgaaccatcaacagccacgaaatcagcactattctcagccttcaatgttcctgctccagtcacgataccatccaccactgatgcggctacaatcacggctccagacacgatatcaccttccaatcgaattgctacagtcacggctggaatgaagggatatcacacgcaaaaaaatcagccaccatcaaggttttttgtccattcgaatatatcccttgattctaggaaagttgttacatgcatggaatcttctagtgttgaccccacattatctttgcatgataatgatgccacctatatctctgatatgcaattggatttggttgacttaaaaaggaaaagaattgataataattctttttcagccaataataattttattcttaaggaagtggatactaaagatgagcccaataatttttctaatcatgatgttgttagtctcccaaaaaatggcagcttggtgggccctggttccccggcccaccaattgatatgagtactatttgttggaattgccgtgggcttgggaacccacgggccattcaattcctacaagacatttgtgttgataagaagcccaattttttatttctttgtgaaactttgtgtagaaaggatgtagtggaccgagtgaaatgtaagttgggttttgaaagttctttttctgttgaagcccaaggaaggaaaggtggccttgctttcttttggaaattttctgatgaagcccgattattgaatttttccaacaaccatattgatcttgagatatccctccctggcaaacctccatggcgcttaacttgtttttatggtgaaccccaacgctctcttagacatacaacatggaacctgcttcgctcaattgctgatgaatcatctcttccttagtgtattcttggcgatttcaataatattacaactcagaatgatgtgaagggaggtcggccctatcctgattctttgattaatggtttcaaccttgcacttcatgattgccagcttggagaacttgacttgaaagggtatcggttcacttgggagagaggacgtgggacctcaacacatattgaaatcaggttagacaacgcatttgcgaatcatgattggttttctttatttcctgatgcgacattgtcaaactatgattactcttcgtctgatcatactctgttatttcttgagcttgaaactgtgaccttccctagtcttgtgccctttaattagatatgaaaatgcttagtttcgtgagcctttgtgtgtagagcttgtgaaaaattgctgggccgtgaataagcacgtatcccttgctgaaaagttaaagtgttgcagcattattttatctgaatggggttttgagcttactgaaaattttaagaaaaggctgaaacagagtaagaagaaaatggcaaagttgaaagtggatgatttctttgctgaacagtgtaattattttgagattctagctcaacaggagatttattgaaagcagcgttcaaaacagttttggctccatgcgggtgacaagaacagtaagtattttcatgccactgctagtactcgcagacgtaccaatcaaattgttcaactgaaaaactttgatgatgcgtgggtcaaatggtcttcgggtcttgatcaagttatcactgactattttcttgctctttatgctaccgatggtattgactgcaattctgtggtacatggtatatctagttctgtcactgatgatcataatgaagctctcttacagccggttactcctgaagaaataaaacaagct

SEQ ID NO: 18547 - DNA, 5872 bp, Cannabis sativa
  modified_base (5845)..(5846): a, c, t, g, unknown or other
gtcaccattctcctgatgccacgttaaagtgcaaaatttgggataacaaagtgcaaccaccagttgcaagcttggtacttacaggtttacgatgatggtgagtggggaccctatcaacatgaaagatactatgaggacccaagtcaatgttggaagttaactttcacttaaattgtctaaggcaaaagatttgtctactttatttatctgattcattcatatctctttttacaggttagcctaatggcaaagaggagttgcactttggttaacaagctagcctatgaacttgaactgttgaagttagaacgcaccaatgctgaacagaggagagaagaggctataaaagctttagcatatgccaatgccaagatggagtccattattaagcaaagagtaaatgaatctctagataaagttgttgtttataaaaagaaggcaaccaagactgagagagaacatggagatagatacaaagtgaaatacacgcaggctctctctcgaattagtgacttggaggtagatttaaagcaagctaagcagaacctcaaacacgcagagctaaggcaacccttctgtctcaagagtatgacaagaaatctcaacttctagatgacaagattatttctaccatcactctagagaggaaggtgaaactttattcaaacttgcagcagaaggtaggggaagttgagaagggtgctcttaaaaaggttgaggaaattgaagttgaattaagctctaccaagaaaaccttggcttaagaacaataggctcgtaaggtatctgagaaaaagactttagagttagagggccaaattcagaaaatgacttaggagaagtaagaccaggaggctaggacatcatgagtgttgaagcagtctttcgtgtattctctatacgcatttggaaacttaacaattctgtgatggattttctatatgatgaagattaaatacaattgatgcctcaagtccttcaactagctaaagccaaagaagccaagaaagcagcgaggggaataaaggtggtcgatcttggaactttcccctggagggagagaacttagaagacccagctctttcagcaattgacgctccttcaatagtcaattcttcagtcccaaaggtctctactcatgttaagccagttgatactcaaccaccaactggtcatgccttgaccgaattctatccaactcttactattttttttgttattaagctttgggggatagggatccccctttttgcgtatatagagacaatttgtatgcccttaccatagggcttttaagtatgtgatcacattttggatatttgtatactttactaactatatagatatttgtggtttcatctattgaatttactaagttttaatcttatttccaactccttgaggttctggttctaaaagcatgaacctttgggctttcgattaaatgcttagatttgacttttcttttaaacaatttttttaattccttggaacatgattccaatggcctgaacctttgtaatttaacagcatacttttagaaaatttttgataagtatcttttacttaagaattttgaaacttaaatatttaattaacctaaagtaattaattactcgagaaaatcaaaactttttagtaagtgtccattagttctacgactttttaaacttaaatacttaattaacttgaatattagttatttaagaaacctaaacaacttagttaaattaaggtaagttaattacaaggcctgaacttctaagttaaattaacatgagttaattatgaaacctgaagtactaagttaaattaaccgtagttaatcatgaagcctaaacttctaaattaaattaacttgagttaattatgaagcctaaaattctaaattaaattaacttgagttaattatgaagtgcgctaaattaattttaagtataataaggcagtggcttacttccagttccttggagctcaagtttcagaagatacttcctactcttatacttgttgttaatttagttattcttatagaagaggtataacatctaacaatatattgtatcctacccctaagagattaagagtttagacttttcatcacttgttagaagacaaaacttttaaaaactgaatatgaaatggaaatcccttcttgttttattcaaatggttcatgccctgaggagtccatggaaattaaacttataaaataaaaatcaaagaaaagaaaaagaaaagtaatcttgccaccctcagtttactgatagtatcggagtaggtggtcagcattccatgctcttgggatttctaatccatctagcattttcaagtgataggttccatcatcaattctatcttgaacgtcatacaaaccttcctagtttggtaagcaggtggtcagcattccatgctcttgggatttctaatccatctagcattttcaagtgataggttccatcaccaattctatcttgaacgtcatacaaaccttcctagtttggtcctaagacccccaatcctggctcctgagaggctggaaatacacttctccaaactagatcaccaatttcaaatcttttgcttttgactttggaattgaagtttttagcgatcttttattggtacattttaagttgaacttgtgactaatctcaaatttcttcaattagatccaaagattcttgaagtaaagcatggtttcgagtagtgtcgtgagcttctctcttatgtgaaggcattatggattcaactgggattactgcttcgcatccatattgtcatagagtacggagtgtgacctattgaagttctttcaattattctacaagcccaaagaacccttggacgttcttccagaaaccattcataataagcttgaagcttttttttcatggttgtcatcaaaatcttgttgatagcttccacttgtctgtttgcttgaggtcatgcaatagcttaaaagtttttgatgatttcgtgcttgatacaatagttagtgaattgatcactgtcaaattgcttttcgttatcagacactatcttgtgtagaagtccatatctgcacacgatgtttttgattacgaagtccaaggcctttttggaagttactatgttcatgggttcagcttccacccatttggtgaagtagtcaatagccacaatggcgaatttgactcctccttttggaagttactatgttctagttggaagtgatcccagtaagtctacaccccaaatagaaaatagccaaggactgttcatgagggttaactctgttggtggagctcctaggaccttagaataacgttaccattgctaacatttgcgaacatattcagtgtaatccttcttaatgtttggccaaaaataactttggcaaatgattttcttagaaacactaagtcgagatgtgtgatctctacaaaatccttcatgtatctcatgcatgacaacacttacctaggttccagcgcgcacaggttgacctagggctaggcccagcgcccaagttgacaatcaacctaggatgttgccttcaatttctcaaaggccaaatcagatgcaaccattgaatttaggattctcaaaacaaggtaggagaccttctcctcaaaggaagtatcaaaaacaaaatcctaggagctcggaagtaagtacccagcacccaggttaacaaatggcctagtgtgctacgaatctgatgttgattttaccatccgtctagtttttcacaatgacaatgatctatgaagtcaaaggaatcaaattcacaactttgaatttctcatttccaactaactcagaaataaagagttttgagtctctcatttctgcaaaatagcaacatctttaagaaccggtgacccactttgctagaacatataaatgaacatattcagtgcaatccttcttcctggttggccaaaaataacctttgtgatgattttcttagaaagactgggtctagatgtgtgatctctacaaaatccttcatgtatctcatgcatggcaacgattatctcggttccagctatgcaccttaaatacgacatcgataatcctctttaatatagctttacatccatgatcacttatttgggggcttaatattggatattccacaaagcaagtctatctttcgagagtgtgcctgattctagatttttcaatattgtggtcatccaagaagttaagtgatcaataactaacacccccagtgtccctgtgcttggagtgagtagatgggggatggggactagtccgtatttctccatttttggatctatttccaatttagctagtatgtcgcaaaggcatttttatccttacagatttgtttcacaaactagtgcttaaaatgttgcaatagctccctggtctttcctacgtaaccaaccatatttttgacttttgtctggtattctccagacacttggttaacaaccagttgcaaatcatcgtacaagtcaatgttcttggcgccaacctctttagccaattgcaagccaacaatcattgcttcatgtttatcgttgtagttggaggctttgaattcaaattcgactgcaatttgaagctgaagttgttgaggagaaattagaatgattctggctcttgaacccttctcatttgatgctccatctacatatattttctaatgctctgggattggcattttaggattgtaatttatccacatgcattccacaatgaaatttgctaaggcttgacctttaattaaaattcttggctgatatttgatatcaaactcgctaagctccatttcccactttaggagtcttcctgatgactttgacttctgtaatacttcacaaagaggatggttggtcagtaccctgatggtatgagcttgaaagtatggtcttaacttccatgaagcaattagcaagcaaaaggaaagtttttcaatcatgggacatctggactctgagcccaacaattttttgctcatgtaatatacaagaagttgtacgtttccttcttctcgcactaatatggcacttatagcatttctttgggcttagtttcattccatactctcgaataatgaaaagattcttctaaatcttcattatggctcatggaagtctttgatttcaccaacatgtcattgacatacacttccatgttcttccccagtacatttttgaacattttattaaccattcactggtaggtagctccagtgttcttcaatccaaagggcatatccttgtagcaataaatgtctttgttagtttgaaaacttgtacgctcttagttagccatgtgcattttgatttaattgtaactagagtatgaatcaatgaaccttaagagttcgtatcccgaggttgcatcgaccatctgatccatgtgcgcaagtggaaaatagtattttgggcaagctttgttaaggtttgtaaaatatatacacatcctccatgtccattaggctttgggactaaaaccagattggctagtcatatgggatatagagcttccttgaggaagccgatgtcggttaacttttctacttccgatctcactggatctaggggtcttcacttttgtcaaactagatttgccttgggatctatgttcagtgcatgacaaatcacacggggactgatttcagtcatgtcagaatgactccaagcctatacatcattatttgccttgactgtggagacaatcttttctctaactgctggaggtagattctttcccactttggtgactttaatgggatattcatcatcaatgcatacttattctacctctttaatagggtcaattgttcgttccaaacctacccatagattgttgggttttatgccctnnataaaactctttacaatctgattagt

SEQ ID NO: 18548 - DNA, 5270 bp, Cannabis sativa
  modified_base (5056)..(5059): a, c, t, g, unknown or other
tattgatgtaattaagtagcatatcttatataacttaagaaaataactttcaggaatatcactaactaatcataaagtgtcaccttataaaaggtactagacacactaatacctaataacaatactcttatagaaagtgtggagcactactaatcccaaatagcaatactcattatataatcacccttattttgttttcaatttttttttatgaaaaaaaccatttctaggtgggacccaaaagatgaggcagactgacttagttaagattaaaataataatattagaatttttaattaatttattattattaaaaaagtgggacccaaaagtggagaccctattaacatcacaccactctaaatgtggcaaaaaagagtcatgcacaactctaaatagtatacagagccatgcaaaagcttgccgtttccaaactttcgccatttggggtaaaacgctctctatctcacgcccttttatcttctcatcttcactatatttggcaaccctcacaccctctttttccaagtttagaacaaagaagaaaacccattaaggggttagattagagagatataatatcttcgagaaagattggatttttgattgaaagtttggatttttatttctgggttttgagttttgatcaattttgttatctgggttttggttttctgagatgggtaggggtaagattgagattaagaggattgaaaatgctaatagcagacaagttactttctctaaaagaagggctggtttgcttaaaaaggctcaagaacttgctattctttgtgatgctgaggttgctgttataatcttttctaatacagggaagctttttgagtattcgagttctgggtatgttttttatttatttatttatttattcatttgatacaggtgaattttttttttttttttttttcattttccttattgagtgttttgcatgtttgtattttaatcattaaacccatttgaatatacactctctttgactctctttctgtttcttaaatgtttgtgaaaatgttttcattaaatgaactcacatggaaaatgtttatctgggatttgatattctgttaccccttaaaggggctatttgtttgaaatggtcttttttcaattcaaaatgcaacttttaagaaatggttttttttttttttttgttttcttattatcttggtgacactctattagtggcttctccttaataggtctaaatctacattgttaaacattatacccctttttggtactctgtaacaaattctcaaaaatcattactttgagtagtcttttaagtccatggatttatctgagttttcttatccattattattattattatttatgattgttgttgtgatcattgccctcttttttatgttttcattttgttctggtgacacatggactcatgggacaaacaaaaggtgcctccctttgagtgaaatgataacacacttatatatttgtttttgtattcttctttgttgttgttttttcagtatgaaaagaacactggcaaggtataataaatgtgtagattatcctgaaggtgctattgtagacaaaacagaggtaattttgactcttttattatttgttattatcatttaaagtttgagaatatgggcaaaagttcttatacataattttgcttcttattacttggatataaatgaaaccaaattttatatttggaatgtacttaaaaagtcattgaataatggttaagagagaaaccacttgtattaatggttatttatcatatctattgatataatttttttttgtgttttcaattaaacgatgaatttgtctagcacagtattcaaaatcttagcaaaaacttacagcgataaagctaatagaaaaaaaaaatagaagagtgattgctggcataaaatccacgattggattttagaaaagtgtaagcgttgggcaacttggcgatgataaaactacttgaagaaagggtagaataaatatatatgtacatgttttctattttgattttttgtattgtattgtcattcagcttatatattaagtacaaaaattttgtgaactaatcttgatagattttgggaatgttttattggcatttgtagattaattcgaaatgcaagctctaataatcttttaatgattttcacctgatattgaatttgtttgaggataatataaatctaaaagggctcttgttattgctatggtattgttctcatgaaccaaaattaattgggataatacaatattgatgatgcttgtaattgtaacttttcagaagcaagattctaaggaggttgatgatttgaaagatgaaattgcaaagctacaacgaaaacaatcgtatgtattctttggagtttacagttctagttctttgatgctgctagatcctaaaaatgaaaaataataataatgattcagtgatctaatctttgttttttttagtcgtttgttaggcgaagacttaagtggaatgagctcgaaagaattgcagcaccttgaacaccaactaaatgatggattaatttcggtgaaggaaagaaaggttcattgcttttggtttgaataacacttattgttattcttatcgtgttgttgttgactttttctctgtattacaaaggccttattagttgttgttcttatgatttcaggagaaattactgaaggagcaactagaacaatcaagactacaggtaagtgacaagactctagaacttgctaatcttcaatttaatcgaaactatcatgtataaatgcttatttgtaagtgacaagactttagaacttgctagtcttcaatttaaccgaaactatcatgtataaatgcttatctgtccttctattattcttgttgttttctcttttaattatagaacaaggcttaaagactgttttagttttacatttccgaaaaattatatgctcaaagctaatgattttcttgaaggaagcctatgaatggtgttggtttttcccaatgtaatatcttgaattgtagtttggttatgaaaactttacaattcttatgctgtacatgattgtatcattaatcctttcaaattttcggttttccaggaacagcgtgctgtacttgaaaacgaaacattgcgcagacaagtaagtttgtgtgtgagtttgtaacattagcttgtctctctttacaatagtgtatctgattttttctgctttaaattgtagattgaagagcttcgatgtttatttcctcgagctgattgcacggttccatcttaccttgagtactaccccattgaaaagaagaattctagtgctaatcatagtgacattggaccagaccagaactccaattttgcagccgagaaaggagactctgacaccacattgcatttagggtactaattcttctttatgagattgtttataccagagtcacttagatatgcattttcaaatttgattatttaattcttcttaggcacttaatgattaggcgaagattcttatgtgagattgtttatagaaatttgattattgagatacctgatgtggtagctcaaatggtcagacatgtggtttattcctataaatgtttgagtccttagatacttacagggtcggccctgaacttttgtgagccctttgagtaaaaaagtatgtatttttaggagggaaaacttttttttggagctctggctaggtgggccctaggcgcaggactagctcgccttaggtcctagatacatatacagaaattgttatgatttcccacaaatgtttgagtccttcttagatacttacacataaattgttatagttttctagtcccgtaatatcgaacggttgaggctatgtcatgtttactcattgatttgttattgttcatccaggttggctagtgatgtttacagaaagaggaaatctcctgagcaagaaatgcactccacagactcaggaagcaacatgggcctactttgattgattcttttaacagaatcacatagcaaaaccgaaatgaatttggcgatttgttttgagttttaaaatttttgttgataaccacccttcctttattgaagaaaagttgtgtagaatcgtctatgtcagatagatttgttccttttaggctttgattctgttctagttaattatgaagtttttaacattcttatagaattaaggtgactaactatggacattggcatactatatatagctttctcttttagtatgcatcaaaataggaaggaactccccaactttctctttcttgcaaatatattcttctttctcatctcatttggaattggatattctggtggacttgtgttcttgttacatttttttttttttttgatataattttccttcatttcatgtatttaaagtaaaaagatggaaagaaagtgtaattactaaaattagatatatattttaaggattttttcatttttacactttaaaataattttttttttacaaaattttacacagaaacccttataacaactaatagagtaacttaaatcgcaatcaaaattcgtataacaacccagatagaaattacaagagaaaccatcagagcaactcaaactgtaaatttaaaaaagaaaaaaaaaagttaaacaaataatatatgagataattcccttatattttaagggtgcttttttgtaatacttttttaattagaaaagtaaaaataatttctaaaattatgttttataaaattgttgtcattttttaattttttaattgagaataaaaaaaattactttcaaaatttttttgaataattttttttcttgattaatattttggactctgatctcatcttagactttggaatccaaacttcgactcagaccctagacccaaacctcgacctggacgccagactcgacttcggacctcggacttgaccccaaacttggaccccgacttcgaacccaacttaaacaaaattaacaaatgaaaattaaacttacagaatacacttttattttctatttttaaaattgaaaaacaaaagtaattatagaacacatttttnnnntttaaaaataaaaattttacttttcatttttgtgattaaaaaatttaaaagtaaaagtattactaaacgctacttaaaaactttgctatgagtatagcaacatgatttacaaagaagcacactaagggctcgtttggtacgccgtattgtaatgtattgtgttgtattgtattgtattgtattaatattatttaatacaatacaatgtttg

SEQ ID NO: 18549 - DNA, 3881 bp, Cannabis sativa
aaaagtaagaaacgaaatgtaaaagatcataaataacactaagcccccttcccccttcttatactgttttcattctatttagaaaaaacctgtagtaatacctgatgtaacagaatcctgaggaccagattgcagaccagatccaactaaatttcttagcatttcttctttatgggtagcatactgtccatatgcagatagatcctctcgtaagccattaaatccatttatagattctacctctgacgaatcccatctcttccttgtgtgaaatccatttttatcttccccagcaccataatcaaaagcagctctaagtgtactaaggcactgtaaaactggcaccagagatccctgcaaacaatctcatcccattgataaccatgaacaaagctaagaggtgcaatgggaaggaccctattaattgcttgtcaaataatggttcgacattggaaatcaaattcaagtggaacttattgcgcatataaaattaacttgtgccctttaaaaaggcttaactaatttctcctagtgatttatagaaaggctaagcacaagagtcaaaatacaactttaacgcacaggttcaactttaagagtcgaaacacccactggcataggttcatttttaaggctgcagtgtcaatacgatactttttatccagcaacccagatactactgccatgaagtcagactaccacatatccagcaagatgcaacaacaaaacaaattattaataataataactgaaatggactttatgtacctgctctaggtctacaatttgaaagctcggcaaacctaattcctccacagctgccaaaaaccttttgacatttgtgacatctggataagaatttggtacctaaattgtaagaaaaaggaaaaaaaaatgaaccacaggaaatataaaattaggttgcatttccaaattcaccaaaaaaaaaaaaagaaaagaaagaaaaccacgcaacaaagtagtactcctaccatttcaagtgaaccaggacataatttagtcaaaacgctacataaaacagtgccatcaatcaaggatgccctcaattcttctgttgaggcctcaatgggcaagctcaggtgaggaagcaaataatttatccactccaacaaagatgatttctgatagcctaaatataaaatgagagtcaaatgtatagcatgaagaagcatttgaaatttaaatcaaaggggcatgcttcttgacacctacaaatgaaaaataagcttacaacaatcagagattacttaccttgagacatgtcaccaaaattttccatcattgcagaattttcatcatatgctccattttgaacattccatttttccatatttaccagcttgtggctggaaatggacgttcatacttcatgataaatcctacaagaatatcccccttccaaaatcaatcatagaaggaaaacagtccaccataggaaggataatgaacaaaatgtgaagacacaccaaagcaaggtgtcagaaacctctaatcgttacaaggctttacacatctgccatatgggccttatcatatcaaaccaatagcacaatgcccaacagaaaaaatcaatgctttataatatgtcattctgggccatcataattctaaccacacaaaaaatttacaagttttttcattggaatgtggttgtatgtttctgaacaacaatacaatagtacgtagaacaaattgcaacacaaaactcatagatgaataaatttacctgacattagcagctaagcttcgcaataacatttcaaaaccacatttacttacacgctaaagctcatacattgatacattttatcgtcctacattttcgttcaaacatttcttacactgaagcaaaaccccttttctttttcttttcaaatttttgtttacaaatgcttcaaagattccttctttaaatataaattttaagagaaaaaaaatcagaaatcaaccagttaaaagcccaatttcaaagaaccaaaaatttcaaaatccagaaatatgcaaagaatacgaaaacccagaaagctcaaatctcattcagagctaaagaatgccaatgcacaagctgcattgtaagaatatcgactcataaatagaaggaaaaaagaaaaaacacgcaaagacacaaaaaccacaaactcaaacttgtattcagatccaaacaaatccaaaatacaaaaattacaaggtttcgaaactttttaacccagaaattacaaacctgaaacgacatgcgcctgaaatctctctgcagtaagagatcgaaggtggactcacggagagagagggaaaacgaataacgatagattctcaaaaccgatccgtttcgaaaaaataacacctaaagcagattcatttcttgttcatgttatttttccttttttcttttttttttttcttttttcgaatttaaaatttaagctcgacgttatctgaaatagatatgtaaaaaaacaacacaaaagaagtttaaaaagaaaaaactttggaaaatggaaacgtaatataatgattttttttttttcttctctctttctattttcccagatatgggagagaggtgttttctgttttagaatttatttataattatttttatatattaaaaaaaataaaaagaataaaagagaaaagcgttttagggattttgaaaattgtggtgtttttggattcatccacgattttcggagtggcgttcccgccttgtagtattcgtttttataatatatcagatttaaattgaactcaagtcgtcgtatcattctctaaattttccggccaactaaaacaaaattataatataatttttttattccaaaaaaaaaaatatctaagaaaatgagaaaataaaggatacgtgcttgacaggcgcgttgatgtggatgggtcttgttttttttttttttacaggtgattatggtccacctgccaactatacataaccaaattaaggaagaaaatttgaactaaatatatccaatgatcatttatattattttttaaaaaaaatgtagacaaatacaactacataaacagttcaaattttgttggaataattattttttcattaattattactattaaatttatttaaagatattaatttttatgttcctatttttttagaaactaataaatatttggccatacaacctcttgacggtaaagattcagaagttggccaggcagaggtgcctatggccgaccatagtgttagaaactagttgctggagaaaataaaaagaacgaaattactgaattagaatttgggttgagtcgcggactaagtcgctctctttaagacgttcgcgacactgcctagatttgtgcaagcagactatcagcctcgtcgtccccaagataaaacagcccagtcgaacacactgtatcagaactctattacacgatagagtactgtcgaaatactacacccaaaaccaactactgttcgaaaatataaatatgtaatatagtagtatgtatatatatcgtataatttttcagagtgaaaagatatatttttctcccactgttcagtcgcattatataggccatgcgctgaaaattgtaatgggaagaaagacgttactggatgggaacgttggaacatgggatcgtgggaacgatgcaaaaaatcaggaagatgctataaatcaggaagcctttgtttattgattaatcaaacacgtttaaaaaaaaattgttttaattaatttaataaataataatttaataaataaattttcttccaaaaaataaggtgacaccacacccgcccgccagcttggctcagacggacggacggcgacggcggcacgcgcgcgtgtgtgtggtggtccggtgtgtgagtcctcacccat

SEQ ID NO: 18550 - DNA, 3089 bp, Cannabis sativa
gttgatatacatatgtgaatggccttatgtagttcaccaactgctgggagggtcttccttccttcctttcattttttttctttaccgctgccttatgtgaaattatgatatagcagaagtaataagtatggtaatatgtgaatctttggttcattagttatttttcatcttctttttgtataaactatataacattatatgtatttatatatatatatgtatgtagttcttttttatgctacaatctactactcactagtaaaaatgcatataattattggtcacagattgataagttacctaagctcatgttaaaagagctgaaacatgagaaagagaacttactggacccaaaacttaagtgtaatccttttgcttgcagtttttattctttcgtctataagcaagcattaagctgttccaatgttaaactttgagaacagctatggccttgcttaattattagaatcatataatttatgaaaataatttttattatagatgccaaatatgaatgcccaccgttaaactccaacttctatgctctgcttatcttcgttaataacaatgtgcttctaaaatacattttctttcaaaatagacacataaaagaaaatgttgaagatattggggtgcatgctgaggtggcagtatctggtccttacaattttggcgatgaatggctccaattccaaacaaagacacattgttttgttgcttctagaatcctctacatgtaatgagaaaatgtcttcttaaaccctcgcgtacccaaagactaaagggtttttatttttagtacaaacacttcacacttcacactacacacttctcctctcacacacaacactgttatcgttgcttacgtgaagtagatatccttcttctccgcaactctttctagggctcaaatggctcctgttcttagcagaagcttagccacggcttctctagcttcttttccttcttcttctccctttactgtcagaagccccaatggagtcttcaacttgagaagtgcgttcctccctcaaaatgggctccgtagaaagggcctcccttctagtgccttgaaatggaagcttgagaggagagacaatcgagtctctgtacgttgtgaggcttccgttgccgagaaagaggagattgatactgatggtgaaaaatttgagtaccaggctgaggtgggtttttctttaatcccacagaagtttgagttttgtgaccgttttatggactctttggttttggaagaaattgagtttggagaaggttttttttttttttttcaaaagaaaggttttgaactggtttttcgaagattgaagagttgttatccttttctcagaaataaaaaaaaaatggaaaatgtgtactttggtttggtctagattatgaggttgtcttttagcttctcagaatattaaaaaagtggataagtttgaaagatttgtaaacttttcaaatattcatatttatgttgatagttttagaactgaaggctgagaacataaaccatttgcaggttagccgattgatggatttgatagttcatagtttatacagccacaaggaagtgttccttagggagcttgtcaggtaagctgcttattcttgatatattaaatgtatatttatatatatgatatttatatattccatactaatttgtttagtgttcttttattctctattatttgctttctttaaaagcctttgccaatttatgtgtgaatctgttctatctaaagtctttatattgaggatcttcctatagctcgttgtttatatgatgtaattgtacttttctttttcagtaatgcaagtgatgccctggacaaacttagatttttaagtgtaacagagccatctctgcttggagaggctggtgacctagagataagaatcaagcctgatccagacaatggcaccatcactattacgtatgtgtgttttttccttttaagaaacttcttgcataatagataagggttattgtgtaataatattaacataatagttcaacgttgttttagggatactggtattggaatgacaaaggaagagcttattgactgtcttggaactattgctcagagtggtacttcaaaattcttgaaggcattaaaggtatcttctttttcttcttcttctattttggtatgtgtggtgtattgttgaggggttatgttattgctttgacatgagtgaatgtttcatccttgaaccttactctgcgagctttgtcttatgataggaaaatcaagaacatggagcggataatagtttgattggtcaatttggtgttggattctattctgcttttcttgttgctgacaaggtgcggtattatttaacattttgatttgaaaagtgttcttgttgaaacttcatgctcttcctatgtagtcatagtcaataaccataattttccaatcaggttgttgtctctacaaaaagcccaagatcagataagcagtatatatgggaatcagcagctgagagcagctcttatgtgattaaggaagaaactgaccctgaaaaaatgttacatcgtggaacccagatcacactctatttaagggtatatcaatttatactttgttgctagtatcctcacaagcaaagttaccgtatgctgatcttggatcagtgtttttttatttagcagttgctggaatgagtggagtatatgagtgtaattgctaaaaaaatcactttcatttgtcacgtggcagcataatacttcaattctaaataattaaggatgtcatcttgtcagcaaacttccagactttcctgattagctgatgttctttctccttctcctttatttatttatttatttatttatgtatttccaattgcagcctgatgacaaatatgaattctcagagccagccaagattcaaagtttggtgaagaattactcacagtttgtatctttccctatttacacatggacagaaaaatcaaggactgttgaggtgagaacaccctttgattgtcaaaaaatacttcccatatatttggcagccttaggagctgctggaaagagagataaatgatttatagattagtatttagag

SEQ ID NO: 18551 - DNA, 2922 bp, Cannabis sativa
aaaaatgttgccatcttgaactctgcggtaggaactggggatgattgtgtttccatcggccctggcactcagaatctctggatcgaacgcatggcttgtggtcctggccatggcattagcatcgggagtctggctaaggacataaatgaggaaggagtccaacatataaccgtgaagcaagttgttttcacaagcacccaaaatgggattaggatcaaatcatgggccaagcctagtaagggcttcgtcaaaagtgttcacttctcgaatatcgttatgagaaatgtccaaaatccaatcataattgatcaaaactactgcccaagtcacgtcaattgcccagatcatgtaattactctaagaactaattaatcacttttcctaatattgattatttgcttacatataaaatattgatcatgtttttttatgtatattttacaggcatcgggcataaaaattaaggatataacatatgaaaacatcaaaggaacatctgcaacaacaattgcaacaaaattcgattgtagccctggaaatccatgcagtgggattaaattggaagatgtgaatttgactttccaaaacaaaccagctcaatccctttgtgccaatgccaagggaatatcttttggcacagttcaacctaatagttgcttatcaaattgatcagatataattattttccttttaattttataattaaccatttcattatttgttgtatattaaatcacattattatcatttatttgttctattcttttactgatgtaataccaattcttagaatatatatatattatatttgttacatccagatatagtcatctaaagtcactcaattaaaaatttcaaactatattgttgcctaatctaattatttgctaaaatggaagaggtgattagtaatttgaacatgaggtatctctatatcctttatccaaaatcagtcattacaaattgatcagtatatatcatttaagattctaatagacaaacaagggtcaacaatgtctaaatttttgcatcaattttggggaccataatgattctacatttatagaaaaattcacctatatatgatatgtagctattaataacaaagaaaggatgtacaagtataagaccaacctcaccaaaattcacattcctttctctctctctctcagctcagctcagttgctataatatatcatatcaccttgtccacctccaaaagaagaacacaatgatcacagtgaataacatgccagcgtacttgatcgatctgtcgacccgatgcctcctctcaatcagcttcaacacggtgttggatagccccactgtgttaagaacatcaagtgctttcctttgtgccctctgatccaacaaaaaaaaaatcaatacttggatataaacacagaaccaaaaagcagagaacataacaccccaacaactattatcgttccatttcttgttctacatatgaaatcaaacatacttatagacaaccccttttgggttttgaaaatacatgagaattctttatacatcaataaaaacatttatacagaacagaactgtaacgcctattatgaagaactggacattaattttctaagatacagccaattcaacataactaacactcactcagagaaggtatcaaggaccaaggcacacacattagtgacaaaatcttccatcaaaaccaacagtcatctaaaagtaactaagagaaaaagaatccaattagtaatttcctcatgcatattccttacaccgtgaggaaataaatccaattaaacagccgtgccaggaggtatgataggtacctaatcttagacttattctcaatcttcattgtttgtattcctgatcttagtcatattctaatcttcattgtttgtattcctaatcttatggattgtttatcacaaaaaactcttgatttcaagcttatttcaaaagaaactcttgcattgtattctaaaagatacttatgcagagacctggaataatttaacaagaactatgttaacaactaaagctaattcagacgaaataaagtccatataatactcttcttgaatggttaaacataattgaaatataccttcaagcgttctctttgctctgagtatttgaaaagtatggcctctccagtggcactagcttcttcaagcatccgagacgaatttcgaactgactgcattgcttgtgcttcctcatcaaaaattctcaaaacatgagaagactcaccattctatacaattaaaccaccaagaaaacagaacacattttagacacaaaataaagattaacactaaagaaaattgtaacaaatatttatttttacatacagctcttccaatcaactctgccctctctctagcttcatttattctcttctgagttcttagaaaatacttgtccaaactttgcttcaaagactcagcctcctctgctacttgttcaacctttctgcaccattatttatcaagatttgtgtttaagactgataatgtaatcaattaaccaaacaatccgaatcagttgaaccctaagatcgaaatggaatctgaaatagatttttaccttttccagagatcgcgctgggacttagcagcaacggagcgccatagacggtccatatcgaggcagagtgactggatctgagcgatgtctttcttgacggagaaagagaggtcaggggaatcgatggcagtggaagtggaagaagagtactcaagacgttcgagacgttcgaggccgtctcttgtcctgatgagaagcttcctggagttctggtacatctccgatagcgtaactccgccgccaccggcgccaccaaattcgacggccattgtcgatcggagaattctgatttttcgaggtcgagttaggggggaggtcggagagggcctgtagaaaaacgaa

SEQ ID NO: 18552 - DNA, 2713 bp, Cannabis sativa
ttacttcacatcctacaatcataggatcttagctagcattaagaaaaataatatggaatgtatatttttgtatggtgaaagttatataagcaataacataagatcttccaatttagtaatagtaaaagtttttgaaaattggcacttctataaattgtatcctgattcaaaccacatgcaactagtataaccttataaatgagttgcatttaaatggtccattccacacacatacaaggcccaatttaactatatttcaaatctgtcaaaacaattcctctttcacaattgacaaaaaacattataaatttgaatattgtctcaaagaattgttaagtcacaattacatattctgtcctcttacaaattacaaattttaaatattgtcacaaaaatattattgtgactaaaacattacttgtcacaaatattgaagataaaaattgctgtgttgttttttagtaattaatataatttgatatcgggtttcacataaccattaatcattcttgaaatgccacatgagcatagtacattaggcacaccagtaatgctctttttataatgtcatttttgttttctaactttgacatgtactaaaagtcctctgaacttttaaggtcgttaaaaatttctcatgaattattgagattattggatttaggaacctttgtccaattttaataaggaacgtctaacatgaatcaaagttcaaggcatataatttagtacatgtcaacatttgaggaatatgatttgatagatatcaaagttgggaagcataatttagtacatagacaatcatgaaattagtaaaattaaatgaaattagataaaaattcttaaatccaataatctcaacaattcataagatttaatgatcagaaaagtataagcccataatttcaaacatgacaatagaatatagtgaattttatgctaaaattaataaatatataacaaaattcatatagtaaaataattagctatagaaaattagaataacttaaacaattaaaatatattgtatttaggttatgattacaaagaagagagtgaaatatgcatgaagagagataataacaacatatatcatatacataaacaaattcttacaaaagttcatatgcacttatacctctttccctggatcctaatcaattgggttccaacaaatttagtacaacaagtagacacaaattcactattatatatttgcctttttccctttcaattttctcccctagttgacttaccttttgggaatttgttaaagaaattggccccaaaaaaagaaaagaataaatccacaatttacctagtcttcacacttgatcatgatgattatattggcttaatcaaactatacatgatcagtgagaaagaaaaaaaagaagaaataattataataattataataataattaaataattaaaacccctaaatggcttgttcagtgacaagtcttgctcttaaacttttcctcaagatttttcctgctgggctttttgggatttcttctatgaagaatacctttgcaattctcttgtaaaacaccacctgtattttcaaaaataccaaatataaatttagttactgacattttcatagcaaatgtatttacattaattatttttcatggcaataatatttacctgttttgagatatattgcttgatatcttcttcactgattttggaaccatttgatcttacaacaaaggcaacaggaacctctcctgcagcttcatctttcattctgaataacaaaaataccaaacaattaatttctactaataaattaattagtatgcatgcttgttaatacctttttttttttactaaaatgtcacttttgtaagtcacaataaaaaaatatcttgttactaattaaaaataagtatataaatataaatgtaaaaaaacatttaatttagtcgcagcaaattataatttattatgacttattactcttagccatcaacttttttttgtgcttcgatagaattttagtaattaaataaatgctatgtttatgtacaatacttacgaaacaacagcggcatcggaaatattaggatgggcgatgagcatggattcgagctcggccggggctacttggaagcctttgtatttgatgagttcctttaagcgatcgacaatgaagagttcatcgtcgttgtcaatgaaccctatgtcaccggtgtggagccatccagcttcatcaatggtcccctttgtggcctcaaaatcattaatataacctgcacattttacaacccacacacacctattcaatcaatatgaccgacacaacatacacaaaacttttctctttcacaaaaaaatcattggtccatgaaacaaagcacatttattggcatgtgcattaataccacatagaggtggcattttaatgttagctaaccatatttaataaaaattatttaagatttaatatttaattgtattaataatgatatgacactttagagagtcttaagcactaatactgtttagtatttctgtattaatattattattaattaagttgaataaattataatttaaaaataaataaatatatacactttgttttgattaaaatagatagccttgtttgaaaatatacatttcactctgttttggtaggtgagttatgcatttttgcttagctaaaattgaggtcactataagattattattattatta

SEQ ID NO: 18553 - DNA, 9490 bp, Cannabis sativa
taattataaattattattcatatgttgtgactaaaatgtttttgggctaaagatactagtcacaaaaattacaatcttactacgaagaacttcctctctttcacttgtttgttgaaataatgagctactttttactggttggcctttagctttagattttccacgtccctttgttcttccattttgtcaaagagagtatgatttttctcctagttgtatgctaacctcatgtgggaggggagatccaattccacaggtagcatagcctcataaccatatgccatggcaaatgggattgtccggtagcacttttcgcagttgatctatacgacaagagtacttcaagtagttcttcaggccaattaccttttacttcttcaagccttttcttcaatgtgtccttaagagtcatatttacggcctcaacctgtccattagcctgggggtgtgcgactactaagaagctttttatgattccttgttgtaggcaaaagtcagtaaacatttggctatcaaattgctttccattgtctgaaacgatcttatgggagagtccaaaccgaaatttgaagtgttgccaatggttcggcctccacccactttgtgaagtagtctactgccacaactacatatggcactcctctttttcctttaggtagctacctgatcaagtcaattccccaaattgtaaatgaccatgggctttgcatatgtattagttcattaggcggagcctgaggaacctttgaaaacctttgacatttaccgcattttttcacataagccttggaatcctcaatcatggtcggccaaaagtagctttgcctaaggatattattagacaagctttgtcccccatcgtgatttctatagaatccttcgtgaacctcaaataatagttgtacaaaatcttctttagtgacacatctgaataagggcatagaaaaacccttctgtacattactgtattcattattaggtaccacacaacttttcttctcatttttcgagcgtcatttccgtcactcggtagttaacatgtgttcaagtaggctgcaattggtatcatctagtttggggttgtatccaccatctcaatttcttcagttcttgctatacttggatctttcaagaattggactagaactaaatttgacttgtacgcaattgaattgctcgctaatcgcgcaagagcgtctgctgttgtgttttatcctcttggaattatcctgatggtgtaccctttgaattgtgcaagcaggtcttgtattctacttaggtatgcaatcattttttctccccatgttatatactcacccagaacatgattttagaccgattgtgagtcactgcaaatttccaagtaatcagcatttagttcccgtgccaacttaaaaccaacaatcaatgcttcatattcgacttcattatttgatttggtgaatccaaactttatttccccatgtacgggatgcccccaggtgtaattagggctatccctactccgaacaatctatcagtggtgacccatccacatgaagcttccaagtgggcttattttcatcattttcattgggtgctggttcttttccttgttcttggctttcttctaggatgtctttttcatttcctagtacactcaactacaaagtctaccaatgcatgtccttttattgtcgttcgtggctggtaagtgatttcatattgccctaactcgattgcccatttgagtaaccagccaaatgcatttggtttctgcaataccttacatagaaactgattggtaaactctcaaattggatgagcttgaaaataaggccttagctttcttgatgctaggaccagacaataggttaatttctcgatcaggggatatcgactttctatatcaaccaaccttttattgatgtatgtagtagacagggtgctgagagttaccctcttctctgattaacacaacacttacttcaaattctattactgccaagtaaatttctaactcctctttgtccaggggctttgacaagatggggggttgtgcgagttgcctttttaattcttggaaggctgcctcacagtcttctgtccattcaaacttcttacttttccagagaatattgaagaaagggacacacttattagtggattttgacatgaacctactcagtgctactattcgaccagtaagactttgaacttcctttactttagttgatgacttcatgtccaaaagggcttgaatcttctctggattggcttctatccctcgagcattgacaataaaactaagaaactttcctgagctgactctaaaagaacacttcaagggattgagtttcatgttatatgttcttaggatgctgaagcattcatccaggtcatctatatgtccccaaacctttctagacttgacgagcatatcgtcgacataaactttcatattgtgtccaatctagttttcaaacattttgttgaccgacctttgataggtagccccaacatttttaatccaaagaacatgactttatgacaatacaacccaacacctgcatggaagttgtgtgttcttgatcaggcgaatgcatttcaatctagttttatcctaaataagcatccataaaacttagaaattcatggcctactgtagcatccacaagctgatcagttcttgagaggggaaaataatcttttgggcacgttttattgagattagtaaaattaatacatacatgccacttcttgtttagttttttcactaggacggggttcgccaaccaagctagataaaaagtttcaatgataaacctatttatttgaagtttttcaacctcatcctttagtgcctatgctcactctttatcaagcaaccttcttttttgttgcacaggatttgcatccagatcaatgttgaggacatgtgtggttactgtagggtcgattccgaccatgtcatcatgcgactaggcaaaaacatcaaggtttgctcttataaattttatcaatgttgattttattttgagcaacaaaccttttgcgattttgattttcctggtcaggttatttggatcgatttccacctcttctaactcttccactatcccaacattggaacttggttcactaaggaaaagatccacatcctcattcctgccctgggcagatccctatttggtgatggattttcctctatctggcccttggccatacttttcttcctatatcaatttggccaaggcaaggttagaacactctcacacagtcctctgattgcctctcaggcaaacaaacccattttgtgttgggaatttcacacacaaatggtaacagaagtcattgctcttaagtcgtacaaggctggacggcttaacatgacattaaaagcagatgaaacatctactaccaggaatgtgccatgactattgcggtggtcagagactttcccattatgagtggtacgcgacacgttcctagcggtgctatgctccggtcggagagcccataaaccagctgtgggcacagaactaagtccttgagattaagatccatcttctcataggtgggtttgaacaagatattggatgaggctccattgtcgatcattgtacgggccaatattttgttcgcaatttccacctccactaccaagggatcattgtgcagataatttacaattttagagtcttcatcacttaaagttataattgggtcttctatttgtgcctgcttaggtttcctttcctcaacgaccaagacttattctcctgctcgtactgaagagtttaagcatatttttcacttgtattcttagaatctcttgcaatgtttgagcctcctatgatgacgtatagatgcccatcaataggtggtggcataagtgggtgcttgttatcatcctgtggggcagccctttgctcttgattgacctttgcatacctccttatgtgcatattgtttttttggatcaaaaatttaatctcttctttcaaatttttgcattcattggtatcatggccaaaattcttatgaaagcaacagtatctggaatgattcctcttgctcatgtcctttttcatgggtagagatttttttttatgactactgactccatggttgttaggatggtttctatgtcttctgtgagaatagtgaaggatgttaactttggatctttctcccatgggtgttagttttttagattattaaattttcccttctttccatttccctaattattctcaccatttgatctttttctactgtggctgcccccaacctgatttaggaccagagcactcaaagatgtgtggtattttgcttctagctggtggaaatttccctaggggaaacatttcgcactacatcttccaacttaatgaatccatctgccctgtccaagaatcctaccatggagtttaccgttagcctcttgatgtctttctacaaatctcccaatggtataattcccccaagcatgacagcaagtcttccttcttcagtcaatccttttaatcttgtggcttcagccacgaaccaacttatgtaatctttgagcgactcgtttgggagctatttaactccgaccaagtcctccaagtgttagggagttgcctagaaggcgagaattgtgcatggaactctgatatgaaagcatcccaagaatcaaactttctcagtgtcaatttgaaataccattgttgagctgcctccgccaatgttgctggaaagactttgcaacgtacatcgccatatgtgaactacaaatccatttacagctcaaaattctttatatgggacaaggtgtcctcttttccagtgtatgccttccatgtaggcattttaaatttgggcagaagagggagagcgtttatccgagtagtgaagggtgaacctctttcttgttcaagttcaaggtcggtgagtttgggaccagtcaaactttcaactaagcttttaagatgatctagttgggcttgcacccctggatcaacttgttttgcatgttgcctaacctgagtcatttgttgtcctccttgagtcctgaccaatgcgtagttttccacattagcaggttgtacatttgggggaactaccccagtcctctgctctctccactgattcaatgtgtgtctgagattgacaggttgggttcctatcctcttaaagactgattgtcttggaggccttcctacatctttggtgttggccggtgaaatttctctctaggcaccccgatctcttcgcctttgagcgcgggttgcattgtttgctccatcatcattgttacttgaatatgactgactacgagcagttgtagtttgaccctattgtgtagccgtgtacgtgacatattgaagatactaaacctacccatttcgatcataaatggctatagggtcctgaaattctacatttgactgctcaagtgttcccacttagggtcgagagttctgactgttttgcccattgttttgacctggcagcgcctgaccgtttactgcttggcccacatttacatgtggcctacgattggatggtccggggcgtaaagaattctaggtgtgagtcattggaacttctgacacgtggttattcccaggcaggacatacggctcctttcatagaggggatctcgaacaacagggatgtcttcctgcaatgtctgtccgacccgttgattaaactaccttatcaactttgtggtttcgcatgaccagtgattgatcgcctcttttgggctcttaaattctttgcctatttatccatctattcttggaagagccttttctgttgcacaaaggcctcgttcatatctgcccgggtattagcttggtcgtgatgaagtgtgttagtgtggctttgaatatgagccactacttccctcaaattttgcagctcggtgtcatcatcgatcgtcacttaagttctatttgttggtggtactctggaacccagactactctccccaacaccattgatactagtgttttgggtgctctgatcaaccataggagggcttcttcaattagcaagaatttgggaatttgggttagttgccattaggtctacaagatcaatagcttgagctcttcaagtttgtacaaccatttgcactttactgaatagacttaatcatattgtgttcttgagtcctcagctcttaatgaaagcaccaaaatattgacctcgcttttggtcaatgacgctgagtccttaaagcgacaagaagtttataagattaaaaaatatataaatgacatgcagtctaatcaagaacacgatgtgttatagaggttcagcccattattctggtaatggcctactcccatattattgtatttaacttgtgagtagagaagcaaaaatgtctcttttctctcgaaagctttataagaaaatgagcagcatataggctcactcgaatgaatgattttaaatccatcttcattagaactgactcattatttatagaggatattcaaaataggattctatctcctcaagctgtcatcctaccaatttagagaactaactcatcctcctaaaataaagaaaatataattgtgattcccttttgactgtgtattaatgacatatttaaataaggacaattattaattgtatttttgtcacacgggttttcctcggccggtctgtacccggttcgtactagttccttctgaccaggtctactcgtgttaatgttgtgcggctagttgcttttagtctgtctgttacttttgccaactttgaatacatcttgggcggttgactcgtgagggtcttttatccgcctaggtctcagagtgaagatacgtgttagccaaaagaacttgccacgtcacctgaccaatatttggataacaacttcttatttgatttgggaaacaaaccgaatgtaattcttctttataaatagtggagtcatttcatcgtaatacttttaattattttagaaatatcatacattttttctattttttttaaaataataataaaaatatatttttttggtaactacaaaaggtaatattggttctttaaaaaatataaatatattttctatttcattgtttaaaaaaaacaataatagaaatatatttttctagacatgttaattgggttaaaaatgggtaataaaaggatttttttttttagatatgcgcaatgaatttaaatttgaattgtaatattttaaaaaataatactttatgttatatagatacatttaacataagataaaaaaaataagaaaaatatgtgtaatgagtttaaatttgaattgtaatattttaaaaaaaatattttctactatataaccttattaaatataacatagaaatagatatataatcacatttaatataacatagatatatatagattagagaaaatttatatttatttattatatatatgtattgttttttaaggcactatatttttgtaaaagaattataattttacatttaaagaattgttttacacttttacaattatttatagaaacaacatgaaaataataagaaaattacataaaactaacaagaaaataacatctaaataacatcaaacaagaacaaaagataacatacaaataacaaaaaatcaataacaaattagtgagagtataacataaaaaaaccgtattttttgtaaataaaattatgaaaattgtaaaaatatttaaaattctatacaaccgggtttttgtattttttgtcatttttaagtatttgtgaaataatcccaaaaaaaaaaaaaaaaaaactcccaggtgaatcaagggccgagcccaataagactagataacaatccagtccaacacgtctatttctttgcatttaataaacttcactctgagcctcaacctccgatgatggaagtgtcgtgtcgtctgcattctcttagctccggaatcgtcgtctttacaaaaggcggtaggtagaaagggatatttctcgacaacactagaggaaacttattcttgatgacatttaattataagggtcagcagattctacctttctctacctctctctgtaattattgtttaattttggtttaccaaaaagttttcatagtataagataatctttagggccatacctaatttcagttttgaaaggaagatgcgaataagttgttggtttcagtttcaataatttcatatgcgaataagttttttaactgaccaaataataaatttgactgctttttatatttatttcagaaatggagatgagcttcttctgccatttaccaaaagaggttgcggaggaaattatgttgtgggtgcctgccgattctctggtacggctcaagctcctcaacaagtcttggcactctttcatctctggcctcatcaacgaccttgaatttgttgacagacacctctacataaccaagaacatgccaacttccacttctttagttttcaataacccttgttcacatgttgaccacgacggaagagactgctatgcaaagatgttctcacttctcaccatatccagtggcgatggctatggtagtaacaacaaagatcatattgtctctgtctctgaagatctcaatgttccctgtcttcggaatgaaagctgtaggtgggatcagtgggcttgggcatatcactgtgatgggatcatttgcttagtcaaactttatgggaccataatgttgtgcaaccctgcgttgcaagaatccaggattctccctcaatcaaataaggctatagttggtgttgctccttttggaatgggatttgggtatgatgctatagctgatgattataaatttgtagccatttggtcttttcctagtcgcactgctaaagctgaggtatacactctgagaaccgattgttggagagaaatcaacatgcctcaagagttatgtaaatactatacacaagggtatccgtatctagatggattatcttggcgtggaaattgttattggttgctgaggaatttagtgaatggggatgcaatcctttgttttaatatgtgtgatgaagagtttcatatcacaccgttgccaaatcttgaaaatagtgctgctgcagcttcttcatattggttggagctttttgtgtggaatgactcagttgctttattagtatcctctgaaggaaatgtgtcgtttgagtatcaattctttgtgatgaataatggtgtaaaaggtgcttgttcttggaccaaacaattggttattggaccagtaatacctggcgttatagtgaagttatcttcatggaaaaaggatgagtttttcatacaccttgtggaagatatagatgaatcaaaagatgggcagttgatctcttacaactttcatactaaaaagatcagagatattgctgttcgtgatgtagatcgattatggcattgggcttgtttctatgtaaagagtcttatttctgtcaaaaggaggtaaaaaggttgatcaacttggagatttcaagcataagcttagaaactccaaagcttgg

SEQ ID NO: 18554 - DNA, 6407 bp, Cannabis sativa
ttgtttttttattgttttttttaaatttacggtttaggtttctaaagtgggtgcagcgctagttgcaataggagatctactgctccaatatatatttttatatatataatttctattggggtttagactcggaagctacttgttctcttttttttttaatgagctaaaaatatcttatttttatgagcgaaagatcttctttcttcacaataatttattttttttcttttttttttttttaaaaaaatgatttagtttcatagcctttatcccctaaattgaaggtttgatctccattcttagctcacgaagaatcaaattgtatataaccttttctggagaaaaaaagtgtataacttcaaaataaaattcacactactccatgacgaggtagggctgtcaatttagtcacagcatattttaacccctaatgtagacaaaaactcaatttatgctacaacacaaaatttataaaaatatttggattagaatttttattcaatcatttttgtcacaattaaattagatagtgtttgtcttaaattattagaagaatagaaaaggatattctttcatgtttgttaattgccacatcttgcctgcgagaaccagaattttcaacttaaaataatagccacaatttcattgaatacgattactagatgaaagatcggtaataaataaaacaaatcacaataagagattcgattaagattttgctcttcccaccaaagtttttgtcaaatacaatcccatatcctaaaaaatctttgtactacaattgtacagacatttatgtccttgtaaaatgtatgtagttgtaagctagtggcaaatagaattacaaaagaagaaaacaaattgtgtttacaaatacaaagtactgttaaactattgaaatatgtcttccactccataagtcctccccacaaaccacaagaatttcattgcttcaatgtttggaatcgatgaaaaatctttgaagatggatattgatcaattaggtacagaaggagtggtccaattatgcattatgcttaagaaaactatccttatcaacaccacaggtatcctcattataaggacaaatgtacctgaggtggtggatgaagggtttttcttgattgtgggcctaggctggcccacaaagcaaaagtgataagagtaagaagaaaattgtgggcgaaaagagtaatgagattccattctgtgtgcaacaagatgattccttgtgctccatatgctttctttcttcttctcctaataatgtctatcaattcattaaacagtgaaaagaatttgcaaagacttgtacaactaattaagcctcctccatccactaatcattctacaagcacaaactggatttgtataagcttttctatttttatttttttaataactcctaaaccatgattttttttttttttgtttatagacaaaagtagagtctttatgagtggaagatagaataacttcttgtcaagactgactttaactttcccttttatgacttggcaaatagaaaatttaatctaatctccattgttctaacactcaaccattttatatatattttttttcatttaccaaattggtacacagatgaagtcagtttgcaaagttgctgaaacacacaataatcatatttttgtaaggaacataaaatgagcaagataataaaaaagaacatactactttagtaggtgggctcttcttattcttcattctaatgagtctatcaacagacgaaccctatgattttactcaaaactacatttacactactcactccagcaaatattattgaactcaacgctcttctatttccttttcttcttctccgtgagtgtgttaaatgtacatcgtattacttcagaagttctcaaacagaactacaacaaccaccaatcaagacaagacattaaatctctataaacaaataaactaactaaggccaattacaaatgaagaaaacacaagaggaagaaactagcactgcttttgtgttccatttctttaattaacccattagctaaccacattaatattatcacctcacctcaacttgtcctcctctctggaccctgttgcagcattccgatcaatgatgccgaatcccttcgctcaagagcatggcccgcttgtaagattagccttgtttcattgactgcagcctaggccaataacaaagaaaaaagaacacagcaataaactagttctgcctttgtgtccccattttacttatcatccatcattagctaacctcatcaacattaattgtcacctcaccgtgtccaactccgggccctgctccattcccattatgtcgaattcccacatctgcttcggtggcaggggcggcgtccgaactagctggctgttcgagcaaggaccgcctgcaagtcgggcatgaagagtgggaaaccaaccatggatctatgcaccggacatgaaaaccatgacaacatttaggcaacactctaactttgtcacccgtctcaaactccccgaggcaaatagtacaatccgtatcaatgattttgatcccggaagaaatgccatatgcagccacggggatcttacgcaatgcgctctttttcagccccgtggcagccaggcgtgccgcggcttcgtccgccgtctcgaaagcgaaccttcggctgcaccgcatagcgcaacgtacgatggagtttagtcccaaagcgcatatcagagcgcagagcaacgccgctagtatgatcaccatgttagtgtcgaagttggcttcactcacgtatgatgacccgcgtgtgagatttcctctgttttcattggctgctgctgccgccggtggaggtgagtttgactctgtactgtcaagaagcactaggcggtacggacggtgatgattgtagtgatgatgaagagacaccattggtaagaagtagtagtagtagcagtagtatattggagttttactactttctcacaagcaccaaacaaacactttttggagggaaattttccgactaccctttatggatttgactgtttggagttaggaaaaatggcttgagaattgattattccatagattttcagcgccaaatcgaacaacgaatgagatagagaggagggggttcattctcaatcgtgtgaagctgaaaggattcaatattgtaacctgatccactctttccgatgtgggatttttcttgcttatgtgaaagctggtgataatagagatatgaagtcttccttttcttttcctttcttttttccttcttttaaaggcttaataatggtagtggtactagctagaagggagaaaagtcaagggaaaaaaaccattgaaaaaacaaaataaaaaagttactagagggaaattggaagaggcgattgtgggttactctatttttctttttctttttcacctttcttttattttgggtgttgttaatcaaatgaggagtaaagagtaaagaaagggatatggtcttttgagctgttaggttatgtccgtagggattctaactagataaagactttgaaataaaagcatcttgatggtcgcttcggatatgggaaagggtgatgaatagtatataataatatgtttcagctctccaaagtagctgatgattatctactattctcttctcactagtttcacccacatcaatacctcgcaattctcttctggtccactttatctatacaaaccaatattttctttcaaaataaataataataaatgaactcctgaaaaagataaaagactagaaaggcttaccatacatttaaaggagtagctgcaacgttttcttctttattttcaggtaatgagagagagagagagagagagagagagggcataggtttgtaattgtatcctttgagaagtgttgtaaataattagaggcaatggcacagggaggatataaatggtagaatgattaaacaaacggacagtttattagttggggacttagaggtcttttcccttcgtaatatatattttggtataaatgaaatgaatggcaactaaataggttaagactaactagacttaagaatcaactcaagtcaagagatagaaaaaagaaagaagaaaaaagaaaaaagaaaaaaagaaagatttccccatatgatatttgattaaggtacctgatcccacctaatcgtaattaagctattttcttttataaaaaacaaaatgcttattctcagcacagaatccatccttttcttcccactaactcgactcgtgactctttcttgtaacaaaaggtgaagtaaacaagtcctcaaagttcaaccatttgcccatcattagatccttccccaatacataacataacataactatgtagatatttctttcaaaaaaaaaaaaaagagagagaaaaatatattaagaaaaagtaaagacgctggtactttttagcaaagttacaatatgacaccctcaataccaaccgtacctaaaccagtatactccataaggaaaaatcttatctgagatttcctatacaagattataaaaagaaaatataatctaatacctgtggattaattaattaattaattaatctttctttcttttttggctttttctgaaacatgtatatcttgttaagaaaaaatctgagctgacccacggttatcccgggcctactactacacacactgttactatggtctattcgagtagtttcacgtacttaccgaaccctcagaaactgactgcagagctaaacacttgtctagtttctatctgagctaataagtccatccacacacatgttaatgttctcacctacttaaactttccaaaccataatattaattatcaaatgccttagatgattaaaaaaaatatcaaagaattgtggccaagagtttgtattgtaacatcaacatcccaaaaatttaattccttggcacaatggaaacagtggtcggtgaagaaaaataataataaaccaggttccctaaacaattgggcaagttaaaccgagaagcaaagttcatgatgaggaaaaggagtgtttccaacactcttttatcttacctacacttctcttgtctttgtcttgttaaaattgaaaaagttttgagcctctataggaagcttaattctcacttaaaagcttataaatgaccttcataaaagaacaaagcctctaaactacaatatttacaatatgtatataaaaaaaatcatgaattatattacaacataactaatccattttgaattctacctttgaaactagttgtacaagtcaaaatatatataattacaatggagtgccgtgtggcgtttgattagctgtctcatgtcacaatgtcacagagaaatgagttaataatagaaagactataatgtataacatctttttaaaatgctataattaatctaaatattattatttaatataaattttcgctataataactttttaattttaattttttattaaaaaataataaatagcactaatgttacaacatagcattcatacaaatatttagaataacattctcttctctacgtataatctcattttgccacataatatgtccactttaccaagcatcctctaaaattttactattagagatgcttttaggcatgtatctaacattatactgactaccgatgtgacgtattaagacttattaacagtttttatattttttattaaagtaaaatgtgtggaattttatattaatttgtaccaataataatatgtcacattttctggtatttggcaccatcagataccgcttagcatttttcaacaatttatcgtcttttcattataaattttttagagcatcttcaatcatgttctatataattaaacataatatttagtttaaatagggagtgagacttaaaaaaataaacttcaatcatataagaaatagctattttataatagagaatgaatatgagctctctatatattgggagctacaagatttttgttatcttgtcttgaacagtttattgtatactctatctattccgagatggacaaattatcttgtcagttgtccatgttaatagttattgttcttctcgcatatgcttatatagcagcaagtttgaatatttctatcaactgtaacttattgaaacgagttatttaagtcgcatttaatgatgcaatctattattataatcgttgagcttattcatattccttttgaaatacacgtgtcagcttctggttgatagctgaatttcggttataacaattgccccctaaaagtgctttttaattaaaaatgactttttaaatattttcaagggtataattgtatttttctcgtttaaaacttgcatgcttataatttggcagtttaaaaccttgaagcacattgttgacttcgcttttagccaacgacaatga

SEQ ID NO: 18555 - DNA, 5876 bp, Cannabis sativa
ccaccatgattactaaccaccacacaccactgccccagcctcctcgacttcggcaccaccacacgcctccctccctcatcaacttctccgtccctcatagtcacgacaacacactcaatttttttttgaggctggaagatggatagaagaataggagaggatagatagaagaggagatagggaaagagttggggttaggattgtaaatgccaatggtaaagtgctctatttacttaacaataaataaataaacccgatcatcacacgagcagatttcaagtgtaattttttttccctgaactcaaaacccaatgtccaatgttcagccctaacaaactccataattagggtagcatcaaactcagattaatttaaatattaatctactttgaaagcttccaaatgctagctgaataatccattcccccttgtctttcgacacaataaagatgtttgctcttctcattgaacaattaaatattttacttgcaccaccaaaactataaaacaaaagtataaatttgccttgttgtattggtcagactaacattgaggattccttttattaattatttttcaaatctctactttgttgagaaaaaatgcagtcctctggaagaaaaccattcaggcatgtctctaagccagggaacaaaatcaactgctcaagaaaacagtttcttgaaattgaaaagagaaagaaaaatggcaaatgttcatcacagaatataaactcccccattacttcagtttcggaaatagtttcagtgccacctgcatagtcacacacaatctcagaaaaacaccataagcataaccagaaaataaagcctgttggtggaagaatcactgatacttacacatttgtcaacacaagaccagtaatcaaaatattgcccggtacagtgcttgtggccagaatcatcgccttggatccttttaacacatgcctgttgaatgagtaaatttaaagtatttttagtcatcgcttcatacaccaaaaaaaaaagcatttaatcaggccaacaatgtaggcggaaccagttcaaaccaaacatataacagccactttccagtgaactcttggactggctcataaagatggcagatagaatggagtgacattttacaaaacttttcttgacaaaccatcacattcatcgaaaagtataattcttaactagttggcctttcaatagttttagaggtaagaaatgaaaaggacatcaattatgtaaacagaaattatattataaatcagtccttgtttgaaatcattttgtttaaaaagatacacagaattgttaaatccagaatcacttaaacatgcaagccataactatagtgcctgggaaatgatcggtttctccctctcctctcaattgtatatatgccacagatttaagtaggcttccaaagcttgtttgttatcttatataaaaatgaagatggaatttaaagggaaaattattactaattgacttcaaatcagggagataaattaaaagtggtatcggtgcatgtagagattgtttaattttgcacaagaatggtgttgaaagacacaaggtgaaaacatgaaagtattgaacagtataagattgattcaaaatttaattgaaattatgattttaggcagttccatttggaaagagtaaaaaaattcaaggtattctggacaaaacaaagtatttggtaaatggagagtctgaatattctctaatttttcatcaacaatacatttaccatacacagaaagcagcaactgagtactgaacaattattaaagtgttcacccctatatcaggacgcagcatatcaatcaaagaaaaggtctacttctacctacttacaaaattaaattcagatccccagaattttgcaacatacctggtattcaagtaatggcttcacacactttggcttgcatgactcctcaagatacttctttggatcaacaggttcatcatccgccctacaagcaagaaggagaatgtaagaaataaataactgaagaaaataatcagaacatccgcacagttggaaagcaaggaattataccaattagtaattactagttaaataaacatcaaatagaatgaatattcacaattgcatttgttatgaaccaaaatgaaaattccttaacgtctgagaaatatgattaaagattctctatggcccccagtggcaaagaaattcaaggatttctgtttatctttgatcaatgttgaattaaaacattacttgtatcacctatgaggatatgcttattttgtgaagaaataagttgattgtagttagttatgacctatgaatatagaccaaagcacacatgatggtctatttattgcttaaaaatagagtggctacacagacattcttatctttgcatatagttcactaatctagttgacatacaaacttgagaaatttctattagctttttgatttatttataggaatcctacattatgtctttcagattgataagcaggtcgactagtatttaattaaacatcaaaatgaagcttgcatttttgtacataatattatttgatattctagatttagttattcagaatttcatatagcgcccattgtttcaaggtagtcaagtacaaaagcggtgtcacctcatgaaaagaataaaaacataaagcctgtataaatttgaaaccaagttccttgagtataccgattgatgcgaaaaaaattcacagctgaccaggcctatttgttaaacatcctaatagattctcacatcagtcattgatacaacaataacaagtcctaaaatataacaaagaacaagaaaaacaaaaaatataataataataaaaaaaatatgtagatagtttaatattggttatatattcaatgactacatagttcgaataatataaaaaatcagtagtttatatattcaacatattataaagagtaaactttgttgtgttacaaaaatcccccagaactatcgtaatgcccactcgtttgcatattgtacattttttaagcagagtactgaattaaccctgatgtggtgctaatatcacccgctttgagagtccagacagatatacatagatagggatatattaacatatttacagccagttaacttgatttcggctagattcaattagttaaataaaccctcgtactgcaactatgcctatggtctgactacatgaggaaacagttcaaacatgaacacaaaaggggaaagttttcaaaactccacaagggcaatagttgagggaaaaaaaattatttgacctattataaatgtagaaggggggagactgagaaaggtactactgaagcaacagagaatcaaagaaattatagctaagagtaaggcactgcaaaacataacaatgtaagtaaagccacagagaagcaaacaacaaaactaaaactaaagcaaagacgtgagagccttacattgtggatagataagacgaggaacacaacacagcacggatgaggctgccgagttacctggctgcaccacaaacagcattaaacacaaggaaaattagcagcaggatcacttcaaaaaggaaaagaaaaaaaaagccaattatgcacatttgtgtaaacaaaaaagaaaatattgtcacccaccagccaagaatgggcttcttttttattagagacaatcaacctttttatttcgtaagcttggacaatagaaagattttatatattttagtgtgaagttttttgtagataagaactaagaatagtatatcaagcatcaactttcaagtacaactacataattctcactacatggagtaccgagatacataggaatgaaaacttttgatactctaactacacaacacaaatgggacaccaaaattacaggcacacccatactatcttaaaactaccaacaattgcatactgctatatttagttcaaataacaactataagattctcaccactgctaatgggacaccaaagtcacaacccatataatgtgattgtaatctacaataaatgtcatgtcaaaacatccaattcagagcattaaatgcttgacagaactaaatgaaattgtttacatgcaacaagcattatatccaaataaacagtgtaacgacatagtgctggaaagaaacaccacctgaccatatcataaacattataaaaattttagggcacaatacaataagattatcgatttcaataattttattataaaattttttttaaaaaaaaataatgaaaaaaaggagctttaaaggatgtaatctttaaggaaaaaaaatcatattctacttcccttctcgacgaaactaactacagtgcctagaaccctaatttgtttcccaccattttctcggctaagaaacacaaccctaaactcccctatttgcaaaaacttcgcttcaaaattaagatacaatggtccaggatcagatcacagggaactcaaaccagattcggtttgagatcaatcgaactaaaactggatgattaaacagatctaataaaggagatattaaataaagatatgaaagtaaaaatcaagggaaaaaaaataaggagggaaatggcgtcgtgaatcttcttacctcggaaaaagtccacaacgaatctcaaccagttgaagatggagagcgaaggaaggagagagaagacagaagaataggtttttctttcggctgagtttagaagagaggtcttgtctcccatcaatcattcctcccctcaacactgtaattgggcctcgccttcatgggctgggcctattctattagaccatcttatgtgcttcgatattaatctttacttttggggaaattataccgtggactcttttttaacaaatatgacttttcgctttaagaatttgatttgctgtgttacataagtaaaaacataatgattgtggtacaagaaattagtggtatttcccatatttatatgagaaatttttacaaatgcacacaaaagtaggaaaaatttaacaaaaataggtggacatggaaaaggaacataaatacggtaaatatatattaatttacataaaatagggtgtcaccttcttcacaccttcaacactctcatcaaggaaaaaaaaaaaaaaaggaaatcactccaggagtatggagttttatacttttttattcatttttacgttttttttattttattttcacttatgtgttctcatttttttatttctacatttaacataattttttttattttatttttttacattatctcactgctttccttttctcttattttattttactttcttcttccaaactatttcagtttttggtcttcctcgtatttccctcaacattaaggtgagactatcatcatgcttctcgcatttgttctgattctaggctcctatcatcctttcctcttgctcttcttttgtagagacttccatctatatttttttaaatttctaatgatgagaaagtatagttgaagactatttgaagtcactcccatttgtcaattacgagcttcaatcatggctttcaactcactcttcgaattagcatttacgtttaagtagttcaaatgctagtttgagtaggtatgcataacaatgttggcttgcatgtctctggaaaataaatttgtgtttatgcaatttcatttcatattttaattgaataatggatgaatttctccgtatctatatataatgttgaaaatatgaattaagttcattcatttgtatctttctccttataggtctaacttttagattagatagatattattaaaattgtaataatgaatgtatttgatattatgaatcattatatgttgaattacctcagtgaaccttaatgttatgtattcaataatattcatttagaattg

SEQ ID NO: 18556 - DNA, 3926 bp, Cannabis sativa
  modified_base (2105)..(2109): a, c, t, g, unknown or other
aaaaacacagtatttttgaaaagatttccgtgtgacagtatttttgtaaaagttaacataaattccagtatttttgtaaatttctctttcttttattcatgttgaatacaattggattgtcattatccaatttttattaatgggaaattctttggctaataattatagatgtgatttgtcacatgtatgctcattcagattgacagtctagcattcttcgtactttgttgatgcattatcattatcggcttattggttttttagttgaatgtattattaggattttctgtaagggacatttagtatgaggcgttcaaaataatttaattaacttgaaaataaaacagagaatatgattgtctgaaaacttatatttgtgtttggttatacaaaagatacctaattagattagtgttaattgaattacattatttgattgaacacaatattaatttgataaattgttgtaaaaagttatataaaaatattaacatactaaatccatggtaaccatggtattaagattaaatgtaatgtttagagccctgcacatttttgaaaggatttaagattaccccataaaaggttaatcttatttccataataataatattcttatctttaaaatagaaaactctcataccaagcatgagaatgtaaaagattaccattcttattaaaacattaatttataagaatcttttaaaatgaagtaattaaaccttgtaacttttctctcgatttactagagttttcttaaaaaacttagtcgctgccagtcctatttcttcctttggccaggcctgtcaatctctccaagcttgggtgtggctctggtcaagatccttatttggcatgtcagggtaagtggatggttcaccttaatctcatctttcctttgtttcctagtttcaattccgtttatccagtggttgttgtgcgttttttgacctcgtgtgctatggggcaatggtgattaacccagatctggcaaagcatggcgggacaatttggtggttctaggttgggtcaattctcaattctagcacggaaggagattgtgtaatttggcttgtggggtgtgggagaagggagccactggcggagggaatggggggcatgtgaggtcatttacccccctcaactttttgcatataaattttttgtataaaattttaagtatttatattttgaccccataaaaataatttttttatttatgtccttatatatttttatatttgttcccataaaatttatattttttatttttatccaacatatttttatttgtatccttataaaatttatattttttatttttatcctcatttatattttttttattctcgcaaaattcgtatttttctcaataaaattatatttttcattaatgctttaaattttttttttgccccacctaaattattgggctggctccgccactgaagagagcgaccgggattgggcttaggttcagaccatgggtctctttgtggcttgttcggatttggtgtgtgggggctttggggtgtggagggatccttaggagatttaagatgattggcaaattggtgtcttttttttagttttttaattattaattcttgtttgttttaattttttaataatggtattttttttactgtcctactagattagtaggaattgttattggcctggtgcaagatgtaaatattgtctcctattggtttatgagtgtctcatcgataattccaagtcgttttggcgatgatatcttggtctccctccttggtcgttagatttgggggatcttcagatttttattaaccctttatcatgtgctctaatcttttatgattaagcattacgacatggttggtcgtgttatttctcttatttatgacttaaataatggaatcgttatgtttcagtttttattgaaagatcattgactgatagtctttgataggtggatatgttcatttggtttggaagcctagcatatttcatatttctttgatgcttagctgactcaagcccgtccttgagttgaaatgggctataggcaaaaaaaaaaaaaatagttcttactattaagataaatggtatttttaaaaatnnnnnaaaaaatatgtatattttttaaagggtatttttttatttgggctcctaaaataagtgggccctaggcacagcctagcctgcctatgcccagggccggcactaggctgacttattgattccttagttgaggttgttgttagaatttgttattgtaaatggtttggtatgtctaattttcataattttactctttgagttatattttcatgtaatggactttgtcagatttaccaattagtgaatatttctgttttctctaaaaaaaaatattaatttaaaccaaacaactacttattgtaatttataaatggtatgatttgcctattattattattgattatgctctttataagatttcgtaataaactttgtttgatttatatattaaaattttttatttttctaaaaaaaaaaaacattcaaacaaccacctttatatttttttttttcaaaaaagccaccttgatagctgttttttacctcacaaaagaaggctatatataccaagtagctaaaatatacgagtcaacagcggtcaaacaaaacatgatttttctttaaaacaaataacaataataaatcatttatatatatattattattatgcaattaatgatgtcatcgctgacgtaaaggtgatgtaggaagatgaaagttcaaattaataagaatagaaaatatggtcagcacaagaattcattaaaaaaaataaaaagggagaaaaaagagagtgaaataattagagtgtaggtccagggttgattatatttgcataaatatttaatatttattgaagaaaacaagcagtagaagttgttaaaggtcggtatctatgtgcagttttttttttttttttttgctttatgggaaggggagcaaggggctataagtgggccttcaaatgggccccactccactagccggcgaaacagtccaaaaactttaagtccctttcacacagtgaaagcccaaaccaaaggagttttgttcgtataagaactcctacggacgctctgagcagcccgggcccaccaaccgaccctcacccccctgacctttattatccactttttattcccaggtttattttataaatatataaaaataacaaaaaattacaaaaatgcacttgtataaaattttaaatatttttaaaatttttataattttatttacgaaaaatacggttttttttatgttatattcttgttaatttgttattatttgtatgttattttttgttattgttttgatgttattttatcgttactttttatgttgttttcttgttgtttttgtattgtttcaatagaaaaaatgtaaaaatgtaaaaaaaattctttaaatgtaaaatgtaatttttttttttaaagcaaatagtctcttatgtaattatctctttatttaattgttaaggtcaattttaaaacactaatttcctcttttttattttatttatttagttaattacatttctaatttaagaattaattttatttttgggtagactagagagtaggtgagggatgagcctgagaattattttcaaatatctcttataaattgggatttgaaagtaatcctttcttgtgataaatttgcatcattgtccttctcatttttatcactacaaaacaagataaaatggtaaacaagaaaggaaaatatatttatatatatatttatatatatattccccaaattagtaaagaattatagggttattgtggaaattgatcctctaaaccaacttattatccaactccttaaaccaactaacttaactaactttcggttatgttagttagttagttggt

SEQ ID NO: 18557 - DNA, 4563 bp, Cannabis sativa
aaataatttccaacagttttctcgttcaataaagatcactgggggtacgagatgtcttcaacccttcttccttaaatggaaggactgcttaaagtctatcctacccctcgtgatactttcccattgatcctttcaagcaaagtctaagcttgaatttttatacaacatcagccttccctctcagaagtcgaagcttgttacataaaaaattcaacatgactctcgccgcccccacagtacattaccctttggtgtttacaagctaagttaatgtctaaatcccttgcaaaattttagcctttctcagtgaaagccgaaagtttgctgcaccgggatctgacatgacccttgcttagtcaaacccctacaatagaaagattatttacacgagggcgcatgcttagctttccttccaggaaaccaacagcttatcgcgccgttagaggtctaggatcccccttacggggtttataccacgatgggattgtgggggactgataatatatgactaggctttcacatttttctgcatagaagctcacaaggtggatgtgcttttctaaaagattcccccagaaaggtgacacatttcttagaacaaggcgaagctacacccgacactcgtcttcaaaaaaaaaggacacaagccagactctaaacaaatgaccgagaatttgagtcccaaaattcctagctcatttagggggtatgatatatccgattgctgacagctacaacatcttatgtccatttgccaaagtcattcagccaaagagtacacatgcaacaaacatggggaacgtcctcaaccaaagtgtccctaggagaaatacacttaagtccttccctcaaaagctaaaatcaagagtgaactcggagaaaggaaacacatttggccaacactttttgaaaaaaaaatgacacgcccaaatcccttgtgacacatctccatgggcttcgcataagtttagcccattaattttcaccacaagctagaatgataggctgacaaggaccaaagtgaggagaatgtttaaatctaaggcaggggcagatatcgctcccgaaactcaactttgtggaagagataaaccctagagaggatacgaaaaatggcaaaggatcttgctttgcagaaaagggccatctcctgcccaaccctgaataaacaacctttcagatggcaggccgagaaaagctacagccccaggaaagaaaggatcacaccaaggatcagtttctaaattaactggaagataattaaggctaaagggaaaaggttgaaacactggctgttggaaacatgtgcttagtaacacaaccagcccatagacagtctatcacaacaagtctccaggaaaggaacagcaaaaaataaaagttcatattcaactactaaaagccccccacggcaagagcaaaatttaaactgtccccgcgcctaaaaaagtatagcgaaaaggggaatatacaaaaaaaaacaacaaaacaaacagatttttaaatgggtcggctggaggttcatggttggacgccgcatgatggagaggatgggcctggatcaaacatccgctccatagtctccatataaaggtcgtgaatggccttcatattctggatgaagcgagattggcgggcactttcctcctccagttgttggttggcttgcagcatgccctcaatttgaaacttggcatcaataagctcagtccagagggtatcgttagcaacgcccatgcctcagtttgttgcccaaacctgcttttgctccgtcaccagtgcgcccacttccacggtagccctttttgccagcaaggtcaatgtcagaaaaaataaggccatgttagaaggctaaagtgacaacacatggtacagggcaaatagacacaagtagaataaaaagtaagacatctcgaagtcttaccccgatggcctaccgctttgcaaaatgggccagcgcgaaagcattcgcgctgctgcaagatgcctaatttttcatgggaaattttgatgcgctcctagctacttggtccaagagctctacaacgaaaggagtagcctttcgccccaacctataggccaaccgattctccaaggcttcgacctccacgatctgccccatcgggggcaccacatgcaggtcgtctgcaatctctaccttaccaaccactgacatcacagccgccccccagggaacatggagcctctccatctctagacgaatttttagggccctgtttgtttacgtctccctctacatctctagaggatcaaatggaactgccctttttgggaaggtgaaccccaccgaaggtgtcctcgacgaggctgagggaagagaccttggctagtctagccttagttgagaataagggggccagaggtggtcccccattcccctaatttcaagggcagacaccacaagcttttgccttttcattatagaagatttactgcccactgtctcagaaggaccggttctctccggagtagacataatgtacctgtcaaaaatcggcataaaagaaaaaagaagggtcattatttgaccccagaattcccaatggttacactactgaaaccagtatcccagaagcaggagcaccgccgtgatctcatccaaaactcttaataacaaacaaactaagaacttatcgattaaggggaggatgttggaatcgaagattttagtgcaacgctaacatcagtaaaatgcgactatggaagaagggaactcaagggttttgacttgacgggaaacaagggtgaaaaatgaaatgactgctgaagggttgttgtctcggagatgcaggctaccaatcttcataaagactattttgaagatgatgttaaacaagcctttttctcaatttcagatgataaagctctaggtcgtgacagttatagtagtgctctcttcaaagacacttgggtaataactaggaaggatattcaggaagtagttctttcttttttaaagtctaggaagatgttgaaggaaatcaatgctaccgctattacattcattccaaaatctatttgcccaaagtcaattagtgattatagaccaccaattgcttgttgcaatgtggtctataaagtggctactaaaatgatctacaacaggctgagagatgtgcttccagatattattttagaaagccaaagtggctttatcaaaggcaggcaaattattcacagcataatgatttgtcaagatatggttagaggctatgataggaaaacttcaaaatatgcatgtattttcaaaattaatttgtagaaggcgtatgatacagtggactggtagtttctcaaagaaatgcttgaagctcttaacttcccaaagaagtttgtggagcttgttatgatatgtgtctctactcctctcacttcttttatggtgaatggatcgcttcatgtttatcttcactcaaagagaggacttcgttaaggagacccaatgtcacctctcctctttatgatcagaatggagtacttatccaaaattatggctatagtatctaggatctatgactttgccttttcacctgagatgtaagagattgagcctaaaccatcttcactttgcagatgacttgcttcattttttcaagggagattttaaatcttcccatctccctgtcaggggcttttagttgttttcaaactcttctgagcttaaagctaatgttaggaagtctactgtctatggaccaagtatgggtcttctttccttggataggattattgatttgtctagttttaaaaagagcttgtttacttttaagtatcttggcatgacaatctgttctaaaagaatttcgagagctgattgtgaaggtttggtggagaagatgacagctagaatcaaatcttggagttctagatacctttgcaggaagaaaggttcttatcaactctattttgctatcaattaatactttttggtcccaaattgttattttacctaaaactatggttcataagattactctgatttgccgtaacttcctttggaaaggtgcaaacatgaagaatggaatcgggattgtagcctgggatgatctttgcaaacctaagaaaaaagttggcttgggtttcaaagacatagctttataaaacaaatgtgctattggtaaacatgtgtggactatgtcctccaagaaggacaacctttgggtaatatgtgttaatgaggtgtgtctcaaaaataatgattggttggactgccaagtccctttggaggctagttgatgttgtaagagaatagttgaagtaaacactactacaatgtaagcctttagcttcccttttttcaactcaatttataaaaagggaagctaaagggggtgaaaatatctgcattgacatttagagacggttttttggtaaaaaccgtaggtatagaatgtatatatatctatgccgtcggttgggggttgggaaaatcagggttttttatatctatgtcgaataaaggtggcacctatggcgtcagttaatacctaataaccaacgccatagggttatatatcagaccctttctgcttcgtcttcctc

SEQ ID NO: 18558 - DNA, 1354 bp, Cannabis sativa
attactatcatcaaacaccttatatttacaaacaaacatacaaatgtttgtttataatttactaaactaccattctcacatttatcatacttctacttctctttcttcttctaaaattaaaaataataataataataatcaccctattggtgtatgagctcaaaacttaagaggttgagttttaccaccaaaagtgatcaaggcaatcgattcagcttccaaaaaacgaaaataaatttactcatatttaaagttcataaaatgaattaccctatacaatgtacatacagatccacgaatacaagcataaagcaataagttacacaacaattttgagctttacaaaatatcggattaacattctaacaattctacacccttctttctttctttcttctttctttcttttctagaaagataatataagagagtaaacttcattacggcaaaactgaaatccaacctttattaaattaacttgttatacgggtacagcctcaaccagccttgaaaagtagaattgtgtagtgacaatgcctcttttattaattttccacccaacttttcttaaagccctctcaacatctgcctctgcatggagatatgccctcgttgcctttgaaggccctgggaataactctccaaccctcttcaacagatcataatagaatgtctttggtgcaaagctcagaattaaccttttctcagccaaggaagctaaatgaccaatcattccgtctgctttattctgaggataatgaattaaaacatccaaacagaccactgtgttatacttaccatccaagctctctaagtctttcacttcaaattttggcattactgaccctggtagctcttctctcgcctgcaaaatatttcaagtaagtttgaggttcacatgtttttctaagagtttagattgaacaatctaaataggtaaaaacattatagaataataaagacaactgacattgcacaacattgaaagaggaaacaatttcagctgaaacataaacaaataagcaagataaactctttcagcaaattttaagggataaaaatttctgcaatcctattgtccaatgaagcatgaaccaatcaaacattctatacttggcaccaaatagctaatactttttttcccttaaaatatgaaagagaattgctgtaccagtaccaccaacaaggtggcaccaagctaatatttagcaatattttgtaatagttattaaattaaaatatgtgaaattcaatactcatatgatactatgactcgtatagacaccactgaacacctttagcatttctcaatatgaaatccaagtagatctttcatgctataaatgtcttaaat

SEQ ID NO: 18559 - DNA, 5463 bp, Cannabis sativa
aaaagtgtcactaaaagtacgtagcagttttttgtagtgaacacaaaatccctaaattgaattcttgcttcaagatcttcaatagcgactactcgagctacaagtatgaagcctcatgtgaagtttgcaactcctcgcaaaaatgatttgctccataaattagacgctcttgatgtctttgaccaaaaagttgttcactagctcgcagattatttcttctctagtagttccacgaacaacttgattgtactgctactaatagtgactttaattatattgacgactgattgaagagaattgccagaccacctggagtcgatgttgcctcgaatattcttgtttgaagatgagcctccatcgatagggctgataattaatggtgaagctactgtaattcctcttttccaaccgatttttcatgatcaacctccgtaagtcatgataaaggttcgaccataatttattgtgaccgacttgcccaaaaaatttgtaggtactagagatccgtttgatataactggtgatcaattcaatccaactagagatccaataaatgttcatcaagacattttgtgtttcttttagactggagatcctatagatgtaactaaatatcaaacacatgcttctgaagatcaaagatcatcacatctaacgccaacatatattatctctatcgatcaagggtttttcctatatatggaactcattttcttgtattcataacacacaagtatccacttatgatatactattcaataagatccatcttatattttttaatatgatatatattttagtttttttctttttcgtgttattataattattagtattctgaaattttaaataacttatgatgttaaaaaataaaattcaaaataattaattggcgtaaaagataaacaagagacaattgattatttaaactctatttccatgcaaataataataattttttttttaaaaaaaaaaaaattagcatatgtgtgcgaacaacgaactttttgaatttctataattttaataccgtacattatttaaatttttctataaatttgcaatagagatctatgaatacagtatacaccatcaaaatatagggttacatataaataatttacatgaatataatgttatcgaactctcctatatacgacatatatgataatatataatattgggaatattattatattatgccttaatgaaaaagttattactatttatatgtttttttgttgtactttcaaaatttggcatattataaattttgatctttacaaggcacaaaaaaaaattatttttattgataatcttttagtatataataattttttttaacgagttttagttatgataaaaaattataaataactaaaatataatatttaaatacaaattatcactaatttaattctaattacaaaaagtatatgttatctaaaaacacacaacccttttgtcacaatactaaaaaaagttacttttacaatatttttgttagaatataaattttttgccattaaatgtgatttttaattacaacaaaaaattacttgtgactaaaatataatatttaaatacaaattgtcactaaatttaatgttagacgtcacaacgtcaaatagtaatttttataactaatatatgtttactcacaaactttttaatgacaatataagaatgtagtgatgacacatgcaaacatgcccttaaatataacatcatcaccacacacaatagtagtatatatataaatatatatatatatatatataaatactactttcaaacgaccaatcactcataacataacaatggagatccaactaccatattattcctttccaatccttttctctttattcatctttctcttcatgttcataaaaatactcacaaaaaccacttcatcatcaaaactcccaccaggaccatggaaactaccactattaggaaacatacaccaactttttgggtcattaatccaccaaaaactaagacacttagccacccaacatgggccattgatgcacctcaaaataggccaagttccaaccctaatagtctcatcaccagaatatgccaaacaagtgatgagaacccatgacatagtcttctcatcaagaccaatggttctcttctccaaaatcatgttgtatgattgtactgacctagtctttgctccttatggtgagtattggagacaactaagaaaaatcttcatgcaagagcttctaagcacatctagggttcaagctttcaaacccattagagaacaagaggtttcaaacttgattcaatggattggatcaaatgttgggaaagaaatcaatctcactgaaagaatcaatattttgatttatgggattgtttctagggcagcttgtagtaaaacaagtctcaacaatgaagaaattgtttcacttgttgctgaaggtgtggaggtctcattagggtttgagcttgctgatttgtttccttctgttgagtttttctcaagaataagtcaaactaggcataagttattgaagcttcaacaaagatctgctaagatatttgataaaattattaaggaacatcaagagaagaaagctagtggaaatggtgatgatgatgatcaaggagatttgttggatgttcttttgaattttcataataataatggtgatgatcatgaaggattttccttgaccaatgagaatcttaaagctattatttgggtaagattttcttccattcatttcatgccatacttatcttaatttggttttctctgtggtcctattttctattgaggaatgctaaaaagtattatccttctcgttgtcatactgctattagtgtaattaagtatcagatcccatataatttaagaaaataattattagagaatatcattaactaatcgtaacgtgttacttataaaagatgctttgcctaataataattcttttttctacctaagaaataaatttgtagttacctgagaaattaattgtagtagtggatctctctttatcatgaaaataacatttatggatctatctatattatgggtcctagtatgggttgcactgactttttctccattttattatttttttatcacaacaattattattttatatatatatatattaaaatattgtatattatttatattttaataatttatttatgtatttttgcaccgtcctttatatattgttacgtaattaaaatatatttgatatacttgataaagttataaatggtgtttgtctcatcttttaaagtacttgtacatattatatatttttagttgagtaataaaaaagtaaaaagtactgaaagattcttaatatatattttcaccttaagagatatgataaaaaaaattaatagaaattgtgtaattattgttattattagttattaagtttgtattataattaaattactcaataaattagttaataaaatatattttcaaaaattttgtataagttttatattgtatattgtgttaagttttcatggttgtttcactgttgttttaattgttccattttataattttacggttgttttataaaaaaataataattttattaaaaaattccgtctaacagtaaaatttaagtttttgtctaaaattcaatatttttgtaaacactcttatttttttcaggacatatttgctgctggaattgacacatcatcaacagtaatagattgggcaatggcagaaatgatgaaaaatccaaatatattaaaaaaggcacaagaagaggttagagaagtgtttaacaaggctggttcaactgatgaaaaaggtattaatgacatgaaatatctaaaaatagttgtgaaagagaccatgagattacatccacctttacctttgttaattccaagagaaagtcaagaaaaatgcgaaataaatggttatgtgatacctgcgaaaactaggaccttagttaatgtatgggcgattggaagagacccaaattattggagtgaagccgagagttttatacccgaaaggtttgtcgatagctctattgatattatcgattctaattataagggtaatgatttcgagtatattccatttggcgctggaaggagaatgtgtgcaggtatggcgtttggtctcataaatgttgagtatccacttgcattgttgctttactattttgattggaaattgcctaataatggaataaggcatgaagatttagatatgagtgaatcttttggtactacactcaaaagaatgaagcctttaagcttggttcctattgcttatgttccttaatatcatcatctatagatgggaaaatgataataataattgttgcaatgaaatattgtagtatgttaatttatcttttgttgttaattaatttatgttgttgaagatgttgtgttataagaaattataaagaaattttagtgcatgttttgatttcttaataattaatgctctttaagcatttgttaattggctctataatttcagcattattagtatttatattttatatacatatataattcaattatttttagtaggaaggtacaatcaagctaaagatgtgattagtgaatacttttaactatggacgtagtagtaaagatcctattaataaattaaatgttaaatcgtgtagttcatcatatttgacttatttttgtacttacatcctccatgaccatgatataaatatatatatatatatataagtactgttttgcgatctagttacacatgtggtttactggcagactaatctttttcattaaatttacagatcttacagcttattataattaaaaattatatatataatgtagattgaacgtacaaaaagatcataagaaaatttgtacatataatattgaaaagaatcttattggcagaacaagagaatattataataaactaggaatcaaggaaaaagtattataatatgtatgatctttctcgtacctatagagttaattaattaattagtgaaaacgacaataattaattaaatatttgctccaaattatgtcctaagctaactccaaatcaaagcttctgtttgattaattgttcttagagaattgttaaaaggcactatgagtgcttagttagcactcttttcgattttatatttattggtataattaagtatcagatctcatataacttaaaaaaatagtttttaaaaaatattgttaactaatctacacgtctcttacattcaaaattcgtgtaattaatattcttgcctaacatttgagtgacaacaataatatatatttttcgggataagttgagaaatatagtttttttttaatatttataaattaaaaatatgccttcatattatatttaattaaattaatatacctatttttatgagtgaattactcaatatacttttaccctccacttaaatctaatacataatttatatatatata

SEQ ID NO: 18560 - DNA, 3831 bp, Cannabis sativa
aggatgttgtgcctacaactctcttaactggatcaaatatatatgggagtgggagtgggagtgggagtggacttgatttggtgatgaatttttattattagatgaattgaagtgtgtcaacaatgtttttcatgacatctataaagatggttttcgtagattaaagctattgacgggttcccaccaggccagaaatgagagttataattaattaattaattaatctgcaattagaatagtaatagtgtttatttcagcaatctctatctaattatatgctcttatttattacttgtaatgttatatttcagtcattattcttccaaatcaacttcattttaatatttgatcttgtatttagttaagtgaatatatagaagagtcttagaaaagataacaaacaaataatatatgttaaaagcaaaagcaacattattattagtggcagactcactttaattagtcacctactttggtattaatttattcacttattcatcacgcgtattttttatttttataataaagacataagagtcacattaatttgttgacccatcataggtcatttttaactatgtattattatatatcattgtttgtatgtattccaatcttttttttattaaacaaaatctgtatacttgtgtgttccttcctcttcattttcatcaaacattcactctgttctgcccttgaattcagtttcacccattcttctttctttttcaattccattttctttctcttaaaacaaaaaagaaaatctcaaaaaaagtacttactctattttcttccataaaaaaaattctagtctagtctagtctagtctagtctagtttagtgcagtagtagtgtttgtttgagcaatctctaatctctgatctctatctataattaccaaagccaaaggtaccaactttaattatgtcttattcatttatttctactctattgaattaatttgttagtgttatttttactaatcctggattatctcctaaattgtttccctttcaatcatttgcatttcagcttttacttctctctcagtctctgtatcactcacatatatataagacataacttgtttctctttcattatcaggtgagtgcagttgccctgtttttatgatcattttcttaagtatcaatatcataatatatattctttcaataataatacttagttgttgttgttttgtcttgttaagtaataacagaaagaaagaaagaaagatagaaagaagggaattgtgtctctacttaccatggactttattattggaattggagccaaaatagctgagtatacagttgcaccagtgggacggcagttgggttatctgtttcgctacacaaccaacgtaagtgaactccggactcaattggaagatttgaacaatgccacacaaagaatggaacgccgtgtcaatgaagccctgaataactgtcatgaaatcgaggctgatgtccaaacatggcagaagaacgctgaaaaaatctctggagaggccaccacttttcttaacccccaaactcatgcaaaggccttgtgctcttgtggatcccctcatcatttggtgacgcgacaccgactcagtaggaaagcaaacaagatgtcagtcaatgtacgtgcagtggtcttgaagaataaagaatttgattccatgccaatatcctatcctcgtccgccagaaggttcctctgcaacaccagcgaaagggtacgagagttttgattcaaggggagaaattctgaagagcatattggcagctgttggagatggtaataggaagaggatagggttgcatggaatgggtggaattggcaagactatgcttgccaaagaaattactagactagctcaggaagacaagttgtttagtaaggtggtcgtgacaactgtttctcaaacaccaaatataaaagagattcaacaacatattgccgaaaagcttggtttgaagttggaagagaaagacagtacgggcaagagagcagaacttcttcgaatgcgattgaagcaagacgaaagcaagattctattaatccttgacgatatttggaatgaacttgatctagaagctattggaatccacgaagagtgcaggatgctaataacctctagagatcaacaagttttacgcaacttcatgggtgtggcggagagtaatgtgttcttaattggtgctttagagtcgagtgaagccatcaatttgttcataaaaatcattggagacactaaaacagattacattaatgctttggcacttgagattgttaatgaatgtggaggcttgccaattgccattgcaacagtggcgcatgctttgaaatacaaaaaggaggaggccatatggaaggatgcattacgacgactaaagagttcagatgtgaatgataaagtctactccagcattaagttgagttacgattttcttggaagtcatgaggaggaagccaaatcattattattgctatgtgctttacataaggaagatgaagaaatacaagtggaagacctgatgagatacagcatgggttggcgcttgcttcaaggcatctacgcagtgagtgaagcaagaaacagggtgaattcattggttgatacactgaaatctcattgtctgttgttggatggtacaagtacaagtgatgaagtgaagatgcacgatgtcattcgagatgtttgcataaaaattgcaaaggaagatcatgggcatgggcatatgatgatgaataatattactagtgctgctatgtatgaagaatttgtattccatgaaagacataaagcatctaaagcaatttcttttcttgactatggtgattttgataatcttcctcaaaaattggattgtcctatgctagaattacttcttctatctagtgggtcttatttggaatcaattcccaatgacttttttgaacaaacaaggcagcttaaagttttgtgtatgaatcgtacatggataggatcattaccttcgtcttttgcttctcttcaaaatctccaaacattacgtttgcgtgattcttctctggaagatatagcagtgattggtgagttaaagaatttaaaagctcttgatctgtcttactgtcattccattgagcggttgccaaaagaaataggagcattgaagcgtttgcaagtgctagatctacgagaatgttataaattaagagtgatagaggcaaatgtcatttcaaatttgacacagatagaagagctctatcttcctcatgaatttgaaggatgggatgagattattaatgaagaaggtggagtaagaaatggcagtcttattgaaataaagagtttgcaacgactaactgctttacatttatatgtaccaagacaacatgttctgccacagagtttgttttctgaaaaattggagagatacaatatatctattggagttaaaaattccaatatgtatggagttataacttcaagcaagatgttgcgcctacaactctcccaactggatcaaatatatgggagtgggagtggactggatttggtgatgaaaggatccgaatatttatcattagatggattgaattgtgtcaacaatgtttttcatgacctccataaagatggttttcctagattaaaggaattgagttttgggaataatgatgggttccattatatcattaattccactcatcatcaagcctttccatctttggagtcactacgccttagtgggttaagaagcttggaaagcattatatgtcatggtggtaataataaactcccaataggctccttcaatcaattgagagaggtgtatgtgaggtgttgtggtagattaa

SEQ ID NO: 18561 - DNA, 3094 bp, Cannabis sativa
gctttttcttacgtggtggaattaaacctaaagatagaacacccttttctttctgatacaatataagggatatataattcttccataaggcataatgacttaatgagagcataatgatagaaaattagacaaagggtaaggtaaaatgaaagagagctagaattgcttttctttagtcatctaaataaatagtaggattacaaagaacagaacatgccctctagtttcttctttccttttgtatgataatagcatagcactaaaatataatctaaaacgagagcagttagtgaagctaacagaagcccttttctgttctcattcctattttattatcacaaaataaaaagtaaataaggtatgtaaacaaaaccaataaaagaatgacatagaaaaaggacacaaaccaactcaactcaactcctatagtgcctttttctaacttcacatgaaaatataagtttgtcagtctatggttcttgttttttatcaaactgaggagttaaaactgcattaactatttctctacgtagagaattttgatttgttaaggctctctgacttaaccgagatgggttcctaggagatgaggacgaacctttcgatctaggagacaaattcgcttgctccaaaactctgaactgaagctctgaagggtaatccctcatgcaaccaatcctaggcccagctccagttgaccatctagctgataactgctgagccaactgataagacttcatccccttgtgtgaaactatcctcttcatgattttctcttttgggatgattggtttctcatcctcctcttcttcatcatcgtcttcaaacaaattagatttcgggaacatgaaatcttcctctgttaggaatgattcctcggctgtttcatagccagactcttcttcagaagtagaatgtagacggcgatgatcgctgtgacaacttgttgggagtgtttccttcttgaaaatgtcaaaaacaaggttgtttcgggttggtatttcgagcgtggttagctttgagcatagcttgcttggcaatctagacatgagattttgattctctgctgcattagggtcctgacctgttgaatcagtgcctgagacttctgaatgcgttgttcctgaattcttaattgaaggtggctttgatagactgtttgctttggagaaaaagcctgtagtttcctcatcacttgggcttttctggtgaataacagaaacaaaaatatttcaacaagtgatttcaatcaatgagacgagtttggattatctaagaaatactaataagaagacaagaccaggttttatatgacaagatctttaacttacaaactgaaaataaagtctaaaaggaatatagaaatttctcaattcttgcctcacatgattccatgcattctgatatacttcaagaacagtgtattttgaaattgtagaaagaagagcaaatcatcttgaagttatgaggtagaagtgtagataaaatacctttacattagctagatcaacattatgttcttcaaggaatgtcatgaactcctgaaaattttcttcggtaggaagatagtgcccactgtgaggccaaactgcctattcaattggaaagaaataccacaaaaagatcagcatttaagagacagacaaggaaattgatcaatagaaatttttcgagtcctacgattatctcctaactcttacctttagaataccatcttccactattaatcttccagcagacaatgtggctccacctgctaagaagctcgaatgttggaacgtgcctttattcttcatgccaacatacaatgtctttgatgtgctgagaacaaatatccacttagcatcttggggtccttctgttgtatcaagaactttcccacttttcttgtagataaacgtcccattttctactgccacttcataaatctctctttctgcctgtagaacaaatcagcaaattaacaactcagttttctatttttcaagcctcaacaagcccataaactgctttaagggctcaaattcaaacttgatagactattttgaagcaaaacataagcctttgcacagtacatgtcaatgtcctaggtaggggcctaactaattccatttttatgtttggtttaaaactattaatgggcataaaagagggatcatgagggaatatagagcttacaggaccaagatacttgatgcattgctgatgaagcttcggtcgagggcatctctctaggttaacttcttttccatctcctatatcaagcctgcatttttcaaaacaaaatattggatgtttgaaataaacaaatgaaatagtgctcagtgctcttaatttttaagggaggaataagttctaatggtctcatatatgattaactaatcttaccaatagaaaaaaggctgcccactttcacaatgaagccatttggcataatagaattgaagattatgaccataacgatgtcgagggtctatctattggcaagaagaaacacaatcagaaagatggttgagaaactgaaagcttgatttaaatttatacactgataatgaaacttactgcctcaagccaatgctgtaacgcgagtttgcgagccttttcatccttagacaaacctttccctacctaaaaagtaagaaaaaaaccagcaatttataaccatattaacagaaagtataatgtataagatgaactgtgcaaaattggcctatcaataaccttggcagccctggtccttgctctggaccagcgtgaaacagcagtctcatgtttctcaatgtcaaaaaatgatattgaactccgtttgagttcagcaaaatctagcagcttccacctgcaaaataaaattaaaaaaggttatgagaaagggtgtctcacaacttaattcaaagggcaaaacaaaagaaagtttcttggacagcaaactaaattttaacaaagattttcctcaagtatacaatctgtcatagacttgtagataaagaagaaagaactaaccatctttgctcaacaagaacagcacaatctgccagccgcctcctggttcggaaacttttgtaaactttttgtaactttaatgctgcctggtatc

SEQ ID NO: 18562 - DNA, 1729 bp, Cannabis sativa
tttaatagcctctgtaacagctacatactcagattcatctgtaaaactgtaataataaaggttacagtgaggtctaattttaacaccattaaatgtatcaattatttttttttttttaagtttatttagtccaattatattgttgtatggaacataatagggtatccttttatcatttatgtttgttgacaaagttttttttgttaacaactgatctaagaagaattcaaaagaagagattgaacatgagaaagatagatatgaaaaccaacaaaagaaaaaatgaacataataattattgaaccaaaaaagatgacttacttctacttttacaacttatacaaagtactgtttacacatttctcagagttagtactcaatcatgtgtatatttacatatgtgaataactatttatatagagttggtcaatttatctttcctaaaaaataagaaaattacaatattgaggtggagtgtgattcataagtagctatttcttggattgagggttcaatcaaaaatgttaagtttaatcagttttattatgatgatgtttctcatttattagttgtggcgggtagtggttcgttttgtgccattcgcattctacgaatggtataatttatgcactaatcaagtctgttacatcttcttttaagagtttcaatttagacaaatgcatatgcacgtgttattagtgctcatatatcagtttatttgttggggtttaatgaaatcttgacttttaaaaaaaaattacaatatttttatataaaaaaaattatattaaatttttctatatttctttttaaaaaatacatactagatgtggacattaatgtatcgagtgcttcacccgaactataaatgttcaaatctcggctagagctatgttgttgatgtgtctatatatgaacctcacaaacttgttctaccatatatattggccccaaagcaggacttaggctttttgacttgcgggacttaattgttataaaaatatatatttatatatatttactttacatgcttgatttttttaattaccatatatttaatctaataatatgatgaatgaggtaattaataaatttactaattttttaacgatgtattttttaaaaaataatataaattatacttgtgattttgtagtgttcaaagaaaggagtacacatattttttgttcttaattaatgatgagtgtaattaaaaagtggggagtagagaaataaatgaatagtatatagaaggatggattcgtagttttatttagagaaatggtaaagggcaccagtagtgcctagcaccctcttatgcgtcaatatcgctattggtgtaattaaatatcgggtcccatataatttaatataatagcttttagagaatatcgctagccaatcgcaacgcgacatgtcgagaaggtgctaggcaccactggtgcctaatagcaatcctcttttatttattattacctacgagagtactagctagtatgacgtagaaatgaagtggttaattatatatatctataggcgaataataatgaatgaacagtacaatgcataaataaaaattgaacgtacacaatgaaggttgttagttataaatattatattatttaactatacagtaattaataagtggagagagatagttgcacttgtatttattaatgtaattgagaaatgtcaaaaggtattacagcggtttacatttgttattagg

SEQ ID NO: 18563 - DNA, 4061 bp, Cannabis sativa
aaatcgaaacacattcttagcttatgacggagagcttccgatattaataaactatctatttcaatcgtgacatgaaaataataatatagcttcaaccagcttaaaactttcttaattctcattgcctcagtcacttctgccgcctctatgaaaatattaacatctcaaactacaaacctcgtcctaaatcttccttcatcaacaaagattgttgcatcgtcgtttacttaacttctggttcggcccatggcacatcccagtcccttttgcacaaaagatatgactgatgaatatttcctctttcttcagcatttactcattaatcaaaacaaagatgcctaatcaaatcgcacatagggtttttaaccatgattcaaatcacatgtagagttttttttttaatactttttgttctaaaatgatctaatagtaagcatctttaaaaattattaaaataatattatattaaataaacaaattttcttactttataataaaatgataaaaaaaaagtaagaaaaaaaaatgtaaaagatgttatggtatgatattcttttgtggcattctttttaattccaatattaaacatcatttaaaaaatactaaaaatatattcatgtcatcaagcatccttcataacatctctattggagatgctctaaaaaggtataaaacaatcaaagtaccatatttagaaaatattagagtcacttaaagaaaaaacatacatacaatttaatttgtgcgatgtgcccggtttgatttgatgaatactcttaatatatatattattattttttaaaaaaatcttaattaagacaaataaatattattgaaagagttcttatgaacaagtgaacaaatatatttcagaaaatcggaccaccaaatagtatagttgctacactgagagcaaatcttgccacaaggaacataatacttaattcatctcttgcttttaaaattttattttaaaaaactttaataaataatttgcctagaattacccttatataagagagaaaaaggtattaggagaatctagtactcttctatttttacaaagcgttgaattgttttttttttttgaaaaaaaaaattgtaaagtcattattaaattactgatacaaaattagtatagagaacttttcttttttatagaaataaaatttagtaatattacatttacctattatcttttttttcgctagtatgtgtaaatacatatatattattaatgactaattaagattggatttgcttaatcttatatgtaggtttactgatcttctactatcaaactgagactgaatgatctggggtttctaatgtaaataaaaataaaaattattattcacattatatgtataattataaacaaattaaattattataattcattcaaaattaacttattgcttaacatttgtgttattaagcaggtagatagatagatagataccagttatacaatataaaaaatatatgtacttagattgaagacagttcttgtacttaaaaaattgtgtagttttatccctaactaaataaattaccagcctttagcctttagagtattattgctgaaattaaatatgaaagtaaaacagctaaaggccatcttgtcccataatgctacccaagtacatagttttcaataaggcttaagctatacaaaatcataagccattttcattattcacaacagtaatcactgtcgatgtccttccggcaaggcaaccaccttatggaagggcacttccctcttcggtaaggatccatcttcttcttcgtcgtcatcaaattcgagtacatagctgcacccgaaaaacagagaaatatatcatgttttgtaaaccaaactctttgactaatactaaaagttattgtgtaagtaccaacagacttgaacctcagaccgtttaaattattctttttataaatgaaattttctgaggaaacatttcatattgatcatatgttatttgactatacacaaagcatatagatgtgacttactcatcaatctttctctgaaaacgattgaatggttggagggtgagtttcgcaacatggaaagtataacaaattgttagtttcatggtgaggaggggaaacagaatccagaagaatgcaatgcagatttgaagaatgctaatcacacaatgaaagtaaaatagttggaattatcaccttacgagggccatttaccacagtcgccttgtacagtgcagtagttcctggataaaccgctaaaacatgtcttccatgagggaaatctggggcactagaaggatcatttttcttggggaaaggaataatagctgatagcggcactttgtaccttctgagaacaatgaagtagacaaaggttgttcagatgaagtacttttctacagctgatcaagttactaaattggccatagaatgatagaataatgtatacaactgtcaggatggaatttaaagcctctgagctaggtgagtgaacttagcttcaaaacatcttttgaatagaaataaggtacatataatatgataagatatcactttatcattaaaatgaagttgcaacttagaatcaattcaatgctacaattctacaaacataatttcaaaatcctttatcagtgattaaaacacacatatattcgttatgatttagtgggaaatattactaacccaaaatctgataactctccaaatctagaatttaattcacagcagggaacggcgcaccaccaaatatatatatagccatccacataaattcacaaggtttcataagtaaatatttgcttgataaaagttacctttgaccagtactctcttcatcgtcaccaggctcctcatctagcacttcaaatctgcacaaagtatctcaacgagtaaggaaaaagtgggatccaaatgttaacattgacccactagagtccaacataacgtgaggctaaacttataggtaaacatgaaaacccatatattgcatctaatgaaactgaacttactctttcgtttctttatcaaagtgtgtgacctttacaacaaaccactcatccttgtcaccatctcctgcatttaccttagctgctacctaaaaacaatacaaattatacaggatgtcatgaacataccaatgaaatggaagaatacacaatcacgtttcatagaactctaaaagagttgcatgcatgcatacttgttcgcctttaatagtagcataagcttctatgtgggttcgcatagagggagagtgtcttgaaatatcggaatcggatttcattctcttcctcttctgttcactgccttctgcaacatatggaagtatcagtagtgaatgggaattttttgttttttttatcattgactagattaaaaatattcaaacatgttagatttagtttgtgttacttcgtagtaactcttacaacttatgaatcaatccacaaatgcatttcacccaattatgcataattgtcatctctatatctatgcaagactttacattttaatgaaacacgttaatcagaacaaatagacgtcatacctagtactacaactccataaaatttccaagacatttaaaatgttacaggcaaacacaaacattgtgatatgctgttaaatctcaaaaagatttaccatttgtgagttgactcctatgcaaaaatagatacaaaatattacagagaaatgctctcaaaggtcatggctcacatgttgtactaaaaaagaagtttagcaagtcattttagcttatgagctataagcaaggatgagcagtttttatatgaaaattggtatctttttactatcctctgtacataaataaacaccaacgagtatgcttacaatattaattcatccctattagtctcttccaaaaatggaaaacagttaaagcccttgcaaatagtaatctttccaaagaaaaatctaatagctccaagctgagagtgcataccaactcttcgacgttgctgcccttgagttccagaaggaagcagggcatcaagttgattcatcaacatattggaaacactgaaaccaaacatgacatt

SEQ ID NO: 18564 - DNA, 6793 bp, Cannabis sativa
aaatgacgtttctttaagttttgtaaaacgatctgcaaacaaggctgctcattgcatagcaagagggtctagtttaaagtcagattgtattttcagtgggactaccgctccttttcaattactgtctattgtaactactgaaagttattgaataaattccatcctttattcaaaaaaaaaaaaataattataactttattttaaagtaatataaaaacaagataagaaattaaataaatatatgtaacataaacactatatatattatttatatatataatagaaaaataaagattacataatactatatatatgtaacatatatatttatatatatataatatgaaactttaggtgtgaattagtacaataacttaaataatgtattacatttttgtgcaaaaaattattttcacttatctctataggtaataaggaaactttctaagaaataaatttgagaattatcaaatcttgtgttttctaacaattgcttgttgattgaaactagattaacatgagtaccaaagacccttttttgtagcatttttgatattaccattttgaaattctaactcataactgttggaaatttatatgaatgatatgaagcatatatgattgttatactcgaaattcggctatgtaccaaaagttgacacatgtcctacaaaaggaatatgaatcaactcagggtatatactaatgacattgtatcattaaatgcagttcaaataactcatttcaattaaatacaagtttaatagaaatgttcaaactcgccgactacttagttttatgcgagacaagaataaaaactattaaactagaaatgacgagacacatgtccgccttgggatagatagagtaataaaatgtacaaaatgagatatccaaagacctcgtgaatcagtgactctctcactcgagtagggtgaagataataatactcaaccatgcacctcgcgtttgacacaacaaagtagtcatctcgcagaatcaatacaaataaaggggtacaacaagatgaattacttctacacttagtgttttttcctctcacggcagataagaaggataactcatatttggtaagatgcaaccttcttagtctgcataactgcttaaaagataaatacaaagagcactagggtagttattagatatcatcccatgtgtgaataaataaaacatggggaatgttcacgtttcaccagcacttataaataaatcaatcccaataaaaataactgacaacctatattcctataaatagaggcagaatctatgggaaaaaggatgacaaaaaatagagagaaattctattattttcaaatattgagatttgtattctgtattccaaaaaatatccctaataatatggactcatggagtatgtatattttaactacaaaatcacgtaaaatatctggtatttattattatcattaaattatattgtgtatttattgcaaaaaaggatatttaaatcttggtactttcatttgagagagagccttagtgataaaaactcagaaaaatatctcctcataaacacaaacacaaacccatattaaatggctgataacaatcaacacgacggtgatcatcctgaggaaaaaactcattgtcctggcaaagaacctatgggatctcatagaaccaacacatttgaaataccacattcatggaggaacgatgttaatttcaatgctgatggtgatcaaatcccaaaaagaaagagtgaggatgcctatgatcctaccaaatacatagcactagtagaattgaaaaataggcaattttaacaacgcctgactgaattaaactgaggaaacgttgagttagagagaaaagttgcggcgaccagggctacatagggaacagtccctcaaaactaacctgatccaactacaaggagacctcagggttccaggactaagaggcaggaggataaccaagcgaatcccctaaatatccaggaggaacaatttgggaatacaagggatgtcccaatggataatcaacctaacccaagtaatacaaggaaccatgaacattgatgtgatgttccacgaacttcccatggatttacgaaccaagggaatgaacgaactattatgccaaaatcatctcgcatgaatgaagaggcaacgcaaaatcgaccaagaaaccaaggatttcatcatgataatgaaaaaatcctagaaaccaacctaggtccagtggccttccctcgaaacatccacaaccgccttctcgcgcggatagagaaaatatgcacattttcttgagtaggggacacgtgtctaatctcttctaaagaagaagaccaacgcgagatgaagcaagctcaagcacaagagaactatgatcccgtgggcatagtagcttgagtagacaaacacgagataaaagtagatctcgatgttattttgttgaccaggagagcataaataactgacaaagttactagtctgagaactactcaaagactaggttcgtaagtaactatgaacataaattctccaatcattccataacctcctgggaacagtcgtcgaaggacttcaaaaagcagtttcaggctgcaagagaccgtcgaccaaaggcgtcatctttgaccaacataaaataacaaccaagagaatatcttaaagcgtacttaagttgctttagtacagctactgtaaaagtcaaaaacctaaacgacagtattctgttaacaacccttctggctggaatcacaactgacttgtctatagcaagggtgaattatgtgatgacctccaaggtcgccctatgaggaatattaatgaatttaatgaaagagcacaaatctttgtgcgtaaagaggaagcacataatgaaatgaagctattaggagacaaacccagcacaagtattgcaacaacgagcatcgtgaccacaaaggtaaaataccttagtggatcaaataccaaaagaaaggatgagtcaaaagaatcatccaaggacaaaaagaaacagaaaaaaaaagcatgagaaatatgtacccatctattcgatatatactgaatttaatgaaactcgtgagagcatctacctcgccaatgaaaacagggtcacattccacagactagagtcgatgagacacgcgaggaacaagtgagattcaacaaaatattgtcgattctgcaaggatattgagcataccatcgaggaatgtcgttaattgaaagatgagattgaaagtttaatcttgtgaggatactttaggcagtatgtgagaaatcaaggaaatgagagcctaaccaacacaataacccgaataacttgagattgcaacctttgagggcgaggatatatatcttggtaatttttggaatgccacacctcgcgggaaacagtaacagtgcacagaagaggtacgtaaatgaagtgaaaaatgaacaatcagcattcgctcctgaacctttgaaaagagcaaagtaaaataaaccaccgatcatcttctttgaagaagattcaaaacatgtgtggtacccacatgctgatccccccgtgataacaattcaactcgccaataaaagggtgaagagagtacaagtagataatagaagttctgtcaacatcctctacaaacacacattcaaaaagatgggattagtggaggcaaaactgaaaccatgcatggtaagtctatgcagttttacaagcgacagtgtcgcaagcttaggcattatcgagcttcccttaactatgggggaactgccgttatcagcaacacaaatgcaagagttcttggttgtagacatcccttccgtatataacgtattgatgggttgaccaactctaattggactgggagcagtgagtttgattaaacacttatccttaaaatttcctacacattctagagtgggagtagttagaggaaaccgatttttggctcgagaatgttatcgagtggaacttctgaacaaaaaagcagttatcaattgatggtaattttaactgaagaaaatgagaagagagcaaaagatttagatcaaagaatccaagatgataaccaactcaaaccaattaaagagatggaggaggtgattttaaatccaaacaatcccataaaatatgtttacatagggaaaagtttggaggaagaactaaaataacaattaatcattttttgaagggaaaactaggatgagtttgcttggagccactcagacatggtgggaataaacccaaaagtgacttgccatcaccttaacatcgaccccaattatccagcaaaatgttaaaagcaacgaccattagattctgagaaacgaagcgcgctcaaagaagaagttgacaaattattaactaatgacttcatacgagaagccttctattgctcatggatttctaatccagttcttgttccaaaactaaatggcacttggagaacttgtatagattttttagatttgaataaagcatgtcctaaagattgttttccactaccaagaattgaccagttggtagatgcaatagcagaacacaagttgataactttcatggaggcatattttggatataataaccagataaaaatgcatgtcccagaccatgagcatatgagcttcgtaacaaatataggactttactgttataaagtcatgcaatttgggttaaaaaatattggagcaacataccaacatcttgtaaatagtatgttcgaaaactagattggacggaacatggaggtctacgtcgacaacatgaagtcagtaaaaagtgaggatcacacgaaggatctcgcagaatatttagctatactcaggaaatatgacatgaagcttaaccctaaaaaatgttcttttggggtttcctcaggaaaattttcgggcttcattgtgaatgcgagaggaattgaagctaatctggaaaaaataaaggccttaatcgagatgccttcaccaataaagccaaaagaagttcaggctttaacagaaaggatggcagcactcaataaattcatctcgaaatcaactaacaaatgtctcccatttttaatgttttgggaggcaataagaaatttgaatggactgaagagtgcaaggaagcatttaaagggataaagaagcatctgtcaataccccagttttggccaaaccaataactagggagacgctatacctttatcttgcgatttcagaacatgccatcaatgcaggattagtgcgagaagagggtaaaaaccagcaacatgtttactatgttagcaaaaggttactgggaacagagttgagatacccacctctagaaaaactcgcactatgcctaattcatgcatctcgcaagttgcagccatattttcaagcgcatccaattaaagtcttaacaaatcaaccattgaggcaagtgttatcaaaacctgatgctttggaagattgataaaatagtcgattaaattgggacaatttgaagtaacttgtcacccgaaaatttcaatcaaagggcaagttttggctgactttttgatagaaggaataaactcagaagaaaattctgacattgaacacaaaatagaaacttagaaactatattttgatggggcttcaaatgagaatggctcgggggtaggagttatagtgatgtcgcctgaaaacttcaaattccactacgcaatgagatttcagtttcatacttcaaataacgaggcagaatacaaggccttgttagcagggttaagaatagttgaggaactaaaagacaaaaacattacgtgttatagtgactcgcaactaattgtgaaccaagtcttaggagcataccaagcgaaagacctgaaaatggctaaatacttagagagaaagtttggaagagcttagaaagtcagattattttaaaatagaataaattttaagagaacaaaactctaatgcagatgctctagcaaaactagcatctcaatttgatcatgataaattgaatttagtatcggtggaggtcttagacgagccaagcatatgtgaagaggaagaaatcgagatgatagatactttgccaacatggatgacaccaattgtcaagtatctattaagtggagaacttcctacagacaaaaccgaggcgcgcaaactctataatatttgataaagacaacttaattacatattagtccttgtcatatataatctctataatattttgcaccttaaccaagatgtcttgctatattagcgatctgaatcaagattgcttgttccggataatgggcattaatgagctgtactagctaccattgcttaaattttgcataactttaatatgttgctgagtattttattcatgaacaatgctcttaattctccgtacaatacaagttataaacttatatatgaataataaattttttgatatttatataagaattattaaatatacaatatcaataattcaacattgaaacatatatcaaattgttcaactactattttagtaaaaaaatgtctttgtaggcttttcaaggcataaaccctaacactaggacctagacttagttcctggtcccgaatgttggcccagtcttggactcggatgtcagtcccataccccgaccaggagcctgaatcccgatcccgaccctgaccctggatctagatcccagactcaactcaaataaaaatagaaaaacataaatgaaaaaaccatagagcacacttttactttttgttttttaaattacaaaacaaaagtagttacagaatgcaatattatttaaaaaaaaaattttactttcacttttgtgattaaaaaattaaaa

SEQ ID NO: 18565 - DNA, 4457 bp, Cannabis sativa
ggcttaatttaacataaatttgcatgagcaccatcttatatgaatatgacccataaaataattgaataggatagagaatgcaaaagaacaaaacgaaaactgattagattgaatgtcgacattcaaagaaagatacaaagccataatggtttcgccagtagagcacaatttggcctcttcttcttagaagttagaacacatgaattatcaaactgaatcaagaggagtcttctagactttaccatgtttataacgaaacacaccacgccccccttcttcaactattccatggagaaacaatacatacaaacacaattgacaaaaataaattgtatgaacactatgtagtactgtttgtagtttctactttttttgacagaagtttgttgttgatcaaaaaaaaaaaatgtcctatttaggaatacagacataacaacatacaattagatcgtattaaataataataatgaaaaaacaaatgagtttatactttggaaacaaaaaataatgaaccccctcaaaagaaaaaatgataaagaataactaagatgaaattaactcaaatttctcaattagaaatcaccatctcaccacctcgagctataatgatcaatttagtgggagattaatttttcttacaaatacattctaatttcgtaatttaacacataaaaactataaaaatccaatcataccatgtgcttcttaacctaatttcagcaatagactaaagctctcaacaataaatgcgggtgtgtaaatggctcaataatgtgcaaactgatgttgatatatgcctatcgaagatgttacaaaaagtttaagggacattttatttaatattttgtactcttacaataatacaagaaaatgagccaaatgtataaacaaatctgcataaacatatgagaggaatatcattatcatatcttcgtcaggaaaaaatgttatctgtgttttccatcattgtactttcaaattccatacttcatcatactggcacatgtaaattacagtccattttatagtttatgaccaaccccagaaataaacaaatgaaagagataagaaatttcatggaaagtaccaagtacaagatttgtataaatcaaagtaaacagaagaaaatggtcacagaacctatgccatggcttctggatatagttctagaagctaacttccaagtttaatgagtcaaagatctctagtctagttcatgccaaaaataaacaatgcccagaataagtaaactgagcatcattttctctattttcttaggtttcagttggaactgtattaatatctaggaactggttatgtaaagatgcagttgatgaaagactgaaaaacaaacacacacacacacaaaccaagagtgataagagtatacaattcatcatgctatgcatattatcttaaaaagaaagaaaaaaaaaaagcagagaacaaccaaccaagtcttctttctttctttctttttttactagctttactgtatggatcacatatattaatcaaatcaacattagcatattgttccaatatcatcaacactcaaaactgaaaaaatacaactctattcattcttccaagcatacaatactagagagaaacccagaccttgtgattgagattctttcatttgctgagaacaagcccgagagagcagagaaggattgtaaacagaatgggtagaccaaagcttctcagctgagagagaagtttggaacataaaaacagcatttcccatggcattgccaaagagccaattgtgaacatcccaaaagacttcaactggtaacccatcaaccaaaatggtgtagtttcccctgaacttccatttcagcctcttcacctgcataacaggcttactatcaatgcgtatcacaagactaggatcactgagcccaacagtgtcacactcaataccaacatcatgtgtctgacccttatcaataaactgagccttggcaacatagaatttcttcccaaataagtgttctctcttggcaataagaatggcattacagcgccctggttcagactcaatctttctatatgcctctcttttcatgtctccaagaagtagaatcgtttccccattgaatatgatagctaagtaaaaccctcctaatggttcagggccagcaccaaatttggcattagccaagtcccaatacatctcaattttgcttgaatccacctccaagtttttagacccttttctcttggagaacaaccaaggctttatatcaaccttacagaggcattggttggctgaatcatcaatcccaatgctaaggccttgacccatcagattcttcgtccatgttacggtaatcaagcataaacgaccacgtaatttgcactggtacacacaggtaaccaagttttgagcatttttactagtactcgaagatgaagaatcagcaacttgaataccattttcaccaaaacaagaaggaaaatccttcattataacagcttaagacagaccttttctggtgatgatttgtcaggcttgtctgctagaaaattcaaaatgcaggcacagcagcagcatagtaaaaactgatacaaaaaaaaggaacttctaccttcatatatttggacaacatcacaaaaccattaggcaaatgcttcaactttagcttctgaatacttcgattcgctcctgctgtcctgtcttcttgtttcaaacccaaaatttatgtgcaattgttaactgttgttaccatctgtttccaaaaattaaaacaaccccccaaagtaaagagcaattagttttagagacacaaaacataggcaaagaagattgaaagctctaatcaaaatcaagatttagctgaaaggactaaatatgaaagaaatcagacaaagtcacaaatgggtattggctggaaaaggctggcgtattatgctacgttatacaaaaacttatttgcctctttctctctccctctctcattgatgggtcactttttttttttttcttgtatataatatatatattttcttttctacttgtatataactaaaagaatcataatgggcctcattcttcaactgacattacacatgcattggagctgaagatttcaaagcttgaagacaaccaaaaaaaagggactacacttttgaaacctccctcaacaggaatatatttttactttcccataactgtccagattaagacaaacataaaatcatcaaaaagctataaaggaaaaaagaaaaaaaaaaggcaagtattttacactttcactatcttatcttactgtttgtccacaatttcatctctccaatatttaccttctttacttttttccctttttccatttcttttgagtaaatttatataatgcaagactaacatttagattattatgtagccaaaagtggacttcaattgtgcatagacctaaacacttgttaacctttgtttcaatacctttcaaaactacattttacattttaatcatggaatttgaaggcttatttatcttttatttaataagctgtatatatatatatatcatataatataagagaaccacaaggacaaattataatgggttaattttgtcgtttattttatagtgctgtcattataagcaacaatgatttactatgataaggtcttagcatttgatgaattgtcatgtcttttgggtggaccaaggtatggattggaccaccacatatggcaattattttgggatttagattattattagtattagatagactaaatatacatatgttgtccaagaattatgacttgaataggatcccaattgacccatttctatgaaatttacatattcattatggaaaatcatcgttccttaaaattttaggaactgggtaccccactacttaataaaatcaacatcataattttaccactgacaaataataccaagttctattattgaccatcaagaaaggattctgttattcatgtgagcaaacaatttcatttttctctctttttctttcttgcaaaaattctgaccttttcacaattactataattttcacaaacgtgctcattaaattttcatgtgtacaataaatatgaagtatgacctttaatgtatgagaaacactaaccatcttcaataatatatttagtttaaaatttgcaattatgctctaatatacaaagtgtatattaaccccagaattaacatagtcatcaatttttttattgaaactatataaaaaaattatttaaatgaataaatattaaacagttttacattagtaaaaattattaatgagtagtaaatgagtaaataaaaaaaaataatattaattgtggtgtataaatttatatatgtatacataaattattttataatagattattttatatattattaaagaaaaattatagtaaatggtcccaaatcatagaactatgttaataaatattttcatttcaaaacttg

SEQ ID NO: 18566 - DNA, 2548 bp, Cannabis sativa
ccacgtattttgggcgaattcaggggcaacagggtgggttcgctggttgagtttttacgggtaccaggtttcgggttgaacccgccaacccgcaatttaaatatattatatatatttttatttttttttataacagtttatatatatatatatttatatattaaattattaattaaaaaataaaaaccctaaaagataacacgaacctaacactttcagagccctaacacacacacggcacacatagtgctatgctcaccccatgctctcaatttttttttataaatttattttctgttaaataatataaattaaatatatttttatatataattttttatttaaaaaataaaagaaacattttcaaaaaaaaaataaaagaaataattatttgaattaaaaattaatttttttaaagagttcactgagttgaccgggtcaaccagccaacccggtcaacccggccaaatgaaacccgccaacccgtgctctattcgggtgcgggtttggtttcatttttttgaacctgaaacccgtgaactcgaaacccgcgaattcgaaactcggtaaacccgtccgatgttcagtcctagttattttaatgctatttaaatgttatttttgtagttctcttgttgttttcgtattgtttttatgaagaaaaaaaaatattaaaaaaatctttaaatataaatttgtaattttttttttaaaaaaataatacctcatgtaattatccataaattatataatatacttatttttagaaaattatactgatacctcttttaagttacctttttgataatgacaatctcagctttaaagacttcaaacataagtttttaacttttcagttttcatcgtacaattatatcagaaatagtttaaaacaaagatgcaattggaataaaagaataggaaaaagaactaattaaactaattaataaaaaaaaaaaaaattaaaaaaaaaggaaaacttactgagtgaggagtgtgttttggagaaatgcgcttgccattgaagagaaactgcatgtctctataatcaacattttggtgattgcaaaatgtttgtaagagcttgaacaacctacacttcttattgattttgaagtaagtctccttgtttgctgtaccctttactcacaaaattaataaattcattttaatataacaagcaaaaaaaaaaaactcaaagttgatgaactaaggcaaatgttttgctcattttcttgtaggtaatattaaaaaaagataaataaataaaaaaatttagtcgttaaaagcaaataaatcgttattaacaaacaaaggccatcttactactttgggaacaaatttgcttgcctaaaaaatatagaggaattggctttaaagaaagtgggaaaggaacaaagctttgatttgatagctaagggccattacgactaaacaagagagtttatgggtgaaatgtatttaaatggtcagaacttttggctgtacaccccaaagcaagaagcaagctggtgcatgaataagattagcaggatttctatttatctgttgcgttgtgatagagtggattatgacaaaacagtttggtgttttatgactttacccaaacacaaattattttatcctttggcaagctatatatatatatatataaatgaatgtctttttacaagggacaaggacaatcttgcttgatgttttagaattgacactagaatctgtagagtgtgtaatcagcagttagagagcaaccatcatctgttttttgagtgtattatatatattctcaagaaaaagtctagatctcagttgagaaagaaacttcatatatacaatgcaagaaaatgtaaaaagacagataaaataatcacaatacctgacttacaacttttatgctcaccctttgatcatcatcacagttttcttcttcttggtccatgcattttcttttctggccaagtacgctcattttgatttttgaagagaagatgagagtgtaaaaagtgggtttcaaaataaatatgggtcttaagttttaatggcttagtttagaaagtcttgtggggatctcctgcaaaggagatactgcagcagtaatagaccaataggctttagtttcttcttttgtgaacagaagtcgcagtactataataatgggcactgctactttatttattttaaggcatttctctgctcccacaaggtatctctcacatgttttttcttccatttaaggaaaagataagcttgtatcccttatttagagtcagattaggcaaatgagataaagggtacttaatacaatgaattttattttttttgaactaagcgtatatatattacaattcataacttgggattcgaacccaggacctccaacacacacgcactctcttatggccacttgagctagcatcaagtggttacttaatacaatgaatcaaatcataaaaagatgaattatcttgagaatttttttatttatttattattttttttttggaggttattgttaggctaaaattagtctaagtttcgggtcatattt

SEQ ID NO: 18567 - DNA, 6370 bp, Cannabis sativa
tgaggctaaggggtgagtggggtatgcaagaattgagtagtaatactctttgcatcacaggggcctaagggatccaatagtttggaaccttgtttctctagttcaatagcaattgcctataatttctactgtttggctacttactgttttattggttttcttgagtttagagtatcggttcttatcacacacacacacagacaaacaacaacagccacaactgtataagaaaggaaattttacattgagttgaatttccttgctaaaacttcatgggacaaagggtggtgttggttggttggttggttggttggttggttgggtgagggatttagggttgcaaagtacttgctttctttctatttatgtcaaaattctcaccataacactatgcaaattcatttctgaaaataagactcagaataataaatccactaacctatggaaccctatcaaattcttaatgcagtcaaaataacaaaatattcctaaaccctcaaactcaaataaacatttagctattatttgggcacttacacatctttgtgaagcttacaaatgctgaataagtaacagaagagatagcaggcaaaagaaatataggcaaaactcgaaatgctctcattttccaattcatatccgatgttcgggttgttacaatagcgtaaccaattgcaatagcctgaggatcaaaacattccaattggttacttatttgtaagaacaaacttaaaacagaaaacatcagatcatctacagaaaactgaacaaacaatgcaagttacagtggttaactcaatagaatcaaaaacatgctagacttgcataatcaggtgaaatttatatttcatatcttcaacaaatttagtaagcataatggccctatgattagttttttcggaaaatttccaaacaaacgatttcaacgaaatttttcaatttcatacaatgtttggcataatcaagatacatagatttggaatgttacctcaaaaatgagagaaaatataataaggtatctaattataggcctccaagtttgggatctcctcttgattctagcaagaacagtggcttcttctttagaaatatactgaagtcgcttctcaaaatcatcaccatttattctaaagattccattccaaattctggaaaagatacccttacgaaccttcttcttcttcttcccaacctcactcgccgtcgccgtcgtcgttgttcccgattctaacttctcaccttctccaacgcctttatcgtctcccatctctctctctctctaccaaaattacacacaaaaatcccaaaatcgataatcattcaaaaaaaaaaaaaaaaacagattcaaacattaaccgtgtgaaatgctaaactaccttaagatttatgaatgaagtaataataaccgatctgagaaaaagaaaagcaaaggaattagatgatgaacatggattgttccatcacctgtcgtatcggatctcaaagagagagaaagatataatcaaacctgttggagcaaccgatggattgggcagaaatgaaatcaagtgattgatttggttatggttagtgagtattgataatcttcttcttcttctaccatcaccattgaattctctgttgctctggttatgatgaccaaatcagagtttaaattactaacaacatgctttggtccaaatatttgactttttatgtatatatttttttttgatagaaaactttttatgtgtttattgggttaaaattatttccccaaacctaagttattcctaataggttaatatttcataaaactcaattttacctctttgattttaaacacccaatcgaacctctctctttctcccttttctctctctctcgctcttcgaccttaccccaaggactcgacccacaatccacaattcataatctcgattcattctctccacgaccaccgagatcacagatccaatgattcacagacctaatgatcactgtggacccaataacttctccatcagtactatcgtcaaagataagcagtagcggaactagaatttaaagtgatgaaattagggagcactcaagatttaaaatgaaggggtgtaatgaaaaaaaaaatgctctatttgagtccttaactaatatcttatatgtaacttatcttaatcattataccaaaactaatattatgtctataaatattatcttttattataaatatgtatcgtaactaattaaattacatttgtttctcaattattttttcaggaagtgacggccctgcttcgcttctatgtgggtctgcccctaaagataagtattaatttttttttggtatgatttagggttaaaatatataaaattattgaaacgtttatttaaatttagaattaaaggactgtgattttctagtttaggtcagatttaggattgaaatggtcagatatatgtttttcgagcaaatttgaatttttggcctgatccgatacaagtctaacatggattcaatatatttttgttgttcgaaagagataaaggttgaagatgatagcccgagacaggctcaataacgtgtctaaattttatacttttttgtaaaacttgattggacagatgtatgtgtcaactcaagatatcaaaccatacattatgattggaggttcttaattacattctaattctcatggttttatgtaattataatataaaactatttttaaataaaatatgtatttattaacttatctgcaaaatttaaaaatgagtattcatatacaattataaaatataatataattactaaaatttacacaattactttcaactacaaaaaccttatcgctccattgtatcattcaattgttttaacatggacttttgattttgtgaatgtgttttgttttagtatttgcttattattttaattaggtattaaaagatacaacaaattgttgaaaaaatatattttctttctttatttatgttttaaagaagaaaggctttggtattaaagtgtaacttcatcactaataagtatttctctcagttttaaacgtcaataaaatacgaaacttcaataatattgttaataattttactcctaaagtgtgatcactatcatatttttactatcgaactattaaaactatcaaattgtgcttctttttactaaaggatactgggtaaagtaataaaaatttagaagaaaaatatggtagtaattatagtttgagatgtaaaattactaattatttaacaaaaaattcatatattattaattgtgatagtttagagaaaatatttaacatcaaaaataatttaagagatcatttttttttctaccaaaattgaggggacaaaattctatttattggattcctagatacaagaacaatgctgctcataaagtagaaatagttttatgaaatttttttcagataaaaaaaattaaaataattttatttattataattgtaaataatattgagttcaggtaataaaatggtgttattttgataagataattcataaaccaaagaaaagaattaactattgtatttggtagtctaacttgttacttgtcattttaattttataccaaatagttcaaattgttacctctcaaaatggttgtcataatccatttttatcgacttttctcattatttatttattttatttttccttcttccaaataatctaagttttcttaatcaaagcaaaaggcacatatttggagttatgaattggttaggaaagaatagagaaaaagaataaaaaggtgttaaagctcaagaaatagaatgagaattacttgtacttctaaatacaacaaagaatctagttcttatttttcattcctatgcactacttaataaacaaaagacaaactaacttcatttccaaaattccaaacatggagtaccctattcatcaaaatttaatccaaaactacgacgatgaagaagaagaagaggaggaaagtgatgacaccgaatcacatttcttgtatgtttccaatgcaatcctcagtggcactgctcgtctcaacattttgttgcctaccgccaccatccttgccttcaccatattcgctcctttgttaacaaacgatggagtttgcgattctttgaatcgttggctaatggggtcattcgttgccctatgtgcagcctcatgtgtgttcttcaccttcaccgatagcttcaaaacaacctcggggagattgtactatggagtggcgacttttagaggaatatggactttcaatgcttcgagaaagaagccttgtgtgtcgtccgattataggttgagatgtgttgatttcttccatgctttgctttctttgattgcctttcttgcatttgcagggtcacacattgatgttgtggggtgttattaccctgcattgcctaggaaagttactaacactatgcctcttgtggttgggtttgtagtaagtgtgttgtttgtggtttttccttctaagagaaggggaattgggtaccctttcttgctacataaagaagccttgtactctagatgttgatacaataatttggctttggtttgtttcctctttgcagtaatatctttgttttgacttgatgaaaaataatttattttcattctattcttttatctgataggtagataatttttttttttggaattttttttaatacataatgaatattatttgtttgttattttttcgtatttattttattttgtttcacacacttttattcttattctaaaatattgttatgtttgtttgggataattgaatagaatggaaaaattcaattatcatttaattccatttcaatacattcttattccatttttgttactttatttgaaagttgtattgtagcgagaaaagaaaaaaattaaataattaacaaattctcatatctgaaatagaaaaaaaaaaaattgcataaaaaaccactatatttaacgaaattttcaatatcaaacatatattgaaattgatagttaacattcttctaggcaagatttagaacaagaaatcatcaacaaagatattttaaagagcttgtatctaaaaataatacaaggaaacaacaaatgtgtattaaattatcatttctcttttgagcatttgtagttaacattttaagtataagtgtctctctttctctctctctgtaaagcagtgataaattactataaccaaaacaagaatacaatatcatgaataaagctattggattttatagaaacataaatttgatgaacacaaaaagataagttaagtacagtgacatcgacgtggaatggatacgcccggtggtcttctcttctcgcgaacaatggcttccttgatcaagggcagtttcttatggacctttctccatatgtgatttactgcgccgtcttcaggaattggcccaatcccaccgtaatgaccattttcgtactgaaaaatgggctgtgcctctgccattttccgacgaaatttatctttctgttcccttgaaaagctcctaagatgactcacaagccaatttggtttcaatgcatcacttactgccacaaaaacagagaattctgaataatctaccatgccttcaaaggggagctcgatgttgtcactgacaataacgggtatacaaagactttgaatggcatcgaaaaggcgacatgaagtgggagtgtctcctgcagggttcaagcaaaactcggatgatctcatcccttttatcgattgctctctcccagttgcattagggaacccttcttccattataacacctggcttatcaaccaacaagtcccacaatttctcccgaaccaggcctccctgttatctcgaaaaacagaacgttataacattcgtcgtccatttagatgtaatatatgtgtatacaaatacaagataagccttctaatatataaatatgtagaaagaaaacaattgaatttcaggatataattaacaatgataatatgaagataggacacttgaaagcaacatggacaaaaacttacaatgttgtacttttgacattgaaaaactcttaaatgctatgaaggggagaggtcaagcactactacaatatcatattcagccaattgcaaagaaattgaaatttcaagtctcttgtacacaaagataaagtattgctatttggcagcctctaacaccattccgatatggcactctataattgattagcgattactcgtattatttattaaatcaaaatatatgaaacccgtcatagaaatgcaccaataacaatatatcacctcttgtggtacttgacgtcttaaggtgactcttagcatttgcctacaagctaaatagtgacttaagatgtccctcaaactagattttgcaaaaggttaa

SEQ ID NO: 18568 - DNA, 1951 bp, Cannabis sativa
aaaccgtcgccgcctataaataacaaggtataggcgacagttttaaattgtgtcctatactataggcgacggttttaaatcgtgccctacactataggccacagttgttgggctagtaggaattcgtcatttggtttccatgcccaatagatacactcagttatgtttagaattagaaatttctagatgagtattttcattcttccctataaagttatagctcccaataaaagtttttgtgacttcctttggggttcaaaagagaatcgtagcaaacttcatattgcgtattgtgagaaggtttgtcttcccaaaagctaagtggtgttggttttcaagaaggcaagaagtttaatatggctttgatggcgaagtttctttgggctatcgctagcaaacaagatagtctttgggtaagatggactaattctttttatctgaaggatcaagacatttggaaccttcctattaaagaaaaaatgagtttgtactttaagaagttgttgaagctaagacaaaattcagatgagatttccttgagataggctgaaaagggaggtaagttttgagttaaacaattttatcactcgattattgtggctcaagaagttaaatatgctaaaccagtttggaataagctcattattccaaagcacatgtttcttttctggcaagtttataactctcaattgcttacctgtgatctcttgagtcggttcatgaatttctcgactgattttttcctagtttgtgtcgctgaaaaagaaactcacatccatttgttcatggactgtgatttctctataagagtttttgaggagatttgtaactggctcagaaaaatgcattggtcaaagtcctttgtggatcttcagcagtggtgttcgagggatactcgcgacttcaagaatcttcttgtcaatgttgtgttttctgttgctttatacttgatttggaagaactgaaacaagtgtattttttaatttggtttgtagcacgactagaagtattatcttggaaattaggaaggttttccaatgtagagttttgagattgggtccttataaacttagtaaaatgggcatgtatctactcaatattgtaaagagttggcagtaggttttgggagcaactgctggttttagcagtatgcgttttgtattgttttaaagttgtgtcttcagtcttgctttgtatgttttctcagttttgaataaaagattttctcttgtttaaaaaacaaaaatatggacactactataagctagacgcctacattgtcttatttaggacaaggatggtgtttatagtcttgacaacttttgtttcaacaaatattatcttgacaaattttgtcttaacaactttggccttttttctatttaaataatttgaaaaattatatatttattacaaagatagataattataattttgccaattcaaaatagatttttcaaacaacattatacaactcgttatcctttcccttgacagtattttaaggtggcgattcgggaaccatggacctaattctaagctctaataaactagattatttattgagttgcatcaaccaaataatctttatttattaattcaatgattactccactataaatgtggaattaaactcttagtaattatataattatatttattgagttatattgtattgtccattgatataatccattccaatgatcagctctccatgtattagtttgtaattagttttggtcaaattgtcgttttacccttataattacttctttatcctttaacatcattaatttactagtggaattataatttggatcccacctaaatttgtgcacaacttttcagttttagaattaatacttaaatgaaactgacattcgatccgttaggatatttaggatttcataattgtagtcatgttcccagccattcgcattattagattctc

SEQ ID NO: 18569 - DNA, 5597 bp, Cannabis sativa
tattataataaagtattaataattatttattgttattattgttatattgatattttttagtattttaattattattttttttagtgtaactctatttagttataacctaataattaaaatataatttgcttggttccaagtatattcttgaatagaaattctagtgtataacgattctttatatccatttcaaagaaaagaaaaaagataccaaagacttctttatataagtagttttcttcatgtgtggcttaatgtgatgttacagtgatccacgtgcgaatagaaagagacatataactaaaaaggtaaaagcactttttagaaaatctagcagttaaagtgtttagtaaaatttaaaaaagagcttttaaaagaatttaattaaaaatttcaatactctaagaaaaaagacttagctactaattttcacaaattctaaatctccccatcaaaacaacactcgttggtagtagtagtaaatggaacacttttgaaacagaacaaatagaaagctacaaaataaaattatgtataagatgttcaatcttcatagacaattaaattacttatgcatagttatccacattagacttttcaaaattcaccaccttatggttaaaaacatgaagcaactgatcacaaacttgtctggacgtgggcctttcctggggactggtttttgtgcactgcattgctatttcaagtacctggaacactgcatactcttctcctggcaagagtggtttcaaagctgggtcaatcaggtcctcacggcagctaccttgcattgccattcgactttccacccatctcaccatgtccatttcaaccccgaaagcttcatcagttggcatctttccactaacaagctccattagaacaattcccatgctgtaacaatcactcttctctgtcgccttcaacgaatatgcatactctgccaacataaaatgtctagtaagaatcacatataaagtagtgtaatataagataccactcttttaagtacctggtgcaacgtagccaaatgagccagcaaaccatgtgtttgattctgtgtttccatcaaactcaaccagtggctttgcaagcccaaaatcccccagatgtgcctccatgttcgagtccagcaagatattgctcgacttaatgtctctgtgtatgatcattgggacacaatcatggtgaagatattccactccttgagctaatcccacagcaatctttaatctattttcccaatcaagactcctcttcttcttggtagtcaaaggctgtttgtgaagccaatcccaaacgcttccattctccatgtactcgtatatcagcatattagcaccagctcctctattgctacaatatcccactaactttaccagatgcctgtgtcttatcctccctagcgtcttcacctccctcgtgaagcttttgttagctaggagatcgtctttggatgaaatcttcttgactgctacagtttctccattggacaattctgctttgaagattactccggaccctcctgagccaattataaactcactgctcagattgtgtgtagcttccatgatgtcttcccatttcaaatctcgctttgctgaaccatttggaaagagaagcctccgctgagtggcagaagaacttgatgagtatatgtagtttacatcactggctctgccataagactctttcctgtgtctgaaaaacttagctgccactaataacagcagagcaattgcagttaatgtacacactgcagaaattaccacaactaatactgggcttaggccagctttctgatttttagagacagtgcatttgtctagagggtctccacaaagttgaaaatttccctggaatgcttcaataggccagtgtgaaaattgtttccctaacttcccttgtaggatgttgtttgagaggttgagctttactaggctgctcatctcaccaacttggggagggacttctccaacaagttgattactcgaaagatcaagggcttcaagttttgtaagcgacccaatagcaggtgggatttcaccactcagattgttgcggctgaggtccagaacgctctgaagattctgcagttgtccaatctccacaggtattactccattgaagctgttctcagaaagcttgagctcataaagcttggccaactttcctatagttggaggaatctgccccgagaaatggttatgttgaaggttgaggacattaagtgaaaccaaattaccaatatcttcgggcacagttccattaagagaatttccatcaagagaaagtacaaggagctttgaacaattgaaaagttgtcgaggaatcgaacccgagaacatattagatgacagcctcaactctcccagctcaactaatcttccaagccaggctggtagcataccggagagaaggttattgtttaaaacaacatgggcaagtttgttacaacgtgagagctcacctggtatggaaccagtgagtgaattgccagagaggtctaacaatgacagttgatggattttccccaatgtccctgggatattaccagtaaactgattgcttcctaatctcaacctctcaagtagaggagaattccccagctgaggaggaatctcatgatcaaatttattgtcagttacatcaaacgagagaaaagaatgagaagtacacaaggcagcaatactaccattgaatctgtttctagagagattcactcttgtcaaatttgatagtctagctagcgaatcaggaagattaccttcaagggaattgttatacaacataagctgctccaaagcaaaaagagaaccgaaagtggcaggaatgccaccagagagatgattatccgctaaatcaaggatagtcattttctgacagtttcccaaagttgctggaagtccccccaccagcccattctgcctcaaatgaagtaagttcaaatctttaagccttccaatagtgatgggaatcgccccagtgaattggtttccgaaaaagtcaaccatttgtagacttgaacaacttccaatctccatgggaatttccccagatagctgattctcatacagataaaaagtttcgagctttcccaactttccaatctctttaggcagagtgccctgtaaattgttgtggtacagcgtgagagtcacgagattggtgaggttcccaatgaagggagatatcgaaccggttaaggtgttgttgttgagcaagagatcagtcaatcccgctaaaccgtaaatttcgaccggaatagacccattaagcgtgttgttggataagtcgagctgagtaagcgaggtacatttactcagctccaccggaatctcaccgtgaatttgagtctctgacaagaaaagatgctccaaactggtggcgttggagcatatttttcttgggattatgcctgacagattgttgtttgatagaaccaagaaccccagttggcccatgttgccaaactcccctagaataccgcccgtgagcttgttgtgtgataaatcaagattataaagattgctcagttgagtaaaagacttggggattggaccttcgagctggttcccagcgaggttcaagtagaccagttgactcaattctccgagttcacttggtagcttgccggagaggctgttgttgatgaggttgaggttttggagattttggagatgacccaactctacagggatcgatccattgatgtcattgttagccgccgtgaatatttcgagactggaacagttgcctaactcggctggaatcggaccgtacagctggttttcttgtaagataagattttggagtctactaagtcgccccagttccggcggtattggaccggtgagactgcacgaagccaaacccagagcttccaagttgagaaggttcccaaacgatgccggaatggggccggtgagcccaacattgtcgcctattcgcatgactcggagggtggtaagggagccaagctgagtggggatgggcccactgagttggttagtaaagagaagcaaagatgccaaccgagtaaggttcgaaagggtgggtgggatgggcccagtgaggtggttagaagaaagatcaagctgaaccaggtctcctaaacgacccactgaaggagatatcaaccccccaagtgaggagtcggataggttgagccccataactcgaactgacccatcaactcggccacacgaaactcctctccacttacaaaagttggtattgttatgactccaaccatgcaaaactttttctgggtcatccacaatagctttctttatctccaaaagagtcctcaaggtggagctgtttcgatcaattttttctttgcctcgtaccaatacagtaaacccagatgagataaccaagaaaaccacaaaaaacagagacttattacaactcatatctactttcactctttgttgtctcttcacaatgataaattaaaacgtaagctcactcactcataatactgtcgtttatagtgtatagtacaacttcatgaagtgagctaagctaccattacatgcagcgtgtcaaagatgagatggtagctctgggcggtggcattagctgtacttgatcttgggttgcgataatcttgaatgaattaagagagcctgggtgattcttctttattattggaaacaggtgagaacagcaggataagaaacttgaatgagaccacaaagtttgtcagccattaatgacaatcttttaggtatagctacctattttctactactgctattcagaaggagtcgtattggaaaaatgaaatacgtgtatatatttatatgcatattataataatataatgtgtgaacgtcaaacttggtcagagaatcatttagagagaagaaaaacaatgcatagaagaaaagtcatcacttacttgactatatatgtaatgcaaatgtgaagataatagttaaaagatatgggttacattatacatagagagggagatatgcagtggttgaggtgggtttgccattagtgtattagctccaaagtgaaatagtcgctactcaagaaagcgagcggttgagtttcctttcaaatttttaaatatatttttttttttcatttgattaataataaagagaattttgagcattgttttgaataattgcaaagtcaacagactaaccccaaaacccttctcatacctcacgtaagcaaacaaaaccttccaaactcaaacttaccctcctttttactaattaagtacatctctatcttttccccaataaaagagtacatgtctatctctttctctctcttaatgcttttgttcgattattaatgaaacaatatgcttaatgggatgagactaccaaatcctactgtccttttgtgatctccttttatttgtttggttaagtaatcacaagtgccaaattagttgccaaatgtgacagctttatattaatactaggcggatgatattttatatgttataatttatagagttaattggagtaaacatatcagagttaataaaattgtaatttttttaatataagtaattgtattttaattatgttttttaaaataaaaataattgaccttaatgttat

SEQ ID NO: 18570 - DNA, 5053 bp, Cannabis sativa
  modified_base (1028)..(1034): a, c, t, g, unknown or other
  modified_base (2771)..(2777): a, c, t, g, unknown or other
aaaaaatagtttagtaatatagcattatgtattcatccaatcagcatttggcaccacaaaaatataagagagaaaataggtaacttggggtatatatgtcatatgccatatagataaggtttaatactccatatcactaccaccacaaacaacatacatatatatatatttatatggcatggtcaatcaaggcatgaccaaacaaaaagctcaaataccacaatcatggcaaccaccttggccctctcttctacacccaccatcaaactcccacttcaatccttctcatcactactctctcctcttcctcactcagcaatttcaccaaagaagagagcaaatcgtttcaaaatccatgcagaactaggtacaaaattttactatatgggttttatttctataacaaattccatgtgaaaaaattgcttagattatggttttaattaaggtagtggagatgaagatatcaagaaaggagggaagaagaaatttataactagagaacaagagcctgaacagtaagtaaaaactaaagcttataatattattcccactttgttgattgtatcttagactcatattggtgaaattaatttgtaggtattggcaaacagcaggagaaagagaaggagaaaatccaatgaaaaccccacttccttatattatcatatttggtatgtcaactccttttgtaatcttagccattggttttgctaatggttggattaaggtacctattagatgatttagttagaattgagacaccaaaaatatatcagcagagccatcatgatcatgagtttttttaattaattagtgtatttaattaataaccatcttaattgcccatttgatatcttcaatggattttttatctacacctacacttgtttcagatatgtatgtatgtatatgaatcaatacattattcttaatgtactatcttgtggtttgtctataaatttagaatagatatttatgattatgagctttcaaccactagtaaatttatatatatataaatatannnnnnnatatatatgtgtgtgtgtgtgatcaatataaaaggtaacccagcttcatgaaattaacttataatctgaaaaaaatgaaaaatgttggagtgatcaacttgtgttaataactatacatacaatttcaaattcagattaattaaatacattctcacatatctatacattttacaccttactatatacacagaaataatgttaaagtaaataatgataattagaaaatacgagtgttagcttctaagaaacttctgtttttattatatataattacaataacatattaaaaattggaaatatatatgtgtataaatctaaatgaatggaaaagggtggtataaagctaaatgatgagctgggccttttagttagatgtgcagcgggatgggcctgaggctcgggttgtggtctaagaagcccaaacttaggaattcatgcccaatttggtattttactaaccgtttaacataaaattaaattacattgacaaaaaaaaaaaaactacttagtcagacaaagatacatggaactagggatccacatttttttcatgggaatggagtcccgcaggaacccgctcttaatgaggcgggaatttctcatctaaatagggaatggaacagagatagagattattttttgtccccgaatgttaaacggagcaggaacgggaaggacactaacggggacctgtttaatttatattttataatatgtgtttgtatttttttagtacattagtgttatttttataattttgaagttatgtttttgtacgaaagttaatatattgaataataaataatgtgtaatattttaattttcatataatttaaaaatttatacatttaaatttttaaaataaatttatttttatattagggggttcctcaccttgtccccgatgggaaataagtatggatgtgatggggatagagatagggattgaaatccttaatgggaatagggacggggggagcactcctcacaaatttcctgtcccgtgtgcatccctacatggaatgttatatttatgttagggtcggagcaaggtccaaccatttaaggtttttggggtttttttttttttttttgagttttctacatgggattttgggatgggacaaggaagaaagtggagataaagggatgacacttgtcgatcggcggcaagcctccatcaccgaaaagggtggatggagaatcgtagaagttttatatgtatatatttttttaatatttaataaaaaaatgaaaaaagaaattattgaagtttttaataattttttttattacttaaattattttttaaataatttttatgttgtgaaccaataaacttttggcatgtagaaattttaagaattacaaacagagttgataaattggatacctacgaaataacaagaatgtcgagcttaaggactataactacaattttttgatattaggacttatatgcatcaaagtaaattttttggaaatttatttaaatcaaaataatttttttggggacttatggcccaatttaatatcaacgcgtgatattttatggaagaattaacagatctgctaaaaaaaagaccaacgaacttataagaatctcaaacttgagaacgattgcagctatttttcttaattaaaaatctatgtacatcaaagtaaactttacgttacacccaataatcaattcattaaaaataagggataattacataaggcactattttttgtaannnnnnntatatttttacgtttaaaaatctttttttacagtattacagtttgagcattttacactatcatcattaacaaatattataatgaaaatttaaaaactaatctaatgaagtttaaacaatacaaaaaaaaaaaaattattaaaattttaacatcataaaatatatactaatcaagtcattatatcaaattgtctctaaaaaataatataatatacatatatatatgaaatatatttgttcttatatggaaaaataaaataaaaatcatattttaaaaattaacaactttgtagtgcgatttaaaccataattattaaattcaaaatcgcaaaccacactacaccgtatagtttagtaaaaatacaaactacaactgcactgtaagtttgtacgatatgaacggtttgatgaataccaatacgcaaaacttatacaaggcaaattcggtatttaaatattttttgcatcaacgatctcatcgaatgattgattatttaattgcgcaaattgaaattatacgattaaagaagagatagcaaaaatgcaaattatgagaaaaaaaaatgattcctgtaaaaaaaaatgtccaaatatggtttcttttactcatattacaacaacaaataacatcacaaactaaagtgtatcagaattccactgagaaaataatattcaagccatgttttagagtgacaataaatgtaaaacattggattgaaagaagaaaatgaacttaaaagaatgttttaagcagacaatctgtaatcaataataatgaatgatctgttgctgtgagtttgtaattgtatcactatcatcttcttaatacctttaatacatctcccaccaaatgcaatgatccagtcacaagtacctgtattaatttcaatacaaatttaggacttaaataactataaattcatcattgagaaaatgcaatccattcttacctgaagtcttattgaagggttttccttaacacaatctcttaaccatttgattgccagtggtagagaaggcattactgcacttgaaccgatatagttatctgttgtagtgttgcgacgagaagcgtcctggtaaataaactcgtgtgataaagtttttgcattatcgatattgaagcctttctcgctaccagaatcaagttctgcatttcgaaacaaaaagatttaatgaaaatcttaatagcaaaacgaataataatatgaattctttctgggaagaagatgagatgagagtatatattaccctttccctggacaatcttttcccaaattctttgtaggttgaattgccatgataagtcttttttagagatgtcggtaggaatggccgaggcaccggatgtaactttgttatacgcagacatacttgggacaaacaaggccttagaaaaataggtacctaatttgaaagattatagttaatctcaaagcgttaggctatgtttggaaattaaatttcggtgaggaatgataaaagctaatttatgttattttatacctgaggaagcacatgtattagcgagccggggaagcaaaatttgagggtctctcaagtccatgcaattgaataaaagaatctaaaacagggaataggacactgaatgagaagccaattaacatataaaaatgaaatcttgctatttcggtttctcatcaactttacctgctttgatattttgcaagaaccgacctctttctcacgttgaaagtgaccatttgttggaacaccattcatcttatcgagcttaaaattagaaacagaagagttttcattttctttaatagaactagagaaccaattagcacaagcttcaacgctttctgggctatgcgctccatctaaatagaatatcaaatctccacgtgagccttcggtggcattagagtttgaagaagcatcatgaattatctgagctcttccagaaatgtgcgcacttgccagacctctacgaaaggcatgtggtaaatcagcagcttctaaatcatcctgatgaaatttgtaattcacaaaagttagaacagtttccaaaaagttaaggtttttaggatgtgcagctttggtgtttttaactaacatttttcgtaagcttttcccagtttcctgttctttgaagccagcatttacaaagggaaacagcaagaccggcgttaattaactgatgatcgccagacaagctaagctttaagccctccaacttcttcgggtcaagtgctggggttacttccaatggaacctgccgcagacattaaaagagagatcaataccaat

SEQ ID NO: 18571 - DNA, 9179 bp, Cannabis sativa
attaaatctttttcaatagtgaatatgcttcctgtaggagtcaaaatatttttatcaatattcaatagtgtcattattatatgataattttatagtacaaactacaaagttgtcctactactaactcctaggataggaatatggacacatttaatcatcaattgacgtcacatggggtcccacatgcctccattgtgtgctatacatgtattgtatcatacaatcaaaatttgacttttatcaaacattaaatcctcaacttcagcctcaccccaaagattggattctgccaatttcaaactccatgtgagattcaacaaaagctgcagaacaagagtgatctcttccaatcaatccttaataaaggtacactttttttgataattttcttcattaggctcttgggtcttaaagggttagtagtgtttggttgaagagggaatgatgataagcaatggagagaatcctattgttaagaataaaaacccaaaactaacagtactacctcttattgctctgatattctatgatgtttctgggggtccttttggagtagaggattcagttagagctggaggtggccctttactgtctttgcttggttttgtaatatttccctttatttggagtatcccagaagctttagtaacagctgaattggccacaagtttccctgaaaatggtggttatgtgctttggatatcagcagcctttggacccttttggggtttccaagaaggcttttggaaatggtttagtggggttatggacaatgccctttaccctgtattgttccttgattaccttaaacattcattaccaatctttaatcatttactagctcgaatcccagctctactaggaattacagtctcattgacttacttgaactacagaggcttacatatagttggcttttctgctgtatctctagccattttttctcttttaccatttgttgtaatgagtgttctttcaattcctcgaattaagcctaagcagtggcttgttgtggatttgaaaaaggtggattggagagggtacttcaatagtatgttttggaatttaaactattgggataaggcaagtactcttgctggggaagttgagaatccaagtaagacattcccaaaggcactttttggagctgtgattttggtggttttttcatacttgattccacttcttgctgggacaggagctttgagttcttcccctaatgagtggagtgatgggtactttgcagaagttggtttgttaattggtggattttggctcaagtggtggattcaggcagctgctgcaatgtccaacatgggactttttgaagcagaaatgagtagtgatgcttttcaacttcttgggatgagtgagatgggaatgcttccagctatatttgcttcaaggtaacaatgaatttgttagtacttgtctactctattaattacccgaaaaacttcaaatgaatttgttaaaaggattgttaaaacttgcaggtctaaatatgggaccccaaccataagcattttgtgctcagctactggagtcatattcttgtcatggatgagctttcaagaaatattggaatttctcaacttcttatattccattggaatgttactcgagtttgcagccttcattaaactgagaatcgaaaagccagaccttcacagaccatacagagttccctttgaaacatttggtgcaacaatgctgtgcattcctcctgcaattttgcttgttcttgttatgtgtttggcttctgtgaaaacattctttgtaagttgtgcagtaatcattttaggggtcttcttgtaccccattttagttcttgtaaaggaaaagaatttgatgcaattcatttcagaacaacctgaacttactatgcctcctactgttagcctggaacaccaattggttgtgtcaaaacttcatcaagaagctgaagacgaggcctcgattagtcttctttcggattcatcagctaagacagagcaagaatcttcaaaaatatcgaatagggtgagaatgtaactgtagagaaacacttgtagtgatggctaacctcacaatttcacaggttcatattaacaaaataatctcaaaactatgtggatccattttccacttaagttggctagttgggatatgttttgaagcaaattcttttgtagaaatctaaactgtttcttgtaaaggctaaatagtaaaaaattgagaagaacacagcagacactagttagaaagaaaaataagaaagttttagcttaagaatcagcaaacaaagattatgatcaaccaataaaccaatttatctaaaaagttgtaaagaatcttgagaaataagcaacaagtgtttatggtttcttcatttgactccattattgaattcattttagatggttatcagaaaaagttcctaaaatttgaacttcaaggagctttcttgatattttattagttcaacttttgtgtacatggagaataaactatactttcactaattaattatgaagttttacattattaacttgaaggacttagttaaaaatatgcactttcaaactttttatttgcaaagtgagaatgttattgaaatcaaagaaaagctagcacaatggtgtgtagctccctaaagacaccgttaggaatacttacattttaaatttattaaatcggttattgaatgatatttttaaaatccaatcaaaaattgatatgatccaattattagaaaatatttttttatttgtatataataagataatatttaaattttatttttatttattgtttattaattaagaactctattacacttgattaaataaatccctatagaaactcttaagagctagcatataatttttttatatgtttttttgaaaaaatttatatctcatactgttttttttttcatttttttttaattttactgttatacagaaaaaaattatttttttactgtttttcatacttttttttactttggacaacaatccacattatttcttttcctcaataaatatatgtgtttatatatataaaatttgaaattttttgattgattgcttatgtcacttttgtgacaagttttttctttttttacttaaaataatttcgtacatatgaaaaatagactatagttttataatctttctaaaagaactaaatttccctattattagagcattaattaggttatttaattaaattttcactatgctttttaaatgcttaagtaaattacattaatattatcttactttccacttacaacttagatacatagaaaatatagtgtagttttccacaaatacacatatatatatatatatatttatattatgaccttagttagtgtaaaacaaattctttcgttactactttagttgacttgatcacatttgaagcttttttaaattgggggtgtaaaagacaactagatttaggtcacacacaataacatattcatcttactcactccaatagcattttacactctttgtgaccaccaacaacatttattcaacaatgtgatcacattcataagaaattaaaacatataaatttgatattttagtatttttcttaaacaaatatgtaatgatgatatgtcactttaacactcttttagataattttgttttttttaaagggaactctctaattctaattctaatcttttattttatcttcaatgtcccgttgattgaaaagtcttcccgatgtataagtacccaagttagaagacattgactaatccaaataaatatataaataaaaacagaacaaaagaattcactcttgtcttccttttcttctttttggtcatatttatatctaaagtggaaaaagaatagatgagcaaacaaacgttcccttaaaatgtcacgtttgaaacaccaaaagggtcacgtgtgtttcaatagaagaatgtttcacaagcattacttcttaatctctgtttggtttgtctaaattacggcataaaaacaaacaaacaggttgacaggaaaaggctttaatcgccagaaacatactattgccaatttggggaaaaaggatgtgcaaagtgaaaaaacaaacaaacacgaagactcttatttcggtgtcaattcacacccgtcttcaccttccctaggtatatctttctcactctaccttgctccatcgctaaattggtttctgggttttgatttatcatccaattacagtaatgggtttctcttattttctaatttcgtagtctctgctaatcgtatttggtgtttatctttcttgtttttacataattccttaattggagattgttgtaaagttatgatctttatacttgtgaattatatttggacaatatttttcagttttttatgtttgaatttttgtcatttaaaatcttagaatgatgaaagtgcgtttttgtgctaagtttgcagatgggttctaatttattttcattttaagaaactgggcaagtgttttctaatgcaattttgatcgctatacagatgggaacattttgggaaattagggttttgggtttcggattgacgatcctgtagattgtcatctgggttttgctgaagaatacaagatttgatttttgtgaataagggaggctaagatgtctctcaatcaaagttattctcgaattgacactttagggctgaaaggtatgattgtccagaagattgggcttcagagggctgagaaatactttgatcagcttagaagattgttcagttttaagatgagtaaatgtgagttcaataagttctgtattcggactattgggagggaaaatctccctcttcataaccagctcattcgatcaattgtgaagaacgcatgcttgtctaaaattccaccaacaaaaggtataaggaaagtggggagcacccttaatgttaaaattgcaaatggaagtcagaagaataatcttcaatctctctatggggatgcctttactccttctcctcgcaagggtaggtctccagtcagtcgagaccgtaagtttcgagatcggcctagtcctttgggcccttatggaaaacctcaaagcattacatgtgaggagttgatttccaaggcacaagagcagcagagtgctactgaattgctttctcttggtagcagacctccagttgaagttgtatctgtagaagatggggaagaagttgaacaggatgcaggaagctctggtgtacagagtagaagcccagttacagctccttttggtgtatcaatgaatctgggtggagctcgtaaaactttgtctaacttatcttactggccagagacctgtcaaaacagtggtgagctacctgatacaaaatcgctaagaagtcgtgtgaaacagaagttggagatggaaggactcagtatgtctgtggactgtgccaacctgttgaataatgggctcgatgcatatttgaaaagattgattgagccaagtatacgttttgctgcgtcaaggcgtgaaaatggtcgtatggaacagctaaatagtcggcatatagctggtgctaatggaacagtagtcccaggaagacagcaaagtcaactgtccttattagatttccatgcagcaatggagttaaatcccaaattaattggacaagattgggccttacagcttgagaagattagcttgcgtgcttccgaagagtgaacaaaagttacaaaacttgcatcttggccagaaagtcagcggttgtgcagaccagaagacatgatgattcagtaatttgaatcaattctttaacctcacatgagttttggtctctacatgttagaatgtcacatttattacaataggaaataagtagtgggttctgtgggaaagttttgagtaagttcattaggttgcatctagatatagaattgatatttgttatggagggggccatgtttatacaaccatttgtaactccttgatacatttaatgatcttactttttgaagagtttaacaccattcttgaattatatatatatatatatatatatttatataacttctttttgtatttctgttttcataatggtaaccaagtactaattcttcttgtgtatggtaatagtggttccggcaaagcatttgagaaagcatagaacactgtttatcttgatcaaggatcatatatcccaaaagattcttcacccagcttgtaaaactcaattttattctatatgatttattgtttatgtaacttactcaaggaatcatggaattattgtgtcccttaacaaattaatttatgctctccaagttgatctattagatgttgaatgcttataatgtagcatcctataccaattttaagctactgtgaatctttttctggaatgctgacttgttgactttgctttgcatctgcaattgaatctcattttttggaaattaacataaatgtctctatcactacaatagtttgataagtctcagtagttttaagtcttgatacacagtattcagctagtactaatattccaattgttcatgtacataaaatataccatttttagttttgtcatgttcattcatttgtacttctttctttttgttaaaaaagaaaaatgatcttattttattttatttccagaaatgtagtcacttgcgattacatttgaactattaagtgtcattttgttgcacttcccaatttatttagcagcatatgtttctttcttctaaagcatggctatgtaattaagattagatttagattaataaattaatatgtaaactttttcgttccgtacaataaagaagattattatcatatactatattgaaagaaaatacaaatgttagtttccaacaatactcacataaacaatgcctgtccaaattagcattggaaaaaacttgaaaatacaataaaaagaaactgatcaggaaaatgcttgaaaaattaataaataaataaacaatataaatgcttgtgaaagtactcttttaaaaggcttcaaacaattgaacccaatgctttacataaccctgttgggattagtctagtgtaaacaaaactaagctacaaatgattcattttaatcaattcttcaattgaagaggcatataggtcgctctctgattcacatcatcatccttactggttttgtagaagaagaaagagcaagcttccttcttttgagaatcaagttaaaagtatggacgcgagtggtctgtttggtcaatcagctgtaactgtggttacagttgctttctcgcggcccgccatgtatgtcatataaacagtccatagatacgaaaatgaattgctcactaatggctgtcaaaatgagaaaaaccaagtagtttattagtcaatagagagattgaaactaatgaacaggttttcactataatgcaaaataccctgaccagagatcataagatatatttggatttgagacttgaatttgcactacaagtactccagaaacagatttcattcataaaatttcatgagaactgaaactagaaaaataaattctataaggtttacctgaagatggacaggaatgaatctgaaagtgatgaaatcacacatgggccagtacataactccatttaacaatgtagggattaagtctctttttaaccgtgaaacaatctctgagccagtttcgcctgcactaggcaataatggcagctaacttagaaacataaccgactaacaaactttagattagtctcaatccttattcattaaaaactaatcaacaaaaagatgataattataaaattagaaatttcatttaatagtaatgtaaaagaagatcctgtgatcaggatctcaatcacgttaataaaatttccaactgaactaatattgaatgaaaacatcataaagttttccagggacacaaacaaacataacacaataataaccaaagaaacacttaccttgtaaacgagcattaagggagaagaaaatcacagtcatcgtaggtccatatattccctgtcccatagccattttcttcaatgtagataatagatcacgttttgggtaaagttttgacacaaagttgaaccaaaaatgcagtgaaggtcctaaaactagcagtccatatccagccatacgtaaagtcctcaagaagtcgtaagagtccaaagatttgttagctatagtctgttgaaaataagaaacaaaaactcttataagcataataaagatcaattaacttcaacgaccataagctgatcagcagctagcgaccaaagaaagctccctaatctttggaaggaatgagaaaataaaacccctaaaacattagcatccgtattcatctaggtgctaagacacaggtcccttctaaattatacaccaccaaatctacagaaccccatttactaaagcataaaacgattcaaacccaattattaaatcaaaatgttcaatcaataccataaagaaacgaacccttttgctctacaattaaataaacaactgacatgattagcctaatacaaacacatacaattgtattcatagtacctgagaagacaaatcagcagcgatgtaaataagcgaagaagtaacactttttgttagaatagggcgacatttaaccatgcccagataccaactgataatcccaacctccttggcagcggcagaggaagaagaagaagaagaagaggaagagaaagcggaggaaaatgaagaaggagagagttcaaactccttggctttctttaaaaagtgaggaaaacgaaggaaaggtctagaagattgttgggttgttgcgaaagtgagtgggggtgctcgtatggggtcgggcagaagaaagatatctgtgattgaatacttcttgaagagatggcgtgggattgtggcggcgttcctcattagagctccgctcattttgggcggaggggttttggggtttattagtttaggtgaaaatgaaaagtaggggctttttaatgtgacacacaaagttgcctatttatagttataccaatcaaatttggtatgcttctttttcatattcgcgcgaatgtaagttcatccctactcgctctattgcccattttttttttctttttaaaataataataataattaataaaaagaataaaattaaaataaatgtattttagattttttttaaaatatatgggatatttgtgctaaattacttaacatttataattgttacata

SEQ ID NO: 18572 - DNA, 5079 bp, Cannabis sativa
agaggcgaagccacataggatctgttctggtatttatttgtattttcttctcttcttgtaaaactgtaataataagtattacagagtgatctaatttaacagtaagattatgatatctgttttgagaaaatgtatttttgcataagccaataagtctctttaataactgtaaagaaaaatgcgactgtaaagatttgtaataacaaaataaaatcttgttacagcagaacacaaatttgtagaaataaatagtgcataattcaaaaacttgatacaagagaattatatgtggcataaatttctttcaaatactcctagttcacacggggccacgcccagagaatgaaatcatttagtaaagtatcaaatattacaaacgcaattgacttatataaatttagactccctttaatgatttgtcgcaatcttttataatctatcttgctaatttgctctctgaaccttatttacaagcttaatattataagtattatccatatttttgaatgggggacacgtggcctctcacagaggcccaatagataaagggcccatcacctagctcgagaagaccaatgagacaatctttgccttttgtaaaagtaaatatggatggcatgtcaggattgtgaatcttatgatgttcaagcttccttgatatgatatttacacccttatttcaaaggataatgagacttataagaatcctagactgaacgggaatgtcctcagaggtcattcaagaatggaagctgaaaaaatgcatgggacagtctatagtctcggaagttatttacgtgtcacgcttttgatacggtcccaagaaatttgagaatttgtcccctccaccaacctttataaaaggcccacgaaaaaaaggaaggaaaaagttgaggaatacttgctttttgtatctattaatcaaaaataccttcatattatatttcattcaaatgtacctacttttgtgagtaatttgtccaatatatcctcacccttcacttaagtctagcacataatttatataaatttgaagggtataataggaatatcatctataaaagtggatatattttaaaggatataaaattaaaggtaaaaattaaaacaagtaaagtaaaatgggtatgcaatcaaatttcctcaaaaaggaaatcacttgtttcccggtgcatccctattctgacattcatttttctaatgatagtgcacgatctcgcatgtcaccgtcaacagtacctacacttatatagcagattgtttttaggaattggacctcgcctactcggcccaatagcttaaaataatgcttaaacaatatattttacccttatgtacaaaaaccattgtaaagggttcatgacctagaaaaataccaagagctataaaaacgtccagggctggccttgagtaataatataggtccaataattttttttgtgtactatatctaaagtaaagtgtgggtattattgggcttctgttcacaaaaatttacaaaaataccatttgggccatggatttgggtgggccctaggcacgggcctagcccgccttagcctagggtcgagcctaaaaacatcattgctaaaaaatttataaaattgtctttaggactaagactcattaactgctgaatctcgtaaaatatgtatattattttctttcttattttattttttttagcttactctttcataataatagatttcttagaaactcggtaaacaaacaataacaacatcgctgtgaaaataaattaaaaccagtattacgataacgacatatattttaggtcaactaaaagattgaaataagaagttaggcatcctcttgaattaattcctttattagctgctcaactggcacaccacctaattgaccaatgtattaatatgtttaattgactacttaatatataagctctacaaaatctttatcaaaatctcctttgctcaattacaagatattattattctctttttttgggaaaaaaatgaggatttttctttatatgtaaagagaattttccatatgaatttaatttgtatgcatgcagctctggctagatgtgtttatatacatataaagaatatatacacacacatggtgaagggattctgcctctctctctattattattattattattattattattattaactagcctatagaaggttgaagaatcagatggtatatataattactatatcatgtttatatatatcctatatatataatatctttttgacaaaaataatatattaatgtgtatttatgcatccctaaaaaataccaatgaatattttataataacactaataattaacgtgataacaaattttcttatttagaagaattagcatactagctagggtttagcatctatatatgtttgaacaatttagtatcagaattttatattataataaattgcaccaaatcaacataatcttctaacaatagcaattataatcctcaatatctatgggattaattagagaatatattattctagttatagtattactcattttcaataatatatatataatgcatatgatctcttctcaacatcaaaatatgtttatattgttgtaataatatatatatagttttttcagaaacaagatgatgatgattatagtgatcatcatagcattgttgggtgttatgattagtggttacaaagccctaaaaccaccacctcccaaaatatgtggctcaccaaatggtccaccaattacttcaccaagagtcaaactcaatgatggaagacatttggcttatagagaagatggtgttcctaaacacaaagcaaaatacaaaatcattgttgttcatggctttgcttcttccaaagaacaaagaattcctgccccaaaagtactacctattataatctatatatatatttatattatttggtgtgtttatggtatagggtatattagtgcattttatttatgtttcttacatttagataatattagtttattttttttatatgatagtatacaacatagttatttaaaatattcaaataatatctactttgttttcgacttgtacatagttatataaaaaaaataagattaaaattatatatctagatatagaaaatatgaacgggtgaaccataattttttttttttctatatattatcaataaatatagatattattacttttgttattagttttattatgtgaatttttagtgtatgatattatgtattgttgttattaggatgttgtggaggagcttgggatatatttgttgcattttgacagagctggttatggagatagtgatccatatccaagtcgaagtgtaaagagtgaagcttttgatgttgaacaacttgctgacaagttgaatattggcaagaaattttatgtccttggatcctcacttggtggctatgtcatttggagttgcctcaaatacatacctcataggtacataaataatataatctttctttaattacattatcattattaattctcttgaaagattgttgcctataagtttattatttgcatagataggtcaggtttgtgcctatagttaggggtgtgcagaaagtcatccaatccaattatattagatcgatccaattttaatcgatctaaaattgaatatccaattataattagatcagatcgaatgcaaattttgaaattcaattatatcggcttggttgttggatggaatatccgatctaataaataaccgaacttaaccaatccaattatcatccaataataatcatccaattatatttatatattttcgatctgatgacccccttcctttcccacacatatgcacccctaaatacccactttattaatcagactttttagggttaatctaagaatgtttatgcattttaaggagattattgaaatttgtagtgctgagataacacaactaaccaacgatttcgcaaccgtatcaacacccttagagacaacatatagagtctaattaagtcacctcaagagccaattgcaacgcgcacagccaacacctcattctccatagcactatagctagggcaagccgaggactgagaaagaaagcgcaataccccacttcgaacaacaaactcacaacacagactcagaagagaaaggaaatcgaagagagagcgaaaaattaaactttttttgttttgttttgttttaatagtctaacctatttgattgggattaaaaattttatgtgcagattattaggagttgggcttgtagttccttttgtgaacttatggtggccatgtttgcctggaaatcttggtaaagagtcacttgagaagttgcctaaacaatatcaaattacatataagtttgctcgttatgctcctagctggatcttctattggtggatgactaataaatggttctctcacttaagagtaacacctcaactcaatacactagccttcactcaaaaggatttacaaattgaaaaaaagtgtcaacaagattattactatggtccggtaattacaattaatttattattatacatttcttctaaatacataattattatgcatgtgttacaattttagataagaagttactaattatttgcataattttcatcctttttttttagtacaaaagtgttttaaataggatatatatatatttatatatattgatctaaatcattgaggatatagacaaaaatatgtagtataataattagttacttctaaatcttttttcaacaaatttaaaaattaagtttgtatactgataaaataagacgaaaaaatactttttttttaggctaattagaatttttgtctccgaactttgacatatatcagatcatgcctccttaacttttaaggctgttaaaaatcctccctatttaggtaagaaaagtctaacatggatgaaagttcaaggagcatgatttggtacatgtcaaaattcgagagagagatgagttggtagatatcaaagttttggaaagcataatatatagtacatggacaatcacagttttagtacaattgaatgaaattaaacaaaaatctttaaatctaataa

SEQ ID NO: 18573 - DNA, 4584 bp, Cannabis sativa
ataaatgagtattaatttattttgtaacaattatattttataacttttgaatcctattatcaattttatgtaatatctcttttattatgtgatcaaccaaaagaagttacgaaatcaattaatcttgtaactccatgttacgtacaaagtgcaagttacaatttttaagtaaaatatatcatatattacataatttatttatcaaacacttaaaatatattattcacataataatatatattatcacattttaatctacatattatattattaaataatataaccaatactacaaaaactaaacacatatataaataccttttcttttgtttagaaaactaaagaaacaaaaaataaaaaagaacaacaaccccacattaatgaacaaataaacaacattattaggttgcctcaacatagaaaaaacataaaaacaacacaaataaaacctaaaaaatgtttacaaatcaactaaacataaacccaatacatcaattcattacaaatatgatgtcaaatagataactaactaaaataatagactgaatttgggttggttgggatgtgggtatggcccattggccaagctaactgattcagcctcctcaattaaccatcgaagagccgactattattagtgagtactttttttttttataaagaattaggatatttgctagagaatattgctaatttattgtccaatttaatttattaaggcatctctaattcatattcattgtatggctaatatcacttgtccttgctcacactacacccaaatttaaccctccaacatacccctttcacaataagatcaggaccccacaaaatactcctccaaatggaggagcagtaaccaccactttggcctccaagaaagaatagttgataaagtaacacttttttaagacccaggcaagcattgattgaggatgggacaagattttctacctttgtttaataaggagagcttgattaaacttagagaggccctgaaaccccatcccgccagccattttgggtttgcacaaatgctctcaattccccaatgaatctttttttttgcggtcaaggagtcccattaaaattgagccatcatggagtgaatatcttgaatcgtttctttaggaactcgaaaaactcataatgtagcaagggatggcttgaatcacattcttaagaagcacctcgcgctccacttgagagaagaggctcaccttccaaccacggagcttgttttgaacttactccggatcatctcaaacacttccttttacctttttccttctcccaacatatacgacatctccaaatatttagtgtgacaatcaatcaattttgtaggaaattaagcatgcccaaaatgcccctacaccaacaccccaaagtacaaaaaaccaaggtcaaacttgacctttccctcttgtgcggatcaagagtgtctttccccaaaacacaactgttttgcaggctttaaaagcctcttattttcgactgaaaccctagtagccaacaaaacctcttctcctttgaaaaccctagctagcagccactccctctcttcttctcttcttcttgctgaaaaccttgcagctgaaccctagcctccttcaactctccaaacagcagcttagtcccccatttctccttccttcttcctctttgttggcttcctcttccagctttgtaagagctcttcaaaacccgaaaccactgctgcaattttcttcctcctacaacccttctatggccgaccttgcacacacaaataagcaacccgaaaccacagaaaaaaaaactaaagaaaaattaatcagcagaaaaataaaaatgaagaacacaagaattgatttcggagttccctctatatcagaggtacgtctcagtcaagcgaccctcgaatagttgcttgaatctccactatcaatgtcaaaatcgagttacaaggttatggagattccatgccacaaaccagcaggtaattcttatttttttgtttggttacaatgtatgtttttaactctctctatatttttctctcttgaaactgaggttattcctccataaaatgactgctgtcattttctgtactgggttggaaaaattcactttaaaaaatatggataggttgctctctcttttatattgttgctgttgtgttgagctgagaaaaaaatagttgagaaacagttataacaaactgttatttgtttttccttgagttgttgaaagtttgttggagtcttgaatattgttatttattttcttgtattgtagagagctaaaagatttaagcctatgaaacagaaccgactactccaagagttataatagtctgttgaagcttgtaaaaaatcttactttatttttcttgtaacttgtttaaggtattttcttatgggacagttaatatggagatttatccaacaaatttaatatccaattaaagaagcaagtcattgctcatctgttagaacttgtcttactaggatctagatttactaacatgtatgttgattataattctataaactaacatcttaaatatgaatttttcaaaataataaaataaacacataaaaaattaaaaaatctttccatattgatgatcattattggtcccctctatccatctctacctagctatacctttcaaattttcactagttaacacagtaataagaatttataaataatatatataagataatattttattaattgatcatcattgctgatcctgacatatatctctagcttatatcaatttggtgaaacttttttggttgagaacactttggtggcagttggtaccacaaaatgacagatgtgcccccaaggaggatatcagttgctaacagaaccccccacatgaaagtgacaaatcaaacaacgtagcaaaagcaagaatctccacagaacatgatttttttgtcttttctctgcacaaactaatatgtactacaaaacatttatatatttatatatatatatatatatatatagaacacacagccgacaatgtgagaatctaatgctttcatgtcatgtaattattcattatacataaaccctctactgtatattgtatagctatatagcttaggtcatcaatatttatatatactctacaatatacagtattccacaagcccatatatatctatagtatagatcgatcacctactcattttatactataaatataatgcttttctttattctatttctccttaacatcgtgtgaaaggttgcatggctttagggctccgtttagctcacacctctttctctctctctctttcaatatatatataaatctttttctttattatttctctctgtcatggtctcattaataaaaagtgaataaaacccatgtgatatattgagctcggaacgtggcaaagacacatttatatgtgtgattgatcatgatgatgatgatcatcatcaacaagagagaatcacataaatgtgggaacttgtggggtaacaccttgaatccaaatatattattatatatatatgtatatttttatattttgagtaactttaatatataagagagatcgagttagcatatgcgattggtaaaatggacacttgtatatatatatatatatatatataaattttactcctttttcttttgtgaatcagtacacataaaaaagattgacgatatacaattagtcgttgatgattttttggtcgaaaattgtgagctgaatggctccatttatatagttaataattaaagacgaaaaggtctttcggcaaaggaacttaatatgtgtctttctctttctctttctctttctctctcaatgctattggtgtcttacaactcaaactcaactatattcatacacatgaattaataataatctcgaggtgtaaaaaacattacaaacctcaactgtcaataaagattatgtaaagataattcatgaatatatatatatatatgtttatactctcataactgtataagttccattaagttttcttttgtatgaatattcattatttatataataataaagaaaagaaaagttaagctctccttgttatgttttatatcacatgctaaaatatagggaataatgtatagatctgtaatgatatttttttgtttagatatgtgcgtaaatataatagataatctatatatatattgtataatatatgtatgtagagatgagagagagagagagcagtcaaagattttgtgtgtagcaatcattaaagtggtaagtatgtctttagccatatgaaaatgatattttaagaaaaggaagggttaagggaccaccaaatagagattggaaaagaattggtaaaaaggaaaagtgatagttgggatggatgagaattaatattggagtaaaaatactaaagaagtaccaaaaaagaaaagtagcaaaagtagagtgtgacggtgtgccaggtagattattattacatttaattctttcagatgatgctgctggatccctccctcttctcttctatttaattctgataaaagacttcttttacctttggcatctcccttcctttctctctctctctctc

SEQ ID NO: 18574 - DNA, 4036 bp, Cannabis sativa
  modified_base (1710)..(1716): a, c, t, g, unknown or other
acaccttaaaaatataaacggaactgtactttagagggttttcccaccaaaatatgaggttggatggttttttgcaagtaaattgatagttgggggggttttgccgcaaattactcatattctaaatttctatttcctatattttctttttcggaacatgatatccacagtaagagaaactgtcttttttggcaagattttaaggagttagtactcgttatggtgagttataaaaaaggtaaaagtattttgaaccctatattttgtaaaagttattaattaaacattttattttgttaaataataaaatagaccttaatattttctaaaagagtaatttgcggcataaatacctaagtcgtatttttagctgtaaaaataccgtctgtcactagtgtggaacttccgtaggtacctgatcgttaagtgccatgttagaattcacgtgtcactcgttcattggtccatgtcattaatttttattattatctaaataattatttaaatgtttaaaaattataaaaatttaataaaaaactaaatataattattttttattttttaacatttatttattttccattgttttttctttgaattaaaaaataaactcaaattgagaaattgaaaccagttaaacaaactaaattcagatttttaacaagatcaaaaattaattatttttttgaattattatcctaaaaaaatccaaattcttcaacaaaatattcataaactatacaaaatttgtttaacacatacactaaacctaagcaaacccagaatttgacaagaacaaaatttcatattagaatcccaaatcaaaagtaaatattacaaacaaaatacaaattaaacaatcagacctaagccaaaacttagattttgaaacccttaaatgagtagattaaatgtcgattaactccatgctcaagccaaaaccccatatctatcaacataaataaaaactcaaacccaaaaataaaagcacaaaccacaaactctgatgagggatttgtggtcttcctacgatttgggaccaaggagagacataaagaagatgaaagtaggcctctggttcgcaggttgtcgagaagagaggaaaaggaggatgcactgtggtgaaatagggctgctctaatggtgaggaggaagaaggcgtcgatgagcagtcttcgcaagccgacgccgatgagggagaagaacaatgaccccatggttcccggaagacgataagggatgaatttgaccccttgaatcgcataagagagaagaacattgaatcggttctcattcgcataagtgaagggagagagaacatgattttaggggttagggattttatattctcagcttttttaggttttgaattaaattttgaatttaatttaattttgtgttaatgataaaaaaaatttgattatatttaatttttttattttttatatttttaaaatcatttttgaacatttaaataataaataaaaaaaattaatgacattgaccaataaacgagtgacacgtggatcctgaccttgcacttaatgactaggtacttacggaagtttcacactagtgacgaaaggtatttttaccaccaaaaatacgacttaggtacttatctgctactcggcataaaccttacgtatttatgacgcaaattactctttctaaaatggtaaaaataggatcctgagctcaatttttaannnnnnnattttttaatataaccaacttttagataatttctaacacgaacatatatagaaaatataaccagtttagatcaaattattattcagttttattttgacaaaaaatcagttcaggatcctatttgtacaattttaaaaaatacaaggtctattttgtcatttaacaaaacaacgggtccaattaataacttttacaaaacacaggatccaaaataatatttaccctataaacgaatatacatattatacttttttgtttactaagaaatgttcatcattaattttcttatgtatttatattaatatatatatattttcattattactagacatgctatctgaattgtgaagaagagagaagcaaatatatacaaatattgatgtgtatatgaatgtgagcaataaataaataaaccccctaaagaaagttatcaatcattgatatttgctttctaagtttgaagctgaattttatttgacttaagagtgttttattgtactgtaggcagcagcaacactagaaggcaaagagacaatgacagactatgttcttaaggtgaaaactgtaaaaaaataaaaaggtcttaacttagtgttacttatatataaaattgaaattagactatttctgtgaaattactcaagtaattaagaccatatgaattacagattcttattttggaagtatgtgctgatataatagtaggggatgaaatactaaggggtatttctggaggacagtcaagtgtgttacaactggtttggacagtttcattacgtatcaaattgtgaatttactcaagcaatatgttcatatctttagtggaacttgtcaactctttacttatgtatatactaacagcaatcaataaacacagatactaaattgattcaagaaaaataggataaatttgttcctcaaattttttgggtcttcatcgtataataagataatcttgctactcatacagacatgaacaaacaagaaacaagaaaaaaaaacaagaccaaaaaaaaattggggttagaaattacatagtagctgctaagatagagaaggagaggaagaagattgaggttagtggaactgacagatgagagagaatataatatttaattacttttttaaaaaatatttatttattaaataatatagcaaatgctaactattagtatacacaaacttatttataaccatttggtctgatagaagacgactggggactcatatgcagggccggctgtagctatagacgggctaggtgtgtatttaggactcacatttttcgagacccaaaataaaaaaaaaaaaattatcaagcttttatttaagttaaattaagtgtatagtaaacaataaatattcatagcttagttggttaaggtgtatgacatattaaagcatcttcaatggtaaaaaaaaaagaggatatttgtttagatggatagatgatgtaacaaaatgttaaaatgttatactattagagtgaaaaaaatgttattataagaatttgtgccaatgctatacatagcatcaatgctatcataattttttaataaaaaattaaaactaaaaatgtattgttgctaaaaattaaaaacatatacaatttttaataataataaaaaaaaattacatatataataatgttgttaggtttacaacttgttatatataatagtaaagtattataaaaatatttggtacggtttgaagaaaatgaatatataagattttaattaaggggaattatgaagtccctcacttcattttgaggtgtgtaagtgtaacaccactaataagacaaatacctttttagtgtaataaaagtggcctggctccctatagccggtttttataacctgattgtacaaatttgcatgacaggaaaataatttttaattgagttttctatatttatctaataaaatatatttttgaggggtattaaagtaaatatttctttttggtgagatatattttcactaaagtgatatgttttgagatcgataaatgatgtattttaaaattttggcatttttataagaatatgtttccctattaattaatgtatatggtttttgatgattagtaccaaaataataccattaaataggattaaaatgttttccaattaaatacataaatatacttataatatgtttcactttacatgttaaaatattattttgttagagtatttatcccaaggagcacattaaatttaatgtcacactatcatcaaatttgatattaaaaattattttcactctaatcacaacactaaaaattacactaaaaaaatattctttattattat

SEQ ID NO: 18575 - DNA, 3254 bp, Cannabis sativa
gcaaatagatggacatactgactttagaggttaagtgagtttaatcccaacactatatttcaattattttttttaaagaaaaaaactatattaattatcttagtaacatgaaaagagacactccctaagaaatagaaagttttatggggataaaagcaacaagattacactacttgctatattagtctggtattaatatacatatataaaatcaagacacaagacatctattattgtgaagagatcatcacacactatcatgcatctctttcgaaatttggtaaatgactacacaattttggtcacacaaacaacttttaattttcttttccttttcacgtctttttctttttctttttaaagtacatttgtttgtttgatttgtttgtcattttcttttttatttctagattggttgacaaaatttcattatgacatagtatatattctttttagatcttattttcatctatttgggtatacatttttttgttggttttctattttttgtcttatctgccaaaggtacaattatatatgcatagacatatttatattttttcataagtacttataaaagaaaacaaaatatatagatttataaagttatacttagaatgaaagttgtaataataattgatgtcttagttaagttagtagaaaatgaatattgtcttcacttagtttatggagttttgtggttttagttgtgtatgaacacttatttttcttgtaaagcatgttggttttagttgtgtggaatttattttatttctttctgtgtgtatgtctgagcttttcatactctactatttattcttttttcttctcatgatgatatatacttaaagaatgatgcacatttattatttatggaggactgaacttcccatatctctgttagttttactggttcttaggactatcagattggattattatggacaattacctttgtctagattagagttcttaactttaattaaaaaacatcagtatatacaatctaaagtaagtaaccaattattagttttatatataatactttatttttaatttgctgaatatgaaccacacaaattattttattcacaagttaattaagttttatttattaatttgttaatatttacagggaacatgtacacaattgtccctctttggtgatagtatagaaaagttcaaagactctttcatcatagacaaaagctattatatatcaaatgctcatgtaaagaagttggagcttaaatttaaaatggtagaaagcaaatatgaatggatacttaatagaagaacagtggtcgaagaagttaaacaagaagataaggatgtattttctccccccgttgctttctcatttatccctttcagtggcttacaacaatatatagaatctcatggtcaagttggtaagaatttcttataactaaattaaacatcaaaatatacactatataactaaatattgtttaaatttatattaattagaccattttcatcaaaaccctcaaaatctaattggaaccgaaatatatatagaaacaaaataaagaaaaaatacctagagttttaagttttttcacaacgatggcttcagatgcgccagtaacttgattaggccttcctagttcaaagcttaaactcaatctctctttgcttcagaaatgaacagtcgagaaagaataagttaatgagatggaaaatgaaagaaactaagacttctttcttgcaattctatttatagaaaaacatatatcctcttgactgtatggaatgattaccttgacgatgagtgtgctacaattgcaaatgtcatttctaccaaacctattatagtagccaaacatctgaaagttacaacttatcaaagtatgttagaagtatctatatatatattacaaaatgtataaacatattcaatctttacctattttataatattaaatttctattgtccattatataaaaatcatgtgatcttatttgtacagagattttattagctacaaatccaaaaatttctcttcttattcaacctaaattgcctgaggttaatgctatgaaattattaaaatgcggtaacataatcattcagctatttctcttttcacttttactattatttatgataagttctaacttttttaaaatttataaattaaatgtatattttattacagggcgttgacaataattatacttctaaacttctccagagaggaaaaaatatgtcatcttctctcacaactcagccacctccaaatgaagaaatagaacatattaatgtcatacaaaatgcacaagaagaggtaaacttaataaatgttatgttaaatttttatagtaatacatattagtaaacatatgagactaatatattaattattactttattatatatcaaaacaaatattattggatcaaaggtaccatttcaatagataattttgatcaaaaattttggtacatggcatgtgaaaagtgcaaaagatctactggtgtcggctttgatacttattttaaatgtgatgattgttgcaaaaagaaaacaatgtgaaagttgaagaggaaaaagtcaaaacagtggcaaggtattcaaatttcatttaatttttttttttctcccttaaaaaacaaatcaatcactttttaatatataacatgaaataaaaaatacagatgtttcattcaaatctacatacgtgactcaactggaacgttacctgcaacatatttggagaacttgcagaaagtttcatacactgcagtgcaaaaaaactgatggaagaaactactgaggtattaataattacttattttatcatctttatatagttttttcatcattataattaataacattaaaattatgatatttctaatctatttatatttgatataagggtgaaatcttgaaagctgaaaatcttatcaatatatccactacaaaaaaagtatattatccatatgaagacaaccaagtatgagttctgtcaggaaattaaggacaaatacattgtggaacaactacttaatgatatttaagtagttttctcaacacaagaacgactatcatgtatcccttttttaaataagttgcttctttataaaatacttttgtaatatatatattaaagcaactaacaacttattttgtggtaagggaaaaaggaaaaagtagtttttttcattttgtatctaagagaaatagggacagtagttgttaccaacttggtttttttttttttttt

SEQ ID NO: 18576 - DNA, 3867 bp, Cannabis sativa
aatcttgagaaaataatgataacaacaattaagttacaattttcttttctttttatcaaaataccccaaactcagatattcattttagttttcttctatcattttttccagtttataacattactttaattctaatgcaatgattttccaaatctagttatgattacacattagattgagacataacacctcactacttcactaatttagattgagacataaccacattctatgagtgtattactctataaactcctaaacttgttgtcacaaaacacactaaaattatcaaattaaaagatcatcaatgacttcaacatttcaacatacaaatcatagaaataaggataggttaaggccccatttattgatatagctaaggtctaaacattggatgatgaaagaagaaaaaacaaactaaaaagaagccttaaaaaaagagatgagctgaaccgagcatgagtaaagatcagcggcgcttcttccctgttgtagcttcccaatcctgtaaaatgtggttcactatttcctctatgccaactccatgctttacctatgtcaacacatgtagatatgtaaaagaacattgttactagtacaaaacaccacaactaatacaaacatgaaaaccaattataaatttaacatgacaagactaatttgtagtattgtgtagtactaggcaccatggctgtaggcagagcagacccgaacttaaggccccgaattttcctttttttcttaataaaagaaaaacagacaatatttgcattggtggtcctataattttactttagcttacttaaagcctccaatttctcagggtcaccaagcgagttagacaccacaggtgcccttcaatattttctatatgtttgaatcatatgtttatgtagattactctttgtgcaattccaacaacaagaactaaattctactcatagagaatactgaacaaaatgctgttgaaccaattaagttgttaccaaccaacctgagcaaaaacaaaaggcccgccatctcgcatacgaagtgcatccctcttcatgacttctaaatcagctccaactgcagctgcaaggtcggtcttgttgatcacctacagaaatatttacatcaaattgtatgcatccaagatatcatcaccagcaacagcaggctacggaaaaagcaaagaacaaaccagaagatcagcttgagtgatgccaggaccgccttttcgaggaattttatcaccaccagatacatctattatgtagatgatatagtcagctagctctctgctgaagttagctgctaagttatctgcaaaccaaacaaatttaagagattgtcattttaacaaacataaaagaaggaataagttgatcatttatcaacaataattagaagtaaaacatattggatgcaaacttgtaactttttcctttttccttgttttcacaacattctctcttaccctacattccaaacatgacctaactgcaaaacttcatcactaatactaacttttcctttcggttatgttagcaaagtgtcaacattataaaaactgctcaaataactcgtatgagagctgctaaaactgttatgttggtttgaaaaatacctccaccggattcacaaagaagaatgtctgccttgaacaaattcgaaagctcctcaaggggaccgagattaatacttatgtcttcgcgaatagcagcatgtggacagcctcctgtttcaacagctcttattctctcttcagggagtgctccatgcttcaccaagaactcaccatcctcttttgtgaatatgtcatttgtcacctgagcttattataattaatccttaaactaactactaaacttcatgttttatgttgcattattatgaacatatttcacagaagaatatgcaaccaaaataaatggtttaattaatggtcccccaaaatggaccccagagagaaagaccctttgtgaatacaaagactttgaaccattttatgcctttcaaaagtgctatgacatcataaaaatctagaatcagagtcaaaaactataaggagtgattttggaaatgtcacttactgcagcaagactatacttgtctcttagaaattgacagagagccaacattagagctgttttcctacataataataataaaatggaaagaaaaatgtcattagaaaccattaaatatattttcttcttctttttcttttaattaggctcctccccacctaattttaatatatttgtggaccaaagtaactatagcaattactaggtacaatatatactatatagctatttaatagttttcaatgcattcactcatagaaggtacaaggttcaaattatcatatatattaatttttaatcccattatacaaaattaaaagtttttcctttttaaattcaagtgttcctaaaaaatgacataccaaaaaatacttaaaccctttagaagagtcaatcatatctaaacaaagtcaaagctaagaatgcttcaaaagaaagtcatcatgaaaagaattatacataaaaagaaaaagataaaaaaaagagggaacatagtgatatacccagtcccaactggtccgccaataccaatagtgaaagctctttcattgaaatccctagtgtgaagtggaggagctcttttggtgaagaatccaggtgagtaaatgggttcatgtgagtgtggtgctagtccatcgtggctatggtagacctttccgtcgggtcctacccatgacccacttcccgaatctccatgaccatgttcatggtgatggtgatcatgggaatgagggtgatcatgggaatgagggtgatcgtgagaagccattaattttttcttttttttttttaaattattatactcacaaactgaaggaattaaagaagagagtttattataggtagcataagagagccactgagagtcaatgcgtctgtttaaggaaagcaaagtagtacagtgtgaagataacatcagtaaaattacagaaataccctttccaaacgacaccatgtgacctgcgttttgacgcattgaacaactcgttttaggccaattactcttaccgtacgtgtttgttcatcaatttgcggcattcgcatttggtaaatttgcaaggtaataaaaaagcgaatctattttattttttattttttttaaataaataaataattaaataaggaaaatcatcacttggcttccccacttcaaaatttaaggtggcgtccagttagagttaataaaatagaatgaaaaataaataaatttaattctatttttttgttgttgcattttaaagtattgaaatgtgctctttttactattttagtggaatgattattccattttaaaatgaaaaaaaaaaaactattccaatgtaacatgagaaaaaatttaataatttttctatcaatttttttatgtattttaaattttattctattcttatttccatatttttattccttctaaccaaacatcacctaatataaaaatagaataatacaattttagtcccttataattctggtaaataagtctacattacatttttctaaaaagggtgttttcgtagatttttatctattttgctatatagaataattttcatgatgatcgtgtatgttataattatttaaaaccacttgtaaatttaaaaaaaaaaattaattaatttacaatgttaaaaaaaattacataaaaaaattatattaaattattttttttaataaaaaaatcatatttgactaaaattataattaaggaatattttttcactattttaataattaaaagatcctttttaggaattctcaagtctcaagtccgtgttgattgtcttttttcttcggc

SEQ ID NO: 18577 - DNA, 4384 bp, Cannabis sativa
aaaaaaaaaaaaaaaaactggtattaccggtggagagagaaagagagaaagactgagtggtggtgacagtgaaatagaccacaccacaccatagcccacaacgcctacctccacgccaaaccaaccaaactaaattcttctaaacttagcaaaccccattcttaaccatccattttctgcgtatgccacccacacccagatacagattctccactaaactaaaaaaaccacctttctctctctctaactcagatccgtttctgctttcttacagctcatatatatatattcatcttcttcttccttttccattcataacccattattactctaatattatttcttttgctatattacttttattgtcattgcttcctctgctctgctcttcttcagagaccgatacactaggtgggttttgttttggattttagctctttatgctcttgtttcgtttggaaatgtgtgaacttgttgttttttctgtgatgggttttctgtttttcattgttttcatcgacctttttcttctttggtggatggggggttagataaattttgttgatttttcatttgggtttttagagtatttgatctgtttcatatgcttgttattactgcctttcttgtttcttggattattttcttttcttctcttcatggatgttttgtgtgtatggtaaaatttgtaattagtagatacactttgtccattgaagactacatgtgttatatatacatgtatacgcacacacccgactgttctgaataatttgagaaatcttgagaatcactagatagaagtcggattttgatatttccaatttgtaaactcttctaattaactgggttagtttttgatccaactttttcttgatgaaggcctgatataatgcatattgaagtaaatttggaagcctgaatttgcatatacaatctttccatgaagtagttatgaatctctgaaaggtgttaatccagctactgtaatgacttatgagttgaattctgtttatgttttctgttagatttacttctttgcatttcttatgtttttcattgacttatttgttcaagttcctactgttttgccttagtttttcttttcttcttcttcttcttcttcttaatgaccttcccaaatcgtgtaatgattcacatccacagtaggttgtgtgtatacatctaatagttgtttagttttatctagcaaaatgtgcatccctaattttcttcatttagaactgaatagtgttggtattttgttactgcaggctgtaattgtgcaaggggaaatcatgatcaaaccagagggagaactcaaagtgagctttggctatcagtgctatggtaacagaggcagccctaatgagctatccggtggatatgaattcgtgcctggaggaatccaaaggactggcagtttctcatgcttgtctggtgctgctataagtgctaatgctactcttgctaatacaaatatctgtaatggcttaataggggaagaaatacttcctagtttggactctcctaattcattccggaaggtttcctcctccccaagtctttcaaggttggatatgttatcatcttccctcccaaatagtatgtcgaacttaagttgtagcccgtccactccaaccgaactgcatgactatgattctaatccatttagctctatgagtgctccatctagaaatgagggctttcttaatcctatggaagtacaggtggctggaggagctgctggtgaagatcgggttcaagccgtttgttctgaagaaaatggatggctcttctgtgccatttatgatggttttaatggaagagatgcagctgatttccttgctgggacattgtatgatactattatatttcactttagctcattagactgggtacaaaatcaaaaatttattgaagcttcagattgtccagacttggatggttcttctcattatgttccaggtgatagtaactttgtaaacaaggattcgcgcagtgatatttctaaaagtaggacataccctgaacttcaaaagtcacctgagtcatttaggcaagaagtgcttgatagtcttcaacgcgctcttaatcaagctgagtctgacttcctctatatggttgagcaggaaatggaggatcgtccagatttggtttctattgggtcctgtgttctgattgtgtttcttcatggagaagatttatacacattaaatttaggtgatagcagagctgtattggcgacagactgcaaggatgatgacttgaatgggagtatgaaactgaaagctatccagcttaccgagagtcatacagttgatgaagaggatgaacgaaatcgagttttgtgtgagcatcctgatgatcctatgaccatagtaggtggtaaagtaaaagggaaattgaaggttacccgtgcatttggagttggttacttgaaaaaggttggcattgttttgtgttttaagctattatgtgctatgcacagatcatttcattatatgataaaaatgaaaataaaattgttttggtgagaaagcagaccttttaaatgctcatattggtttgctgaagtttaacatgatttgccatgctcagagtgctccatagtttccttttcattgtaaatatatactattatcttgaattggaactgactttctttttctttccttgcacagaaaattctgaatgatgcactgatgggaattcttcgagttcaaaaccttatgagccccccatatgtctccactcaaccatcgttgaatgtgcataggatttcaaaatctgaccaatttgttataattggtagcgacgggttgtttgacttctttagcaatgatgaggcagtagagctcgtgaggtactatatcgccagaaacccttacggtgaccctgctaagtttctagtggagcagcttgtaattaaagcagcaaaccgtgcaggtaaagtttccatatttgatcaataatatccataacttttggctttaaagttatgagtcggggaaagattgaaataaaccaattttcacaagagtccaccttaagccatctttaaagtctctaccactgccctcaaatatgattgtgttgactactaattcttccactatatatgctttggtttctaattcttgtttctatgatgaactttttcaatttagagaatctttgaagaatttagtcttctgggaagaaaataatttgtacagaaagacaatcctttaggtctaagagtgtgattgttttcgatgcaggcttcagtatggaagaattgatggatattccagcaggtaggaggaggaaatatcatgatgatgtaactgttatggtgatcaaccttggatcaaaccaacgcactacaaaggcatcaacctgcatatgattttttatttttatatatatatatatattttttcccttttctgaattagaatttgtagtttcaggttttgtacatgctgtaattttcaggtttagtacatttccttttcttactttcattccagttttcgtttttatagttttcaaattgtatataaagaatgcaatgaacaattgcttttggtattttgatgactttatcataaacccatttattattattccataattcaatgatttatctccaaattatgctcttaattggtataccaaagattatgctactttttttcttactagattagtagttcaacatagctttggttgttaaaaggccttttctttttctttctttaattgataccatcccaacttggttctcataaattcagccttttggcttatcaccagcctcaaaagcatctgaaagcccactataattgtaacatgcttaaactttttctgctccctagttgattcattatttcgagaattttggtccacaagccaaatggtactatatgcctaattcaaatatatgattaggtggttcatctatctaataatcatatactgaccaaacattaggaaactaagataatgctaatgatattgttgcattatcataaaaagtgatattggaaagcttaaaaaacaaatttagacattggaaggaagatttttggtttcattaacaataatatcatggaaagaaaaatatgtgacttttgttataggcaccaagtcaagtggcccctagcttgaaattttgtgtgccaatatgagtggccttaatcaaagaccagcatggcaaaagatcactttgtattttatagattttagcaaaaatcacataattttgattatgaaggccccacaacaagtcacaaacaaacaatactcatttaagctatgttggtgtatcttaggttcaaacctaccaatcagacctttctctttagagtgatgatgtcctctgttaaatctccatccc

SEQ ID NO: 18578 - DNA, 3330 bp, Cannabis sativa
ataatgacttgacatatttaatggccaagtacctaaaaatataatttaaatattattatattgtcaaaaattaaatttaattatttatttaaaattagaagttaaacttaattatattatttatgtctcaaatttatgtatatgcaatatttatctttctgaaaataggcctgaatctacatgtctccatctaaagtcaggattttagagacaaaaaagaataggaaaagttatgatttttcttatgaatttttatgggaagttgtagaaattataattaaaaagaaagaaaatgaaaaggcccttcttctggtccattgtgataatatcattctgaatgattacactggcggcgctcagaagttgttcctcctccaactttgtttttgttgtgtttttatacatttattatatattttgaaattaacgttttacttaattggatgtgatttcccatatcccatatgtgttgccatttttcgatggggaattagggtttgaaaaccaaggatttatgggggtcacatggacttgtctcacataggtttttcttctttaattatagggttttttaagagatatgggttataaatatagctatatatatagctaggttgagtcagaaaaagatgtagtgatattatatattagcccaaggctgtcttcctccactcacttactcactacttaagtctgtacagagaacatattagaacatagatatatagcttttgtccctccaaatcatcatcatattctttatttaattttatttttattttaaaataatatttaatttaatttaatcaattggacttaattaattatattaatttatcgataatatacgtcgaataaaccaatttgtagctaccacacttgtacttctactgctttaaaccaatattattattgagtattgattaattaataatttagctatatatagctttgatcgaacctgaactcatgaatacataaaatactgcgtccaaatgataatgaactaatcatatatacatatgcacacacaaatatttcctcaaagaatgtatatgtatatatatacctacatagacctgtataatactttgtatgaaaactgttaaaattaattttagtaaaaaaattttgtgtatatgtatacacacacttcatatgcatatattaattattattactacccctatgggtgtgtctatgaaacctttacttatataaaagtattgttggattttttttcttctctataagaacataattcgcaaatattgcaagtacaaaatcttttgatttgaaacgtaatttttattgtttttttttaaaaaaaaaaattatattttgcatcattacttattgacaatattaccttaacaaactttgttgtatttaaatttatcataaaaggatattagtacgtaccttaaccaacattcttttcgaagtagtttttttttgccaaattaaaagaataaatagtataaatgctactttattatttcgtttataggaaaaaaatgattatatgatcatgtactaaaaaaattatgagagcaaactgctgatcactttcctataactaataataaaaaatttgaacataacgagtggaattaattaattataagaataaaaaagaaggaaaaattaatatatgagtttgatttttaagagaattaataaagtaatgatttcccttttttaaaattgtgctttttgacaggttattatgagacaatttccccctacacctaatatagaccgactgatcatttttgttgcagagcaagatgttggtcgtgtatcgcaatataataataattatttcttttccaaagaaaacgaattaaaaatatttatttatatatatatcatatcaaacattctttcataacaagtctaattcgaataaaattaatttaatttaattaattaattacagccctccgtttgtatatctgaaacaagtggctatggtgtttttgagggtcacttcagcagaagatgaagaaaaaagaaaagtgtgtatgggatgggaagatgagtagcggttggggacgatggtgagagacttctctacttgagaagagtgtagacgccctaccagaaaaataatctaagaggtgacaaaccaagattttaacgacaatgcacgattttctgtcagaccacaatattttcagatcagataatttccaaattaatatataaatatattatatttttatgtacttaactaattcccaacaaattagaggttgtagtttacattagacgaatctattattttttttaaaaaaaaaaaaaaaaaaattggagtgttaattataattttttaattaatttttatatttaaaattatttattgaaatattttattttttttaaaaaaaaattgtaataatatttattataattacaatattatttctataaaattttaaaagaatttaaataatttatttataatattaaaaaataaaattcttcacattttaatttataacacaaaattaattaaaagattttaataaaaaacaaaaaggatatggagacttcattcctcccgaaccaagcattgtaattggttaattttttgtatattaacttaaaaaataaaacatgtgtttaaaatttcccaacataaataatttctcttaaatctaattaaaaaaaattaaatactaaaagttactatgatatctaagcatacccaagatattatatgctattagtttaaaaatcactaatcatttacgaaggcggctctcatgttgatcatagctactcataacaattttctaagtataaaatatatagtgataaattttagagaaaaaaaataaagatgaccacaaataagacaatttaattttacaaagtaaattaattagggaagaataacgtaaatatcctttggacaaaatcattagaagaaaccctaattaaccggcagatagagtttttttattttatttcctaccaaaaaaaaaagaaaagaaaaagaaataattaatgtaaaattaagaaggggtagtattattaatccaaaaatgtggagacaaggctagaagtctatagtaaggtacctatattaacatcacgaaatactctgttcctactgtcatcaccaaagcgtggcattatcactatgcatctcgagtctttctctatctattatttctcttaattgaatagagaaatggtaaaggttatggtgtaacatttttgtaagttgataatatcatttattttattttaataaatattatagtatattattaattaattataaggtgacactttattgtaatgctaagtattataaga

SEQ ID NO: 18579 - DNA, 3831 bp, Cannabis sativa
agagaaactctcttcagaaaccgccttagatagtgactagaaaagtaatcagagagagagaaagagaaagaaaaaattgtgactatcgtttttgagagagagagaagcttctgaaatatagctcaaagcctataattgtataatacacgcataaaatatggaacaagaagaacggtatacgaggcatctatttttaaacttaataactgtatgaaataggattaaataatataaggccatttttgtaaataaaaacaagataacgtctcctgtgtaaactttttaattttttatatatattttaaagtttttccttaaaagaaataccatattttgtatacttacatttttatgacatatatatatatatattaaaatttgtattttcttttcctatttttgtaaatagctctgttatctaattctaaaacattaatggcctacattgtgtatatatatgactgattttttttttcttttgaaaaaagacatcatattctttaaattttgagcctagttcttttatttatctttaacgcgttttttgtgtagaaattgcaccatatacccttttttttgttaatctatttcatttttacctttcttttctatatatttaatttataccttcttttatttattatatcccgattatacccttatgaaatgaaaaaaccttcctcacctccttcaacagtacctttatgagagggtataatcggtaatgaaataaggctatttttagttaactgatgaaaacaatggctatatttcaacttacctgttttctgtcctattctagaagtgctataattaattaatttagatagttgtagtttttcacgattttaattcatcaaacagtgagattcttaaggataaataataaaactatgactatgatcaaattataaaacagtgatcaatttaacactgagattcttaggaataccattgtttggggaagagaaaaaaacattttgttttggtaaagctcatccaggaaggaaaaagcccaataaagaaataaaatgcaaacccatttgtggaaagagctatgacacatcatactcaaaacttgcataagtcggccagaataagatgaataggaaaggacaaaacttgtctcgaatcagtctgagtagagattttacttggattaggccgagataagattaagctcgggccaagctaatacgcctactctcaacttgaccaagactagtcaaaactcaaatcaagccgagatataaattatagaaattttgagggtttaggtttaatttttatttatttatttttactgtgaggtagattttttttgaaaaatactgtataaattttatattgtatattgtgttaaattttcacagttattttttagttgttctactgttgtttttaattgttctgttatgttgttttacggttgttttaagttgttttataaaaaaatagtatttttgtaaattggtgtgacagtaaaattgtaaacttttatctaaaatccaatattttcgtaaaaaaacccctaaattatatctcgaattaagccaaggcaagatatgtcattggtcaaacaaagacataattatatttcggaccaggtaagggtggaacacaggggtgttcattggactacattcaatatttttaggtctatccagatccgatctaattatatattggatgttagattttactatccggtccgatctagttaatttcagtcatccaatcgatccaacatctagtggatgttggattggatcggttcaattcgttggatgtatttcatatatatttattggtttaattgaggttatatatttaatattttagacttagtatattttggatcagattggagccatccaatattttaggtccagtatgtattggattggatccatccaatccaagaaaaaaagagaaaattttaatgttaacttttatatatacatatattttacgtataacaatataaaatttaattactcatctaaactaaataaaaatactaattagtttgattggatgttggacaccccatccaacatccgatctgatacaattggatattcaaaaataatatcaaatctgatccaatcacaattggatattcaatgtttcgcagtcagttgtaatttgatcggtcgattgtcattgaatttgatgatttatgcaccctcctagctgaacatatcaagggtccaagatagcttatatctcgaatcaagtgtcgatataccacaatttaaatataattgagatgggatgaatgtcaggcctagctaaaatataccatgcctcaacttggatggaaataaggccgaatgaaaataatagtacaatttatctttgataaagcgaaattaatttgaaagaaatagtccttaaataaaactaatcatgaaaaattaacaactcataagtacatgtgtctattagagcattaaggacgcaacaacacaaccatacttgcaaagaacatactataaagacttaagagaagattcacataaaaggaattgaaaaaatggagaaaccaagagaaatgatccattgtgaactttgagaggaaaaaacacgaaatcaaagaaattttaactgtgtaaatttgatctaaaaaatccttcatcattttttgtcaaaacaatcacatcaaaaaatgagactcttaggaacaatttgtcttcggttattttttaataacagaacaaagacgtaggtctttaattttttttttttttaatattttgatgacctttatctaaacaaggatgaatcaagtcttttctgagacaaatgggtccacactatccaattcgtaagcaaagctaagaattgtgcatttaaaatccttgcatcaatattgaccttaatggcacgtttactatacaatatttagaattgaaataaattaatggagaaatgtaacggaataaatgaaaaataatcagaatccatatttataatatgttgtttactaatatttgttggaaatagaatagttgtgatttatcttgtttactttataaggaaacgtaatcggaatgcttaaattaactagattacccttttaagttaaactatattatatggtagttattttgtaagatatattttaaaggacaaaattgtcattatatatttaatactaaaaaataaataaaaataattaaaatccattacccttaatggcattccttacaaaattggtggagaaagttctccctttcttttctcccttatttaattaattaagttctccctatcctaattttaataatgtaagtaaacaaatgtaagggaatgattaccttaccattgatttccattacttattagtaaacatgccaaagagttatgattcagccaagaggaaccttagtagtgactcatggatcatttgcgacattaacactctttaaatattcttgatagtcaacagtcaatttatctaatttaaccccagtcatctctgctctaatttttaaagcacaaaaatcaacaatagaagacgagcaaaatgtgggcaggcctttgaagacttcttctattagaatgtcatttataaagttggtagcatctttggtaatatggacaattccaagttcgtgcaaagcaacattataaacaaaatgagaatccccagcaggctgagaaatcaaaacggtgagacgttagcaatgggaaagacttcaggattgataagtttggggaaccaccgatgagcggcatacagttctctgctactcccggatatagtcagggccaggccttggcacccgcatcatcctattttggaaatccctcagggataaatgg

SEQ ID NO: 18580 - DNA, 7494 bp, Cannabis sativa
aatttatacagagaatattattaatcagttcatttacatttggagaaccaaatgtaaaaatgttagattacactatatttttacatcaaaaagttaaacaattcattatgtataaactagataatataatagtttttcgtgcggtaattttaaatatttatttttatgagttacgttagatattttatttttctaaatatttatttaaattgctattatcactgtgttatacttataattgttactacatttaaaattattttcatcacccctattaaacactgagcaagtattataaatatgtaaactacaattatatatgtaattcttgaaagacaagcatatagtattaatttgctttatttatgaataatcttgtttagcatcaaacaaagttgataataaataatatatatctatataattcttttaatatatatatctttgatcagtttataaggctaaatctgccttcttttcctacatatagaagcagaaatagcattattattatttatttatttattttgctactaataataaataattaaaatacattataatatattgatattataattaattaattaattaattaataaccaccaccaggcctcttttcatgcttgggatttggtcctggcctgtcatagtccaatatagcatcaacacttataagaagctttctcatcattatcttcttctcatcaacaatgccctgattaataatattttacataagaacccaaataaataaacttaatatattttaggctatttagaatttatcctcgaactataacttatacatgattgtatctattgaactttttagaccgttaaaaataattttcgagctattcatagtgttgtagattgatcattctatcaagttttctcataacaaatagaataataaaatgattgtttcgacaatcatcacatcagtgtcatatcaacaccacacgtgtaattaattttaagaaaatataatttaattttacgtaattttttatcattaattgattttttgtttaatggtcttttaaaaatatatatttttattactattttttattttaaattatacatgtgaaaaaagtgatcatatgtcattattttatttgtcatgtttgataaaatttgatagaatgaccaatctacaacactgttaatataattcatggactatctttagcggactgaaaaatttaaagtgcataatgtataggtcataattcaaaacaaaaaatttaaatggcctttttgttattataaaataatgttgatagatattatatatagtaattcttataaaaaaaaaaaaaaaaaaaattctcaccttattttttgggaggtattgtggcttcctttctccatggccaaaaccttcaactttgcctttatgtaaagaaaaagtagtgcttaattgattaattatataaatttaatatatattaataatattattatagagaaaaatgtagtaacaattaaacttcatttgtcaactgaaaaatgcattaataattaaggtaacgtttgattgggaggaatagaaacatagaaatgggaatgagaataagaatggaatggaataaaatttaaaatgtatataaaaaaaaaattgataaaaatattattaaattttttctcatcatgtattggaatggtgtcttcttctatttcaaaatggaattgtcattccaccaaaatggtggaaagaccattccattagagtgacattccaacactttaatatgcaactaaacaaaggaatagaacggagattgtttcctttctttttcattccatttcattacctctaaccaaatgccaccccaattctttcaaccacaaattatacgtgtgaacaaagtattataatatagataattttagaagaagaaaaggaaaagttttattatcattattgtgtttgtatttaaggaaaaaatatataaaaaagaacaaaaacatctttgcatgcttacctgaaaacatgttcaaaaagagcaagagaaaaatgagaagatagattttgatcagcgaagccatattatattgatttgagtcgacgataataatacgatcggtgtcttttgaattaaagcaaagagagaaatgttttgaaggagtaataggggttgtactcccttttatactaattgtatggagagtgtaaataaaaatgttttatttttaatttttttttcaaaaaatattttcttttttcatatggtgcaaattaattaacatactcaaaagctatgtagagtggtgaagaaaatggtgtataatagcccaataaaaattataaccatggccaccactatataagtcaaaccacactaactctctgtgccataaattataatgttacatcatcaattattttatttttgaataattacatcatggattattaagtttttaatctaaatatcatcacttttaattataattaaacttacttgttagtgtcaatttaaatataaattatgactaatttaattttaattacaaaaattaaattttattttttgtgattaattttttattattattttagttacaataaataattttttatataaatatatcacttttagttataacaaaacattacttattaatcagtattaatttaaaacaaattaggactaatttaattttaattacaaattttttattttttgtgattaatttttttattattttaatcacaataaattacttttgatctaaatatattacttttagtcataataaaatgttacttgttacttattagtatattaatttaaatataacttatgagttatttaatttttaatcacgacaataaactataacttttgggattaaaataaatatatttttttgcgatttttttttactgttaattataggttaaatgtaacattttttgtaattaaaacttatggaactatgctacacaaattttttaagtgtacaaaatatagggagaataattaattgcatggctcataaagctcctatatatgtgttctttgcttaatttttattgatttctaattcacccacatatataattcttttcagataattaatcatgactcaagttaattgggctataaacaagagtttagaaagaaaaaaaaaagtgcacttatatatttttgagtaatataagctatcattcatgtctctatccatagttgcatctttgtttttgacatataaaaaaattataatatataattaattatatgaccatctatgttgtaattatagtaagtatttgactaattttctcaaaaaaatcataaataatttatgatactaaaaccataatttagaaatattagaaaagcacttatgcatgcaactaaaggcttaactcctgtttttaatatcataaattatttaattattttcttactactgaaatgtctactatttaactataacaaattgcattattatttctacaagtaaaaaagaaaacacttatcaaatatagtgacaaaaataatgcttttactattgtcctataataaaaaaataaaataaaaaaatcattttgtggttgttactggctatagctcatataacatatatatctctttttcttatgaccatttatatatctttagtggccatttgaagcactattgctttcactccttcactatgattatttatatatatatatatacatatatatattgatataaattaagtagtctttgtgaccatcatgaggattttgacaaaaaaaaacacaaatgtgtcatttaattctcataccaattccaaattcatcacctacgtaccattaaattaattactatatatatatatatatatgatcctatacaaatacaaaaatactaaaagatatattattaaatatcaagtctcatataacttaatgtaataatttttaaggaatatcactaacaaattataaaacaacacgtatagaaagtgctagacactactggtacctaatagcaatactcattcttatattatattattgttaaaaggtactactggtacttagtactttactcgattttaaactattattggtgtaattaagtatcgagtttcacataacttaaaaaaatattgctaaccaatcagaagacaacacatatagaaagttttaaatatcgctagtacctaataacaatactcatttatatattatatttttatagaattgctaaaaagtattattggtgtctgacaccctccttagtgtcataccgctattggtgatattacgtatcaagtcttatataatttatgaaaataacttttaaagaatatcgctaaccaatcgtgaaacgctacctataaaaatattgtatttttataagtagtcatcaaattctcattctctaagaattagttaagtcaacttaggagatagcaaagttttattattaattattatatatatggacaatatataatatatacacacattaacaatcgttttcagagcttttgaaaggttaattaatgtcagtgccattaccataattaagctcattctcaagacagcatcataatatcaaactatatatagtttaatatatataattattaattagttaattaattgtgtgtttatatatataaacaatgtatatagtaaaaattttagtggagcacaaaatgatggtgtttgtgttttacctagatgaattcaaagaaccaaaaatatggtagatgttgttgatgtcaacattgtattcatcaaaaaactgaatactctttgataatgttagaatattaaggtgttaaatttttgaggttctcttttaaaactagaacaaatagtatttcatttttttcattgtgactaggattttttcctctaaattattattattgtaaaatacgaaaaaaaaaattcttgtttcgttgcattttgcttaatttttgagataattaattcacgtaaccataaacatgcgtataatatttacaatatatgagaacttatttaattaatttaaattgactggaaagtataatgtccttaaatattcaaacattaactctaaaattacggatacaaatttttagattttatcagattactatttatctatacaattatttttagttggactctcaaattacagtagattaaccttagatcactcgtaccttaagaaactatttgtaaaaataaatgaaatgcaactaaatgggtaaatttgtaattatttttataatttgaggagaattttttataaaaaaaaaaaaaaattggaggacagtatcacatttatttttaaaattaattaattagtaatgactgaaatagctcatatatgttatatatttaattaagctctatgttgatgacattgaacaatttggtaatccaactctatacaacaacataattgaagcgctatagtacattgtattgacagaccaattaggttatatatgtcaaaaacttagtcaatttatgcatgtcttcaaccacagctcattgatgggcttgtaaaagggtgttatggtatctaaaaggctatacaattagaggacttgtttttgaaccagcctctcaagcttattcaactactagttttggagtcactcttggaggttacctaatcacatggagcatttaggaaacaaaaaaagttgtagccatatctagtactgaattagggtagcatttgcattagattatctgcaacactaatcatttggtgtgataattaaagaataaatacaagataattaattactaaatttattttaatttgtgaatactctattagttttacttaaagaatcatacaaatagagatgcaattatacttattaatctcattttatcttcattttttttaattcatgtagtactttactctaacgccgaccaaagtggtttgggggcattgggcgaaaaattaaaattgggccttttattaaaaaaaaattattaatttttttttttgaaaggaaaaacgttcattgataaactgagattagatctcacagttattacataacaagtttttcagtataaaagagatatccactataccaaacctaatgtgggtaaggtacactttgccatattatgggctaaaaaattacaagttcttacaatcttagaaaaattacaaccaacaaaaaagaagaaagtctttaacaatagttagcatagttattaatctcccatctagcacaaacaccattaaaagtattgataaccacgctagagtcgctttccgcaataacaaaatggtgaccacggtccatcgccgcatgcagagccaaacaacaagcagcgatctcgccacaaaggaggttagtgaaacaaacactcttagtcatcacctatagaccacctcaccaaggtgattacaagcaacaaccactaaacacatatcttctatccccacatgaatatcgtagctcagtttaatccaatcaagagggggagggaaccatttctccaccaagaaaagggaaaagtggaagaagagggaagcacagtaatttgcataacaataacaaatagagtcaatgtaatattttacgctacccaaattattattgtgtaccttgttatttggggctttctaaatgatatccacgacaatagaggcgtataggagcacctcctccacattgattctttttttactcagaccccagatgaatttaacccaatttcacatacaaatgctaacgttagaaattggataaatattccacggggaagatctccacagatgggactctggaaagcagtgaagaaaaaggtgttatgtagattccttttcacccccacaaatagggcaaaggttgtcatcaatttgcaatctctttcttaactttgaatgcactgacaaagcattggacaaggcaagccgacttacaagagaaattattattgggttccttagtctaaacccagaagtcatggtcttgaaccgaagcctaccaccttttaaaatgcacgaatcgtatcctgattaaagaggtaggtcaacttctacagatcccaatcaccatttttagtcagaaggtcggcaactctgttaaacccaatggacggggcccccttaagttttgaaacaaaatacttcccatggactacctagggatcttcccaaatattcgtgtctttcccatcaactatcactttacaagcacatttccttagaatatcatgggctttaaccacattttttcaaaactaagagttcgagttcttgtattggcccttcaagaaatctgcccctcagatatttagcttccaacaccttacagcggagggattgatttccagtcaaaagattccagccccatttaacgagaaaagctacattcatttctttagttttacgaaactcaagatcctcacggaatttaaggagacacaactgtaacgccccagtattattttgccttattttacaaaaatactattttcatgcataatttgaaaagataaaa

SEQ ID NO: 18581 - DNA, 9432 bp, Cannabis sativa
tagacactccatccaccaatcacaattggatattcaatatttggcggtcgattgtaatcggatcgttctcattggatttcatcattttatgtacacccctaagttgagaggttttttttttgttgaatatattttcaattttattcactttctataaaaacacacaaataccgcgccatttttctaatttcctatttcttcatacttgttacttctgtctctgtcgtctgtttcaatcctctttatatttttattaattattaattatttattaaaataattttattaattattaattatttattaaaataattatattccaatcacagttcaaaacccaactaacttccttattctctctctattttaaacctataaaatatatataaataattaaaaaaaaaagaaaagaaaagaaaaaaagacaaggaagagaaaaaaacacagcaccttctgaggtccgattctctctctgtccgtgcgagcgagggaccggcgggagtctgatctcgccggaatttcgagctccatagccggaatcttcatttctgttcacctccgagctttagaattgtccatttatcatgtacgtttcgtttcagttgagataaaaagtaaatcacctatgttaattttcttttttaattttgttctggatttgagatttgatggtgaaattatgggttggcaatgcaggtagaagaaaacttgtttttcagaagaagctccatttttgtttgaaattcccttcttctctcctttttttttttcaaaagaaatttttgctttcgttcagcctttttttctctttcttgtcaattttccagagagaaaattgccgagaaagagagcaattgcggaattcggatgttttgttaatttcccggaaaggaatcgattttcgggaacaggctggtgatttggttgcgtggttgtggctctattacattagggttagatcctgctctctcatgttttcatttgatctcttatggctataatttcaaattttggtggtcaatttgtgaaatttcggagtccgattgtttttttaatttagttattattattattattattattttttttttttttaagaatagatggtttattcctatgaattcttctgcttctgctgtggcttttttccaattctgggtgtcttcttattagcttagtttgatgaaaaatattgaagaagaaaaaattgtattcattccgtgaggttttatttttgttttcctgcatttttctcggtaaccaaacggaacagctacgtttggtcgttggtaggtaaacaagcgaatttctttatgaagatgtcctatttcacggtttctcagcttgcattgtactatgcaaattaataaacaaaataaaagagcaattgctttttaacacattccatctgtattctatgggttaacattttctttttcccctcaatcttgatatatgtaaaagatggtgtttaattctatatttatttttgttttctgtaggtgattgaatttggataaatttttgtttctatctgtgaaattttctggctttctgagctgcacaatgccatctgaagtaatggaacaaaggggtgtatcactatcagctccatctcacctctttgatgaaattcgttttccttctgaggtacttattgttttcagtattatgtattcaaaagattgtccctccaatagggcgttcattagatttttgtgttcttatttgctcaactatgccttcttatttatttgtgttatgaataatttccttagggatacttgtcttcttaagatccactataaatattcagtacttaatatatttttaatttttattgggcagaaacaagttcggaaggtgaaaaccgtgcctgaacaaggtaagaatcgcccagccgtagcttcccttatatggccccttctaacttagcttatttagctacaatctatgttgatgtttaattttggtttgtaagtattagagtaatacatttaaattatttatttatcttggaaggtatgcacttcgaaactcctgacatttatgaataactgaagtgttgtcgaattaccgaattaccaaatacgatgatgttgattgttgtcattggtcagtttcaattctcttttgggaaaaacaactgtagtttataactgaaaccgaaaggtccaaaactttcagttttgttgggagctaaaaagagttttgcttagttttatcggtccatcaatcatctcattcccaccattcttagttccaggatttttcatgttattacattcaactgtagatttttttttatctgggtttcatgttatgaatgtgtttcagtttttctttggaaagacctgttgccgtagaaacaaaaacattgctttgtagttcttatttataagctttcatttgtgtggtgtcatttcccagtctttctgcatttattgttattattagtgtttgcttatgacctgtgtggctaattttctatttcctagcatgctcattttcttagttgcccccatcccccagagttttggcagttctatttcctttacgttatattatatggtttttttcaaattggaaactgttacggaaggaagttattacatctcgtgtacattttgttgtttagctgatagggatagatatatattaccaacctggccataaattggatattctctcacgctttggatattttttaccagttgttggaagatcaatgcaatgcttggagatgccacagtccaatccaaaccgggttcaagcagaaagacagacaaccggtggagaaggaattggtaccatccccggagcttcttggaaacctatggatcacgatctcaagttgtggtcagatttgcgtacgaagacagaatcttatagttttgatgaaaataaaaatttcactagtaatattcagcatgaaagtagtctcttttcaagctcattgtcagatatcttttgtagaaagtgtaagcttcccgtttcatgtctattataatgattgttatatgtgattgctttgatctttagtttttgctgagttagattattaatatcatctaattctctatagccatgctgacaaacgtattactttggcaccgtttcatgctaaatatgcaaagggagtcaaaagcttaatttttcacagaaattttatccagaactaacaagcttttatctgaaattattatattataaatcaccgcctttgaagtaacttggttcaattggtatctttatgtgtctatccttttcttttttattctacattggtgatacatgctattattgttgtaagatttgtgtagtgatatttataattcattcccaattcaatatgcagtgaaattatcagcgaatgatgtcacatatcatcagccttcccatactgttatctccaaagatcaggaaaaaccactaaactattttggagaaattgagggaaaaactattgggagtcttcttcctgacgaagatgatctcctttctggaatgaatgatatgatggcatacaatgctaatgcaaataatggtgatgaatttgaagactttgatctgtttagcaatggtggaggcttagaattaggagaggaccgtttatctgcaatccaaagaaagcatgatcttgttgggttagttttgaatggccaagctggttgtaatgggtcagctggtgaacagccttctagaactctttttgtcagaaatatcaacagcaatattgaagacttcgaattaaaagctctttttgaggtgctcatactccctattctctcttgtttgcagccaagtagtataccttgcactatgaattgacagtatttttttttagcaatatggagagatacggactctatacacagcctgcaagcaccgtggttttgttatgatttcttactatgatataagggcagctcgaaatgcaatgaaagcacttcaaagtaagccaatgaggcgcaggaaccttgacatacattattcgttacccaaggtatggcggtgaccttttgatcttggttgcgtaaaactttaaattttatttccttcccagtcttcccccattatgcaccctggtttattgtagtttaatgcatttttcccatgcctgtgatgctttgttgcataatgtttactttctaatgtgtcaggataatccttctgagaaagatatcaaccagggaatcttgatggtatcaaaccttgattcttctgtttcaaacagcgagcttcataaaatttttggattttatggagaagttaaacaagtgagttgtttgttttctttcctctattatcctgattttttcgtagcgggatgatgaaccttgcaattttggttgttattttgttactagattcgtgagatttcagacaagtatcatagcaagcttgtagagttttacgatgtcagagctgcagaaatggctttttgcaagctaaataagacgaacattgctgggaagcagatcactcttgagccaggctttcctggtggcaccagacccgggtatcatcatctgtttatcttttcttacttaattctgttaacctatggtgcttactcaagatgtttgagttttctaacacaactcctatggtggctgccagttgcgactttctgttttattgttccttatctactagtttctttcctatttccttgttcttttgaattcgatttctcaaaattgcaactccttacagataatatatctttgcagcttgatgcaagtgtccaacatggaacaaggtgatcatgaaccccatctttatcatagcttttgtgacaacttttcctcagtgcacaaaggtaatctttctctgctaagattgctctgatttttcaacatgtattttttttttgggctcatagaaagtctcttttcagcaagagtatctcctggagttattgcaccaagtcgcatggttattggttctaatcagggctttcatcctgcaattggttcgcctttgagtacttcgtttgaaaattctctctctcatcagagttcaagtcttcccaagaccatgccttctccaatgagaatgacatctgctagcaaacaattcggttttagtgagatcaataactctttggatgaaatgaagtttgctaaccaagggatgcatggtttccatccccattcatttcctgagaatcatgatagtttagctcatgccattccaagtttgtctcccaattctattaccaacaagactagtctgggtcttggagtaagggatggatgcatcagtcatgttcatggtgtgaatagtgcaaataggcatccagtggaacttaaaggaggtacatacatttgctatagttatattttaaaattatttgatgtaagttttggaatatcaactctaatgagagagcaagagttcttcattttatttagttttctggtgtgaataccaaaagagtagttaggttttttcatcataattttgtttgatttggtgttgacaaaccttttttttcatataatttggtgggggtagcttttgggaatgggaaaagtcctgttcatgatcagcattgtgcatggaacaactccagctcatatcagcaacctccttcaagttcttcaccttggcacaattcaccaacaattgtcaatggttttcatgcacaccgctttccacaaactcagggattcccaagaacatcacctcatatgctgaattcttcttcacctttacctcatcacattggatcagcaccagcggttaatccctcactctgggaaaggcatgcgtattctcctgaaacctctggtcttcacctggggtctcttgggagtgctggttttcctggtagtcctcaattgcatttcatggatatttcttctcacaaaatattttctcaagttggtggaaattgcatagacatgactgttaatggcgcacaacactcttctcaccgtaacggtcacatatttcctgggaggaatccagtaattccgatgcccgcatcttttgattctctgcatgaaagtgctagaaacttgtcccaccgtaggaatgaagcgaactctaataacgttgataagaggcaatatgaactcgatattgatcgcatattacatggggaggaccgccgaaccacactgatgatcaaaaacattcctaataagtacgtattctccttgttaaaatgatgatggtcagtcatggtcttgcaaaactgcaattcttttatcgtcctagactataaacatgctcttaatttagccaaggcacaaacaatgccagttatgatgcaaacacgacgaaaaaggcaaacttaatgcaattgtggctactatgccactttgttgtgagaaccatattgcattagattgtcatacattttttgatatggagcataccttctttcttactttgtacttgaaactaatttaacaatttcccaggtatacttcaaagatgcttcttgctgcaattgatgagtactgtcgaggaacttatgactttctctatttgccaattgatttcaaggcaagtaaaattgtgacctattcttttcttcctaaatgcgggagctcatattttatgtgtgtgtttaacagaacaagtgcaatgtgggttatgcattcatcaacatgattgatcctcgtgagattattccattctatcaggtttgattctccaaaaatggatatgttaatttgtgtcctgcggcggattttttcgtcactttcatttctgtatgtttttaagcagatggtaatatatatagatgttatctgttgtcaatctcaggcatttaatggcaaaaagtgggaaaagtttaacagtgaaaaggtggcatcattggcctatgctcgtattcaaggaaaatctgctcttatcgcccattttcagaattcaagcttaatgaatgaggataaacgatgtcgccctattctatttcatacagatggcccaaatgctggtgatccagtaagattttgatttattaacttcttaattagtgttggttctttattaatactcaccgcgaatgcaaatggtttcaaatttaaatatttatcagatagaaacttatgtgagagcctgaatctagtaaagttcaaattcagtgcattctgcattgtaatttaatttaccataagcttttaggtcatgatgaaaatcacacttgagctcatcctttcttgggctgcagagaaaactaacctttctttccctttccaggagcccttccctatgggtacaagtatccggccaaggctgggaagaactcgagctagtggaaacgaagagaacaaccaaggaatctcttcagcttttgcaaatcaagaggaaataatcttcgaacttgattcttcttcaccaggtccttctaaggactctgattgagcagaacccggtcaaatggagctgactaactttgacttttgaaaacgtaatatcacccaatagaagctatacattttcccccaattttatatactatatatctacatatattattattattatcaaaaggtggtgtatcagtatcagtatccacttcctttatttttggctatagaggagactacctacctacctacctacctactgcaatttttggatgacctaaagcaagaggttgcttaaaacaacttcctccttcctaattatgtgaaattcttggtaaaaatagaggccgaacaaagggtccaagttttgcactatttgtgagtgaatattatattttattttcagtgtacagaagatccttgggacatatatgtactactaggattatctttttaactccactaccacctttgtttttcttctcttgtgggctcttgtttttggttggtcaaggagggagagagagacacacacacacacacacagagcaatctgcctagaagactctgactattgcactttgttcatgctttttgttttaattgctaaccatgattggttcatgttattttctcattatattggaatcttgtttccccattggccttttgtttttaaagctgctcagttttttacaatgaatttatgtgttggcaactttgaaatacattaaattgtcgaaaatctaaaactgtgtattctaccttttttatttaataataagaagtgataacagtttcaacctaaacttatcaaaatattttgaaagttgaaaatatcaattagggagcgttgcatttcacctcaaaaacgttggagatcactaaataaatgaatttaaggttgaaaaatcaaagtcagagcatttcacttcatacatatttcatatggatgatcagtgaaccaaaatgactagtgtgtgagtgcagcgtcgaaaaatcttatccgagctgaggttacaagtggaaaaaactaagaatcagtagaattattcaactaagaatgaatccgagctgaggtcataagcttttgaaagttaatgaattggagtttcatatattcatagtctgccacttgaaaatcaataaaaaatatttgtgaaacaaattgtttgatatcaaattgagaaaataattaaagcctattttttttgtcgctaataactattttgaaaagccaaaataaatagagtaaaaaaaaaaatccctagtaaaataaaaaataattatagcatgattttttgtgtgtgtgtgtgtgtgaagtctttttgccctttaaagttttaaaaaataaatttcaattaaatgatggacgatagaaagtaataaaattagcaaaatagttaagacatttttttaatataaaattattaaatgtttaccttttaagtaaaataaaatatatattatttttattcttttttataaaatttaataatacaacctagttttttttttttttcctaaggtgaagttgattcatgtttaataacaaatgtataaaattttataaataaagtgaaaaaatcacacgacttaactgttaactaattatatgaatgatgaaaggagcaaaaagctcatagctcatgtaggagctgccaaaaggaccaaccccataaaaaaaaaagacctaaagctaatgcaactaagaacatatagttcaaaacaccgaaaaaactacaaaaactaaaaaagtaaaataacacaacaacatgataaagtctctccctagtgcaatggatccattgagacaacccaaaacaaactgattaagggcaaaggagcgctgccaacttctgacaagaccaatctactctcgacttcccatttaagttcagaacattgaaggagacagaacaaaggaagcacattcctttggaaagaagtcgtgtcctcccttctacatctacaaaacttcaagagctccaaatgagtacttgtgcaccgaaatcatgatgtctgaaaagaaacctagaagctaacactgagattcaaaaaagtttatactaaaattttatgacaaaaataaaagattatt

SEQ ID NO: 18582 - DNA, 3727 bp, Cannabis sativa
attaggtacttatgtcgctaaaaataaaaaaaatatgatatattaaataccataaaaaaataacaaacttataaatgacatatttatgtaattttattataaaatctcataattttcaaatgtaaatttgtagtaatctatcttctaaattctaatacaaattcttccacatatattgatttgattgttcttttttggaataaaacaaatcaaatcccattaataaacacattgtttataaccgaacaccgtgactttggttgccgactaattttatatgagtagatctcccacactcttcaaaatcttcacttcttttttcctttttcctgttcaaaccaaaacgcgcaatctttgtttctttctttctgctgctaccactattgtacgcccagtgtcgcatccatggcaatgacccagagcgcggctggggcttgtagcccggtggttttaaagacgggcctcaccgtcatcgctctctgcattgccggctatattctcggtccccctctttactggcatttcatggagggtttggctgctgttagtcaatcttcttcttcttctactacttgccctccttgtgtctgcgattgctcttctcaacctctcctttccatccccatcggtaatttctcaatgttaatttttgtgatattagatccggcttagatctatttcagtttctcttacatttcatcatagatcgtgatccacgctactgatatacgtactttcttatggtgaggattttagtttatttgctttggtcatggttcagtaattgaggcaatttgtttccaacgaaaacctcaagttaacagctgcttagttattactatattttgcaagatacaccttttctctgtgctgatttattaataatgggtcgtgagatatagttttttttttggggagatgaactgattctttactgttgtttggtttctttgtatgcaggactgagcaacacctcctttacaggttagtctccgattataaactacccatgtatacattacctttacacctttaatcttacttttttctgtttacataatacatattagattaaggttagctcttgatatcctacttttacttttactttgagagttatgaataatcaactatgaattactcacttttaaggcagtagctttaactgtttttctttttaagggtttctgattctatgttggaacattagatggtgcattttgttattcattgacaaattcttgagtgataataattcagagaacaagagatgaaattcaattatttctgtctgtagttttttacaagaaataagaagaacagatgacaaatgtctctcgtgataaaatgggctgataagcagctgactagcaccaagttgctgttttaggcgaattgagaatgctcaaacttctatcatctacctagaccaaaaactatctatgctattaagaacaagactcttgagaacaacaaaaaaataggaaaatatatccacagatgaaggatcttccaaatttttagtgtgaaggttaaggagatgcatccttatatagcatttagaggaaggggtttcaatttctcattcacataaaaggttgaaaacaaaattagttcagaaattaataaggataatgatactgaaaaccatgaaagaatgggtccacacaatagaaacccaatcttcactagagatttcaagatctaggttcaaaagtaaaatacatgcgtattgtgtaaaccatgattatttgtaaggaaaaatgataagttaggttcttaatatttattatgccttggaatagccaaatgagaatgtgagctactcttacttaggagtcatccatgtgaggaagaagtatggttgctccaaaggggatatacttgggcttaattatttttacattgtcttagggagatgttcatggctaaggtaaacataattatacaaactgatttgtataagaaagacttgtgtgtggaatatgtcttcgactcatcgtttattaactagtaaagtaaacatatttacatgagagaaggttcaaaggataacgcccatttatcataagcaggttttagaccattgccttctgttactatatctctgctgtttcattgttttcattttcattcactggggaatttgttagaaaaataaagcatgggtgaatgaaaaattgacaatcaatggtgcttataattttgttttgtaacagtaagactttgttcaattttctatttaattgtgtaccaatttggaagttatgtctatcataatgtattttgaaaatgagaattaataagaaatttaaaacctacctcatccaagtgttatacaagttgtgctctttattgttcacatgaaaaatttgaaagctagatcacttaaattatctttcttttttctttgttttcaatagtcttaactttattggtatagaagatttttgtactgactcgatgactgaagctaaacatcctcaataccaagtactagtcagctttttttttttttgtgcatggtatcttgggaggcaaacgtcatctttcctcttgtgccaccttgaggggcatttgttttaaagaaactgctgcaacacatgtctggatccatcttgccactataacacctatagcatgaatattttacttgcatttacacctgtaccgtgtcctaggaatagcttattctggatattgtatgtatatatagatgaattttgagagcataattacatgccacgtggatttgtatttgaaggttttagatattgcttaatcctggtctactatctcaatctgttagcactacttattttccattttggtattctatgcagattgtgcaaaacgtgacccagaggtgagcgaagacagtgagaagaactttgcagacttactggcagaggagctgaagctaagggaagctgaatctttggaacatcagagacgggcagacatggctctacttgaggctaagaaggtgacatcccagtatcaaaaggaagcagacaaatgcacttccgggatggaaacatgtgaagaagcaagggagaaagctgaagcagcattaactgcccagaagagattaacagcaatgtgggagcagagagctcgtcagaaaggatggaaagaaggaatggccaagtctcatgctcagactcaaggaaatgtccagacagcatagaagaagcaccatatgacattgtgtggaacaacagcctaaggctgcattcacagggggattgcctccaccggtactactattcacctacaaagggagttgtatcattaaattcaatatgctatatgtttacaaacttagaattatatgttatcaccatctcaagtcaaaatatagaatctttgaagtgtcatcatctatctcgccttctaaaagcaatcaattttttttgcaagaccaaactgtaatcttctcattcaaatccatgccctaatgaaatttccacttgtaatatcttggctaaaaatgaaagcccctttcactttattgttgttgaaaacgaaatgtgacaagctacattgttttggatgtctagtgtttggtatgtattacacccttagtctcgctgagcaacatagtaattagcatgtgactcgatgtaatgaacagtcaaattccatcagcagttggattgttttgctttaatacttcagcacctgtagtttcatcaatactgtctgttttttattattactatta

SEQ ID NO: 18583 - DNA, 7625 bp, Cannabis sativa
aagtcggagagaaaagcctctagttccgagttcaacaagatgttggtggtagttacatcacgatgaacaattgaaagagtgcaatcatgatgcatgtaagataatgcataagctatgcctttgatgacatttatccttttgctccaactcaaatccacagcctctgtatcattgctcaacacacagaacaagcttcctctttccatgtactcgtatatcaaaaacatatttcttttgtgcaaacagaacccatgcagtcgtataatatttttatggcgtatttctgtcaatgtttgaagctcattagtgaagctctgtctcagagttgagtgttcagcctcaaaactgtgaagctttttcaaggcaattactttgccattaggtagttgtgctctatacacactaccataacctccagttcctatgcaatatctaatgtcaaagtcttcagttgcttgtatgatatcttcaaatgcaatttttccatcataattccatatcgaaaacatgtctccgttcttcatcactgtttgatcacttggtgtctggacttttcttctcttcagccaaattttaaagaccacaccaaccccgaaaatggcgaagagaatcgagatgggaagaataatcataattgtggtgatgaagctcttcttcctccggctaaaattatgcttactcgctctaaatttagagcaaggagggaggaaattgtagatatcatcactacatacatccttatttccagtaaatgattcatttgtgaatttacgaagaagcacattacttattttacctcgtaaataattgtgtgaaacattgaaaaaggttaaattgtacatatcatcaagttgaggaggtatgattcccgaaatattgttatatgataggtctagatcaaccaattgtgaaagatttgtaatatcttcatctatggaaccattaattcgatttgaacttaagtcaagacgagaaatgcttgctaaagcagtcaaagatggggaaattggacctgtaagttgattataacttagatccaattcattcaaattcttcaaaaatttgaattctaaagggatggaatcggttaattgattttgactcaagtccaaatatattaggtttctcaagtttccaatttcaggagggatagaaccaataaattggtttgaggatagagatagagttgacaaattggttaaattacctaaagctttaggaatagatccattgagtttgttttctgaaatgtctagagcagttaaatttaatcgaaatagagtggaggggagtggcccgttgagaatgttactaaacaaattaagatagagtaagttctctaagtttcctatactgataggaatggatccactaatttgattgctccacaaatttaatctagtaaggttgatcaaaagaccaatggatgaaggaattgcacctgttaagatgttgttgcccaaatttaattcaaccagattcgtcaagttgccaagttgttgaggaatggaaccattgagttgattactactaagatcaagtttcttcaattgggaaaggttggttagtgaaagtggtatttggcctgtaagagcattgttggagaggtcaaggtaggtgagctttgtaagagcacctatccccggtggaataacaccctcgagtcctgaccccgaaagatccaaatgaactaaatgttgaaagcaagatgcagtgaagttctggagcattcctattttctctgcatacgaatgtcgatgatgaatttctgtaatgtggccagcatggtcacaagtgatacttgagtagtggttgcaataatagttcatgcttctgttgaagagatgtttgtccttacaccaattggtttgaaacagaggattcagttgtggttcttggggattatccatgacattgtttggtgctggtgctggtgcctgtgatggtgatccatgttgagaagcttttaccaataagaaaatggtgtgatccaacttgggtagaatgatgaagaagaaagtgattgtccatactagtgatggtgatgatgaactagcaagggtattggaaatgtatagtgtcatgttgccaagatttgttatggctttggaaactatgctgatcaactagacaggaaatgttactaggtagacacggcaagggcagggtcttactctcagcttattaaatatgtaattaattagttccacacgttaatgatcttttcaactccaatttaatttatgtgtttaaaagataagatggattgaccactacatatctatataatgattttcaatcttcaaaccttgacttggccaagctttctagttgactgactttaaatcccaaattacctttcctatcaattttgtgaaagggtcttaataacacaattatatacatacatgtgcttcttggtgtccatctattactaaaattaatcattgttttttttagagcccccaaccacatatcataactgttctatagatagagctaatttagcaaagtgagcgatgacattaaagtgtgttgacattaacccttttgctgaaattcaaatccatagcctctatctttgctcagcacacataacaaactttttctctccatgtacaaacagagttcatggattcaataatgtttgtatgacgtatttctgtcaaggagttgacgattcaacctcgaaactgtgaggctttttcaaggcgattgctttaccattagatagttgtgttctatacacactactgcaaccatcagtcagttctgatgcaatatctaatgtagtgaacacttatcaattaacgcttagttattgagggttgacacttacataaacacacacacacaaatactagcataaaataaaacaaatttacgattgtgcttctactaagactccattgtccacaagattgaagctcaggggaaaacatcatgattgaatttcacttgtaccattctggtcaatttcagcatccatgaagactttgtctgggattataagctgtccaagagagatatcagtaaaaggtttggctaataatcctttgcgagcaaggagttgctgagatacatgcttcattgatggtcgacacttggggttggcatttatgcatgctaatgctattgtagcaacaagaacaatatctcgtacaacaacacaattcgtcggtgtgggcaagcgtttgtccaatatatgtgctagcattatgtcttgagcagttgatgatgaagatggtgataatgaaaacaatgaaaacagttcttgaggatgcctacccaccaaaatttcaagtgcaactactccatagctataaacgtcacacttttcagttataaccatggtgtaggcacattctgcatgcattcacaacaaaattacaaattactagatgaaggaactttagcttttcattacaaaaataatcaaatagtatatttggattttgaacttaccaggagcaatgtatccataagtaccagcaatcatggttcgattggaactatcagaatcaagtagtttagctgtaccaaagtcggcgagaaaaggctctagtttcgagtttagcaagatgttggtggtagttacatcacgatgaacaattgaaggagtgcaatcatgatgcatgtaagataatgcattagctatgcctttgatgacattgattcttttgctccaactcaaatccacagcctctgtatcattgctcaacacacagaacaagcttcctctttccatgtactcgtaaatcagaaacatgcttctcttgtgcaaacagaatccatggagtcgaacaatattactatgacgtaattctgtcaatgtttctacttcattagtaaaactatgtcttagcattggttgttcggcctctgatctgtgaagctttttcaaggcaactactttgccattaggtagttgtgttctatacacactaccgtaaccaccagttcctatgcaatatctgatgtcaaagtcttcagttgcttgtatgatatcttcaaatgcaatttttccatcgtaattccatattgaaaatatgtctccattcttcattactgtttgatcatttggaggctgaacttttctcctcttcagccaaattttaaagaccacacaaaacccaatagagcaagaaaagaatccaagtagaattgaaatgagaagaataagtttaactttggggatagatttcttcttactccagctagatttagagtatggaggagaactatcgataacagtgcacaaatccttatttctagtagaaaacgatactgctgggagtttaaaaatcacgagagctcttaatggaaattgtaaacaattgtttgaaacatcaaacacggttaaagtgttcaagctctgaatttgagaaggtatgatacctgatatattgttatttgataagttcagataattcagtcttgacagatataaaatatcttcatctatagaaccattgatttggtttgaacttatgtcaagatattcaatattggttaaaccattcaaagttggaaaaagtggcccagtgagcttattaaaactcatccgcagatcaatcaaagtgtccatgtttccaatttctactgggatgaaaccaacaaaatggtttgaggaaaggtatagatggctcaaatcagttaaattacccaaagctttagggatttcaccactaagttggttaaatgaaatatcaagaaagaataatttggttaattgaaaaagagtggagaggattggccaactgagattgttactggacaaattaagatttagtaaattttccatctgtcctatactcataggaatggagctaatttgatttccccccaaatttaaatgagtaagtttgatcaaatcaccaatggaccaagggattggaccataaaacttgtttgagaaaagagatagagaggttaaattggttaaattacccaaagcttcagggataacaccaccaatttggttaaatgaaacatcaagttcagttaatttggctaatcgaaaaagattggaggggagtgacccactaaggctgttatcagaaagattgaggtatgctatgttctctaagtttcctatacttgtaggaatggagccattgatttgatttccacccaaatataaatattggagactgatcaaatgaccaatggaccaaggtattgcaccatgtaagttgtttgaagaaagagatagagaggttaaattggttaaatcacccaaagcttcagggatatcaccactgagttggttagaagagatatcaagctcggataatttggttaatcgaaagagagagagggggagtgacccactaaggttgttaccagatacatcaaggtaaagtaagttctttaagtttcctatacttacaggaatggagccaactatttgatttgcctccaaatgtaaatactcgaggttgatcagataaccaatggaccaagggattggaccatgtaacttgtttgagtcgagagatagagaggttaaatttgttaaattacctaaaactttagggatttcaccagtgagttggttagatgagatatgaagctcagataatttggttaatcgaaaaagagtggagggtaatgacccactgaggctgttatatgataaatcaaagtaaagtaagttcactaagtttcctatactgataggaatggagccactaatttgattgctcgacaaagttaaataagtaaggttggtcaaaagaccaatggatgagggaattgcacctgttaagatgttgtcgcccaaatttaattcaactagattcttcaagttgccaagtttttgaggaatggaattgttgagttgattcaaactaagatcaagtttcaccaaccgggaaaggttggttagtgaaagtggtaaccgacccgtgaaagcattgtgggagaggtcaaggtaggtgagctttgaaagagcacctatccccggcggaataacaccctcgagtcttgcaaacgaaagatccagatgaactaaatgtttaaagcaagatgtactgaagttttggagcgttccttttctctcaggattctcaccatcataaaaaatatattgaagaatttgagtaatgtggccagcattgtcacaagtgatacctcgctggttgcaataataatgcatgcttctgttgaagaggtgtttgtccttacaccagtcaatttgaaacagagaattctgttgtggttcttcgagattagctgtgacagtgttgggcgctggtgctggtgcctgtgatggtgatggtgattcatattgagaagcttttaccaataagaaaatggtgctatccaacttggttagaataatgaagaagaaagtgattgcccatactagtgatagtgatgatgtagtagcaaggattttgaaaatatggagtgtcatgttgccaagatttgtttggcaaatatgctcaaaactaattaaactagtctgttatttaaggattgtgagaaatagtattatgcaaattcttcgttgacgaatgatgattttgatctaataggaaaggatttttccacacgttaattcaatatctaattaattacttccacacgttatcagtggacttttccacactaatgcctacattgattatttgattggccactattcatatagtttggaccaattcttaccattacttcttacttgaccccatggaaagcttttgcgttgactgactttaaatccatacaacctcttctccggctgccaaccttagagccgcttgggactcgcctagtgttactgatgttatgcagtaaaatttgactgaaatttactctggtaagatggtgctgctggtagatgcagcgttcaaagatatgcgcgctgcagctgggattgtggcgtccatctgggagggatcggtgctggtgcctggaggccatggctgtgaattttgattctaatcagccgctggaggctgagacgtgggcgttgattaatgccgtgaaatggtgcatttgcaggggttggaagcaggctgttatcgtcctcggattgccagctgctggtgcatgggtttacacgcacggagggcccccgattggcgtcttgctggtcttttctgggccctggttgcagctgctcgatgaacttcctgacgtggagattgtgtggcatccccgagctagtgtgcaggtggctcacaagcttgcacattgggcgttttgtaactctttttctggttttttaacagctgaggacttggcccctcttgtggttatgtgactgatatgttgttttctggttttctggtttaatagagaagctttctccagcaaaaaaaaaaaaaaaaacaaaggcatgcaaaacaaaagcacattgtcagtagttcgagttgcttttgaagatggtgacgaccataacaatgtcagtaattttcttgtgccttcaaactgagtgcttcatgaattctcaatgtacgccactctcaatctacacattaagagtttgtttggaatttcgtattaggtcatattctattgtattatattgaattagattatatgtcatatttttatatatttttatataataatacgttaaagtttaatttatactaaaatattatatatttagg

SEQ ID NO: 18584 - DNA, 2200 bp, Cannabis sativa
gccccaactatggaccatatcacttcctttttagcccatgtccagcctaaggtccatccaggggtcatgatatgtcggtacatttggaagttgttcattgtcacagatgcctgcaaagtaaggaaaacaaaaacagtctctttatatgtgttgtttttaaaacttttcacttaattgagaaagctaacaaatgacataccacatagccatctgccgtccaagacatgatatcccatttaattgttatgttaccatttggatctagaggatcgtatgcagctgcatagagtgtatacatatacataaatatataatacaagacaagatactattattaaagatgaaagaagagagctgagataaaaaaacaatctttacctgcagaagaaaatatgactagaaagaagatagctgagatgaaaaatctcatctctgcacttatttgttttgcttaggcttgaaaagcttgtcctgtttttggtgactttggttttagaggttagttatattcaatgctaaacaactgatgagggagatcaatcataagcattctgagaccactatgttaattggtgtgtatttaataaagaaaaagaccgcagagaaattccttgttgggtttttttagaatggtttacctaatggttgttacaaccatatatatatacatatatttttctctcaagtctctataatttctctcggtgcagagttacagtactttccatatcttaaagcaacggctaagttagactttggcgggagatacatatgaagtgagaactacataccaacctcttagttggaagcgaagttgacgggtataatgaaattaccttgataaccctggtcaatatttcccttattcaactacgtctaccaaggtcattatggtcaatttaggttgatggtcatgaagagttttgccaactaacatggaatggtggaacatcaaaagtggttctttaaaaacgtttagcttttttgtagtccttacacgttttttgagtcagaaagaatgagttcgaagcaagcaaacaactgaaagtagctagggagacacgtagtagtgagttatttacctcttgtgaaagaaagacctcccaacagcttggcattgaacaaaatcaaatgcttaattattatattacttacacagtaaaacatctcatgatatattatttggccctcgactcattcgacccttatagttacttaccaataccatcagtcatgaattaaccttgttgactactcaacattgtttattatgtaggaagaaaaacaagaagattaataagtaccatctgatgaggaaaaaggagaaaagataaataagtactctgtaagtttatttgcttatgtttcttaacactgttcttcacattaatttcaatttattttctataggatttgtgtagtgattaatggtgcatccacacacagcacagcacaacgagatatataatatatttaattaaggagttttttttttatttttatattttaaagtatttttttttttttcatttttacaaaaatttatataacaacccacgtgataactaacagagaacaacttaaatcacaattttatttcacataacaacttacattaaaaaaaaatatatatatatatataaaatgattctcttttaattaattattattcggatttgatctaattaataattaagatatcgttcctttctttgttattgtcattttgtttcttttagtgatctgctctaagaagttgcagcgtgacttatattttgctgtcttccacttaattatctcttgatctaaaaaatgtaatatttagttagagttcgtttattattactttttaattttattttgaaaaggcttatttacttcgataatatattagttttaattgtatatgtgagattaattacgtacaaagtaacgaacatatatctttgatgtaataatacccaaattaaaaaaaaaaaggtagactcgtttcttagtgtaaattactaggtattttatttagttgataattttgtgtagggacagatgtgattatggacttttatatagacacaattagtaaaatgaacaaccttaattatttttattataattaaagtgaatattgaatacacaccgaattaataaatgcattccatacatatgatatgatgacaattcaattatacatttctttaaa

SEQ ID NO: 18585 - DNA, 6743 bp, Cannabis sativa
tcctggtaaaataattctaacaggtggaggttctcttatgatggtggccgactggttgtcatctaagtaactccattttcttggagatgttgcgaatgtctacgcatggtggttggttaatattcagggaaagacatcgatatggatttgtctttaccacatacagtgccaagctgttaacagtaagaactcgtcaactaaattttagttaaaaaaataaaatgtaaaaggctaaagatgaaaagcttaagagaagttaagagcatcgatgttgtaaattcatgttgtattgaatatctaagctctcttacaaatggtggttttccaaccctctcttcaatgacagagaatggtatttataggaagctataatggctcgaaaatacaagtggtcctaaaagttagaggacaaaactctatctgtactatgaatatcagcacgttagaagggtagtggagaagtggtggtcgtgtgttattttatatcccaagtgggacaagtggtggacaagtggtgtctccacttcttttacttgtcgtactcattgtatgttcgcctccctttcaaaagcgtgcttggcttgacagacttgtctcttatcgtgtattcctttgacttttccccctatagctcaggctcacaatgtgggaataccattagaaaatttagttaagcgttaggaccatgagacacgaaccttgtttcttagacttagtaggattttctccctcaatgaatttccttctcaatccctttggtggttactctattgtaacaaacattctaaatgtcattgctcttttgtgtggagtaagtggtattaggtggtgactagtgaagtgagtgggtaagggaacctgggagaatgagagtggggaggtagagactgaggatggggagagagagtgaggatggggggagagagaaagcagggagagagagggaggacggggagagggagagggagagagagagatggaaagaacagggagagagagtgagatgggtagagggagatggatagagaaagagagggaaagaacaaggagagagagtgagatgggggagagagagaatgaggatgagtagagggagagcggggagagggagtgagaatggggaaagaaagagtgaggagtaggcaacatggcacagggagataaacttgtgcttcgaccctccttgtgttggctcttcctctcgtgtggtgtttcaccttggtagttggcctcccattttcttgtccatatactttcaaagtgtattgtggggattttttcccgattagcttagatatctccaaatttatacttagtcaaattttgggtttaacaacttacatacccaggtcccaagctcgcacccggactcaaactcgaacttggtcccgacttcgggacttgaacccgtacctggaccctgggacggagactatcgcgacacagacccgaacccggcccaaaccataagacccagaactggacctaaccctagttaccaaacccaagacatggactcgggattgggacctgaacttggacctagagttgtacataaacttttgtaaaccgtccaacatgaataatccgtccaaaccaaacccagataaccaaacaaaaaatgtaaaccaaatagcccaatgaaaataatattgggcgagttaaaaataatactaacccgtccaatcaactcgaactaactcgaccaatacgattaagagggtttatgtatatcatatattttatatgactatttaaaaaatataaagttcaaactaatatgtttcttttatggtggttgatttgaattttgaatttaatctttctatatatttctctcattattacaattaactaaaatataacaatcaaatgtaaaaaaaattaaaagaaaaaaaacattagcggtcgatttgtgcttgttagcccgacttaaccgaccaattttactgggcagtttactgggttacatttagattttcgtaactcgatttttacattggttgaataaaatgtagcataaactgaccaaactaaccaatgtacacccctactcggacctgaccccaagactaggactcaaatctgaaccccaagaccgagacacagacccagactcggatacgaacctagatcgggcccaaggacccagactcgaacttaaacttggacctgcacccagacctttaacctggaccgaaccctaggcttggacccaaacctggaccaagactggggtcgggagttggaccctccgagacctgggtcgggtccaggtctgggtgtaggtgtaggtttgggtttggatctaggtcctaatcttggtccgtgtcctgaggctgggtttgggttctaattctggttgtgtcctgacactgggttcgcgtccatgtttaggtcttggggctcgattagggtccggatccgaatgcagtgcctagtctgggtcctggtctcgatcctggtttgagtccagttcggggtggccttgggttcatgtcgtggtacgatataaaatattaaattttttttataaaaaagtataaaaattattttagaaaatattagccaaacaccatataatttttaaaataacaaaaagctattttctattcttgctttaaaaatataattctaaaaactaaaaccacaaccaaacaacttcctaaaatttctaaaatgaaaaataaaaaaatgagtcaaaatagtgtgcgtatggctgaaaaataaagaacagaaaaattgctagccataaagaagaaacgagacaaacgttataggcatgaataagctctcgagcatcactatttagcacgataaggtatttagcatcataccaaagtgatattatacaattaattagcgactttttatattatttattaaaccaaaataatatgattcaatattaaaatacattatcatctcttaaaggtactttaagttgccttaccatttctctttctcatcagcttcgccatactgttatttctcgttgttaagccaattttttcgatcacagacacgacacaccaaactttctttaatccaaagcaaaacaggttcaactctattgaaccttgtcattaaaactcaataaaacttaggtaaattagagagagaatagtagctttattaatgtgtttctcacaaatgatgaatcagttgttacatttggtatatggagccctatttatacacataggtagagtgtgataagagtaccgaacataactaactaactatatcaggcatataactaaaactcgctcgtattaatagagtgggagaccgttttggaacttgttgtagttccaaagatactattgattggcctttctttcgatgttttttttcagtaactatctacacttttgagtcattattttgttaatctatattgtcgaaagagtgaagttgtcataggtccagatttggaacacacgttcgtaagggtatgaagtacctttctcatcaaattattatctatatttttttattattattttattgatatctgaacattaattaaaacagttttaacatttaggattctcaacttcttgacaagttaatagtcaaatttattaagaagaaaaatcttaccttataacaattaccattaatttgacttgaagggtcaattgcaagtcacactggtaatttagcaaagttgaacaaggacaaaacaatattacaatattgacaatagataaacaacctcttctattttgtcttttttctctatttttttccccaactataataggagtattatttatttatttattttatatgtaatttatattataattatattagatatttcactagtttttgaaaattctaagggcacatttggaaatctaagagagatttggagttaggtgtaattaaaggtaattatataattttgcatgtttgtctgactatataattacaatgtaattacgtaattagaagtaattaaaatatttcaattacactttccaattctcatactcttgatgagaatcgggtgtaattactaaagactttctatttaacatattaagtactataaattattatcttcctgtatagttactaactattttgctaaagaaaacattagaaattcataagtaattgccacctcatatacaaataaatcttgtattttaaaataaaaaataattactatgatgtgtaattactaccctaataataaaactacttaataattacacaattactttcaaatgcatcttaaatcatttacaatattaaaaatcaaattcaaaataaacaattgcatccatttaaaaaaaaaagtgtgcaactaaatgtctaaattttatttttaacaatataaactattctaaattttataaaaatatttaaaatatctgctaatcatataattaaattcaaagtataattttattatatgtagaaatatcctcctagcaaaggtagaaccctgtaaaaaattcctacaaatatttatatagaataattagtatttttattctttgaacttttgacagaacttgattttgctctttaaaacatacagtttgttaaaatttgtccttaacatataaacattacataattatgctctttctgttaggttttcgtttcttttaccgttaaaggttaatattgttaccctctaaactttgaccaatacaaaattttaccccattttatataaaaaaaaaaaattaaaaattatagtattctgttaattctaaaaaaaaattaataaaatattattaataaacttgataaaaatattaaattaattaaaaaatacttaaaatacctaaattacttataaaaaaaacattttttcaaattttattttcatttacaaacacatatctcaaaaaatagcacaaaaattattgaaaatccattaaataatttaaacaaattaaaattttttgaagaaaaatcaattttatttatatttataaactcatatataaaaaattaaaaaaaattaaaaattaataaaatataaattattttgaaaaaaaagttaaaagttaaactaaaaaaaattatgtttacttaaaaaaatctagatttttggagagaaaaaaatagacttaaacttgtttctgaaatttagtttttataaaattaaatttttaatatatttttttttttatatcttaatagatttttttttaaaaaaaataaataattttttaaattgcttacttagttttattttatttttttaaaattttcttaatcattcaaaataattttttaagatttaaattgattttttaagatttactaaagaaaatgttgaatttttctcattttaattttgagggagtacgatttaatagttgtcaaaatttaaagagcaaaattgctaattcacaaagacacgtcaacatttaaacgaaataatagaacgaaacctaacaaaatgactaaatttttgtaaatgcaaaagtttagagagaattcttaacaagccgtatattttaagaagcagaattactattatcgaaagttcaagaggtaaaattactaattattcttttatatatatactgggtatagaagtcaactctcaagaaatatattattctatttccatatacatttccatttgtattcatacaccaatttttataaattaatggtgcgttttgtaacacatttttaattagtttttttgttttttttaataagaagtgaaaatattttttaaaaatatattcaataaaattgtttcacatttcaatttttatcaaaaattttaaacaaaataaaaatcactttcacattttttttaatcaatattttggactctgacgctaacctgtaccttagatccggactccagtcctgacccgaatcctgaactcggaccacggccgcgacaccagacctgaacctggaactgataaaataaaaaaacaaaaacaaaaatgaaagttatagaacacacttttgttttctgtttttaaaattaaaaaacaaaagtgattgtagaacacatttttattttttaaaaataaaattttaaaacacaaattttatttttatttttgtgattaaaaaactaaaaaataaaaatgttgtcaaactcccctctaaaataatacaaatgaatacatgagattggtgaaaatggaagaaacttttatttttatttttttatttatttattgagaaagaaactactgtaatggaaagcatagataacaatccttccacctgttataaaaaattcaaaatcaaaatcaaaatatattcttttcttaaaaaaaatctgatgcaataaattgtatatcaagtgtgatttcttcagtttactttgattttcctattaaaaactatatctgaagtagagaagcaataaacaatatctgaagtagagaatctcctcagtataataatatatatgcaaacacaagaaaatcctatttggactgttatgcttgaatcattctaatagtactctctctgtctaccatttatttttttaataacaaataccacataaaaccagcaatgaagtcttaatgaatctgcaatattgaccaccattctaacttggtcaacctttgttctgtaccagtcattactattactaagaaaaaaaaaaccagaaacatagtacaatcaaaatactggtgttgtcattttatatatttatatttttttaaaaaataatgattcttatttctggccaagttgtatatgcctcatcattgtttaatactcca

SEQ ID NO: 18586 - DNA, 4371 bp, Cannabis sativa
agattctcaaagttaataagactatgcaggccacaaactttcagttaaattcttgaaaataacaacataaccccttcaaatttatgaatatatatcatatataattttataaaaagcctacctcaaacaagttaagaaatttttttttaattaagtgtactcatacttatatgatgacacatttacctaatgcctgattaataaatatattttacattgtgcccgggttagatgtgaattaggacagaaaaatcaattccaactatcaaaataatcacacaatcttaaaaagaaaaaaaaaatgttaattaagatcgaagggcaattatatttagaaattgcactaataaatatatttttctttggggtgtgtagatgataattgggttttgttaaagcttaaaatacagaattttttacaggaaaatttgaataaattttttcttttaaaaaataataataaatattatactttggtgtgattaatttattttttcagtgtgattaaatggtttcatctgattaaatctatcaaaaaataataaatattaaaaatagagtttaccttctgcaaaatcttgagctcatcgcgggcattccagttcatcttcttgatggcataaaagtctccatcaattgaacctttatagacagagccttgaatcaagcaactttcatggaacccattagtggcttcttcaatctcatcaatactaaacactctgtacttatccaaacaccctgatacatctgccattaaactttcttccatctccttagtataaaaccctttattcttgttacctttcccacctttatagagttcttgcctttgcttttcttcatcaccccacagatctctctcctttctcattgacttttctctgtacaaccaaagcccaccaatcaaaaccaccaaaaacccagttatccccaacccaactgccagccctgtaacgacaccctttctgctgtcgttttctggagaaggaggagaaggaacgacagtgggctgggacagggctgggagcttagaaactgggatgaaaatggtgtcgaaaggcttgatgttgttgccgttaacggtggttatggactccgtttggactccgaaagttgcagccacagttgatatgttatcagaaggctggaaaacgtaggagatgagttgattggcttgatttccaatctgggttttgtttggacacttgcagaagattgggaaaatgacactaaccccaatagtgagatttacaggtattagagttgggttaactagctgaacagattggtaagtggtgaggttttggaagtactcagttgaggttctgtaaaaggtgtcatcttttttgattgtgtagctaatgttggcatacgatatggccatgctgctattgactgagttgcaagaacatgttacggggatgaaaaggggttggtttgggactagtggggaagatggagaggttatattacttgggtttgagatctctagtctgctaagtgaaaagaggtcgcctatagtggctaagtccaggaaatctggggcctggcctctgtaaaagacataggtttggcatgggctggtggtctggtttatggtgcacttgtagcctatggtgcttggttgagcattagaatggaaaatgatgaagatgaagaagaagaataatagtagcagtagaagaagagagttgtaacgaggtttggctcttgtcattgtgtttattgtgtttatgacaagtttttgtgtttattagtttatatatgatgtgagacgtgtagttttagaagatagaatttgtagaatgaagacaaactattttcgtgtttactatacactcacctaatcctactttctaaactatacactttcatattctaacagtctggtctttcaacagaagcttctgctgaccttagttgtaattcatgaactgtatatgactttatggcaataacaaatgggaagagttcccaatgagactaaaagatcctcttattggacaaaagtagcataaagtcatgtactacatattaaagaacattgaaaatccacacagctgacactagaaccatgaccagcatcataagttttatgttggactagaaactacacgtgactcaatctgttgaaattgttatgagatacgaagtaatttggtctcatacgacagtaatattattcagcacagcagatattattgatcaaactcgactcagttttcccatttaatttatttcattttcgttcaaagttgtttactgtagaaaaattttgatgataggtatatagttgtggccaacttctcattattttgtggatttgtgaaatctagatacaatgtataaaatggggggaacaagacaagggacatgatttgttgtaacactacatgccattaatacttagaaaatttacaactactcggtcgtatctataaacaaaacagctcattataaggtagctgaaaatataatagtaaaaaaaaaaaaggagaaagaatggacagagaagcagcagaaaaggaagagagacaaattatgtatacctttcatgtttttggtggctaagaatattcattagaatagatggatctcatctattttttattgttgtactatccttcttgatggtgaaatcccaaaggtctccatatttctcattgaaatcccaaatgtccattgtattgtagtcagaaattaacttgtcacgagctcctctttccatattgtaaatttggggctcaaagtggtggggtttatctggtttatccatctcaatgatgcaaaacaccactgtaaacaaacctgctccaatgaacacgtactctccctaaaaaaaacaagtagaaaagagtgattttctactgaagaaaaaatatgataagaaattgaaccttagataaggggtgtttccttgttatatatttacatacaggagcattgaagtacatcccagctgcgactgctggaagaaacaaccatgaaataagccctgcaacacattaaaaccaaaaggcgtttaattttcacagcgatgtacattttcttctatagtagaaataaggagagaatcatcatgttagtgaactagaggaattccaatatggttggtatctcctcaataaataaataaataaaacattccaagcacaacaaaataacaaaaaatagtcttattgggtatctataaagtcctggttagacactcctcttacattattgaattaacatgaagtagtctttgaaaaatattattaatacagaaatactttgtttttgaataccaagcgtgaaaaattcgcaatccaaaggtgttagattccatctgtaatttttaacttaagttttaataataaaaagaaaaaagaaaaaaaaaacaaatggaattttaataccaagcgtggaaaattcacaattccaaaggtgtcggattcatttgtacacagactctcagcaacttgaactatcttctttgtcatttaataatggtgagaagtgagaactacaaaagtagttgacaacattgaacattctattttgcaataatgaaaatgtatcatcattatctcaacaatgttaaaatacaaaaaagaaaaaaaaaaggtcagttattaaaaccttggaaaccagttggtgggtctactgaagcgatttctgatgatagtgcttcccaaaaagttcctgaaaaataagataaacaaagcatcatggatccctaatttccaagagtaacagttaggtataataacattgaattacataattataagaaaaaactaatataataacttaattagttcacatagcatatgataacttaatcccactaaaaaaacttagataattttaaaatccctcatcttttccctaaaaataagataaatcccttatcttcatgtatattaagggtaagaaaaagaaatactagatggtgcttgcttagtgtaataggaatagtaattgttaaaaattattggattccattttaaaattaaatggaaatgagtagattagttcatgtttttatatatgggttaatatttaaacatttgattatttttgtttgctggcttgcggctggctaactatgactcttatactatgttgataatcatacgttttcatctcaaaactaattggtaatgagtggagtagctcatattcttatatatgacttaatatgattacatttgatccatgtggggcaatattgtccaataataatcgaaatataaataataagagagttatatttgcaaccccataagataataaatataccacattattaaaaaaaatataaacttaaataatttttataaattactcttaatattttttttaaaattttttcctcacattatt

SEQ ID NO: 18587 - DNA, 6867 bp, Cannabis sativa
aagctgcaaattggttttgaatctaggatgcaaatttattaagtatacgaggcccaacttttccatgaatatgcacacccatatttgataagatgggtaatctattgaacataaaagatatgaaagaatgtagcatccattcatcagaaaaacatttaggcaataatcgttttcaattcattcatttccaccctaccctccaaacctccaaagctaaatgatgccttcaaagatcatgcacaaggacacaatgtgagagaacttagattcgaaaaagaatcacatagtatctcgaagcttaactttgaagcaacattgtgattgtgttttggtatttccagtgctagaattttgatgattctacttgattcaaacttgtccatgagactgaaaagattccaagactgtagtcgaagttggaaaagtttagacaacactaaatttgtgtgaatattcaatgaaactaagaatacttaattaaaaatgtgtgagtactccctaagagtagcgagtacttaacttattgagtaccaaacaaactaaataaaagtagaaaaataacaagaacacaagagaattatagtgattcagtcagaatttggtctgcttagttcactgttgcaaagatctcatcttaatttatttgatttggatcactcatttatatagaaaccaagtgtcctttagatttacataattgattggtttcaaaattgtttttacattaaataacaaataataattaaataaatgttcaaggaataaatgaagagctttttaatacgttcttgtattaagtgcaacaacgtatgcgacttagtaagtcacgagttttccattcatattctaacacacgagctcgcaggctctgagatgtttatattcgcatggtggccatcgggccttttatttggatatctgcgttcacccttgatcacatacatagatatcttatgtgttgacaacatggaacatgggaatccccggcgagttgtcaaatacttagtcattcagacaaatcctatgtaaagaagcgatccttattggttgaaggagatgtctacttagtcatcgcatataatcggtatatgcgagatcagtatcaagtcctcttggtcctgcttactgttaattatgcaatgcatagtatgcaactagaccctgtcaaggttgcatcatctttcaagtttaggtcaagcaagcctgactctatgagaattatggattaacacgtcatcttttccttggaacttgggtccacatgtcaattctatacgagacttgtaatgtcctactcagaggaacgccacgtgttatgattacagctagctaatcccgttaatcgggggtccataagccaagtaatttaaaactaataataaacttaatttaaataaataacttgcaataatacaaacttatttcaaactaaaatatttaaaattatataactgagatctcgcaaaatttattttttaaaatattacaagtcatttcttacaagccggcctaagcggcaaaaattagaatttctacacaatttcctgttcgacccaaccctcgtggtctagcttggcatgaacatgtacaactcatcttcaaagccctcaaattcatggttgaagcggcatcgcctaactactgtctgcacattagagcacatgtgagccaaggcccaccaagacagaataataatacaatatgataattataataataataattacacttcatacagtacgccactgtgtatacactgtgccaccacactttatatcacagtattccatatataataataccactataatttattaatttatatttatataacatagacccatagacccatgtgttacactcacacgtctattaatgtatatatagcatacactcacgtgttacgctcacacgtctattttacatttaaggccttactagggtttgtctcaggtatagttactgagtctaacctggttatgccttacccgcataactctactcatatatacataattcatacattatgctctcacaataatttattctgatgatgtttatcaggtctaactcagttatgctttatacacataactcttgaaatatatatgcatacaatatattcaacatatattctactatataaagttttaggataataaccccaacttgcataactaatcatttactcacataatacgttataacatgctcaagacgaaatatatttagggtaataatcctaattcacaaaaaatataattacttagggtaataaccttaatctacaatataaatacttagggtaatcaccctaattcacaacacatataacttagggtaatgaccataatccatgttttcatctaattaatcacataatatataattgcgtcacggcgctataatatatgtgcataattcaccgtcttacctgatttccaaagtatgaggagaaattccaatccataattgatcttgaccaagtttcggtatccctagtcataatccccgagttgtacacaataggttaatcccaaaataatttttttataatattcacatttgagactccaaacactggaccaagtaatagagctcgaaacaagctttctaatgatataaagaacgtctaaaacaaagttcgaagtcaaaaattatgaccaaaacaaattcaggaaaattaggaatgttgcagcaaggtgtggccgcgacgatagggtccgaaaaaccctgaaaaatgcctaaaaatcagatttcaaagatggaaaatacacaaactcaacccaaactttacctaagtcatataatcgatttttcatgccaaattagagtgtttacaagcacttttcacaataaatacaacatgcttgaagtacataaacaatcaagctcaattatctcatagttcacataatctaagcttcaagaacactatacaaagaaaaccaaatgaaatttttcatgctcaaatccaccaaatggacagcaacatctataaataaaaattgacccaaatcaaaattcatgcattgattcaaattaccacaacaaaaccttgactttcatcgatgtaattaataacataaaattatttcaagaacaccatgaagaacatcattcaaattcaaaccctaagatgagaatttcaaaaattacaacaatacaaaaatgaaaataatacctcaattactcctccaagctaagctcaagaatctaacaccaaaatccacttcaagaacttgtctcaatttttctcaaaactcaaggaaaattttcaaagaagaagaggagaaattaattcctatacttagccttttttttttctttctatttttcatatatgctcattttttttactcacaggtaaactggttcgatctgagttagctcgagatcgcgtagaaattaatgaagttttaagcagtcttccagttagggattgtgattggcgtcttctttgtacgtcaactaaattgcgagagcacaaattgattcgtcctgacactagactttagcgagaactagtgtacaaagatctttctgagaaacaaaaggtgaagattgacaggcgtctttccaaacaaactccgaggcaaatatcaggttacacatttcttacttatactgacatttttatgcgagtttacacatttttcttgttcttagaaaatattgctttttttttgcagacatgactttccttaaagagtgctcatgtctccaattgcaagtcaacgatcaacaaagacattgtgactccatcttctctaaatcctccacagaagaggaaaagtgatgttgttgatcctctggtaatcgatctgtccaagaagcatcaaaaaattgtccaaaagaagggaaaaaagccaatgatggatccggggatgaaggctcgcggtctcatggctttgcaggaaaagttcgtgagtgatgactttgttgccaaaattgagggggctcttgctgaagacctcttgactcgttcttctgagttcatgatccatgagatgattgtatattcgtgagctatcactgcgagtcttaaaaaacttgacctcctgaagaaacaaaacattgctctttaagagagtttgaaaaaggttaagctcgatgcagttgctaaggacaaggagatcaaggattttggtagagccaaaaattaggcagaggagaaaatcaagaaattggaggaacaaagcgtcaatctcactcgtcactttaacaatgaaaaagagaaaaaaagaaagcttacgactaggctatcaacgactacatctacactataccctgatcaagttgcctgactttgactttgccatctttggtccaaaggttgtcgagatggccaatgcatattgcactatgtctcctactgagactcaaggtctaggcattaatcgtttccccaaggacgccactactgaggttgaagtcgcagatgctcctggagttgacgtcgcaactgctactgaaaaggtcgcgaggaacatcaatgaccctacttcttatgaatatatatttttttgtttgaacttttcaatatcggtatatgggtactcgtgttttgtaatcgatctttgacaatttttgcgtcgcactttaaacacttctcacagtatttggaacaatatatcctctaggtaattttttttaaaaaaaaaattctaagtaatttctaatgcgatttggtttacttcttgcaattataagtacatctcggcatacttatacctttagtatttatcatgatcgtaactacagcttggtgcaaaaatattactgcaacttactattacagctcagtacaattatttattcatgcgatttacgtatttatgaattttttggtgttcatgagaattatttaaaaaaaataagacataactgtaaggataaaaatttgaaaattgtgcgatattattcatgatcaataatgcgatttttattaatagtagtagtgatgcatgtattctccttatatttaagtaattttgaacaattaattaaaattagctaagtatatacatgcgagtactactgataatagaattttaaatgttcaccattccaagctcggtcaaaaactgagttgtttaaatcagagagtcagtacgttgcgttgcctatcttttcaacaatgaagtatggacccttccagttatcaccaaaaaccccatgtaccgagttgcaagtatacttttcgtaatactaagtatcctaaaattacaagatctaaaattaaattatacatatagtatagtattttctttttatttaacctccatctacccattttattaagtagaaacattctattgtagcagttgtgatcatattcataccctacaaggaaatggaaagtctctatcttattatatccgtatcttaccaatcaccccgtaatctctcatcttataatcaaaccaaacaaaaaaaaaatcttttctatgtgattttctaaaaaagaaataaagataatttcctcaataaactaagaaaacatatcattttggccttaatacctttctttaaaaaaaaaaaaaaattgaaataactccaacttattgctttagctgtaatcgataattgtttaaacattctgattaaacataatataaaacaccatgctatttgatatttatacatttagtatatttactaaagcaaaattcaaatgaactgtatcaataatcatctccaaaaactagaaaattaagattgaaaaaaagaaaaaagagagagacttattaacaaataagatcaaatgatgatgccaacaagagccattatgctgaaaagagttgcacaagccacagcaacaaagcccttatctttcactaaaactccaaccaagaacattgccacgtcattggtgatcttcctcccacttttgaccagaacccgacggcggttaccggcgacggtgagaagtactaacacggtgatacacgtcaccatggtggctcttgctgcggccaccagtcccaacccaattgccataacaacacccaaaagagccagggctgacatgtagtgaagggcagtccattgtgtgatgttgtgatctgtttggagaaagaagaatgctgaatacgacagtaataatggtattaatattattgtcgtttttctggttagagatagagatagacccatatgggatctcaatgaagaagtagaaggaaataagaaaggaggggcgggttgtggttgtgagactgaatatattattgggttgatgagctttaatggctcaatcaaaggaattggctggcatgtgctgcacatggaaagatggcatattagaactaatatggtgagaatgagaataataaataaatatagaaataaatcaataataaaaagttataaaaaagacagagagagagaataataaataaatattttatatatttattgaggtgatacagagtaaacaacaacataggaagaatttataaaatgtagttgggaaaatagtgtatacatttactgatacttacaggggtgttcacggtgcgggtggtgtgattttttactattttttcaaattaacccgcacatttaataacattaaagtgattggaatcagtgacagtgttgcctctgtttcgaaacaccatcttaatccttctgccatagaaaatggttcaatcaaaagaaaagcagtagagtcaagtaatatattttgagcatatcatcatacatgcttttaatcacaatgagacaaaaattgcaacattattgatattacaaaattggaatatccaaatttatttggacttgaaactgtcaactgttcaaatacaacagcaaaacttacaccttacacccaaaaatttaaggactattttaaaaaatatg

SEQ ID NO: 18588 - DNA, 8543 bp, Cannabis sativa
cgtactgcatttaattctttgtgatgtaattctcattacataactgagaattccattatgtaatgtaatcatgattacattataatcccattacatctccttttaactaaatattctaatgtgtaatttgattctattacaataccctttacaacaaaccaaacatgccaaagtttaaaatatctatttgaaatacatctataaaaatattaatactccattgcaatgactaatttaccagcacaagctacaagagactaattcaccagcacatcctacaagagaactaccgaaatattgatgaaataaaaaaggtgcaccttaagacctctaaatgtatgcattaagcaaactataagtacataataaattaaagaatatttctcaagcatcaaaaaagtatatggtttgtaatacagagtacagacctgaaactggccgaattccacacaccagtgccattataaaggacacagatatttgaggcatcatcacctttcccctgtgatgactataatttgttcctgctctctggctgcagttcagcttcagctgatgcttcgcttgtattatctatatcagcttctgtaggatctgatgatgctgcaactgcatcaattttatcacccaacttctcatttttgagctgatcatccttcaccaaattcacttctatggatctttcttcgtcttcattaggaccaagatccgaaggaatttgttcggatgcttcactcaactgggcttcatctctcctctctcgattggccactacattcaactgggcttcatctcccgtctcttgattggcgactgcttcctcttctctctcataatgctgagaatcacttgcctccataagctcgctatttgttttaagatcaaatgcttcttctacctcatcttcgtcaggtaatatacttccatattgtggcaagttgtaaccttgggtatcggatgttacgtcctcttcaacaccctcttgttctgtgtcactgatgtcttttgcggtgtcggttgtttgagtctctgtttcagttgggatggattcttttgaaatgctttctacttttgaatcgggcccggctgcattttctgaggcagggaaggactggaaagcatcccaatcatcttcatcctcttcgtcctcctcgtcttctttgttctctaccatgctatccttattatcgagaattacaggggctgaacattgcgagattttctctccactttcccctgttggcactggcaaacgtatctctaaggactggggtgtggcttttgactgtgttgcattttgatcttgtgtaacagaagcacggatgacctcctgacagaagtagaaattatcgtaacttaatgggaattcaattaatggagtctgcaacttctgactatataattcattaatcaattgcaattatcagttgcaaaaaatagtttttttaatttgattcccccatgattccgagctgtttctaactcgcaacagcttcactaaaaaaagagacaaacatgtaaaacattttatcatcctttaaaaacacacacacacacacgaggttcttacaggactatgcatacaaaacaacaatgaaatactaaaatgccacaattggagcctggagttattctaaaaaagaaaaattggagccagcaggcccaacactagaagaatagtaagtttcaccaattttaaaagacaagtcaatattatgagccacagacctaaaatcttttgtggacaatgatgaccattaaagtaaaaagctttacctaatataaattaggtggcattatattagcaccccaaaattttattaaacaccatactcattatatatttttttacaataaatctatatatttttaactttatttattgttttcttttcacattctaaaagaatacaatataaatcaaatatattttaaatattagtaaatttttttatttttttttacattatttttacaatgattgtgaacataggattaaataggaaaacatgataaaatttcatgattttattttttaataatagggtgtttttatatatttttggagttcaaatgcaataccccctacaaattattataaaccaccaccagtcatctttatctccatattaacataatgaagcctgatagtcatgtggtgaattatataatactgtttctttatcttttaaaatgaataaatacatccacgatatacctgaagttgttgccgatgtgctagaggcattgacaataaggcatctttgaagtgaacggcagatgaaggaatttgtgcaagctgagaaacaagccttatagcagtgcttcttagatcattgaactcctgccataaaatgatggtaaaaagaattttaccataaaatcaaataagagacgaccacaaatatccttaataaacctaaaatacaattgtccttattgttgttgtaagttgcaactatttcagctaataatataagtcacctgagaatatccattctctgaagccataataatcatgacaatggcttctaagaagagtttcacataacctctctgacattcactgtcttttgatactgcctgaagaagcactaaaagcctcaagcactcaccagcaacagctgctgattctttagttataagcttatgctgaaccgccaagaacatcgtatcagtcttgaattagaagcaaaacaaagaaaatatatgatttttaaaaacaaacagctataaagagaaaaaaaaaaaaccttcagactcttctggattatcataaatatatcttcgataagttcaccagcaaagaacattaggaaaacattgtcatcagcatttgtgcccctttgtatcacaccttttagcacctgcaacccaatagcctgaacctgcacggtagaaaaattctaacagttgcttaaaactagtactcaatgctgatatcttcatgcaagagaatgtatgcatgttacctgtatatttgaatcattgagtacattttggatacactcaatgcaaattttgaacatgtgaaagtacacttggtcaccatcactgtgctctccaggacatcctatttcatcaattaactgggcaactaatatagtttgttcaagagaaaaagcaagctttgcctgccatagtgttcgcaaaccagatttattttccagtagatgaattttctgaatgcaatcttttgacaaattagctatcgcattaagacaaattccaaatatcactctcatatcaggaaaatcactatcagcagatttgtattcatctgcacgagagtggaagaaagaaacaattagccagctgaatattgctaccatgagaaagctgattttttagtaaaaatgagagtactgctctctagtaaaaatttagcataaataatccgagtactcctcagatcatgaatgctcaccaatatatttcttcaataaaagtgtacttggaaaagtcattaaaacgacaagttggtcaaagcttttttaatacactagcagtaaattaaaagaaatgacactgccatcatgaattctcaccaatgaatttcttcaataaaaggctagtgcacttgaaaaaatcattaactttggaaaagcacgagttggttgaagctttactaatccacttgtaaccaattaaaagaaatgacacagctgcggaggttaattgtttctgcagaaagttgataggaaggtgacaagtaaatgttaaatgtgtgcatcagtaatacaaataaaatacaaccgaaagggaaaacaatcatgagccataagcccacctttggtccaaaatgcttcactagtgtttcagctgtaacgaataatgcagaaactgaatcttcccagtttaaattatccagggataatgcatcaatactgtaaagaccagaagttgtaagttacctgggtattcgcttcaatgagcatgataaattagtaatataataaaaggctgtacctccgagacactttaaagagataagccatacaaagttccatggccaaataagaaaagttttccatttcaaggaaatcttcagggcagttcagcacaatctattgaaaaataaaaatatgattcagaatctttatttcaaaccataacaaatttatacatgagcacataaatcaagtttctaaccaacatcatgcatgcattatatattttgcttttaaatgggtatctaaaaactagtcttaaatcactttagaaaaccaaaatgaaagggctcgtattaaagacaaggacgtcataccaatatgcagtacatcttagttagcaaggtaagtcaatttcacaaaaataccatatcagtaaaatgtcataaatacatcatgtaagcctaatatcaaattaattttagggacccttaattatacaactactgatgatttggctacttaattttcaattttggctcgtttgatcccttaattattaaattatcatcagatctcctaacttctacttcctaaaatactgagatcaaattaatgacaaatgaagtcacaacttacatagtcaagggactaaatatgccaattacatacagcaagtgaattgaaaattccataagaggccagcatttacctgtgatagaacagaaattgacagactatcccacgaattatcaaggtacatggaatatgagaaaacctgtgacagtaaaaaaaaataaattatacttgtgaaatcacatacatgaaagtgaaaacttgcagtcgttaaaataataaattacagaagctttagaaatcagaccacattcctacagagtgggtgtcattatactaagcataaccggaacgaaaactttgagggaaaaataaaaagtgtacagatacattgaacaacactcctattcccatgtttatggaaaataacttctgtatgtagttttataatcataattctttgtttctggagacagtgtgcttactggggatcctgatcaaagagccgtagttttataatcataattttgtttgtggagattgtgtgtttactggagatcctgatcaaagatcttgcttattgtgtccttgtatcaagtttcctttgtttttaatagttttggttgactaaaaagcttttattttttacctttgttggctattttgtttggcagatgacagtttgccctctaattctcatagttatagagtttatttctcaatgaaatctactattttcttaccaaaggaaacgcacagtacacgcttagggcattgactatgacataaacattacggctgttttgtttgtaccaaggatataaacatagcttgaattgaaaaggaaaaaaaaaaacacaccaacaaacatcatctagggcaacacaaataaaaagaaattgcttatgcagtgttttttggttagacacttaaactgcaatcagattcgcaattaagattcaacatgccaaaataataaaaaaaaaatagtggaaattttcataatatatattataatgtcagagagagaaatggatattcacctgcattagttctctgcaaatatctacagtaagaaatcccgcactggcaaatctttttgttgagagaaattggaatactggcaatacaatctcatataagtttatacccggagagttcaactcttcaatggctgaattgacctcatggttagctttagaataagccaatggaattttcagcttacaggcagttgaatgctgtccacgaaataaaacaagcaaggaaaatccccagagaaattgatattcactagtttcaagttcaaccatattatatccagaaagtaagctatttcctgacacactttcaatagtgccttttgacaggtctttcccatcaagactcacaggaactgcatccaacacaagtgcttgcaaaattaaaggccaagattcttctaaacaaggttgaagttttgctgacaccagagatgattggattccactaagaaatgaattccactgagaacgaagagtgacagcataaatacattgaagattttgtgtaatatgcaaggtgtaagagagaaaagcaaacttaacaaaagtataccttttttttaagatgcacattcaagaaggtataactgtaatcacgcaaaatccctatccagtacttcccaagcatatttgaactatttgaaaacagtggtaagagtgcaaggtattctgctggaaccacactatgatgcttcctcaaaaatgtataggtgtaacatttaagagatgcatgagcagctagaagtcttatcttgatctgtttcattatcgatgaataaaattagacattcattttatcttggatatccatcacttaagaaataagcatgagactcttgattcttctgtagcatcatgtatactcaatgttagtttaaaagtaaaataaactaaatttaaataccttgcaggagacccattcggcaaatgaaggaaagtaaagatcattgaattcatttagcgggcgtgatatcaacgtaaaaatacgtttaacagcaacttgatcgcccttaattattccattggtcagtatctgaaaatttcacgtgtcatttcatgtatggattattggttaaaaaataatcaaagaaaatattttgtcttactcattaccttagtagccaactgcaagcccgcctccaacaagatagggcctgaagatgaatctaatgcagttcggattgcagataccagttgtgcctacattttaaacaattttattcactgagaagaaaaaggtgaaaatagaagaaatcacagaaaatgaaaaatacttccatcgtaccagccaaggaaatactttatgttttacagattaatataaaaaactaatggtttaacatcaataattactcaaactagtgaagagacttcaaaaagttcagtcaacatacctgatactgttccaataaaaggtggcctggaagttcagggtcaggtgttttttcgaactgtctccatacaagataaaaagaagattacaaaagaaaatcataatcttctggtaaatggatttattatttcccaaaacaagaaaatatgatgaacatgaaattcggagagtaaaaatgattgtgaaaaccataaagttgtctacagctaaataaaagctatcttgaacctggaatgagcagtcttgttatatgtgctcattcagcaacccttttcatccatatatattttcttaataattataattgtaaaaatctcaaagggaaaaaaaatatatcacccttttccggaagactgcattaatcatgattagggcagaagataaagggagagaatggttgaagtttatgatttcttggtgtaaaacatggcttattaagtcttcgggtaatttcatttatctgatgaataaaacgatgaagataaaaccagcatgagtagaaaacccaaagagcagcacacagccagagaacatattctcacataaacagcacaaaaaacaataatctagacttcggattcaagggagactgacactcccttaacaaccttgctcaaagttgactcagccactatcctccagcctattaccttcttaagcctcctagagtaccatttgagtggaggtttatcgctcagcataggtgtctacaagagaaccagccttcataggcattgatagcagaatttacagcctatttgaattataggttaattgacaccaaccaactaattgaactaacacaaagttatagcataaattaaatcccaaaaggcaaacacttagaaaatacataaaagctctacatcaaaggcacatattagcatttcagcaagaaaaagacagatttaccttgtccataatggtacttagaagtctcacacctataggttgcatgctctcaaactggatcgtgcttatctacatataaatagttaagaggaaagtcaaccttaaatgcattttggtacctgagatatacagctcataaacacataaacagaaggcaagcattttcgtgtccacacctgatatgcaagtgatatgagttcttgtatatggaggacaagccaatcaccagaagaccgtccactggcgggttgtttccttgccaaatggagatcaaaatgagctgggctagttccaacagctgtaggaaggtgactcaaacacctacaatcacataagataacaggtgatctgtataacaagttgaatggtgcatgtgtgcaagaaattaggatgtaaaacaaaatataaatgttaaaagaaaagttatcacatactcagcagcaaatactcttgtccgatatctaaggtgtctatctcggtttaagagcatgtgagaagctttaggagtgtttccatgtgatgaaaagcctccagagctagaaaccatgttttcatcatcatgtccaaaattcaaacttgtaccaccctcggtaccatttgaaggatcactgtctgcgtcattattaccttcagcatttctccttgtggatgtggcaagaacctgagagagtgtcaacaagttttcaacttccaccttactttttagagtaaaatcaagagtttaatttg

SEQ ID NO: 18589 - DNA, 1718 bp, Cannabis sativa
accctggtacattttctgtctgcactgttatgatactccaaatcttttctgttgtaatatgggttaatgatcctctcggttaatttcttcacagatttcaaggatgatcccgatatttacgttttcccaaagctgaagtacgcaggaattgaattgtggcaggtaaatctttttctcttcttttttgtgtgtttttgcgttacatagttgctcccatggaaactcagatgctgatacgctatttttgcaggtgaaatctggtaccctgtttgacaatgtcttgatcactgacgatcccgagtacgcaaagcaggtggcagaagaaacatgggccaaaaacaaagatgtatgttttttcttcactctattgttagtgtaactcccaataacattatctcttttatattatatcttacggtttccaatggtcttttcaggctgagaaggcagcatttgatgaattagagaagaagagagaagaggaggtagaatcactttttcatatttgttattattttgtcaagaatgttctccttttctttttcttccttttcccatcatgtggtatggtattgacacctaaatttaattctatttcaggaaactaaggatgatgtagttgattcagatgtaagtaaaactttgcttatttctaagtaactccataaaaattcttctgctgtggtcctaatagtgttgttgtgtttgtttccaggctgaggatgaagaagaggccgaagaacacgaagaggctgcagaggaatctgacgccgaatcaaaacaggaggcagccgaagacagtgacgatgacaagcatgatgaactttaggaaaggttaagcacaacagcagagttgaggagagagataagctgggagtgttcgaaaactactccgaatttttttcttccttattttaattttttacatgtaggaattttctcagcaaagtaaactttagctgtttgagcctctaattagataaaagaaagatatgatgaattgtgtttttttcatcttcacaattatgaatagctcaaacttgtttaaattgcctcctctttttaatttaagtctctgtctaggcccttacttaacttaattgtttccgtaaaaagaaaaaaagaagagtgctactgttaaattttattttacgggtcttcgttaagcttataacatcatttttataaatttttgaaaaatttcgactagtttacagtgtcgaaaatatgtttgaagttttgtgaatacacgtgatattaaagattttgttttcggtattgtaaactatttagaatttttcaaaaatttacagggatatttagagggatgatactgtaactataattaatattgctatgaaattttttttgaaaaaaactatttcgacatgtgattttagacgtgaaaattgattaagaagttgtaatagaaggttagaattagtactcttccctcaaagaacaaaaaaaagaaagaaaaaaaacttaatttagttttgaaatctcttccaacaaaagtaacaccgtcctttggtcctctcttctgtagtggttgttgttagtaatgatttggttgagggatttcatttattggttacctgaaaaggatcttcgtgggaagttctgtcatactctgcgtttttggtagtctgcaatgtctccacttttaaatttgtacccctttttgttagacttttatttgggcttacattaaattt

SEQ ID NO: 18590 - DNA, 7740 bp, Cannabis sativa
atggataggagaggtacatttcgtattctttcatatatggaaggtttagttttaacatatttttgtattgcctgtgaccctcatagtatctgttctactacgcgtgattcttttaataatggtattttatcataaagaaagggaatatggggtgattggttttgagtattcatatcatacccttgcatttttttttcttatggttattactctttttgtacttgccttgtaataagtgctattttctcagggtctggataagaggcagctacctttggatgacgaggaagaaattgtcaatgccataagtctgattcttggttccattgctaataaagatttaaagagcaccatgttagctcgattgctatcttctagctttgactctatcggaaaacttgtaagctttttcttctattttgcctcgttgcttctaccgttgttaaccccttggttttcccattccattttctagtttatagctttaggaatctaaatccgatagaatcaagaaataacttttttaattcttttccccaccttttgagagaacttggtctagaatgcaatcaaatttgaataaatgctcacctatcgggaaaaaaaaaaactattccttacttatcaacagataaagaaaatttgtactctttttgtttacaaacagctgtggaatattttcagaatgtgtcagaagttgctagctagctcattgatctttgttaattaaccacggttttctctctttcaggttgatgaagagaatacccaccgcctgagagcaaatccagctgtttatacacaaattttgaattctgctgccagaggattgtacaggtgcgcgattttagcgaatacttttgcccaagtttttatcataattttctttaagcataagatatcgggccttcgtagtacttgttttcactaaaatttgagtttgcaaagtttggcttataccttaaaatctgcagagctgttaaattacaatatatttgtattgattgcatcggaagtttagagttgaaattagtaaatttgtttccactatgcatcagttatctgatctagcttgaaatcttgctgtttaacataatacagaatgggaactgtattcagtcacctcgctacgtgcctaccaagtggtcctgcttcagatgattccgtactttccttactcagagttttttggcccatgttgcagaagcttttcaggtctgaacacatggagaatggtaatttagctgttgcagcttgtcgggctctttcacaagcaattcaaaccgcaggtatagaagataaaaaaccaccatgcatatgcgatgctcttcatgtgtctgttgtacgtatgcagaataatcggttatgtttgattcatgtgcaggacaacacttcgtaacaatactgcccgaagtactagattgtttgtcaacaaattacacatcatttcaaagtcacgaatgcttcatcagaacaggtaggcttttattatgaattggcctggagccagcctcatgatcatgttttcttactctctccaatttcagttgcttacattacatcttttcagccactgttgttcttgaggaatatggtcacaaagaagagtatggacctttatttgtcactacgttcgaaaggtttactcacgcatcgtcagtagtggctctcaactcttcatacatatgcgatcaagagcctgatctagtggaggcatacacaaatttcgcatcctcctttgttcgctgctgtcataaggtcttttacagtcctatgttattttccgtgctccaataaatttgaagtgcttgcagtggattaagattaaaaagaaaaggaaaaaaataccaattttgaatgataacggtggttgttgatgtctcaggatgtactggctgcatctggttctctcctcgaaatttcctttcaaaaagctgccatatgctgcaccgctatgcaccgtggagctgcactagcagcaatgtcgtacttgtcttgtaagcttatcttagaatcttatactatcgcgatgtttagattaagaaagtacatgccttgatgtgtttttctaggtttgctgatctgtttaggcttttcctctttccaaccaatgcccagtgatcaagtataaaaaaagtgtaaagtatactaagtttccaaaccatagattctacctatcaataactattaactactgatgatctttcatcagaaattgagacaatcccctttaaatcataaataagagaaataacatgatcatgctcaattacagtggagcacataataaagggtcaataaagatctggtaatcccccaaatccgacgaccaaagagagaggtcaagatgtcctcatcgaagcaatttagatctatcaatgagacacccataaaccaataggagacaaaacttgcatctctcaccaggaaaataacaaactccattaattaatagggcggtggagaaccaccattattaggaaaaccaaaacaaaaacaaaacaaaacagtaaaaagcacaatttttctttctctcacactctctcttgtgctgtctaggtttcttggaggttggtttaggctttattatattggattctatgacttgtatctccgatggatcgtttagtgccacagtcattcaggtcatttcccattgtggtgagggactcgtatctaatgtggtatacgctttacttggcgtttcagcaatgtctcgggtaaataaataaatacaacatatcctcgagtgttgattgcttgaaaacattcatcataaaattcttttcggtgtctgtctcttgataggttcacaaatgcgcaacaatcttgcaacagttagcagcgttttgcagtttaagcgagagaacatcatggaaggttattcttagctgggaatcattgcacgggtggctaaacttagcggtctctcttcctctctttctcaactattacttgttcttcattttcttcggtatatctggttgtctgtaactagttttattgtcattggcacaggttcaagctcttcctgttgaatacttaaaacaaggggaagcagagaccttagtgccagtttggttcgaggccttggctggtgcagcctcagattatgtcgagagcaagagtcgagatgcacttcaaaatgattacacttatgggcatatgcaagggaaagggggaagaattttgaagagattaattcgtgaattcgctgataatcaccgaaatgtttcaaatctgacttgattgcagagctacaaaatgcaatttgtctaaccatagattatgaagatgaagacgaaaacaaagatgatggtgatggtgaggctacaaccaaccacagaggaatgaatctgtggtgttagttgatgatttggggttgtgctgcattggctggatggcttaccatttgattttgagcaaaatttgcagtacataatttagattgatatagtttgcattgcatttgcatcccaaatctgatattattcttgtacagtgagtgagttaatgaaaaacaaagaggtgccaattttgtcataataccaggcatgaaacaattatttttttattattattattattatagcacatgtaagtcatgtatgtaatgtaatgagctctaaaataaatttcatttttaggtatcgacaacaaaatttaatgttaactcatggtcattaacttgacacgcaagttttttttttgttgtttaacgtatttttggcactgtaaattattcgaaatttttcaaaaatttacagagatgatgttgtaagcataacgaacatcccgtgaaaaaaaaatgaaaaaaaatatttcgacatatattttcgagcgtagaaattgattaaaaaattgtaataggaggttgaaggtacaactcctctaaaatttaacaagttatattttagcacttcaaatagcttaaaacaactgtttcaaaaaaaataaattagcttaaaagaaaataagtgaagagatacaatttgatgcactcccatagccatctctccttctttctcttctcttttcagtttcagtttcagacccttttcttcttcccttacaggagactttacctttcttcaacttcaaaccctacaaattacacgcaaacacctccagctccacggaaatgtgagatacaaacaactaccttttcgccaacaaaggttctgtctttttattattttcatttgattgtgttatcaacttcatttgattgtgctacagtaggcaagttctctttctgggcatttcaatttgggaatcgagaaattgaaagttagaaatattgaaccaagaaaaagaaggatctttttcagttatgacctttgaacattgtttgacttaaataattatatgttgtgttcttgttccatttaggcttacagtgtcaatttggatgcactggtgttgaataacagctgttcgaggaaatgtcccagagaaatgatggtttttaagaagcatattttgaaggtatgataaggataatttggaagtgttctgacctagcatagctttatcatatgaactggagattggagggaacttatcattgattgttattattcattgctttgagaatggaccatgagcttgaaatagcaaaacccatctgcattatcttgtgaagcttggtatagtatttgggattttgtgtttttcttttttttttttacttttgtgtgcataaattgggtgctattgcttaaatagtgacagtgcaattgtatgcacccaattctaaggcaagtaagttgttaccacaggacttctctttcttattactcttacatcttagaccgatgttggacgataaaatctttagattttgtcaagatcactcatgcccagttgataaaagtcgggtttaacactcatacctttctgggaaatcgctcactcgatgtttacttccagtttgggactgttgatgatgcattgaaggtttttgatgatatttattacaagaactgtatatcttggaacatatgcttaaagggattgtttagacatggctgtctcgagagggtgcgtatggtattcgatcaaatgccccttagagatgtggttacttggaattcaatgatttcaggttttttgtctcatgggcttgttaattatgcactgggactttacttgaaaatgcaaaatgcgggcgtgagacccaatcaatacacattttcgattttggtgtcacttgcttcgtgtgtttatcagggtaagcaaattcatggctgcataatccgaaatgttcttgatttatcaaatgttgtgcttggaaactccttgataaccatgtatggaaaacttggacatgttgattatgcttttggagtgtttttgacaatggtgaaggttgacaccatctcatggaactctttaatttggggttgttatagatcagggtatggagaactggcattagatcagttctatttgatgagaactactcaacataaacccgatcagtttacaatgtcgacagttatcagcatttgctgtaacatgagagatttaaataaaggtaagcaaatctttgctttctgctgcaaggtgggatttttgtctaatagcattgttttgagtgctgctattgaccttctttccaaatgcaacagattggaagatgcagtacatctttttaatgaattaaataatttagattcggccgtgtacaattccatgatttcgagttatgcaggacgcggtttcggggagaaggcaatggaactttttgtgcttatgttgaaagaaaatctcaagcccactgaatttactttcagcagtattttgagctctgtctctggtattcttccagcagatcagggtagtcaaattcattcttctgtggttaaaatgggtgtggagtcggatgcaattgtttctagctcacttgtgcaaatgtattctaaagttggattgattgactatgctatgaaagtttttgttaatatgagtgagaaagatttgatatcttggaacaccatgataattggactaacccataatggctatgtattcaaggccttggaaattttcaaggaaatggtagccaaaggttcacaaccggatcgtataaccttattcggggtactgttagcttgcaactacggaaatcttgttgatgagggaattcaagtcttttcatcaatggaacatgagtacggtatcatacccgagtatgagcaccacctttgcataatagacttgttgagtggtgttggaaaactcgaggaagcaatgaatattatagcagaagtgccatttgaaccgagctttatgttatggagagcagttctttgctgttccaatgttcatatggacttaaatttggttgaaagtgttgcagaaaagatgatggaaataaagccaaaatcatctctaccttatttggttttggctgaagcttatgagataagagggagatgggaaagtgtgattcgagtcagggaagccatgaaacgtcactgtataaatgaaacggttgaatgtagttggattgggataaaaaaccatgtgtatacattcaaggcagaccagttgctacatcatggaggtgaagagatttacttaatattgaaattgctgttttggcaaatggaggaggcaggttatatataaaccatttgaataagttcctaagaagaatggtagagacatagaattaaataaataaataaaaggcatatatcttatttgtttatctgaagaagatgaagataatctctggctatagttgatgatttggggttgtgctgtattggctggctggcttaccatttgagttttgagcaaaatttgcagtacataatttagattgatatagttgcaattgcattgcaatccaaatctaattgtacagaatgagtgagtgagtgagtgagttgagtagaaaaaatggggctaattttgtcataataccaggcatgaaacaattattgtttattttatttatagatttgttattatcattaaaaaaatggttgtattgatttaatattattatgtaaacacatttgtttataataataataactttcttttaagcatttattgtatgaagattgtccctatgtttagtttggcaattaaaaaaaaaaaaaaaacaggtctttttattgaacacacatcaactcatttttttaaataataatattaactttttatttatttattagctgaattatccaaatcaacccactttattaaataataataagtagaagatgaaaagagaatagatgaagataatgatgatggaggagatgggtttcagaaatttaagaataaaataagtagaattaacactagtttttagtttttttaaaatgagcattcttatttagtattaatggtgcttaattcattttaatgttttataggtaacatcttacgatttattagcaatactttttaaaagttatttttttaagttacatgagactcaatacttaattatactaataatggtatgacagtaaggagagtgttaggcaccaatagtaccttttagcaattctctttaaaaattatgacagttttatgcttgctttttattttataggtttaggcatttcttttatctttttattattattattattattattattattaataagtaaatagctacatataacactattagtgaacaaaaaactcaaaaggatcgagagctaaaagttattattgataaatgacatcaaccataataatatttctaat

SEQ ID NO: 18591 - DNA, 3260 bp, Cannabis sativa
aaggctctgaaatttctcagaggcttcttctacaatccctggcccggcaagagaaagagggatggagaaatttacaagacactgggaactgagtttgatagttccatacaaattcatggatacttccatccaaatcttttaagatatttcatgtacaatattgtaatttgaaataagaagaagaagaactatgctttcatatgtggaaaatatgaagacttgtcccatgtatttccctgcgtattatagcacatgaaacaatccaaggatttttctaaattttaatattatattatattcctcacctaatcacaacaaccttttcttacattgaaaaaaaaaaaaaaaaaactactttcctcctcctttactaagaatttccaaatcccctcctagaacgcattcattcccttctctccattcttatgaactctccatgaaatcaaataataataaaaaaaattgtttttgaaataaatttctctaaactatttttgtagctcaagctgtaattgtaaatcatattttcaagtctagaattgaaatattgtaattcacaaacatgttaattttacacttttaagtcatgagaatatcaatactaaaagtacttaaattgaagcatactttatgtaaataatcaatttttgcttactaaaattggattaataattactatccaaattcccctaaacaatactggaaattcttactaaaattattttgaatatatcttgataataatttcattcaatttcaactacttaaaaaacgtaatagttttaatccgtacattaaatgttacgttcaaccaaacatatgaactgaatatatttagtcattctatttcattttctatgcataaataaatggtaacaaaatgtttgactttttgtattttagttgaaaataaaatttctttgggacaagtcccggtaattctgtatctgccgatactacaacctaaaatattcacaaaattaaaaagaaatacaagattcaagacacgacaaaagagttaagtaaacagaagatatgctaaaatgagaagtaaacactaggcaaaagagcaccacaaaaaaacatacattacatcatgaaaaagatacccaagtaatagtaaaatactaatcaatatacatccattattcaccaccatcctattcttcatcatcatcgtcaaattcttcgtcttcttcatgatttccgcttgtttcttcctcttggtccaattcatcatcaccagcaataaaccctccaagtgtttcatcatcatcatcatcatcatcatctctgtcattcttattctgtcgagattttttactgccttgagtgtcctcgtgagctgatttgtcacgatcctttgatcttgtagagtattttggcctattattaacttttcccacattagaaacgacaatgtcattatcatcttcactttcactctcagccatccaatcatcatcctcatttttttcattctttttcctcttcttcctcaaactctttttctttttcttctcaaaatcatcatcatcgtcattatcctgaccactatcattcttatcttcttcaataaaccaatcccagttcttcacatcacgaatcatgtgcttgggataatagtcaaactcctgtcccatcacaaccaaaccaaactctgcacattccaagaagaatttcaaataatcaccacaaggaattcaaatggaattaaccattaaaaaaagagcttatattaaggttatgatatatatatcattattcaaacaatttcaagtcaaacaaagcttatgcaaatacctcaaaaattcatttcctaaatttctaccaattatcaaccagtactttataacattcgaaacacaacttgcatccatagtccataccacatatcctaaatttaactctatcttttattttttgttatcattaaaatagagatagaaagtggaaagaaaatcaaaagtacaatgattttcaaatatcccgtatcagaatttcaatttcagttgatttggcacagaaaaaaggtttgaatgaaagtagttcacaaaatgtcactgtagcacaaattttaccacaaatcgttcaggatattattattactattattttggctttgagcaatatagtttagaggccaaaccttttacagggtcaatgcctgaaacatcaaaactctcaaattccgacccacttcccaaactctccgtcaattcactctcactttccaaacccatcttcttctctccaccttcaaccccaattttactcaatttgaaccaaatgggtccctttccagacacgcagaaccaatcccccggggccaactcacccttctccgatcttgtgaaaaccctaacttcctcctcactcttgctccaaacccaaacagggttcctccccagcacctcaaaccaaaccctgggctccgactggatggagtccggtttaacttcgagagcaaagtgacgacgagagaccgttcggtcgtccgtactgatcccgaaacctctaccaaacacggtcttgtgatcatcgtgaagatcgattttggctccgtcttggccttcgatctccatggaattggaagtggagtagagttttgcgatttacggatttacccccaacccaaaaacaattcttacttcttttttttacaactgaacagaacaatgtggatatcacgtggtgagcacgtgggataagatttttaagagtagagaagaagaaaacaaacgacaaaacgacaaccttttatcgcttctggtgagagagagagagagagagagcattggtatttggtggtcgtaaattgattactttgccttccatgtcctttcgcgctcactctacaaatcaaattttctttttcaatagaaaataataatctcctttctccaaataaaagaacaaaaaataatttctaatgtaaaaataatgataatgcaatatgaatggtaacgtaatataataaaaattataataagagtgatattattatgacgtttgatttgatatttttagtaaggatgaattattattatacaaatttatatcatattgtaatttaattttgaattaatttttgttcattatctctgattctctaattggaaatgacgaaaaaggatggttttatgtgagaggtgtggagcaaaactaagtcttggactcttgtttcaatatgcggctctctatttaattcttcttcttcttcctagtttaggtgttctctactgaatcgaaggtactct

SEQ ID NO: 18592 - DNA, 4907 bp, Cannabis sativa
tatatttaaattatttttttttaaaaaaataaaaattcatgacttggaccaatcaggaattgtcacgtggcaatttatttaatacttaaaagttaagtatttacataagtttaagaattataatttaagtattattactgcaaaaaattaaacttaaatatttatttacaattaaaagttaaatttaagtatttatgtgtaaattgaaaaataaaattttttttaaattaatttaaacataagtgtttttttaattaatttttatttaaatttctctctatatatttttttttattatatgatcctaaattaaccacatttatgaggccacatgtaactgagttagcaaaagagagaagaaaatgccaaatcaatagccatttgtggtcatacacaacctataatatgatatgtttttttttttttcattatcttcatttttattttttatttatttttttaaaaaatatatttatttaattttattttctgagtattggagagaaatgatcatcaacaaaactgtctccacataaaattctcacatttccatgaaacagatttggtctcaaatgcctaccttgaaaaaccaatccacttagtccttcttctctctctcatatgagatatgacacagacttttttgtcattatattaatatttttctatttttttcattgtttttgtttgtatatatcacattgttaaccttttattttccattcttctccaaagttttatcttttgagcttttcattcatccatttttagtttctcttcctcctccttagtgggagagccataaaggtttgttctttactccaccattgattcaagttcatatttttagacttgggttttcattaaattgagttaatttccattctactactaaaattttgacttgtgtatttatgaatattacatgtttgatacagtgactcactgagctttttccttattgaaatgggtttatattacatgtttgattgtttggattttcttagtcacataactctaaattctcttcttaataagcttttaattaacataatctcttatatgcttttggagtttacatgtaaagtggggccttacatactttgctgttagcaaagtaagagtattgtagtacaaggctatggcttgtcatggtgtctttgcttctgaatagtagaatgattgttttgttgtacaagtattgatgaaaaagctgggatttgaaactgtgatttacaggagcttgaaattgatgccatagttactctgtttcatttattgtcatcctgtgtttatgccatatttgcatttggaatattgagtttgtcaactttagtcgctttcatagcttttctctctctgtttctccttaatcagttatgctttcgaaacaaatttagtgtaaagtttggatttggattagattaagtcgttttctaagcttaagagtgattagtattctttctcttgatgagttatacttatctttagttcttgtttggatcttgatatttttttgaagtataaattttgttagagaaaagattaggaaaatattttcctagaattttataagtgagtacttaaaatactgtatctcaatattttgttagaatccaaacatgaaaaatgatatcattttttgattttattaaactaatcatgttttgtttgttttcttgatcagagaattcaaggaataccatacagaacttgttaagatggagatcactaatgttaccgagtatgacgccattgcaaagcagaagttgcctaagatggtttatgactactatgcatccggtgctgaggaccagtggactcttcaagagaaccgaaatgctttctcaaggattttgtaagcagtagttccacttgctgtaatatgttttcatttgataaaatgagaagtaatttcttagttttacttcagaaagtgttggaaaattgatagtatgtttaagcttccatgtaatttttcgtttgattgaaataggtttcgccctcgcatcctcattgatgtaaccaagattgacatgagcacaactgtcttgggattcaaaatctcaatgccaatcatgattgctcctactgctatgcagaagatggctcatcctgagggtatgaactcgggtgttctttacacttaactctattacacaagtttctttgtttgggaattatggctgatattgtgatgtgattttgattcaggggagtatgcaacagcaagagcagcatcagcagctggcacaatcatggtttggtctctttttctcaagtgttttttaattttctattgaaattcaatcaatatttttatggcaacctcattcagtttatgaattaatgatgttgttttagactctatcttcatgggctacttccagtgttgaagaagttgcttcaacaggacctgggattcggtttttccaactctatgtaagctttctgttctatgttttcttgcaaaaagtgtattcgacatggattacgctttctgactcccgtgcttaaaatcaaatgctggttcaaaatgttcaggtgtacaaggacaggaatgttgttgcacaacttgtcagaagagccgagagagctggtttcaaggcaattgccctcactgtggacactccaagacttggccgccgagaggcagatatcaagaacaggtagttttcatttacaaccaatttctttttctaatactaaacaagagttggtgttagattatttagctagattctctcactgtgaaactagtgtaatgatacaaaatattatggctctattgcagattcactttgccaccatttttgactctgaagaactttgagggtttggaccttggaaaaatggatgaggtgagaactatatgacctttcaatttattttcctttacatgttttaacatatttttttcaacaaaaataagagactcctcctcaattatggcggaggaaaaccgtggtaacaaaacaaaacatacaagagttgttttaacataatttgtcctgaattttcatttgttgggtgacactgcagagtagtgactctggactggcttcatatgttgctggacaaattgacaggtccctcagctggaaggtagtgtatttttcttgttctgttttcggtataagatcttttcggggtagaagtagtagcactactgagaattctcttgatcaatcaatgtacaggatgttcagtggctccagactattaccagcctgccaattctagtgaagggtgtcatcactgctgaagacagtaagcaattcataccaactccttttcattcttaccatcattttttttttctctagattttattgacatgtccattaattgtttctgtaaaaaaaaatgcagccaggatagccattcaagctggagctgctggaattatcgtctccaaccatggagctcgtcagttggattatgtccctgcaactatcacggctttggaagaggtaatgtcctgaaatctcagcttctataaccttaacttgcagagtatactaatgtcaagttttgtatggggaatgttttaggttgtcaaagctgcacaaggccgaattcctgttttcctggatggtggtgttcggcgaggaacagatgtcttcaaagcattggctcttggagcttctggaatatttgtaagtacataatgcaaaccttttcttaacaccattattatacgaaacactttgtctgatttagtattgttatgtttcaatgtatcagattggaagaccagttgtattctcactggctgctgaaggagaggctggagtgaggaaagttcttcaaatgcttcgtgatgagttcgagctgaccatggcgttaagtggttgccgttcgctcaaggagatcacccgcaaccacatcgtgacagaatgggacagccctcgtaccgctattgctcctagattgtaaggtgtcaagtgtttttctttcttctgcatttttatgcagtcgaaaaaaaagcacacgttttcgggtgccttttatcaaaagaaatgttacatatatttataacttttgcttcaaagaaaactgttgaagaatctgataaaacttctgtttggagaatcaattacattgtataaatggctacttctgctggcttttatttactactgttgtgctctttcttttcatttcagcacaactgttctatattttgatattacatatcattatctactaagaataggattatatttatatattgtatgaagtggattgagctttattctactgctttttgaacacaatttccagattagaaatactctagaagaacttgtgctcataaaaatatgataatctttcaagccattgacaccaacgagtcactgtggggttttagaaacttgacattcgatttctacttcaaaacaacttaactaacttgtcagttaagttggttagtcggttagtttagtggagtcctttcggggtcaaggtcaactctttgtgctagcctatataaagagttgattcccttagaagtgtttcctttgtaagtagataaaagagagaggagggttggtgagctaatttcggtgcaagatgccattgctgtcgagatttctaattcgattttcaatcctagtaactcggttatacatctcctttagtgaagctttgttaaagggcagttcctctcgagaattaggcaccacaaaaaatgtgatgaatctcgttacaacttgtgcaattttacttagcagatttcagatttctggcttataataaattcttgatcttattgattcttggcaggtgttttgacaccacagtcaccttccccaatgttaaaggtcacatttttttaagcattttttgtgggattgttctaaaagttttggtttgattttgcattgttactccattatatg

SEQ ID NO: 18593 - DNA, 4356 bp, Cannabis sativa
ttcatatatatatttttatttatttttttttttctattataaatttctcatttttttattttattattttttgaaataacactttagcttttacttttcatcaggttttttacttttttttaaaaaaaaataaaaataaatggatcaataaaaaaatagataaaattagattaaaaaaagggtctcaaattaaataggttctactgaaacaagatttacacttttcaattagttttcagggtagttttaacttaaaggtatactagatcatcaatcttcatgtcagaatcagaatacacgagcttgaacggttcaaaagtcaatatataattattacttttataattcatttagctgacatgattctgattcaccgcaactactactaattccaccttccagaagccttgaagtaaaacttcggttatttgacttgaattggttcatctgttaaacagagattatataattaatctaagcaacttgttcattcctcaagaaaaaaaaaatgatttcattcagtaccatttgcatgtgtaaaattgaaggaatttgtcttaaaagtaaagaagcttttattacaagttagggtttgactcaataaacaaaacccagagtaaagcactaggacagacaaggctcttctgctcctccactctttctttcaagttgagatatgccttattccaacaacattagagttatcagtcagagtgtcactttctaagtgacagaatgaaataatggagcataagaaaagagccaatcttcaaaaaagaactatagatgtactgtttggtttaaattttcacaagctcccctgtcaccgcccaatcaagtaaaaattgtattctacaggactctctcaaccaaaaaaagaagaaaattatcttccacctagccaatctttcctttcccaaaaaaatccacttaagtggagcagcaacttttctttgcattcccagaagcttcattaacatttatagaggttccttgaccaggaagtgcagtatttgtagctacttcttgagctgccaaggcttttttgcttatgatgtgatagatttcagtcaaaatggtctgaaatgccttctcaacattagttgcttccagcgccgatgtctcaagaaatgaaaggccttccttctcagccaaggactgaccatcatcttctgaaacagctctaagatggtttaagtccgacttgtttccagccatcatgatgacaatgttagaatctgcatggtccctcaactcacgcagccacctctggacattgtcaaaagtttgcctcttagttatgtcatacacaagcagtgcaccaactgcacctctgtagtaagcactggtgatagcacggtaccgctcctgacctgctgtatcccatatttgtgccttaaccgtctttccttctacctgaaaaagttttcaggtaaggctatggtattaaaaactaaactacctttcgttattacagtagtaaatggtaaatcagccatatcagtatgcaaacaccactccatgccataaatgcaatacaggaaaatggaaccccaccaaaatgccaaaatactagttggttttcgaacttttcctaaattgttgtccatttaaaattcacacttcaaaacgattgatttcaaaatgaaaacaaataagcccctaaagtattctttaatcatgaaattctcaaagacaatttttcattgtagtgtagtttgtactcaattatctccgtgaaaggaaaaacgaaagtaaaggacaagtttctccataacacatcctgcactgcacacgggtttcttctgaaaaaattaaattgaaaatatgtgtacgagatacgcaatcctaaattgaaaaataattccatttccgcctcaagcaatcataattggctttggcccaatcatttataatactaaaataaatttagcacgatatttttaaagtccaccaactccctcgaagtaaatttatgcaaccatcaacaagacccaaattatggttgatgctgactcaattattaatgaagtttaactcaatttctcttcagaaaaaacgagacccaaataattttaaaactacgaactccagaaatcaactataaccccaaactttcccttaactcggtgaaaactcaaaggacgcatcactgaaaagctttatcaacacaagtcaatttaaaaaggaaaaaaaaaattctgttccattagagagaaacatgcaagatcaatcaagttctaaaagctacaattattctcaaaaaatctaagcatgtcattgatgggaaaaaaagacacacgcagacacataatcgacgctaacacgaaatcagaatcgtccaaacagatcggtaaaataacttgcctggagagtcctggtagcgaactcaacgccgatggtagatttcgattccaaacaaaactcgtttcttgtatacctcgaaagaatgttggattttccaacgcctgagtctccgatgagcacgatcttgaacaagtaatcgtattcgtggtctaccctatgagccataatccctttctcctttgatctctggaacctacactcacccaaacccgaaattcagatcccacttcgtaatcgtaatcaacaacaaatacacggattgtaatccacagatagatctagagatttcgaaggaagaatacctttagtgacgctgacggatcgaagagagaatgagatatcggaaggtggtggtggtggtggtggtgacgatgagtctccctgagagacttgggctggtatggaggtttcgtttgagaattggtaagagtaactgtacgaattggagggtagttcaactcttgaacgaggagaagaagaagattatatagtgtgagcgctaacgtaataataacatttggccaatcagagaatagagaaacggaaagaccgaagaccgaaaaacaaaggtcctttgaaacggccttctctcttctcaattctcattaaaaggactccactcacgtgaaacgacatgtcgttttaaatgagaccataaacgacaattgcatttgtcaaaggtcaaatttatgaggtggcactgaaacaggtggcttggctggcagcctgtgccagaggatgtttagtgtcttccacgcctttattattatttttcttaaaatggaatttcaattttatatattataaagtagaaggtagcctagatgttgttttaattattattattatttattttctttttatataaaaataggatttttgttaatttgttcttatttcaggtgaagcatatgtcttatgtgacataaaaagcatattttatatataaaaaaagttaaattaaaataaaaaatgtccactcaatatcttgttgcattattcggtcatgagtaatcaaattaatcatagtgacgaagataattgaatggttttgcactcacaacataaaaagcatgtgcattgataccaatgatttcagatccaacctatctttttcacctcacgcacaaacacaattaatcattatcttttttttttttttttcacaaaacaaaagtaaaattgtgtatgcctttcatatcttttgtatggaaattatttttcatgattatatttggcaaaaaaaaaaaaaattaacccaaagctgaacgcattttaaattagtgttcatgtttcgttgatcctaaattacccatcacataacaaaaattcatcttttcttccttttctctttctctctacactatccattttctttctttctctcttacccactcattcatggtcaacaaaataagtgggtaaatgattttctttaattctttgttattagtcaggtcgatgatttataatattgtttagaatagtggtttctttgttttttgttttttttttttttttggtgaaatttgccaattttgggtttttgtgattttttaaaaaatgcacaaccaagggctgtctcaaaccatttagggcctaggacaaaattttaaaataaagttttttctctaaaaaaattcaataaacatttaaactttaaatataattaaaaatattcaaatattaaaaattctagatgtaattataacaaaaaaatccttaagcaacattattcaaataatccattcatctaacacaattgttttttcttcttagcatgtttacttaaagggaatgaaaatgaatgatatggtattgattcgcattcaattgtttactaaattttaaaaagggagaaactagtgggacccacacaaatcagggagaaagcaaaagaaaaggttctcccccatttttatagggaatgcctttccctttccttacttaatttattttaatttatatttattaattaaaaatgaaaaa

SEQ ID NO: 18594 - DNA, 2646 bp, Cannabis sativa
atcatacgggttttcccatggtcttttttggcgcgggtcggggcgggtgttcgggcccaaatgtgcacatcgaattacttccaattacacagttacaaatgtaattacatggtcagacaaatatgctaaattgtgtaattacctacaattacatacaaattcaattatattgtagctttctaaaagcacatcgataataaacctaaaattagattgaattgtttttaaatttttaatctaactttttcaatattttaattgtagttaatattctttaccaaacaaaataatttattttattatgtattcttgccatatttaattatacttatttttttggttggttaatgcatgaatatattaattaaagaaggtaaaattatcatccatccttaagaatattaattttttaaaaaaatagagaaaagattttggtttgcgtgtgcactgatagtaataaacaataaagaagtcataaaaaatccaaagagtgagtgggacccactttggcaatggataaagcttcaactgatgggacccaccctcctctactcctaaagtcttatctcctccgctccgacccaccaaactccgaacctaactcatacgtgtccatcatcgattggcttggactctggctcggtcattacaaacacacacacacacactaataatactaataagactatcttccttcttcatcaaaattcatagcttttttctctgtacaattcaattcatcattaccatgtttggtagccaaaggcaaaggtagaactccatccaaagattctctcatttcttttattgttattttctcctagatagtaatagaaattttctcaaagattttttaatttttcatatatttcttgttaaattttaatgcatagtttgactgagcttctaattccaattcccagatgagaacagtacatatagtttccattgtaattgataaagtttgtttttttattagtggggttggaaattttcttagtttaattagctttatcggtgtaaaagactgaaactactgttttagtggtgatcggatcaatggggtttcctaaaaaagtaatcttgtttgcttcttgaactcccccaatagtaagattgatgatgatatgattccttgtgttttttttttcttactttcccttttctgggtggtgattaattggttgcagcactcttctggtgcagtttttctgacaaatattgattgcaagaatttcatcaatggggggagcttgttctaggaagagagaccaaagagaagaagaagataacataggtggtgggatttacagaagatatgggaaaagtgggagttcaaagtggttggcaacttcattcagtagacagtctagtgacattcaaatgggaaatggaaagtgcttatcccttatggacttatgcataaagaaaatacgtgaggtactaagtttttagaaagattttgattgtttcaggctcttttttatatctgggatttggccaattggtccttatgtttcttcttctgttgcaggacattgataaatatactactttctcaatgctcccaagggacttaagtcagcagattttcaatgatttggtgttttcaagattgctaactgaggcttctcttaatgcttttcgggattgtgcactgcaggtagctttaatataattcatcaaactgaaaattgtgtgtgtttgttgatcattgtttatgtctaaccaaaaagctttgtgtaatgtgtttggtaggatctttacttgggagaatatcctggggtaaataacagttggatggatatggtggcatcacagggttcttctttgctttctgtggatctttctgcatctgatgtttctgatgatgggttaattcaccttaaagattgcataaatctccaaacaataaactttaattattgtgaccaaatttcagatcgtgggctggaatgcatcagtggtaggcttgcttatcaacaataattttcttaccatttatatgtcaatgccatgccctttttctctgtcccatgtcccaacccttttaaattccttaatttgagaaaatagtggtgtgacataatgggaagttactttctggaggaaatacctttgtaggaaacttatatgacaataaatgaatctttcaggtctctcaaacttgacaagtttaagctttagaagaaacaatgcaatcactgctaaaggaatgagtgcctttgctggattagtgaacatggttcagttggatttggaaagatgtcctgagattcatggtggacttgttcatcttaaaggtggcttcatgtctaatttagtaatgttttatgctatacatttttttattcttctactcgtttttccttaaaaagaatagaaaatggaaggcactcagctaatccatgtttataatgtacagactttgcatgaagctaatccagcttactgtcaatagctgaatgtgtcatcataatgatcaaacttatacatattgttcttttcattatacaggtttaacaaagttggaatctttgaatttgaattggtgtaactgcataacagatgctgatatgaagtctatatcaggttagtacagtgtctaatgtctttctttctcttttgaagcaacttaattcacat

SEQ ID NO: 18595 - DNA, 7993 bp, Cannabis sativa
taagaaaaattataaacccaaacaatctttgacccatatcttcttatgagttaatccaaaaccaacattaaacaaaaatatatattgctctctactctggtcaatgtgatgcaaaaatgatactttacaatgtattatagaagaaaagtaatagaatgttacaaaatgcatttgttttttggtactatttgatagaaagacttaggctaacaatcaaaaccaaaaccaaaagaaaaagaaaaatgctacattacatatctataagatttatctatagaccatataaggtcaaaagaattgatcttacaatttaaaacaaaaatacatgttaatgacgacgcctcccccgaacagcttcttccattctctctaacccttcttttcatgccccccatagcctctcggggggcatgcctaaagggtcagtttatggctgacactggtgaggaactactagagttgatcgagaaactcgtaacatcagaaacaggggtaccacagtctgaagatttgttggtgatgttatatggagatgtgtttatcaccctacatgatgatccaaaatgcacattcagcaaataaggtctagaaaaatataatagtcaaattaccgaatttagctataacaataaccagacacacactcagaaagacagataacaaaaacctagaatcagttataactaatgaggttagtcctttccaattttattgagaaaataagttaggacgacacaaaaataacttaataaaattacctctccttacgcttttctaagaacctagccaaggatgctttacgtgcctgagggacggggactgcgaccgaagaagctggaatcacatttgttgtggcaggacctactgagctgactactttaggaggctccaaacggttactcgaagaagttgaagctcccattggcttcaccattgataatccattggtgttattagctcctccacaaccctgagtatcagggtgcatggtaacagaaatggaacccggaatgcctgtaaatgaagatggaatatgagaccagttcctaatgaaaccatcagccgtcgaaggcctcggtgttgatgatgcctccccttgagccattgcagtaggtggtttactctgagaaagcgaagaaccatttccagccagtaacataatagcttgcgcctatatagaaaaatagtgtaacaattataaaattagaatttttacacaaagtacctaaaataatacttttacggattatgatgtattttttatgaatattttttccttttttagttacatttttacaaaatctcataaaaataatgtataaataatataaaaataacacgaaaacaatattcaaaattccctataaaattagaataatacttgaatttatagtcagaatatatttcctaactattgttttgggattccttgagtaattaaattgttactaacaaatatagtaaaaatgagattcatgccaaaaaattgtggaagtaaaaaatcaaaatacataccttttcaggagatatatcatcatatacactgacagatcctccataaaatatggtcaactgagcaggtgcactagaggacttgggtgcattcctacattacacaatcaattccaaaatttagtatattatcttcttctgatcattttgattgaataatatgattgaaaagaattgtatagggtaccttagatcagtggtgccaactacagaactaccagaaggaagaacagataaaggggatataactggtacacctccaaaagactgtggtttcatagtagaagaaaccatgtttttagcagaggaaacagacattaatgtttgattatttggttgatttgatgataaaggaaatatcttcatttcttgagaatgatcaaaatgctgcacaggatcataaacagtcatcccatattgaattactcctcctgtttgtttctcttgagtgaaatttttctacacaaaaaagggtcaattaaataaaaatcagaactttaaaaaagttggttaaaaaaaagaattgtatacaatacaaacctgaattggactactttcattaactgtctttcttattatttgcctattattactgtcttgaggagccttgaaagacaagaattgaggaagagcagagaccttgtttgaaaatgaccactgcatccctgaaaatttttctggtgctgcaaaaatgatcaatgaaatataagcttagaagagagagcccaattattttttctggacaaaattaatagtcaatgatttataaaatcaaaaataatatatatatattcacttacaaaatagaaatgaaacaaaaaaaagtgttttgtaactctgacaaaattaaagaccattaattagcacatctgagcttaattaataaacacaccattaagagattcatagacataataaaataagatttattataatattttttattaaataagtttgttttcccagttataatatcatataaaaaaacaggtttacagctggctaggcactatattcagaaaagtaaatttgagaatatgattaaaattgtttaaataaattatagtccattgttatgaaaagcagtattcaaatgcagattattttaattaattaatgataaatatttatatatatatatataaatatcacatttttataatataaggttcttgttgattaagttctttattaaaaatattaaaccacagcacctggccaggcactaaagttatgaataacattatcttattcatacacgacaacattttttaacataaaataaaaacaccttaaaaaaataaactatttaataatttatatacaattaatatttacaaataaatccaaaagacacctaagcccacgtttacatccaaaaaaataaagcccacatgaattattatttttcttgaaaaataaaataaaataataaaagtggatttctacaacaacaacaacctcaccaactgtgaaaaatagggaaaataaataaataaatgaataatatgttgataaacaatcttcttgtgatttagatttcagaaagattatcataacatatatggttctggtgtaacatcaagagtaatttggtggtcacaacaaccaccacatgttttaatttaaagattaagaaaaatctatagcataccctctaaaaaaataagtgttttggtataccttttatatgtttcaataatacatgagagttttcttagaactactgtttataatgtcgaaaataaaatttatactaattttttttatacatatgtagtcctaaataactaagatgtatactattattacaaaaaatacgctaaaaagctatcataaatatcaaatcagatagagatgtatcgaaaacttttatgtactataaacttaccctaagaactattttagcaaaaattaatgaagaaataatggtgacacaaaatttgagaaaaaaaaaaatggtaaaaaaccaaaacatggtagaaaatttaaagttatttacaatattaaaataaaaataaagtttaaatattttgttataaacgtaattattttatcatatattagggacacattcacgaatcaaaaaatatatatacaatttaataagttatgacatatatttatataaaagataataattatagacataatattaattataaaataaaaatctattcaaaaaaaaattataaaataaaaattagaattcaatttctacatgaagtagtaagtaaataattaaaccttattttcggtatcatttaataaatgagatgtatgtactataacctaaagactattttaacaagaattaatgagcaaaaaagaaatggtgacacaaaatttgaggaaaaaaattggtaagaaaccaaaacgtggtatcaagaacactattcagaaatttaaaatacaatcaaaatagttgaccaaaccttcttgccttttttttaagtgtaaatccaaatttaatattcgagaaaataaggcttaacaaaattttttgtaaactgttccaataacctgtttaaattaatttgagataatattaattcgtccaatcaatccaaactaattgttaattaagagattttttttatatgattttatcatatatttatagaaaatactattatttgataatttaacagaaaataaatttaaatatgattctgaaactgttacttaaagatacataaaactattaataaaatctcataaactaattaataatttagttcacaaattaggaatatcttcgtactcaaatttaacataaatattcataattcatgcagaaaaatcttcaactacaagcatcgaatcgaatttcatttaagaaactaatattgaatctcaactgataataaattcaatcaataaaacaacgatgaattaatttgattttcaaataataaatcaaacgaaaaccaaacctgaagatttggaatcattagtagcagaagcagtagcggatgattcctcctctttcacactcaacgaaccattctgaaagctcagactcaagaaatttctctccattgaaacccaaactgaagctttttctcttcttcttcttcttcttaaggaaagtttttcaatcgaaactgcgtcgttttaaactttttgaatttgcagaaaagtcctcaaacagaaaaatgttaccagattcgtccccgaaaaagagagaaagaaacgagagagagagatttctgttcttgcgttgtgttgttataacaacatcgtgttataataaatgaaatgattagtgagaaaacgtgaaatctgaaccgttggattaatttaattcgtgtgttaattaaattaattatcggttaaaccggttgataatgaccgggagtagccggtttgagagcacgtgcgtttcgaagtcgatgaccgtactgtctgtttcaaaaaagcttgcgacgatgggcctagcacgtgacacagctatcaccttatttttatttttattttttttgtaagaaataattatttttcttttttttttggaaaaatatttattttttttaatttatatttggttatgtcatgtgcatcgagtatttgagaggcacgtttcacgaggaaataaaataaaattccatgttgacaaaaaaaaaaaaaattcataagataattaaaagtgatgcactgatctactttacttgtttaggcatcgagaagagtttttagtttaatttttttcatattggtatacattagagttatttcagttgagtaattctcaacaccactactattttgcctatttcttaccttcgaattctaccgtaaatgaatccccatactatttattcttctttaaactctttaaaatcacatgtctgcttcacttctgctaagcaaaaaaaaacctagccgctttatggtaacgtctcaataggccatcccgctgacgaaattatagaggattcaaagagagatatcctacaaaatttgaaaaaattcaaaaaaatttacaatgtaaaaaatagtgttcaaacagtctattttacacacgtacaatacactatttgagccttatttttagcgagttaaatcttttcgaatttttttaaaattttacagaatgttttaaataactataacgttcattactatgagaaaaaatttgactaaaaaattattttaaataccaaaacagataaagatgggcatctcttttaagggagtttatcatgtagaattttccattgatttatttgatcaataaatccttgaattattaacttaaaaaaatattatagaaaaattctacaatactactcctaaaaggggtttagtgaggtaccatctatttattctagtatttaagagaattttttagtctaattttgttcatagtcgtctacgttgtagttatttagcaaaattttgagaagtttaaaaaattttaacacgccaataataggattcaaataatttatttcacacgtgtatcaaataaaaaagtatcgcttgtaacatgctgattaaaccctatttttgatgtgtcaaatttttataaatctcttaaattttatcgaatgtcttaaataactaaaacgtcaacgattataaaaaatttagactaaaaactctttcgaatatcaaaacaaataagaaatacattgtagaagtatagtatcaataatatattcccttttgtaccttccatgtttgattgtttgctaagtacttctttaggcttttgtattttgaatctatatttataaattatttgaaaatagtgttttgagcttgactataatttcattttcaaaatatatattgattttaattttcacctaaaattgaggtcatatgtaaaaatagtattattacaaaatagtattattgtttaaactaattatatatgtaaaaaaaccaataacatggaaagtgcattggcacaaaataatattattatactattgtttatcataaatctagtttgtgcatgaggcatatttttcaattagaaaagagtaaggatataagaaaagtctcattaggctttctctatttttttataataacaaatcaacttgattaagagtaattactcaaaaaaaaaaacaattaaaagtttcgaggcaacattattagtgaacatacaatcagcaaataaataagattagtgtgcaaaaacttgattagtagaacattttaagaaacattacttaaagatttcaacaagctcatacaatcttgaataactaaataaccaaagggatagaacattttcataggagtgaagatggattgcacatcaaccaagctatttgtctttacacaaagtgaaaatccttccttttcaactagctcaatacctcttttatttgcaagcctttgcaattttaggcttcacctttcccgaccgactcaagctagcagtcgccatcagtttagcatcacaaattcctaaccacaaacccaaaccatcatcgactctcctcttaaaaaatagcagcgtctacattaatcttaacacaatttgcaattagtttttgtccatagctctaaactatcattaagctctctaatttagttaataggtgttgtgaaaatagttgctgcagaaaataaaaagaataaatttatcgaattaaaatttaggttgagtcgcggactaggttgctctctttaagacattcgcggcactgcccagatatgtgcaaacagactatcagcttcgttgtgtccaggataaaatagcccagtcgagcacactatatcgaaactctattgcacaatagagaaccgtcaaaatactacactccaaaactgactactgcttggaatatatatatgtaatataatagtatgtttatatcgtatatgttttttctatgagaaaaagatatgtgtttctcccgttggtttagatgcattatataggcaatacaccgaaggtagtaacaggaagaaagatgttactgaagcgaacattagaacgtgggaacgatgctgaaaatcagaaagcttctatttaccaattaattaaatgcgttttagaaaaaaaaatgttttaaataattaaataaataataataatttaataaataaaatttctctaaaaataaagtgacaccacacccactcagttcggtagcgacacgtgtgtggtggtccagtgtgtaagtcctcacccatgcctacaaaacttggtaccccttgggattccaacccaagttctaaacttgaatattatatacatttttaatgaagtgtttctatcccatgtggaattctatttactcacacggtaacaaaaaaaaaagtagttataaccttaattttttttctcccattgatgagtcaaacatttctttagtttagctttttagctatttatttagctaaatgcagctacaaacgatataagataaaagaatatttttaggtgatattagagcacgtttggtattgttttctattttttgttttcaaaaaattgttttcagaaatgaga

SEQ ID NO: 18596 - DNA, 2381 bp, Cannabis sativa
atgtggtccaatgaacaccctatgtactcttatttatggcacaaatacaaaaaatgttgttcttttccacctatcctatatggaagatgtataaaatttaaatcatagaagagagttttaactcaaaagtcaaaaccaatgcaatgcgatggttaaaggaagggaaccacacaatgtgtatttacaaactctatacactacaaataaaattaagtaaaagtcaccagcattacaagatctgtaatatcctaatgatatttaatttggcgttaatctgagccaaaacaaaacttgagtaactaacctcaagagttcatcatatatcttcctatggatagagtaagagttcagttggtatttgcattctgcctttgatctaggcaccagcacgtgtagttggatgtggacatttgataaagctcatctggggtcatcgtctccagttctttggtccatgaactcagatcaactctgaagctttcggtacggtgaacagaaaatgatgcctcaatgctctctttgtggtttaaatcacgcattcttttgtaaagtctcattacagacacacaatcttcgtatggatcgtgcgtgccagattgaatatcatacctggaaagccaagaaagagaggcacttgaaccacagcactttgcatttgcttaatgcatcagcttattactagtgactcaaaaaaccaatgcaatgcaatgattgaggatatagaacaatggagattaaaattgatttcttcttttgttaagaagaagaagaaaagattcacgtgaagttaattgaaaaagcacattaaagttgttccgtaatcaacaaaaatgacaaccaatagaagttgagtttcatagaacttgccccagatatgttcgtgtgaggtacttcagagggtggctaaccaggttcgttttcatcaatggtcgatagtttgcagtatccctgtgtataaaataagtatccgttagacaagaaaatgccaatttcaggcaacaacacaaatatgtactagaagcttataacaacacatgatcatattggtgcaagcttagcttacctacaaacatctgtaagataaattactgcccataactttttaatgagagagtcgtaatgctgaaataccttagcaagtgatcaggataattcattctcaagcaatccaaatcatgctttatactatgtcccacaagaagtctggctttagcaccatccgaccattcactcccagtagactctccattgtacagaatttgtgaaatcttttcttgcacttcttttagtggcatggcattactcagatgctcttctgttaatccagttacttcatatctgtaaccattagggatttatgttattattcagcacgcaatggaattgcccaaaaactacctaagaggagtagctcaaatggtcaggcatcagagttcgagtcccttctgggtaccctctacatagaaattgctatagtttatcctagtttcaaacaaaaaggaatttcccaataaactcgttagaaagaaagcggcataatcaacaacacaagtacctgtaattagtgacagaaattagaggatgcacgtaagcatgaaacagcaaattctcatcttcatcaatgaggcagactctagcacagacgtcgagtgttccatcatctccacctcctaccatttcacagtctaaagctaccgctttagaaccacttccaattaggtttacatcattagagtttgaaacctcaatctgagattctgcatccgacttcttagtagtgccctgaaatgattaagtacatgtccagtaaagtcaatagacttaacaatactagaacaatgaatcaacagataaaaaagttatcccagaggagtttgtatactggaaggcttactaaaggaacaggtgcagataggcaacaaattttcttatggtcattgagagaagtgaggctatcacagattttgaggcatagattgcaaccccgttcggaataaattgttgaacaatttgactttggcaatggacctaaatgagagaattttatcaatgataagcaatgcaaaagacaatacaacaatatgattcaaaagaaacatttgattatatttatattcccaccagtgagatgttccctgagtgattcaaaagacttgcaatgctttttacacaccccacatctaggttgatgaacagagtggaatgaacacttcatgtgctcaactaaatgttcctttttcttaaattgcttgtagcatgcagagcatttgtgcctggaaaatatggttcaatatagtttcaaataaaatatgatttcagggtaggccaccaaataaagaaatgacaaataaaattttccctaaataaaaaaaaaaaaaaaa

SEQ ID NO: 18597 - DNA, 4288 bp, Cannabis sativa
  modified_base (3646)..(3646): a, c, t, g, unknown or other
cgccccgcctcccgagtcgtcgccttctcctcctgctgctcagatctccaattcgggtggtccctctgatgaggttgtacccgacgaggatgtgatcgcaggaatccgtagcgactttgcggagatcgggggaagattcaggagcgggatttcgaagttgtctagtaacaaagcggtgtctgagttcactaagatagcttcgaatttgcttcagttgggagaggaggatgagctcgaggctagaggttcagttggggttactgatgaagttctggctttcgccaggaacattgctatgcatccggagacttggcttgattttccttttgctgatgatgaagattcagacggtaagggtttttttttttttttttttttttcaatttccaaaacatttttgttatcctatgaaatttgatgggatcggcttcggtttgataaatctattctgccctctttgatcagatttctctttaacaatcggaaatgatatacatttacttgttctattttgatatgcaaaattgaattgacattgctctattcagcttttttgggcaagtaatgctaattttgtaatattcatttctaaaaactgaatgtgggttatggagagttggtaacctcctgagttccatttttgcaattttttagcttaagcatatgtatggatacgcctttgtacttcatgttcattagagaaatctcttagcattattagtctattgtaagtgatcttcaactggttaattatatgttgtgagcttgtattatttcagattttgaattatctgatgcccagcaagaacatgcattagctgttgaacgtcttgcaccaaggttagctgctctcaggattgaactttgccctgggcatatgactgagggtcacttttggaaaatctatttcgtgcttttgcatcctagattgaatagatacgatgctgaacttctgtccacacccgaagtaagttgcttgctttgttgcattacttacctgaatcatactttttgttattattttcttgtatgtatgagatgaaaatttcgtttgttgaagaggatgagtttatgtaattaatcacctcgtcctatagcttgatgtaatgtttatgttcgcagatagtggaggctagagcgatattgactcaagagctacaagttcgagccaagggaaagactcaaccacagtcttcttctgggattgttgaattaccaaaagtagaacatctttctgtgccatcagttgctcaagctgaatatgtgcctattgtaacacataaacctgagtctgcaccttctgctagggcagttgatctcgagacagagaaatatccagttcagagtactgagattaaagttattgacaaggctgtaattgaggaaggacctgcaaactcctccaaatatcaaggttcaacctctggctcttcctccaaggtactggatgataaatttgaggatgacggtgatgattggttgaaagatgaggaaaactcagagatagttggtgtcagtggaacctccattcctattgggaatgacgaggatgtgtctttcagcgatcttgaagatgatgatgatgatgcagatgttcctgtcagttataagaaaaccacatctggttctgattcatcaaccaaagactcaagagattgggttcagctgagcagaggctctgctgattcagataaagaggttagctctattgaagtcagacatggtgggtctgagcaagcaccagcaaaggaaggtaatgactggcttgatgttgatgacattgatgtcatgtaattcaatcaataaacacctcttctgaaagtttgtgttttttttattattcttgtcattcatttcctatgttgtgaatagcatgtgaagctttaaaaggttaaatatcaaaaagacttggaaaactcacgattgtacataaagtccgctactggatcatattccgttcaatggatgtatttttaagcatagataaacataatctaataaatattaaaaagtgtctggttctttttatgttttcgtttattgggttctatcaatgtgcaaatcacaatagaaaaatgtacaagcattgatgtttttataataaacttctttttccgtaaattaagtttatatgtacacttatccatgcatatttctggccactggaacctaacattttatggtaaacaaaccttttttagtatgtactctttattgtttttcttcagttgaaaatctgtacaataatagatttcaaaggattaacttgtctgattcattatataaacagatatctgcatagatacaaactaagtttgctccctatttaaggacttcctctacagccttatggcacctccgaaactggaagaaaccctctccagttgagaccaaagcaagcttcccaatgagaaccttggtacattttcaaccctggtatgcgttgcagttcttagacttgtactattactatggctactactactactactagtactacttctactaaggactggagatgaaatcctggaagtggaagttttgtaaattgaaataattgatcctccaatctctctgattgccaaatccaccgtgctaagattcacatcatggcccgaagcgtcagtcacgtaaaacgacccaaatgctctgtcgttctgtgttgccacctccattcttgataaagaaaacccactttcacgaaacaccctagtgatatacgaaagcagtccaaatcgatttcgagaacataggtccagcctcaatccctgcacccccaaaaacaagaaacacttattagaaactcttacaatcatatacatataataatcattacaaaattgagaacaaagcaacacatacatgtgagattctccgctctattgctgctatcaaacacaaggtaagcttattcctctcgtcctcaacattcaaacgacgtccggtggcgtgtcgtatgaagtactcctgttcagccattgtgcctttggaagcaaccacagcatggaaaacgacataacccaagtccgtgagagcacaaaccgtgtcaaaaagaagcttgggccgatctctactcctcacgttgagaatccagtaccctttctcttcacaattctcaatattcacatgtgcgcggtcacacccactgatcttatgggtcccagtcaaagcaccgtcgcaaccgttgcatcgctcgtagtcaccgtcggcgtacatcaactggtggagtctcctctcggtgtgggttctccccactgccggaatcatagtgaacctcacacttgtcttctctcccttcacgtgatgggcctccaccacgctctgtagaaagtctcgtacctgggcctgctgtactgggtcctcgatgggcccaccttcaggcccattttctacgtggacaatacaggccactcttgtgttgtgggtccaagccactgaatcggttacgctgcagccccgttcgagaagagcggtcattatctcggacattaggcccggtctgtcggtgccggtcatttctagagctgtgtccatttgaagtggtctcactactcttccaaggcttgtgatagtggtatatgtagtaggtgtaggagcacccctcctagttgcacatattgcctgtcataataatatatatatatanatatatatataaaaaaattattggcactttctcacaattttgtcttgaatttctcttaaaattgaattataagttataactattcggatacattaaaggagttaaactaaattgcaacgatgagaagcaagtttcaaccatcaactctaactacaacaaattaatataacaaagtataaaaactggagcaatacagtaaacattccagattccacacatatataatatatgaatgtatatagtatgtgaaaaggaaaagaagaaaagaaggaaaagtgtgtacctcctgaatgtagtgtatgaggctttcgtcagtaagtttgttcccacgttggtctgtcacatggaacactgaaaccaaaacaccatgcaatcaaaatggagcccatgtcaataataacccaataaagttcagacttatataattaattatataaaaatgtaagtgtgtactattagaagaagaagaagacgaaaacaaaagcccttttcaattaatttgataattcttggactgtgagctcataaaaaaagctgaaatggagaatcttgaatgaagacaaacctcctcgatcataatagatcgaacatacattactttttgggttttttttaaagagtttttccaaaaaaaaaaaaaaa

SEQ ID NO: 18598 - DNA, 7007 bp, Cannabis sativa
taataataataaattaataataaataacaccaataataattaaatatcaaatacactttaatttaataactattataaaataacgttaactatttatacactgctacttcgtattaatactgaacactactgattcttaataataatacacattctctaataataagagtactaattgaaatattaaaggacacctatagtgctgaacgccattatgaagtgtaatattactattagtgtaatttaataacaagttctacttattttagtttattaaatgttataaagaatccctaacaagttataagacgtcatgttatagaggtgttgaatatcttggtgcttcataataatattcttactattatatatcagtgatgcttaacatcatctaaagataatgtcttacaattaattaacaataacgatgcgatactttagaatgtattagacaacactagtaccttttaacatttctctaataataattactattttagaaagacattaattttcattttttattatcccttctattagattggttagcatggattttctactagattctatcttttattttcttccataatatattttaattattttatgcaatggggtcaccaaaccattcatgaagatcatattaaaaaaaaaaaaaaccattaagaaaaataatcaaattaaaaaaaaaacatcaaaagcttacatgaccattgggaagacacttgcttttcctaggcaagctatcattttttatacatgccacgctctcccttttatttttattttattttattgatttttaaaagtccaagatacaaataaaaaataaaaaataaaatgtttcatataatattataaacatatataaaagggtatttgactctaaaatatattactcagtacacttttgatcctaataaaatgttcttaaattagtagacaatagaattgtttggatgatttgtcataactaaagccttttttttttctcttttataaatatacaaaaaagaaaaagagagagaaaaaaaaagatacttattactcatctaatagtgtttgaatgtaaaaaaattggctttattgctacttaattactaaaattaaaggctatgaagactaagttggactatgtgagtactataattaaaagattagtaaagtcaaatatctcttattattaagttgtctcataaataaattaataaaaattgttatggaatgtagtagagtaggattggagtatagaaattgaagtttcatactattactattattattattaagtaattatacagtacatcctaatttttagtccaattttttttatgaccgtgtacattataattatttaagttattttataaaattttgaaaaattcagaaaaatttaacatgctaaaaataaattttaaattatttgttacacacgtgaatcttttattatatacatgtgtaaaataaattgttcaaacattattttctatattataaattattccaaattttttaaaattttacaaaatgtcttaaataactataacgtacacaattacgaaaaaaattagactaatttttttttttctagatgtaaaaatagataagaatgcatatgtgcacctattttaaaggtgcaaggtaaaaacactcgtttataatatcaaaaataaagttaaaatatttattgcacaaataattattttttatacacgtagtaattagttatttaaacttttaatactataaattattcaaaaaaatttaaaaattacaaataatcttaaataaaaacaaaatacaccattattaacaaaaaaaaaaagaaaattaataactaatataattttcttttattctaaaatacataactaatataatcatatattttcctattatatatttacaatatataacataaaaatcaaaactttgtcactaaatacaaacaaagaataaaatagttaaaaaaaaaagaatttgattttattttcttaaaaaaaaaaagacaagagccaaaaagtactaaacgacagttgaaaaaatatgataatacggtaacaataactgtacaattagttagagacagtagtataggaatgaatagaccagtggaaaacataggagaagaagaaaaataaaaattatatttttaataaaaaagaaaaagtgatctagatgtaagaagaggaggttggaccaagaggggtaaaatgggaaagtttggtagagaagtctctctcaccaacattgggtttcagttcagttttgaggtaaagaaaagaagaagaatagtgtgagagtgaagaacaaggaaaaatgagctaagctctaaaaagctttatactttgtactaaaaaaatactataatgagactaagaagaagaagaagaagaagaatttgaacaagttccttcatttctattccttattagtgttagagtttcttcttcttgttcttcaaatcaaatcacatctaacccacctagacccttgtctttctctttctttttctttattggtctgttactacgtcgttttcttcatccaaatctcaactgcccagaaaataaatttaagtttgaagctttcttgtatacccttctgggtcattttttgttaagtgaattaattgattagttatggagtcatctgagaattgttctgttaaggttgctgttcatgttcgtcctcttattggtgatgaaagaatccaaggttgtaaagaatgtgtttctgtcacaccaggaaaacctcaggtgattagtaaagtttcttactttgtgttttgttcatgagctttttaaggactaatttagctaattttgttgtggggtttggttatttcttctcatgattcagtttttttctcttaatgattgtaattgatttgttcattttatggaatttactgtgtcctagaatagaaggataaggcttctaaagctatagaatagaaacaaaagacatttgtttagtttcacttattaaaatgtgtgaagactctaatgaatgataagagttagaaaatggggttgtcacaaaattgaatgaatagttcctagaaaatggggttgtcacaaaattgaatgaatagttctttggaatttggttaggcatatggtttgctctgacaaggtctgaggttcgagtccctctcgggtacctacatagcaagtgctatagtttcctggtcaccaaatattgtagggttaggcgaggcgcggtgtggatcttagtttcgaaatagttttaaaggcaatgttttgtaatttgaattaactatggtgtttaggtacaaatcggatcacattcctttacttttgaccatgtttatggaagtggtggaaccgcatcacctgcaatgtttgaagaatgcattgctccacttgtggatggtttattccaaggatacaatgccactgttcttgcttatggtcaggtaattcttgttctacaataaattgtaaatttagcaagaacaagatctttttgtgttgttttattatgttgtggttaatttatatgtatttatgtagacgggatcggggaaaacatacacaatggggacgggctctaaagattgtagccaaactggcattgttcctcaagctatgaatgcacttttcagcaagatcgaaactttaaaacatcaaacagaattccagctccaggtttccttcattgaggtatgcacctaagaatgtttggtttgtttgtttgtgttgtttatagtgttatgctattaaagcttatacaatgagctaaagaagatgaactagagaaacatatgaaaatggttaaatactattttggagtctgaacactgtgttttgtaaaagttaccgattggactctttgttttgttaaatgacaattcagattctgtattttttaaaatagtacaaaataatatattgagctcattttttgtctaaataaacttaataataatttgttatgaccatactggttacattttttttttttgcatatgttcgtgttagattgatactattttggaaaatattgagtctcaaattgtattcattctatcagaattcttatttaataagtaataacacatgggaaaaaagcttctaagaaagttgtgggacaatggcaagatcatatgattcgatatttcttctgtttactttattgttacaaataattaattgggtggtttgattttgaagatcttaaaagaagaagtaagagacttattggattctgtatctctgaacaaaatggacaatgttaatggacattctgggaatgggaaagtttctgctccagttagacagcctatacaaattcgagaatcatcaaacggggccataacactagcaggaacaactgaaatgtctgttagaacattacaggaaatggctgcttgcttggagcaaggatctttaagcagagcaactggcagtactaacatgaacaaccaatcaaggtaacttgtcatactaccgagctaaccgagcttttcaatatttttaatgtaagttaatgaatctaagagtaactgaagcttcattacatgttatctaccagccgatcacacgccattttcacaatcaccttagaacagatgcggaaagttcattcagtttttcccgggaacgattctccagatgaggatatgagtgaagaatatttttgtgcaaagctccatttggtagatcttgctggatccgaacgagcaaaaagaaccggttctgatggtgttcgtcttaaagaaggttgatgaatctgttgatgcatttagtcttagtttcgatttgtgaagaaataacgaaacttctaacttaaattttttatgctcaggtatacatatcaaccggggccttctagcacttggaaatgtcatcagtgcattgggggatgagaaaaaacggaaagagggtgttcatgttccttatcgagatagtaaactcactcgactcttgcaggtcagtttattagaattatataattgtacttaaactatattttctcaacctaagactaatcttgatcatagcaatctacttattctgagatggattcacttgtggcttctgacaggattcactaggtggaaacagcaagacagttatgataggtaacctcttaactgattgtttaatcaattatatgcattgctagtttaatggatcttaaccccaaaaagccaatgattaagatttcgaattctcatcatccttcttttgaccaagacacgagacaatccttttttccgggctgtggttttttcccccaactttgatgctttcgacatgatatacactttcttgtaatcttaaagatttttcactgtcttaccaaaatcatttcatgggtgaaagttgatggtttctttcatggcatctttgttttcggttcctccatattatagtccttttatgtttctcttatgagatggaaaaatttctactttacagcttgtatcagccctgctgacatcaatgcagaggaaactcttaatactcttaaatatgcaaatcgtgctcggaatattcagaacaagcctgttgtaagttatcaaatggctctgttgcttaaacatgatattttctctaaattttagatttatcgaaaaaacattgaataaatttactcttgtgtgtgtgtgtgtgtttgtgtaggttaatagaggtctcgaatccaatgaaatgcaaaagatgcgacagcagctggaatacttgcaggcggagctattttcccgtgggggcgcagctccatctgatgaagtacaggtatttgttatatcgaaaccttcttttgcttggaattggttgtttctgttctgaagtggcgtctgaaaacgaagtccattcgatggtgttgattacactattgatccaattcagttcttgaaagaattggaatataggaatcttattgatatcataggaagaattacaaagttccaaacttttcgagacaatttcgtatctccccagaaagtattttactttctttaagagacgactggcctttatacagactcggctattaactaaaaagcaataacataattctatctaactaacaaaatgaggagccctataggaactaaactgaacaacttatgcattgcatacacttggatatgaaagcatatatttgaggcctaacaggtatattattgcttctaccttaggttcttagggaacgaattgcgttccttgaagcaagcaatttggacctttctcgagaacttcatgtatatcgcagtagacgtgctgttgtggggcagtgtgaagcagatcttccggtaagtgtgtaataaacttttttgtatatttgaacaaatatatgtcatactacttctccgttgttgttcaaagcctcacattgtttcgatctctttaataaattcaaactatgattactgacatggtatctgttttttgttaccttccttaggatgactatgctcctcttacaaagaatgatggacttaagagaggctttcaaagtatcgattcctctgattatgaaatgggcgaaatcatatcaggtaagagttaatttttgttttggctacttaagattgttattcttcaggcctgtagttcttgacatctttcgcattttaataaactgtacaggtgaaaatcctagagaagttgaagttgcaacaaaagagcgagaacatgaatatatgcaaaatacattggataaggagttgaacgagttaaacaaacgcttggaacaaaaagaggttcaaatttttcttaaaagtttctttgtatgttatgcatagactcgacacttgaatagttatggctgtaaatgtagggctctttgttttcgatgcaacacctgttgaatttcctcggtatgcatgtttataatgaatgtcataattttattcttttttcggtacagtctgaaatgaggctttttggagggattgacacagaaacactcaaacagcacttcgggaagaaaatcgtggaactcgaagaagagaagagaattgtgcaggt

SEQ ID NO: 18599 - DNA, 3368 bp, Cannabis sativa
cagtatttttgaaaaaaaattcgtatgacagtatttttgtaaaagttaactcaaatttcagtatttttgtaaatttccctatttttttatagtgatatttgttgtaattacaatttcccttgtaaagttttaaaaaattcgaaatagtttaccatacaaaaaattgagtttttgaaattcctgtttagcacgtgtattcaaataattttaaagttatttttgacactataaattattcaaatttttttaaaatttacaagaataatactgtaattataacaaatactaccataaaaaaaattaaaaacaaatatactaatatatgtttttagatatagaagttgacagtagtgcaccttcttacttaaaaaaaaatcattaaataatttaatttgatggcaaagttttaatctttatttatttatttttcttaggttcttgttgtggttcatcaaacccaaaattgtattttaattttgaagtggctttggtggtaatggaaagggtggtatggtatgtggtgtggtgagttgattacctttgaattggggaaaaaagaagatgtatttttattatgaaaaacaacaatacacattgcaaaccccactaaggctaccgacccataaagccaatcaattaaaaaaaaattaataaaaaaagatattgagagtttgtggtcaattgattcatatcacatatatcaatctttgtcacataaagcaatgaaattattatgatcatttgtaggggtatttatatatgcaaaagatttattagaatgttgttactagagatatctgtggtgttaagcatcatctaaagaaaaattaaaattaaagaagccaaatatattttttgagagcataagtttactttcctttatacactaataaattataaaatctaacaccaatttataattatatattataataatgcctaatatcataatttcttttaggaatcatataataggtaaatattattttagacgatgtgttttgtcaaaaaatattaattggaccatctgttttattaaataataaaatagattttatatttttcaaaatggtaaaaatatgactctgggctcaatttttaacaattttattttttaatataacaaattttaagactttaagacactttctaactttctaacacgaacagatacagaaaatgtagccaattttgttataacaattctaaatgagattattattaaattttattttgacaaaaaattagtttatgatcctatttgtataattttagaaaatacagactctattttatcagaggctctaattgataacttttgtaaaacacagtatccaaaatagtatttaccatataatgataacattttattgagtagaaaaaagatattagttttttcgaaaaaaatttatagatgatacattttctgtttatttcggtatttagaagagtttttagtttagttttttcttatgattgtgtatgctttaattatttagagctacttataaattttaaaaaaaaaatctaaataatttgcagtgtttaaaataatatttaatttttttcctaaatgattactgtttttttatacgtgtagtaataataattattttaattttattttagtactataaattatttaaatttttttaaaattttacaaataattataaataagtacaacacatgtgataataaaggaaacggattaaaaactctcataaatatagaaacaattagagaatgtactaaaacacacatcaacattttgtttcatctcatcaaacactattctaacttcactaccttcatgcttgtaaaaagtacaacacccacaattactattattatttctttctatacaattctattttggtttcttttacttttagtgatgcttttagttttagacaagttttggagtcacatcacacacattacataaaatttatcaaagcaaatatcttttcttttagtctaatgcaagaggaatagaggatatttccttttggtttcaaactctataaaatctttttttttgttatctctacacaaacttctaaccatctatgattccaatgtgttggtaatttcatgagtctttgagtactttacccctactttatttatagcattaaaataatttaaatagtattttgtgacttttgaggagaaggagaaaaaaaaagtgtaaatttatgagtgctcattattccttttccatctcgactatggaaacactcaaaatggacctttttcctatattttctcttgaccattcatagtttttctttttgccttaaaaatattacaaaaaaaaaaaaaaagaaaaagaaaaagaaaaatgaaaatgcaattcttacatataaaattaagagggggctaaatattttcttgagaaaattagatatctagttttgattggatgatactaattaagttattaacatccaattcaatatatatattaaatataatacaattatttaaatttatacatgatctcttaatttttaaaacttttgtatcatgcaccaagcatcattttaatatttattttgtttatagtattaaaaagataggataaatttggcaaattaaaacaagagccttaaatagatattaattcagctcatccacgtacttcaattaaaataatcccaccttcattttttttttaaaaaaaattctcaactatacataaattacttcattaattaattatcttcaaataacatggatcttatacatttaactaatagtaacaaaagaaaaaacaatccataataataattcaatttatttcaatctaactcaccaaaggagctactaacatctaaatgaattgagttacataattattttatgagaaatgctaccattaattttctatttcaaccttttaattaatctatgtgcccaaaaacatatgctaaaaatagttttttttttcaagactatgttcgttatagttacaattttaagattgtaaatttttaaatttttttgaataattcacagtaccaacaacagagttcttgatattaaaatgcaccacacatatttttaaaaacttcaaatatgttttcaacactgtaaactattcaaaacttgtaaaaaatttacaaaaatgatattgtaactataacaaatatcgatatgattaaaaaaaaaaacagtattccgacgtgtattttcgaatgcaaaagttgactaagaggctgcaattaacactcctctaattttataggggttttacaaaaatactggatttttgacaaaaatttataattttactgccacacgaatttttttataaaaatactatctttctataaaacaatcgtaaaatactaaatagaata

SEQ ID NO: 18600 - DNA, 4649 bp, Cannabis sativa
gggaaccaagacacaaagaatgcttccatattagagtataatgtctcacatagaaaatatcgagtaacatgtataactccattcattactaattggactttatatagaatcccatgattcttgtcatagtatataatctatcgtagccatatatccctaataactcttgtcattccagaaattttcaagaaaataactatttgtaaactgtaactgaactatgcttacatatgtcaactacattgtttctttttactgtattttctttctttctttcttttttttattacaagaaagagacctcaaaaaatgaaaagaaaaaactttcaggaaaaatgatacaccaagtaagatgacagctgtacaataataaatttgagaaagaatggaaaggctagcaaagggttactgtaattgttactactgatcctgatgctgttcttgatggtcttctggttgtatttcttgttgctcctcttgtggctctagatgttgaagctgttggtctgcttgctgttgttggttatcttgagaaacccaaactatatcttggaaagcaggtctaatctcatcattcagtatcttctgatacaacactgtatctccatctgatttctttacctcaaccaaataaaaagatggagtgacctcaaagatctctgcatcaatggacaagaatccctttttatcttcgttcagaccctccaatctcaacaatcctgcatccctcttcttcactttcatccttagttgcttagcaatatcttctagtttggagatgacgagtgcagctggttttctgaaaataaaccttgcttctctccggtgaggattttcttcaaacaagccagagagatcaaagccagctgatagggagataatatcaaaagcattcaagtttgaaggtctgactggctcttgttttccaccagaagccatattcccactaccacatgcatcagaggtacctgtagatgatgaatccttgtttcctagttcaggtttgatactttttaatttcattccttttctaaaccaagaactttccttgattttgtctattgtaatcctagtgctggggtttggatcaaagattttggataacaatctccgcacttcaggagtgaaccaactggggaatctgaaatctgctttaccgattttcctataaagctccatcaaatttgaatcatgaaatggaagataacctgccaataacacatacaaaaccactccacaagaccaaatatcagcttttgcaccatcatagcctttcctgttaatgacttcaggagcaacataggcaggagttccacaagttgtgtggagcaggccatcttggcactggcaattagcaagagcacttaatccaaaatctgaaaccttcagattatcattttcatccagtaataaattttctggctttatatcacggtgataaacccctttgttgtgacaaaaatcgactgcattgataagctgcataaagtatttcctggcaacatcctccttcagccttcctttggcaaccttgttaaaaagctcacctcctttagcatattccacaacaaagtatatcttagtttttgtagccatgacctcataaagctcaatgatgtttgggtgtttcaccagtctcataatcgaaatctctcgcttgatctgttcaatgagtccaaccttcattatcttttctttatctatgactttgatggccacactttgatttgttaccaagctcctagcatagtaaaccttcgcaaaggtaccttggccaagtaatctccccaactcatatcttcgcatcaaaatatttgatgtattttccatcccaatgcttcaaaatctattcaacaacaaactacagagtccccacaaatatacactatatatagcttacaggaactggggatgattttaatataagctattcaaactccaccgtctccatttagataattcatcaacccagacataaaatttataaatttatagctacttgggggtccatggagcttttcagagctgagactaaaggatctcagctctaataaattctcactctcaaggcttttgacgccaaagcttcgggcacagaggcacatccttcagcattccctcgaattttcacgttccaaataaatattaaagaatacttatagattgatatctgtaatggatcttcagcacaatgctttacgattcagggcaattttgaatccacaatctgaaactataaagatcgacaaataagaacaatcaatacaacttagcaatacaatttgagaccaataagataactaggtcacaattaattgataatcttcaaaaatgattgatgaacttgaagcaacatctcctatttctgttgattattacattaccatgtttttatgcatcaaaaacactacaaagatataatattttttaagatcatatatatacatatatttatattataaatcttccctaataataaaacctatcgcaaatcatatcatttattatgtttcaaagacaacttcatcaaacaacttgattcaaatcaattcccgccgaccatcgtattctttacaataaatcttaaaaataaagaaaaagaagattgaagaaaaaaatgacagcgattacagatacagaacatgattaagctggaaaaacaacaacaacaaaattagacactaaaccagataaatatctcaacaaaataacttggatgattactagtcttccaactattttcaatttccgttacatgaaaaatcgaaacttacctatatggtggaacgaagaagcttctttggctgataattttcgaaccacagagagaaatttcaaatagccaaggaaaagaaaaaaaaagaaaaacagagagagagaaaatattggagtatgaaatggtggagttacacctttacattaattttctcataaaaagttgctaatttaattattaatttgtatttatttatttatgcggtgatacttggaccagactggagctgtccctcacaagatctggacttagtgggcctgaccgtaaatgtatgagcccattccatggaacgtactacggtgtaagcaaacactttttttaggaatttcaacacagttgctacttagtcactaacgttcttccacgtgtcagtaaataaatccaacggcctcgatccggtcctaccaaataattatttatacattttcatttgaaccaatataatttgttgttttctttttttcgaaagcaatataatttgttgttattattattatttttttttggacaatttcaatgtaaatatctttatatttggcattaaaaaaatctataagtgatatgtttggtataatttatttaatatatatgtgaggtatacatagatataaattttgatacctctattataatttatgttttgttatatgagaatgtatattataggagtatgtttaatagatatataaataagtggtaaaaagttaaaatatagtttatttaataaaaaaatatgctctaatagtatatcaaaaaataatataaatttagcccatagtaaattttgcaccaaatttgacacaatattttttatgatataaaatttacattataataaactactacttttttatttatatttatgacacttgtattattttattagtatatttaactatagtaataacttataaaaaatttatatatatattttttaatatcttacatattgaagtaataataaaattgataataaagttattagttttttattttttattaataaaaacagtaattaggtaataaagtttacattaaaattttataattgtacattagagtacaatgataaaatttaatataaatctaccacaaaactattttttgtgacaaatgtaacacaatttttacatctatcattagggatgatttaagacatcttgttgtttatattttttgttgctcaattagttggacccactttattaactttaaatttttaagccaattagaatttattttgttttcttttaatagaactagtaagagcactagtgatgatcataattttttctcactcttttctcttctatgtcacatcatctagggtagcccattatattttttgacaacacatgggcaacgcccactggaggtgctctaattggagcatgtatccgcctgttttttttacttaaaaatttaaaaaaaaaattatagtgtcaaaaataaaattaattaaatgagataatggtgagagctttgggataattaatgcaggtgatttttacgtggttcgggtattaatgaaccgtagtccacgagattttgttattaatgagagttcttatacagagaatgtcttggtgagtttttctctctcccctttaatcgatcccctttcccattttgttcaggggtatttatagagattggtagggatagttcaaaagggataacttgtctttgagtgccagtattgtatgagcagtattgtatgagcacaagttctcaagagatacaaaatagggcatgcacaacctatgctgttggtaccatagggattaggtgagattaatctttatcctttcttgattgatgtgattcttcataatagagatgtcactatcccctttgattactgtgtaattgt

SEQ ID NO: 18601 - DNA, 6448 bp, Cannabis sativa
  modified_base (4730)..(4741): a, c, t, g, unknown or other
tctaagatcctggtaaaataatttccaacatcttcatcttcacaatcagtgagggccccgctctaattttgaaccaacttggttaaggccactatttggtcttctaatctctttgtatcagtgtttgggaggtcccttacatggaccttgtcattcaaattgtttatgagattgtaaccacgtggccttgccttctcacttttttccttattgtatttcgcgtccaaatgccgttaaaggtcaacgatggaccaactatcattagaacactgcctctctactcccccatcctggttcactgaatcactagggcggtcttcctccctttgggtcttggtactttcgtaccagcttcctttggcgtcacagggcctttctggttgaaggacatccaagcctaaaggtgatgcacatcttctacatcgaaaaatgcttaattgcctgattcatgtttttttgaggaggtttaggggcacgagagtttttagggttaaccactttttccttcccttatttttgtataggagtagagcctttagcattagtaaggttttccctggtgtttcctctgacgtattccactgaaaggtcatcattaaaatccccttcgtccaggtccccaaacatgctttgaaggaaatctaatactttttccatttttttagagaatttcttctatcgggccaacttttactgggctttgaacaattcttgggaaactcttgttacttcagggctgtgctcatagtgatagctatctttgtaaaatccatccttgacacaattgtcttcaccatattcttcctcttcatagtccttagcattcttgtcatggctgacatggtcatgttggttgtccaggcctttctcttaatcattcatgttagatgtgccttcgcctctcgtgtcgcttggttgggcgtgttccagtgagaaggggttcacttcctccatgaccgtttgaaggccatcttgacgagcctttttgttacctgtttttcgtgtcaataccatggtagtaacaatggtgttcatctttctctggctctcaatgaatggaccaaaatgtttaccaagatttttagacactaaaatatttgagagctaataagtaaaaaattccagagatgaaaagaggaagatttttatgtggttcaggtgttaaagaaccttagtccacgagttagtctattagccttaaatggcagtattgatggatttacaatattttataggaaaccttaactcttaacccttcatttctctttgaagaagaagaaatctaagggaaatttttgtggagtttttttgatgtgtttctttgtctctccttcttgcatggaaacaaagaggtatttataggctgagtggcgggtatgggtaaatccatgactcgcctaacatttttgcttacatcccactattagggtaaattacatgtcatgtagacttgaatggttaatcttgtgggtagcattatgcccacgcgtgtagcaactggataatgggaccactttgtactatttggacacatgtcacacaaaggtttaaccttcaaaagagaaagacacgtgtcactcaaagcttgctcctttatgggtagaagtttgtatttcctacctggtaaaaagagggtggcgatgcacacactacaatacttggatctaggggacatgatctaatctattagtaaaagcataaccaacatttggtgacctagcatatggaaaaagtcgatatacgcaacacctagtgaaggtcgacatctactttaggcccttcagatgtgtatttaaaaattagccaaaagagcctctctgccatacccctccggtctgagagagacatttctcatcccactcttcaagaagcatatgttgacaaaattagcctcccatgtgtcttcttattctagatgacccttaattcgagaagatctcctagttgtactataggattccaacaacagggtcatagacacaggttttttccttccatgccacgtgtcttgccttgtaaaaatgtggataatagagggagtgacaaataaccttggagtcaatcccaataatagcctcatgcaatcaagaaaagatatcttaatttctcttgaggcatgccataagcgatgcgcataaggcccctgtcagatttgttccaatcttaacaatcttggatgggtccattgctgtgagggggatttctttgagttcctcattcataccaactcttgattcaatatccccaaaacaagggtgaatatcgtcctcatcttaggcaaaccttcaagcagttttgggtgcagtctccttggttataactttagtggtctttgtcgcctctctgaccatggtgaaagaggtcttgatcgtccatccaactattagaacagttgaagagatcttctttgctagtgccaatgaagttttgtagcactctagggtggcctattggttaccaaggaggcgaccattgtcggttgctaccgaaaacgtcacagacagatggtagatggataagatgccttggaagtcgtataggcctggccttccaatcataatgttgtatggagacttggtgtcgaccactatgaaagttgacatattagtgtttttccttggggcagtgccgacagtaaatggtaatttgatcttaccatagggactaattccatccccactgaaaccatacaagagttggtcgcatggttccaagtctttcaaagataaacccattctctccagagttttctcaaaaagtacttttgacgatgctccaatatcgatcatcattctagccacaatcatgttggctatttagacctcaacaataagaggatcgttgtgagggaactgaatgtggtcccaatcggattccctaaatgtgattggatcacactcgaagctttaacattttgaaggccccttcacaacctctaacattttcaatctcggttcatgtcggcgagatctagcatacttctccaatgctcttcttgaattactgagaaggtgtggaccatcaactaccacatcaagcttttctaccactgatgtaggctggagaggaccgttgcctcatgtaggcacctgtagcctccaataccactgtagggcgacatgcttttaacagatcaagaattttatctcgtctcgcaactgactacactcattagtgtcatcaacgtaataattatggtaggatagaacttgttcatgtcttctcccttactctttgaagggaagaggcttgtggtatggcactgttgactgaattactacaaatatttcttctctttgggcaaagagaatagaataggaggtgaatataggctcatactccttattgaacctgtctccaattttagctttctttctactagagaagttagcttatttaccaccattatttaacctctaacccctgctttttcctcccttcccacttcccacttatgcctcagttttaggggaagaattttgtggcaatttcttctttttacttttcataccagttgcttgagagatagcttcttcaagtttgataaagccatatgatatatccaagaagtcattcatagtgtagagtgctttgaggtgaaggtttgaccataggggactcatctccttaagtaaggtcgcgagttccataaccctcgtgtcctcactaagtatttttgtcttagaggttgcctctaagaactattggatacagtccatgatggattcatcatcttgttgcttcacatctacagaatcatttggttcgatctagagttgttaggatggagcgaattgactgtcgaaggctttcacaagctcttttcatgaatcgatagatctagtagaaagcttgagatgccattgctgagctaggcctgtagccgtggtagggaatattctacacttgacatcatctcttactccttgcatactggttttcacttcgaagtagatgatatgagaaaacgaatttgcttttccaatgtattgatgtcaggtgaaattcttgaattttaaaagaatctccaatgctttgattcaattttagagtagtgagtactgtgatatagctcaaagtttgacaattttggagttgaaattcttttcaccaaggtggtgaaggaataaaactcgcccctgttgataccacgggtggtagtctgcgtcccagttggaccttcaactacccgattaacgaggtcaccactagaagctcctacttccaccaaccttctcttgttcgggatgtcacgtaggtccttttattttccaattaggtcaaaaatattttttaacttgggtctggctgtagcctcctgaccattgggtcatgaagccaatgtggggaatttcccctcattacgtagggtcataagcgcgaagagagttgaaatcattgcttaggttcagctcttccccatgcactcgagggaagtactcatattgatggccattaggaccacgagcaaggtacctacacaaaacacccctttccccatggaaatacttctgcgtgtggagtggttcgttggtcctcacccttagaatctcataccttccagtttcatggtagagcatcggggtccattccccaaggttgactacaggtccttttccctttgtagagtcaaaggtcctagagtcattggacttgtgaggagaatcccgtggaggagaaattagaatagagtttgacataactattttcgaaatatatatatatatatnnnnnnnnnnnnagagagagagagagaaagaaattttttctcagttgttcttgctcatgtgttgagaactcaacaagaacaacactatacactttatcctaatagcccacacaattccttgtgtgaggtggattgatttggaagatactggtgtgagttcaattgcatcatcctcatcaactagattaagggatacaacatacaagaagttttgaggataccctgataatctttaaaatggtatatgttctaaacttgttattttttttttgttttgatttaatgtatacacatattgagatccactgggttatggtacaatgataatcagataatacgaaacctttccgatgcgtacctaatttagtaccataaaccaacactagcacatactcacatcttggtaacatggtaacataattgagtgggagtgttaatcatagatatgaatatctatagcttttattatatatgttagaagtgaaatgacagttttctttgacgttggttgaaacattaaatatatagagctttatttcagtaattaaatttgtttactgaaatattattatgtcaactaagtattttaagaataaatatcattaaggataaaatggtaattctaggtctctattaattatatattgtatgtataagatcattgattgatgtgatagaaataatgaataatttatagtgtatctatattatgtgtatagagcgctctataaaatctagagtgcaattacaagtctatagtggagtcatgaagaattaataataaaaaaattttatgttaaatttcagatctacttattgggagttttattttataagcacgtggtactcgtagtatatagggtaatgtttaacaacgggggtacaataattatttatttattcaattaaaactcacactatttattttatcaatttaagaatttttcacttagttggtgaaatttagaagagagaaaaaaactttaattatttattaagacattttgtgttataattaataataatatttaaattatatttttatttagataattatttagatatgataatttaattaaaactagtgtaaatatatatatataaaaaaacatatgaattaaatatggcaaaggtaaaaaaagatgacaagattttacgtatattaagctaacatatgcaaaagagaaatttttaggggaaaattacaactatttttggttaaatttttacattttacgtttcaaattttatttatttattttgtacggtattctataaagacacaaataaatcacatgaaagtaaataagattttaaagactataaaaatacttaaaattccgtataatcgtatttttgtaatttttttttatgatttgtgtgtgttttaaattatcctaatttttagcccatcaacacatgaagtgggtgctaagctcttttattttattatttaattaaagaaaagaaaatgactaactacttcctataaataaaaaacaataaaagagcattctacccacttctaaaaattgagaaattttaaaaatttgctctgttaatcaatatatatatataaaagagaagtatgaagcggtgacatggcgctttaaaatcactcaaaatatttgtatctattctctacttaattctctcatttaaattaataaaataacactttaaaattactcaaaatatttttatttaatttttaatttt

SEQ ID NO: 18602 - DNA, 3918 bp, Cannabis sativa
  modified_base (467)..(469): a, c, t, g, unknown or other
tcataaaaaatcttaaatgtaaaagaatattataagagagtggcaaacttatgggtaaattgcggtataaatatgtaatgttttagattttatacacttaaataccttatctttatttttaaaggcaaaaatacataatgttacaattctcttacatacattactatcacttcccttaaatcataaatatagacacgtggagggtctagattgcattacatttattttttttttattttaaaacttaatgttcttaatattagaaactaaatgctacttttttcaaaaaaaaaaaaaaaaaccaattctcataacaattttcacatgatattgacactttaattcgataactatgttccatatactgcactggttcacttagctatggtaattaggtattgcatctctctctcttttttttttgaaacaagtaacatttagtttctgatattaagaatattaagttnnnaaataaaataaataaatataatgcatctgggtcctccatgtgtacatatttatgagttaacggaagtagtagtaacaatataagaaaattgtaatattgagtatttttacctccaaaaataaggataaagtatttaagtatataaaaattaaaacaataagtatgtatgccgcaatttactccaaacttaaaaataccatacttttgtaattttattatcaaatctcatatttcatgtaattttcaagctatgtattttaggagcataggacaaaaatattaactatatttaatgagatatatatgggttcgggtcgggtcggatcatggatagtccatgaaccggtttcttcaaaccctaccgcattttccatctcttttctttcttcttccctcaatcgactcagaaactttgttcttctttaatcttcaaatccaaccaaaccaaatacagagaagagaacacaaggcctaacgagatggggaccttgggtaaggcaatctacaccgtcggattctggatccgcgagaccggccaagccatggatcgtctcggttgtcgtcttcaaggaaattactacttccaagaacagcgtaagccttttttttttcttctactctcaatcttaaattctcatatgctttgcaatcgtattttgaatatgaaaatgcgacgagtattttcctatttttagatccacgaatttggggctgacttcgatcaaatttatgttctttgttctgttatagtgtcgaggcatcggacgcttatgaatgtgtttgataaagctcctgtggttgataaggaggcttttgttgcacccagtgcctctgtaatcggcgatgttagggtgggacgtggctcctccatttggtatggttgcgttttgagaggtaaagtaaaggtttttagctctttgatatcataattggtgttttcttagagacctgttgtgatttttagctttttctaagccaatcgcataatgggttgtcgcttattttttgtaatgatctgtaccagactgacttttcagtgttagggctttttttaaagacaccattttttttcttctgtttttggggatattgtggtgtggattatgagtgatgagtctatatgaggaaatgcatttcataattgtgaaacaatgacttgaacaatatttgagaacattagaagaactatttgtagctaattgcaagttcagataatgaaaccacataaaaaagtgtcaagtccagtcccaagtattttagtgtaagttttgtaggttgtcaatcatggttgctgctcattcaatgcagaaaggaatgaaattgcttatgatgactgaattcttctcttaaaaacagtatgggagtaccgaaacttattgctgtataatggcgttttatctgctataacttacaagatattatcttttgtaattaggcgatgttaacagtatcagtatagggtctgggaccaatatacaagacaatgcccttgttcatgttgcaaaatctaatttgagtggaaaggtgttgccaactatcatcggagataacgttacagtaggtgagttgtgccgtgtttaacatgatatcagataacagtcctttttctcaacttcattttgtgattttgtttgatgacttcaaatgtgaacataacaggtcacagtgctgttttacatgggtgtactgtggaggatgaggcttttgttggtatgggtgcaaccttacttgatggaactcttgttgagaaacatgccatggttgctgctggagcccttgtaagacagaatacaaaaattccttacggagaggtcaatactacacccttattgattcgctgaaattctgatggcttgatatctagtttgttttacctgagtgctttgttagaatgcattttttggcatatcaagattcaatgagcttgcatttatgagtaactgcaacatttgtccttaatacaaattttggattcaacttgggtttcaaatttattgattgttgattatatttttatacaggtatggggaggtaaccctgcaaagtttttgaggaagctaaccgaagaagagatagccttcatctcccagtcagctgtaaattataccaacttggcacaggttcatgcagctgaaaatgcaaagggctttgaggagatagagtttgagaaggtgctccgtaagaagtttgcacgccgcgatgaggactatgattcaatgcttggcgttgttcgtgaaacccctcccgagcttatccttcccgataatgttcttcccgataaagtagccaaagctccttaaacgtgtgtgttcatattgccctatttgatacctacctcttttcagttggtatccatgggtgttttgttatgcccagatgtatggagaacatctacctttttattagtttccaataattttcggggtggaatgaagtgtcacggtcaatcgtggtgtgtgcatttctggcttaaggctcttcaatcgccctgtctgattgatcggaaacttcaatttttttccttttgcttgttgagaagaaaacagaaaaagaaaattaaaaaaactgcagtagcggaacacattgagatgatttaaatcatctgggactgtctgattggttcgtagactagatcacaattgctttgcatctaataaaaagttatcaaatcaggtaactggatcttgctattgccttttaggcatcctttgattaattccagttgtatgatgatgatgatgatgatgatgatgcaggaggttatctcttgatttatttattgtttagttagatttatgtcctttcaatcagttcttttgttcccagatatgcacgtttgctgtttgtgtttgtctccttttttagggtcaaaataaattaagcaaatatgtcaattgagacatgcacaaaagaggtcatacaaactagatagtaagataccaaaacaattccaatctcttcatcatttttgttttttgaataggatcggttaaactagatttaagtttcaaaattattttgacggcttaaaacaaggttttgagatgctaaaagcacatgtgaaaatccaactaaccaagtttatacttttgtactattccataatttgttatagtatagaaatgggcttaactaactatataaataaaccctcttagagttcattagtaattagggtcatcacttttttgagagatttataattctatttttaacgagcattatgtgttcgatttgtaattgactatgtaattttatttatatcaaatgaccaatgctcatcgaataaaaattgaaagtacaatgtttaaacgaattatcttgattctcttttagatgatatttttagttttattgttcaatttttttgagacgttcctaattcatgtatgtcggttgtctgataaggtcactcataaattagttgtatacacacttagagtggatgg

SEQ ID NO: 18603 - DNA, 2778 bp, Cannabis sativa
ctgtatacttgtttgtcgtaacatctcctttgttgtcgttttgtgccactaaatgtagcatgtattttgtcactcattgagtggtaattatttttatagtgggacgttttgatttataaataaacttaacattagtgaatgtatacttattatggtcctttatgtttcattttaaaagcaacaataaattaggctatgcttgttttaatgtttggacaaaaagctcatttaaaatcatttgactggccggtcacattttatcattatatttttaagcttctttcttttttttatcttaaaaatgtattttgtaagcttctttcgagatattgaaaaggtggaaatgaattttatttatctaaaattgacaaaaagcggtaaatttaatctatattacctcaatgtgtattttcatgatgtggaagtgctaaaattagttaatctggatttaatctttttttggatataagattgtcacattttgataaattgtcattttgttgagaaatatgcatttgtgattgtttttttggacatttgataattgatactgttatccgaaagggaccccggacttcaaatataatacattatatgataatgtaagtgaccctaccattcacgttgcatctcttatgttgctgtaaatagttttgtgtcagttagatacacttcaaagttcaaaccctacataatagtacatatgcctccatggtttcgtaattgctatgattcagtttttacttttaatccccacttttttttttattaccaaataaactaatatttggactttaggccttacaaaacatgattaattgctttctcaaaaagagaataaaaaaaaaagactagttgaataatgaagagttcccaaccaaaagaaagaccaaagtatttatgaaagaaaaaaaaaaacttgttgggaatatgttataggaggtcactcaagtgccacattatttctttttctatcaacaggtgttactcttttcaattttttcatataatatattattataaatataaatgatgtttctagaactaaacatagtattttgtgtgccacaaaaagaatctatatctatattccaattcaaagtgtttttttttggcttttttttttgaagaatatgttttgcaagttttaattttgcataaaattgcattttgtttagaaattcttcttttttttttttcgttcttagcaaccatgcttttgaaatttataagtagtagatgtccttgttgttttctgaaacaaaattcgtagtttttaagtgatttgttttttaaaatttgtttatacatttaatgtgtacaaatattttaaggtgtataattgtttaaaaaatatcaaaatcattccttgaaagaaaaacaaacataatttttctaagtattaattaaaggacataataaatagccattttttcagtgactcaatttctcaacaataaaaattcaagggatattatgctaaaataatatattatgtggctttaaattaattagacaaattatagattttttttttttttttaaaaaaaaaatacttaaccaagataatatggctactatgtattgagaggtactttcacttagtgagtggtagattaatactttaatttataatagacaaaatttcaatatatctttttttgtcagttgctcatatgcttgatgaaaattatagaattacatatgtcataatacatgaaaatattcttatttagtgagctcagtttatatttgagtaaaaaaataaaatttattttatatttaagtgccgtttaattatattttaattttttaatcacaaaagtaaaattttgtttttagaaaatgaaaatacgttctaaaactatttttatttttcaattttaaaaacagaaaacaaaaatgtattctgtaaaatttattttatatttattttttgattttctttaagtcgggtctagttccaggatcgagttcgggtccaatgtcagggccgagtttgggtccggtctaggtctagtcggagtttaaaatattaattaagaaaaaaaaaatatttaaaaaaatattagaagtgacttttttttttgttttcaaaattttgatcaattaaaaaattaaaaagtgaaaatcgttttataaaaaataattttaaaagatatttttaatttttaattttaaaaataaaaaactaagtaaaaaaatattacaaaacgctacaataaattatacatccaaataaatcatgaacaaatattatcattttacaacgtatgatcaataaaggtacaaaattataataatatttatatgacatgcataagacaaaatccaagaaaaaataattgtcacttaaactaaaaacaactcacgagttgaagtgtattagtaaaactttaaaaaatgaagagtaaaattttgaaaaaacgtacacatatactgtaattagtttagaatttaaaaagtaattttaatttttacatttttttttgtatggattaacatttttcttttgaagcaataaattgtcaacattaaacccgtgagatttatctactcaccgaaaaaaaattgcgtttaaactttataaatactacaaaaatatcttcaaaaacacatacatataactcttcattaaacattaacacataactttaatttctaaatattaaaaatcattaaaatagaaaaaataaagaaagatttaaaaaaagaatatttttgaatctttttttttttcaaacaaacaaatttaaaaagaggtctctagaatatttt

SEQ ID NO: 18604 - DNA, 3499 bp, Cannabis sativa
aatttacattttaaagtgaggaaattatattatatacctactttacatgttttaattcttaccttcatttctatattttttaaaatatacccacttttataaataatgtacttcattatacccttagattaatgcaaattatgtgttagacttaaatagagggtgaatgtgtattaatcaacccactcataaaactagatatattttaataaaatatattttgaatgtatctttaattaatagataaaaaagaaatatttctcaatttatcctaatgtgatccatcaatttataaactatttatatatataaaaaattattgggtagttaatcatgctcttagattttcagtattttcggtacataaataattgtaattttatttttcaaataaaagtgtataatatagttataaaagaacttttacaaattttaaaaaaaaaatctaaatattatataacatgtcaaaattaacattcaaacaactaattaaaacaaacttatttttacatttatatatactataaaaaggatagtaactagaattgtacattcggttcaagtttttcggcacgacacaaaatcagcatgagtttaggaagtacgagcatgacacgatacaacaaaaattgtagcttaaattcagaattacaacattattttcaaggtttgattttggtggtactccttagaacctttgtatggttctagcattagtggctccacaagctaggtctttcttgaggtattcgaacataaggctccaatcccacccctaatgtaagagtaaactcatttgatgttcgcggatgacacaattctattcacccgtgctaatgtgaacatggcatccaaaatattggaatgtgttcataagtacgagagttggtctggacaacaatgtagcttggtgaaatccagtgttctcttctctaagaatgtggcaaatcctctaaaggcaaatatactgaatgtgctaaaggtaagggagtgtgatggtaatgaaaagcactggggaatccttttgtattcaaaaggaaaataagagacaaatatatgtatttgagagaaaagatgatgaaaaggattgaaggttggaaaacgaagcttctattgtatgcggggcgcaccacattggttaaattggtagcactctcgattccattgtatgcgatgtctataaacaagctgccactctctagctgtcgtgatattgacaagataataaggagattttggtggacgggggatacggagaaggagcgtttcatggccctggtggggtgggatcagctgtgttctcccattatccaaggaggtttgggatttagaaagatggaggacatgaataaggtactacttgccaattggcatggcagatggcctcaaatttgaataggccgtgggtcaaatgtctctcggagaaacattgcaagaaggcctcaatttggagtacacaagccagagaaaacaattcagccttttggaaaggaattctcagctttagagatgttatttgcaggggaggcatgaccctagttggtagaggggacacggtagatatttgaagcagccatggattccatggctcaactactgtgatttcctaaacctcatggatcaagtaaggccgagatttcctaaccttaagtccgtgccaaatatctctcttgataatgggtgctggaatgtgaggcttcttaaggaaatgtttggcgatacgttgggtgaaagaattggtagaattggtcgattacctggtgagaacatggatgtgttagtgtggaaagagtcgactgatgggatgttcacagtgaagagaggctatgaggcgtcccaagcacttgggccgagtttagagagtaaattgtggaagaaagtttggacccaagattgcatttcaggcactcgattatgttatggagagtgatttcggactgcctaccaactagagagaggttagtttttatatgggataagacttgttctatgtgtagggaagaaactgaatccgctactcagattttctgggattgtcattgtgcgcgggcgctttggtttagcagtctcttctccacccggggaggggttggtaatgggtgttcgatcaaggaaagattagtgtggctgttggaaaaaatcccgagtgagcattttgctagcttcctatcctttgtgggctgcttgtttgaaggtatttggaaagctagaaatgaactcttgttcaaaggggggtggttgatatccaacagataagagactccattatgagaagatacttggaatccctaagagcaatggaggaggatgcggatataggtgcaattgcacctactggtgttactagaaagacggtctgcaacactgctgaagttttcagtgtttcggatgcgtcttggaaggaggataaggcatgtcttgcggtgggtttgttggataggcaaaacaacaaaacggagtggttcgcaaagtaggttccgatttcttctgcggctgaggcagagctgctggcaattcaatgggctatgcagctagctagacagaaaggattcaaaaggtacgctagtgcttcggatgcaaaagtactaattgatgcattgaagaaacaaatttgccccccatttcggcagttgaaacctctggctttggaggtattgagtttgtgtaagttgtttgatgcttgtaacttcttttttatttctcgtcgagacaattcagcttgtgatgcgttagcaaaatgggctagacaaaatagccagtgtaatggctacattttcagggagggatcccctattgtgattcccaacttttctttgcaatgaacttctcttagttctttcccaaaaaaaaaatgtaggagtatttatagaagggacatccattttgggtgcttgtcaagttaattccctatttagtctgtttgatttagccaggcgaactctcaattgtcgattctctaactagactaaggatatacgtaacgagttggatcataaacatcctaaaacgtcttgcggtaatatttctgtggggtttgtgatatgattttttgaatttgacgagttgataggtttcccaaggagactttatgaactttttcaacgattggtttacaaaagatttataatcgttgctcttactgaaaattccaaactaacttataataaattacttgaattgagattatgaggatttattacctgaattgagattataaggagttataatatgtactttaaggagataaaatatatacatatttaataatattaataatttgtacttagttcaatattattttcgtatatttcttggatttgattcagttatctcaatggataaatattacgactatgatttttattagatgaggtcacttatcaaaatttgtgttatgtttatttactatataactattttgaacgtgtaaagtccttttttgtcaagttagttgacaaaataatttttccttttatggtaagattgttgtgcattcata

SEQ ID NO: 18605 - DNA, 2472 bp, Cannabis sativa
gagacaattatttgttatatctaagtttaatgccaaaaaaccaaaaataaatatatatgtaggcataagggctattagtattacccgcctctgcgctgtctctggtctctgcaactgccttacctctttcgttccctcctttctccttatcttcaaacagaattatcaattatgagggaagaaaaggccatactttcatggcgtcctattccagacctaacggaataccacaaccacccttgcctcgccactctcaccttcactctcaatggcgctaccaataggactgctcttggtcccaaactccgtaatttcgcctctctttcgatttctgagaagaacgacggtgaacggaaggagttcgtaccgacaccggctcagctccttaaacatcctttgtctattctcgctttggtccccaaagacgccgcgcttttcgccgctggagctgtcgctggtgctgctgctaaaaccgtcactgctccgcttgatcgtatcaagattctaatgcaggtttatattttattattttcaaattattggtttgattattctgtgtatagccttaatttcttttggaattctggttctggttattttccttttggtttctgagaaaatgtggatagaatttggtttcttatgagaattgaaattggaaatgaaatgattgtatgtctcttaagggaaaaaaactgcaattttatgattctgaattattttaccagattaggttatatcctgggtaacctttggttgtgctctgtttttaatttctcttattcatgttattgagaagatctaattaggtatctttctgatgttgtccaagattacacgaagacataatatttgttcttttgttcgtaaatttaaatattattttcataaaggtggacaagtgacattaaagttttttgctatttaattatttcctatttgaattattaaaagtatttggattaggtttgattccatatctcaattatcttgtattctgtttagtgccatttttctagtataaagtcaatatattcccgaatgctttttctaattaaagaaaatacacatgaaaatgacatttttatgtttattttggatttctctaatagtaactgtttctgatatcaagtttaaatctataaacttgggtttttacaatcggaaaggcttgtcatattattgcccactaaaaggaaagtgttaaatttgttgaagcacagcatgttaaaaacactcttggcttgccattgtattttgtattatataagcataataatggcatagtactccagaactgcttgtagcataatattcttacacttactcttttataccaaccaaatgttgactgttgactgtttgttggtcattaatcttcttaacgagtgatgataattcataagaagggcaacttccatagataatttgttactatcaagtcagtagttgcatgtctgcacgctctttaaaatatagatattctgcaaaatgtccttataaatcacaatatgtttcacaagaagaaaaaaatgtatctgctattttgtcaaagagattcatccatttttatctgttcttttgctaagattgacttggttttgccagtattattgaggaagttagttgattttgggtataatgctgataattgatagtaagtcgctgttgtttgcagactcatggtgttcgagttggacaagaaagtgctaagaaggcaattggcttcattgaggtatgttatggattcaccgttcctttaatctcttttgtctgtttttgtgcttcactctatataatcactgcttatttctcaaataactgtgcatatcgtccaggccataacaatgatcgggaaggaagagggactaaaggggtactggaaaggcaatctccctcaggttagtgaaacatgaattccgttgacatttcaaaaatttattttccttaatattgataagagttttttgtgctacatccactttcttatatatgtatttaattgtttaggtcataagggtcataccttatagcgccgtgcaactctttgcctatgaaacctacaaggtaactatcaatcacattcagaaaaatcttgttttaacactacatgcatttggaactaaatgacctaaacttttgagactgcagaaattgtttaggggaaaggatggagagctttctctcattggaagacttgctgccggtgcttgtgcaggcatgacatcaacttttgtgagtagtataattaggattcatactgttttatgcactggctatattcttttgtttgtgtgtctatatatataaatatatatatatataaataaatatatctttggatacttctcacttcgtatccattttttatctttgaatccatttctgcagatgacatatccgctagatgtcctgaggttacgcttagcagttgaaccaggttatcgaacaatgtctgaggtatgatttttg

SEQ ID NO: 18606 - DNA, 8526 bp, Cannabis sativa
ggggggggggggggtgtaatatatccagctatgtacaatgcccctttatcattttatcttattgtctatttaaatattgagttcctttgcaaaaatgtatggaatcctaggagtagaaaacttttcctgaaatctttaacatttttggctattttttttaccatgtacgaaataagtttttaaaatcatatggaaaaagtgggagtaggaagctttacctaaaaccttttacgttttcaactgctttgttaccacattttgaaaaatataaatttattgtgcaacaagttagctttcttaattaaactacagaaaagaaaatattacctaaatttcaatgcgctttcacccatgtttcttactagaaaatatcgcctgattctattgtaattttagccttttttcttattagtttgagttaacaaatctttttgtatgtatgaattgacattatgttttaagtgcaaaaaataaagttatgtctggaacatgagagcttagccttccaggagaaagccactttattactgcatgcaaatataatactctattcaaatagttaatttatagtaccaaaatggagttaggccccatggaccgttaatgatctgataatgaacttaaaatccttctacaatacttaaaaattatctggctaaagttcattcgtgccatgaaaataccctaagtcatctaaagtgttgatgttcagaagtggaacttccttctttacacttccaaagctcaaggcaatggagtatactactggtctgggaccaatgctgcgtccccttctgctaccttagtctacctccttgctcggatgaaggtggaccttctctaaactatcacgacttccctgtcatgacacctcttgaggtattggtgggcttcctccaccttcttcataaccttagcattaaattctttggggcataagggcgatttaaagttaagggatgggatcgatggaatggtagtaggcacctacttttgcggctgttgttgtttgttatcttgttgtggaggttgttgaagttcctttagtagtggttgttgagtttgttgctgttgtggctggtgagtttggattggttacgtcagatgttgtttttgttgttgttatgatagttgtgctaggatagtttgttggataacctgttgttgttgtagtggttgtgattgggatggtttctacttggtctgccattggcttgggatcttgcgtggcttgtcttaggtctccttctcccctaggagactactgcctcagcactgccacccttgcctttttggcctgtttcccgaagccaataggaggatgggggcacttggcatgagaaactacttgttagtttttatggtccatatcagagttaaaaaagtggaagcagatttgataaaaatagtttttatctaatatgaaatataattctaaggatctcaatataatatatataggttaaatctagactaacgaaagaaaaactgttatcctaatttttttcccacatgatgtggcatgttcacgtaggcaagatcaaggccatgtggaatacaacgtatcaataggtgagcaaagtcaccatgcacaacacatcaattaacaagagatccaaatactcaggcaagaacaagttacgagaaaatatccaaccaggaaggtctgatcggaccacaccctagtcggccaaggaagtctatgtgccagccaacccttatgaaaaggttaggctggccagcacaagcaatgtgcatcaaaaggggattcaattgaaaggtggggtccacatccatctttctgaacgggtcacaacttggttttagttactagacaacccacgaaagaagggattaaaccccaaattatctacctatcttttagggatgttacctagttatttttgtaacttaaatatatgataaaagagtagttttccctatttttaagggatgtttacttacttaaaggttgatcatttatgaatattctatattgttccaagtaaaaccacacataggtaggggtgtttatctaatctaatttgtattattttattgatagtgcattttatccgcattaagtgggaatttcacattttgaattctattcaatctgcataataagtaaattattgttactttttggattgaattggttactttttaaaatttattaaaaaatatttttttaatataactaacaacaaaattgcatgtataaataaatatttaattttgttttagattataattttcttatattaagagtgaaatatttattaacttttgagatatatttgtattatatgtgttaaatttttattttttacattaaaatattaattgtatgtataattttttaaaatatatattaattggattgaatcagttacttttacatattaatcaacattcagtcaatctgtacaagtacttatatttgtactttgtgaattaattagatcagatcataagaatttggattggattgagtatatttttataaacacccctaacatcgtgtacttagacaatgtcacaaccacttggtatcaactttgtgaaaatttgtactaaaataatggccctcacgttttgaagtaaaactactgcaagctctcagccagggtagtaataatgtcacctgtttatttattttttaataattattatagcaatgccacattagtgtccatgcatgttatagtcttctattgactatattggatataaaatttaacaaaaaatgttactttttaataatgttaataattccagggattatcatattgatttattttttaatggtactaattttgagatttttttttttttgcataccaatttgaacttcaactttcaaataactataaattaatgagtgattctccagccaaaaatgtcaccgtgggcatgcatcatcgtgtactatatatatggtgtttgatctacaattttcaaagctatttgataaacttgatacatgttgtggcggtcgtctacatccatgcatggttaattaatttgggggttgtgctcattgaatctaagccagttttatgtcaaactttgatcattttctagtcagaataagatattctttagggccaaaatttcattttgattggcttcttgctaagtctggcattatgatgatggatgacctgaggtcttgaaacacgccaaacataattaaatattattaattagacacgatttccatgttgaattcttctccaaatgaatagtacccaaatagttttttagctagcttttcacaatattttcaaagatgatgtgtgaatacactatatatatgtgtgtgtatttatgtatgaaagatgataacagtataagtagtaagaaatgaaattattctcttgtttgaagcttggttatgtgttactcatggtccacctcgtattagccaatacaggtgtgtactatacatataaaacatgactagggtttacaatttggtgaaatatatattgtttaaatttagttaaatgcctaattttttcttatatcctatatacattaaaggaaaaaattaatgcattaattagtactgattcttacagagacacaaagtaatacaactataatttgcagatcatgtcattactcggaaatttgtaagggcaccaaatccaccccctcctccagaaatgagagaacatcaaattaacataattttttttttattattttaaaattttgaacaaaattcgagcagcataatatttacattttaacatatccaaaaatattaaaacctgctctaaacactccaaaacttttttaaatacatcataaatttataatatttttacatatacaaaaataacatatttccagattatatcaaattatttattaacatttagaaaagaaaaaaaattacgtaatctattttttttatttcaaaactataatcaagctgtttttcaaaaaattacacaattttttttttttttttataaaatagattaatatattataaaaattatatgtttacaaataaaaaaaagatgaacatatactgaacaagtataagaaaaaaagaataacaatagcgaagggtaatgttatttattatcctcattttattctctttattatttatatatattttgatttatatttatatatatatatgtatttatatttatatatagttttatattttttttttatttttttgttaaaattatgtatttaaaaatctaacataattttaacataattttaacaaaaaaataaaaaaaaaatatataaaactatatatatataaatataaatcaaaatatatataaataataaagagaataaaatgaggataatatataacattaccctaagatagcgatagtgaggtggtccggtgaagtttcaggcggcggtggaggtggcagcagcgtggtggtctgacaatggagagacattgctggtctagcgatggattcggcctcaaattgaagatgaaggaaaaaaatcagaaaaaaaaatgaagatgatgagggacgtgagagagtgataaaaaatgaaatggtgaaattgagtggggggatttggtttgaaatggtgaaatcgggtggggggttggtttgaaatggaaaaaaataaattaatggggtatcagaaaaggggttggggttattaattgaatcgagatttggggttgttttttaatggtgacatacattgattatattgtcgtcagtggtggtcttgcacgccattagtgtcagtccaccactgacgacaatatcgtcagtggtattttaggagggacaattcctaccttgacaatgttgccattaatatttttttcaatgcattgtcgctattaatgtcttttgtcgttattgattaaaaattttacaaaaaaaatccaccaacgacactgaaatgtcgttagtgatattatactcacttttaatgaggactttttgccataatttgtaatagtggtgttagtaataccatttattcttgtagtgtttggacgaaaaaaaaaataatatttttcatggtggaaatagaattgatggtgcccatatctatagttatgctatgaattacatggaaaattttcgctcagtttctaaccgcaaaacaacaagaacattctgtgattatttatactcttgtgcgcatacaacaaaaactgccactagtaatataacaaaggaaacgtcttggaaacctccaaatagcacatggcttaaacttaatatagatgctaccatgaactctgcatcaaaaatattgggtattggtgcgatcgttcgagatcataatggctatgtgatcgctagaacatggttgtttttgctttgatgaaatgaaagctaaagcctttttttatagccttaaaagggtgttgcagatgcaattgcagattacacaaattgaaatagatgcatagcgagtctctgatactttgaactctacatcaaaagatttatcttatttctcgaatttaatccttggtatttgttatttttattattttttttttctgaagttgttgtttctcatgtaaggaagaacactaaccaagttgcacatggttttagcaaaacatgctttggagttggatcaagacttttgttgaatgtgaataattccttctcttatttttactattgttgtaaataacactactacaaaaatagcattcccgtcggtttctataaccgttgcctatacaaccgtcataaaattggccgaataggcggttaaaaaccgtcgctaatgtggacttcccgacaatttaaaattgtcgcttataacagggtattttaaaccgtcgagaatgtaaaaaaaatataaatttttctaccattgtattttcctccattttttttcttgcattagttttataattttacctaaattaaaataaaacaactaattaattttattacgataacaactaactttaaaacacattaaatttatacaataaaaaaattaatatatataataaataaaaaagtatataaataaataaatatatttagaccgagctcaaagagagagaaagagagagagagagggagacggatgggaggtggtggtggtccgacgtatgagatggagatgagaaggacaccgacgggaggtggtggtggtccgacatatgcgacagagaggagagggagactgacgtgaggagggtgggtggagatcgatggacgagagagacgagaagaaagggagatcgagagagggaagaagacgatgagagaggaggtttggtacggaggcgtgggtggggttttggagagttaagattttcattttagggtatgggaaatagagaagaaataagtaagaagaaatagacaagcatgtgagaaatagaaaagaagtacgtgggcacgtggaaattgtggcgagaagtaggtgatagttttttacccgacgattagttaggcgatggtaaaaacggtcgcctattcctgtaattactgttgtaatctgttgggatcatactaatttttcttgacaattttaaacaattaatttttttagcgacggtccccccaaaaaagtatttttaggaccgttgcaaatgctgacttttctagtaatgtaatgacggttgatttataataatagtaaatgctttttcaaaaaaaaaaaaaaaaagtcctaaatatgaaattaacgtgtagactttccctttactcatattttctctacttcaccttttaccaatttaaacaaagtcgcaaagatttactattacttttttttttttttttctaatttaggagaagactttttttttgtagagaattactaaaaaacattattagtgtctacaccttaattggtgttatactattattggtatacgtaattaagtatcgagtctcatataacttaagaaaataacttttaagaaatatagctaaccaatcgtggcgcgccacttatggaaaatgttgggcactactaatgccaatacttaaaggagaagactttgatttgtttttatatttatttgaaaaaaccacattgccgtcgtgtttaatacttttcttgacagacatattccgtgtttcataatatattaatgaaattgatgaggtttcacaagaatttccaaagttgaccatctgaaccatacatggatacgttgtcttgcctttatatatatatatatatatatatatatatataatataagaggaagtatagagagagagagagtgattacaacttaattatatgcacgaaacaataagtagtagaaaagaaaatgaaattctgttcaatccttattattattacttatatgttactctttctcctccttctattcgtatcatcgcccagtatctacgtggcacaaaaatgtttcagccgtagtacaggtgcgtaagtaatttataagtagcactataaatttggtgcaatattttttatatatggcaattatatagcattatatataattatattttttttttttttttttttgagaaaatataattatattataattagatacttaattttttttttttaatattttaaactttattttaaatagcgtaaattattaaaagtttctaaaaacaggtgacatgtttataactataataataaaattatattaaaaaaaaaaacaaaataagataatttttcttggtaccaaataaaaaaagcccctagtaagtgtaaaagtggatcccaccaattataattaaacattttcttcttctcttgaaataaaagtaggaaaaatatgactatactatatacatatatgcaccatatgcatgcatgatcatcactgtaaagcaaatttattcagctttcagaatatttgaatagtttatttgattttactttgcagatgatcataataatcatggtctgattaccagaaaattgggaagactatcgactggccctgcgcctccctctccaacgaaagcacctccccgtaataacattaacgtgccgcctgcccaaccttgactctgttaagctactaagttcaattttaaatattaataaataaaaatatttattagaaagagttaaattcctagtataatattttgtatgttgtaaatatcatatatatatataattacaaatatatgatataattacctaaaatatatatattattaatattttttgattttttttttccagagcagtcactcacccatgctcctgggcgctagtcacaaaataaaactcatgaaacaacttatatataaatatattaaaaataatattggattgtactttgtttttttaccctgtgaaaaatagaaaattgaagagttacggcttctaaatcagtttttaattacatcattttagagtttgacaccaaaaattaaacaagagacctgtttcatatgcaaaattaaaagacctttcaattgtagtaattgaacctattcataatatcattttgtgtaatgtagtaattgacacctaaacaaggctatgttgtaactaatagattagttaagcatgtta

SEQ ID NO: 18607 - DNA, 3816 bp, Cannabis sativa
  modified_base (3307)..(3310): a, c, t, g, unknown or other
agatgtcatttttcttgctacgtgtcaaacattgatattcacatcatcaggctactcttggtgtaaacagtttagaatacagccgaaagaataacaatccttcctaacatacttgtaactaactttaactaaccctatggacaatactaacaactctaatacaaatttctattttgtcattttcttttttattgttttaaaatgtacaaatttgcaagaattttgttcaaaaacatgttttatacggtaacacagtataaggtaactaattaccttatcttacttgtttttgtcatattttttatttttatttattttttcataaaaaatcatattttttcaaaaattgtataaatactcataaagtttgtaattttttattttctttggggtggtcgagtgggccctttcgtattaatttcttaattaatatatatgaatatactacaccctttttttagagtgtccaagtacttagtattttttttctttagataatcgtatatgtttgtagctattgatgaatacttgtaacttttaaaacattatgttgaatcatagtttacgcataattattcttattttttttaaaaaaaatacaataatccttaactataacatacattataatgaaaaacaaattaaactaaacaacttttttagatgccaaaaataatgaaaaatgtaaagtataagatgtactataaatttactccaataaaattaaacaatcacgtgacacatgtgagtaagtggaggcttacaaattaaaagctggggagctgtaagcctccaaccacttaagatatatcaccttactcgggctgcatgcccaattctacaggaacagaagatatttttgtatataaaaaactacaattaaaaaaaataaataaaatcaacaaagttgaggctaattaatctgctctatgatacttttcttcctgttcattaatacttgatcaggagtttatttattttaaacaattatttgatatttgatagtacactcttaaattagaaatattaactctctataaaattcttgcacgtactcattgtgtggcaaccgaattatattcagttttagttttctcttcgtcactctatttactgcttttgcttttttattagagtactcaaaaaaatgttgatgagattgtaattctataatataaaagtacacacggaaaaaaggaaaatactgtcataaaatataattatgaaacaaacacagatcgtagtagcaaaagaataatatatatatttaagttaatgagtggtgtttttacgaagatactaaacacggatacaaggtagtaataaattgtcacaacaactgatcacaaagtaatttttttaataataaggtaattaactctgctatatatgttctgttttttctttcgaggtaatgaatatataatttacctcaccaattttccatcacaacattttgaagcttatgtgtaggaagagtaggaagcttgacaaaattttcattcctaacatcacaagaactcttgcaagaaaaatacataaacatagttttccttactttggaggctttcttgttattaccctttttctgaggtttggtgcactctttgtaagccaaaagaaatggatcctcttgccactttagtcccttggcagagttactcctgcttggaggctgagatggtgttgggcatggaggcagaggaatctttagctttaccagatcattgttagtattggagattgatggtgatggtgatggtgaagatgttaagtctagggcttgtactcgagggttttgttgagccacttttgagatacctggcttgtcctcccatgagaagggtatgcttccttgtgaataaacctttctgtgactcatgatatctttgctacacttagttgtgaaagtggtgtgtgtttattgatctttaataataattataataataaagctctttttatttcatgtgattttcactctctaacagaagagagacctaaagtctaaagagcaagcaagcaaaacgtgaaaaggaagattttggtttatattatcaacaaaatagattgatcatagaggagaagaaattttattaaaggccggtgaacaagagtattataatctttggataatttatttaaggcccttagtaatttggcaaatggatagtacttgtgtgtataatgtatatatatgtagtttgaaaatgattttagagccggctactagtgcaaattgacctattcaatggctgcattattgagtaggtacaatgacttgtttcatattgtatagctcaaaatgattcaagagatttttcttttatttcatgatagctacttcaaaaaatagtcatttatataataagttagaataggaaattcttacattttattttctttacaaaataatatactaatcagttttgtctgctatagacttttcttttcttttcttttctttttttgaaaaaaaaaatatttccatatatacacatgacatacatacatatataaataatattaattagaagttgtgcttatattcttttactttggatttttatgtgattgtcaaactatcatccttaaataatgtcacgatttgtttatatgcatatatatacatattagcatcaaatatttaatttataattgggagataagtttatgatgatcggcacatatagtcaaaaaaacgtgtttgatgggctaattttgaagaatacaagttcttgtttatgattagtatatatatagaaggaagaatactcatactaatattatatatgtatgtatgtatatagatatatatatatatattgtcaagtatcatattttaatttgaaatcatatttcttgtggaaaaattgaaatcaaatcatcatataattattgaccattcaaagtatcatgtacttaacaagcatatatatatcttaatcaaatccttaattctgttatactttctttaattttccccttcttaaaataatattatatgtataccgtaacgctatataatagctagatatataataattataaaaggactttacatgcaaataattcaaggaccatcaggtcggagggcttgactagaaccctttacctaaaagaaaaggcaacacaacaattgcataaaaatattgatcgtgataattaatggttaaagtgacaacaacttatacatatatatatatatatatattgaaaatatatttaatgtatattttttgtggagttaagtgcaagaaagcttgctgataaaacctacaattgatataaatatatatatatatannnntatatatatataaaaatatttacatcaatttatagattttcatatgggtcaaatataaatgattgatctacacataatttattaatattcgtttttggggttgagatgttagacgagaaaatgaagtgattagcaatattaccaaacatcaacaacactacaactacaaattcaaaaatattcctatttttctttataataattattatattgtatgtattcaaggaaaagttaaatttggaaatgcccgaaatgagcatataaaagtgtaatgttttagtaggtgtaacattcttaacttatgtgtgaagttaactaaacgtgtgtcttgtgatagtgctaacttcatttaaacaaaaatcttcctactacatttacacatacaaatctcttccaatttaaaatatttaagctatatatgtttggaagttggaattaatatggcggggaaagaaaatagtaagtaggggaaaaacgtgaggaataggaaaaaaaaatattttttc

SEQ ID NO: 18608 - DNA, 6785 bp, Cannabis sativa
taaatatttatattactttttatgcatttcaagaaacataaactaagattcaaatacatatttaaataatgttacctgtccaaatgtgtagggaaaagctgagtacattcctgcagctctttctctgtaaaagactgttctttcaatggaaactactggctgtacagatgcagcattttgcatccctatgaagaacactgcactatacattgatcccattgaattaatgatatcttgttgtcttgtcctgcaattttttatttgatacaaaagaaaacagaaagagttcagttaagaagacattatttatcaatttatcactactaatttctttgaacactaattatgacttaccttttagatcctaagtcccagaatattgttccaaacatcaaggctatgaaagtggtaaacataaatctcacagcagtataaggcgggtttcgccagtaagaccgacgttgtttccataagcaagcaatgcattgagtgaaagatgagcgagagtattgagtagcgaagtgaagatcctttgaaccaggagcagggatgctcaactctttaataagctgtttgttactcctgatttgtgaaaaaaaaattgtttagtatctttaataactctttagtattttattttatcttccccaacatagtaaaataaacggtctttcataaaactaactaacctatatagttccgagctcttgtaaattttgttgaaatcaactcccaaagcaagttcttgggcggaactcgaaacctctaacatccaagttgcaggattataaccatctttgactttgctgacaccttcaattgccttgataaacaccaaatttgtttaaaaaattagctagaatggaaaagagccattgaagtttattaaaacaagtttctagttatactcatacctcaaaatagctgataagatggcaagaatgtcgacctaatggccccacatatatttcttctcctcctcttttcataaggaatagctacaagtacaacacacatatgtttcaattagttatgcaaataaataaataataataagatccaataagaaatctgacagtaatggtagaatccttgatctctgagtcttacctcatcaaaggcttcaaagatatcaatacttggttgatgaattgtgcacacaactgttctgccagtatccactgtgttcctaactgttctcataacaatagcagcagccctggcatctagccctgaagttggttcatccatgaatattatagaagggtttgccactaactcaactgcaatagttagtctttttctttgctcagttgagagaccattcaccccaggcaatccaacaagtgcttgtctaagtggagcgagttcaacaagctccatcacttcctcaatgaacatctatttaatgacataataacatattaagatcattaaaatatgttagcttgttcttctttgttgtttttttttttgtttaattggcttgctttatttaaaaaactaacctctctctttttagaatcaacttcagctggtaaacgaagccatgctgagtaaagcaatgactcataaattgtaacatgaggtgaatggatgtcattttgctcacaatatccagaaattcgggcaaatgtttcttgcttcttagggtaaccagagattctaacatcaccctcaatgtatccaccagtttttctaccagcaagcacatccatcaaagtggtcttaccagctccactaactcccatcagtgctgtcaacacaccaggcctaaaactaccactaacaccttttagtagaacaagtttatcttcacccacaccttgagtcttcatttcctgcaagttcaagttcaaaattttaaacctttattctttgtgatcaatgatcatgctccttttgagactactaagattattatttctttattccttacctgtggcatatccactgagtaaataacatcgtcaaaagaaatggaatgtggctcaaatggcagaatcattcctttctttgcaatttgattttcaccaatgttcggactattatttgatcgttgctgcatttcagtggccctgttatcatcttggatatcgttttcaggatcttcagatttgacagattgtgctttctcaaaagctgcatgataaatatatggaattagttcaattcttattgagaattccattagtgtatcctaaatgattactcacggttaaggtaagtgagagccactgtgtataaaatgtttagtataataatgaatcctgtcattgctcccaaaccaagccagtaccaatatcctctagtaaagaaccctcttgattccaagacttgaattccaagaggttttgttgagtttggtccggtctattaagaataaacaaatcaaatgaatgattaacaaggaacaaatccaaaactttcaaaccaataagttgcaagaaacttacatgtctccagttttctccaagaaactcgttaacaagaacagcagtttgaccatacattagaggtgacgtccagtaaccccaaatccaccagccctttatgtcatctgtttgcataataagaagatttaaacatatatgtaattaagaaaacaaatggttgaattttaaaatttgagtctgacatacctttagagagaacgaaaccacccaaagttataagcataacaagcacaaatgtaccaaatgtgttggctacgatcatgttcctaccagtagctgcagtagctcggaataatgctgaggacatctgattagcaaatatcagagccacatattgccgaaacaatctgaagtcatgcacaaaaaaaaaaaacaactgttgagaaaaacatttaagcataaaacctattaattcaaaagtgtagtctcagtgttttcttatctaccttccaacatttggatctagtcccattgaatagtatgtaatggccacccatactgctacttctaccaaagttattgggatcttgagaatccaagatggaagagcatatgcccaagctggatagaactgcaggtccctttgcttgtaaaacactggaagcttagcaatggtcattggaatctctgacattccattgaacataatcattattacagtgaagaacaaagcaccaaggtaaattccaccatcatctacagtattacgtttcatctcagttctcaagaaaagtgttgtagcaatcagcgccatgaacacaagctagaagtagggaaataataagtatgagtattcatggccaaaggaaatatatatttaatagtaataagaaaaacattgatgaaaaatctcacttgtacaatcttgaagatgtagacaaatgagtttctcttcatgagcaaatattctcttgagaaacaagctttcaggaactctttcttctttacaccatagtttttggttgtcaaagcagcaggatgattcttgctcttgtcgtatggagttgaaagatgatctcctattgtctgccccacatggaatgatttgaatgcctcagcaaaatccttgactttcacatacctataaggctgatcttttcttgcccaatattgagcttgatctttccttgatgttacctatcattacaaaaatgatataaattaacaatatcaattagaagagtaagttaccccactaatagaaaattgcatgtaaatatatgttgagttagttacctcttgaagaaagtctgctacaccttttctttcaggacatttgaaccccatggcttcaaagaatgaaagcacattttctcgtggaccttgatacacaatctgaccatcagatagaagaataatatcatcaaaaagatcataagtctctggtgctggctggagtaaagagatgacattagttccattaaagatgtgaacatattgcttgagtgagttcacaatctgaaacgtagttgaactgtccaaaccagttgaaatctcgtccattaacaatacaccagctggtccaacaagcatctcccctgtaattaaattgaccaaattaatgtaacttttagtaatgtgatacactaatgttatgcaatatatacacatatattaatgtatgtatgtatttataacatctttgtatttataccagttgtgacacgcttcctctgtcctccagaaataccccttagcatttcatcccctaccattatatcagcacatacttccaaaccaagaatctgcaattcaattcatgtggtcttaattacttgagtaatttaacatcaatggtgtaatttcaattttatatgtaaaatcatatgttaagacttcttttacggttttcaccttaagaacataatctgtcattacacttgtctcttcgccttctagtgctgctgcctacagtacaataaagcacactaagtcaactaaaattaagcttcaaacttttgaaaggaaaggaaatatcaattattaaataacttttatttttattatattttattttaaggggggctttatttttttatttttcttttctcaccttcatgtacacatcaatatctgtatcaggtttgatatttgcttctctctctcttctagacaattcagatagcatgtctggcagtagatgcaaataataatgaaaaatattatatattaatcttaaatacataaagagaattaatgatgaaaatttgttaagaaacacaaaaatataaattgatatttatatatgtatatttgtttttaactgaccataacgagtaccaactccctgaaatcttgccgaaaaagacagagtttctcttactgtcatttctccgatatggacatcatgttgactaatataggctgctgttctttggggaatgaactcattcatatcatgtccattatatgtcaccctccctgaaaactgtaccaaaaattttactttaataaaaagaattacattaaatcaataaatgtgaagttcgacgatgttaatttatatgtttttattcacctttaattcagaggcaagctttcctgccagagtcaataaaagtgtggtcttgccagagcttggaggtcccaatagcaaggtcaatctaaacgtgatttcatggtgattgtaaaaaataatagaaattagtttgatttctcaaatatatattgatagaccaaataataaaaattagtttgactaaccttcctggctttataactccgctaacatcttgaaggatattaagatgtttctttttggtattgaaaataggcagaaatcccagtacactcttcaaaaattgaacaaataaattgtgagaacaatattattgtttttttttttcattttatatatatatacatgtaaaaaaaaaaaaaaaagaacagaaaacaaggaataggagttgactggcgtaagtatcattaattacctcgaagatattaatggagaagttaatgaatgaaggcaaagctctgcttccaacatgaacatctgcctccacattaacatgctcaaatctcacttcaatagttggaacatcaagtccaaccctgaaatgatttttattttcatattcacaaaaccaaatgagaaaatataaatatactcaagaaatagaaaacttgaaacaaaaaagattatgtatgtgtatataaagaaagataatttttgtacctgtcgatacgatttttgagcttcaacaaaaacctttcattatcttcctcagcaaccttaacaagtctctcaagcaaatccttcctttgttgaaagccaagattatgtatatcaacttcattggattcacctttggaggtagtgaaaatgccttttctcaaacgagagtaagttggaagcttttcaagagcagcccatttgagagcttcttcatcgtcttcatcccttgaggatttagagaaaacttccatgttgttgttcctccataaagaactgctaccacttctcatactgttgctgcctctgtatatatcattactctccatttttaaccaaaacagagattattttagtctcaagactccaatccaatgcctacctttaattgtttttcttccaaaacattacaactttgagactttatataatgttatatgtatactgactttcaaattttcattgatctacttatcatacagtactagatttatatgtataatattcttttttttttaagagtgatattataaatattctaaaattctataaatttgaccctactattaggttgacttgactttatttttattacttgcataaattaaaactcaatctttttgacaatctttaataaaccatgtttagtgccaaaaaagataaaatttaaacaatagctatacctttatattttttaagggtaattaatttatatattattttttgaaattttttattattatttttacagtttggttgcaatgtgaatttgggttgtaatttaaattattctattactccgcatgtttctgtataaataaaaaaagttaaatatataaataaaaaaaaaacctctttttttaatgggattttttcatgtatatataaaaaaaaaacaattaaactacaaaaatatttaaagtcgaccctatgaatattaatacaacccataaattaaatattacccaaatactacttcttctactactttagtcgcacagaacgaaacaaagaacctcacgcacgcaactttcgatcgaccaacccaacaacccaatacaaccgaaataaaactcaatcaaaaagagaaccaccattaattctgacgacttcacctaagaagacaaccgggatcaatcaaaacaggggctgtt

SEQ ID NO: 18609 - DNA, 6941 bp, Cannabis sativa
aaaaaaaaacttctgtaacaaagttttaaaataattttcctaatataaataagaatactgggctgtgagctgatgggctggataataaggcccaattggcttcagtacatgtacaatgacattcttacatcccatgccgccacgtgtaaagccccatcactgcagtctttatcgtttgcttaacgacgaagaagcgttcaatggagggtcaaaatcgtcatttttccgccaacacgcgttagcataatctcgtaaaacgacgtatctttctggttttggttttatttttctttattctctattccctttttcggacaaaacactttcgacgaacctattaagttttgcccggaaagaatttcgctactaaaactcggtgatgggcctactctctaacaggtattgtttatcataatgaactgaatatattatatattttctttttgattctgtttggtagggggatttgatcagaaagtgaaggaaaaacaattaattgattaaaatttactctttttattgttcttgggtaaagcccaatcttggcttattgggttttatgatcgttgggttttgtggatattgatttggaaattgtgggtgcagagtgtcgaaggagtctctgaaaccaggggatcatatctattcttggaggactgcttatatttatgcccatcacggttctcctccctcctctcttttattttttttctcatttgttaaaaatagtctgtgttctaactatttatttgtagatttcttttttctttatataaatataatcaactgcatttgttgagttaagtaataaaatacatgcaagttgatgatttttaacgtttgagtcttccttttcattgtgagtatttatatgtgaagctttggttgaaacgagttagggtttgtacagtaagtgtagtaaagttctaaatgtttcaagtagaaaataagtttcgattatgcaagtggtattatggttctgaattattggaccaaaagatcaagtggttattgcatcatgtgtagtagtatttgaaggattgaaacataggaaatgaaccatcttgctatatttgctgtgcttttgaggaagttgccaagggtactagtcatgactgcctacttccacagtctatccatttttttaatattattagtattattataattataattatttgggttggatcatagcaagtttatattagttttaaaaattgaattgcgcaagttatggagaagaagatagatacataacagattggtttaagcaaatctaccttttttttattgctcattgaggcgaaatgtcggtgtaggcatcatgttttaagtaacttatgtaagggaatgcctttctacttttgctatccttgcaatgttcaaatctttggttatgtaatcagttattctacttgatcaataccgcgaacttttttttaaccatgtaagtaacatatgggagactcacaaatgacagtcatcacaatttaaaattgtgtggtttcactgaaaaaagttgtatctattgtcatcattgtggatatctgctagtgtaatttgtaacaattattatattttggtgttaagtttttcctttttgtttagaaacattctaaacttaagatatcatgtctacaggcatctatattggagatgacacagtgattcacttcaccagacgtgggcaagaagtgggaacgggaactttcttggatctcctcttggttagttctggaccagctcgatcactggagccctgctctgtttgcagtccatctgaggaaggcagtggggttgtttcctcttgcctgaaatgtttccttgctggtggcatcttgtaccgtttccagtacgctgtcaaccctgctctttttcttgcaaaagctcgtggtggaacttgcaccttagccgtttcagacccagctgatattgtggtccatcgagcaaagtacctacttgacaatggattcggttgctataatattttcaagaacaattgtgaagactttactatctactgcaaaactggactgcttgtcgttgatcagggaacattggggcaaagcggccaagctgtgtcgataattggaggacctctagctgccgtcctgtccacgccattgcgtcttgttaccaccaatatttatgggatggcagcaactgctgttgcagtctattgtggtagtagatatgctgctgacattggaaggagaagagatgtggtaaaggtacctgttgaggatttgactagaaggcttgcgactggcttgctccaagttgtcgaatcccaaatttcggcatctccacttcaagactcatcccagattgtcacccggtgaccatggactttggtggttgctcttggttcgtgtttattgcatgtacgaatcaaggtttcctatattatgcattcgtatttttctttgagtgataatttctgatactattgaatgcttacttctattggaaatgcttttatttcatatctgttgagaagtgttttaagagcatcgaataatatatcttatgtataatgcattctattaatctaaggtgactgcttatgtggtttataaaactagcggttaccatagtttgaacccaaacataacgatacaacgccgagttctctcttattttcacaattcgagtttaagcgattgccatttctccaaacttcttattttttttcccataaaaagctttgtgcagaacttatctcatacttttttttctcttaaaaaaaatcaattttttagaaatgcctagaagcatgagaatttaattgtaattttactaatgattaattatttatgtttgtaattgtataaatataaacataaaaattacctaatatataagtacgattaatttggaattcgtttagctagtgacttcactctctccctcctaactagaattttctctttccaatcttctttttgctctcaatggaggttccgctagctatgttgttcgactcttcggtgccctggccgagaagatagctttggatcttctacaacgtccgtggtggtgtggtggtgtggtggttatgggcttcccatgtctcctcatcgggacatgtgctagctatcattttttttgtggtggtctcaggtccttggtggaggtggttgtgactttgcattttcgagatttttaccatccttgagtggtgcgtcatacggttctatactgtgggtttgtcttttagggcagtgcatccttgtgttgttagtctaatgttccaaatgaatttgtttggtggtgtgcttagtctagattattttgtgtgatgcttgttgttacttgtgtaggtagtgttgttttctttgaggttttcttatcttttatttttattgtaataatagtgtttatcactctgccttttgtgaattgtgatgttggcttagtgtcatttttgttggggtttctcttttgtgtcagaatggggtgtcgtagtttggtattaatggacactttcctatgtatcatattgttaatagcacaatgtcaagtttgtcttacttataaaacgctatctatgttgggcaccgtggtgccatttgtcttacttataaaacgctatctatgttgggcaccgcggtgccttaataacaatactctaaattgttcaagtttcaacatatacatatcaatgtataataatgatatatataaattgttcatcacacattctcctctctcatccaacaataatttaaaattcaaattacaaatctccaacggtcctctagctagctagcaagttttttcttttcctgaacgaccgttggacatctagcgtccaagttccaccacaccagtatgaatctggtgatcgagtgcataccttgattagcacattaggaaaacaattatgtggggttttaccagtgtttagactagaaccttaaatgtagtcttgcttgagaacataaagagataatgagctttaatgtattacttaaaacaaacgagttcttaaattacaaagaaaaatgtatcataacaaaattttggttctctaattcaggttcaaggtacgcttagtatttcaccagaacattctcaaaccctcctagacaagcaataccgcatttacacatccgtcgttctctggattgtttgtcacctgagcgtatttccctatatccaacacaagcaagcaagaaaagaaaacagaaaagattaacgtctacatggaaacgaaaagggtgataatctcaattatataggaatcttaccccatacaacttttcctgctggagttactaaaccaagctcactcacatttacctgaaattcacagaacaaacaaaacaagtttagaaataacactagtggcacaaacattctactagagataaacgtttggctactgaagatggtacctccacaatggtaccccttgttaagacaccaagagaggtgtacatttgcccattgggatttttctttactgcaattatctcgagattgaatgtgcattttagttcagggtgagttacatgagcctttgtgaatcgaagtccactaggacgaataaaccgctcatactttggaggcttccttgtaaaactaggtcccacaaatgtggcttttgtaatcattctcttccattgtttagctatttaaaaataaacaattggggaatgttaatgaaatgataccagtcataacaaaaaaaaaaaagaaaagaactgaaatagacagctacaatgaaaaaccaaaagtttatgaaaaatgtctgtggcatacaccaagatgatatcaaacaaaagtttacttactcttgcgttttccagttctgagcactttgaacatctcatcttcagccacaggccttacctaaagaatggaggaattgcagccaaaaccaaatgattaatatatcaagttaaacaagagcctaatggatgttaggcccagaaagaaaataaaaaacaacattagttattctcgcacacggaaaacctaatggtaatgcaacatttgaccttaccttaggtagagggacctcccacttcccagctttctcttttctcttctgcttaatggtgttgctaagaacctattttaagacataaagttagatccgtacaaaaaacaaatatatataatttttttcttattccaaaaataggagaagaaacataccttggctcgggttgtgttttcacgatccagcaaatatgaaggaacagctccctcgtgaacatcatcatccaccttacgcctgcttgttgactcctcgtgcatagccaatctgatcacacaaacacaagcttaagtataatcagaatcaattacaattaaaatgttaaaaaataccaataaagataatacactacataatacaacttccaaatgattcattcaccaattgtaatctcaacaaataatactaatcctctgtccaacaaatacaagcttggttacagttttcattaaaataatttgtttcaaaaagggtcatgaaattcttccatgcatcatttcatttataaaacataaattttctcaaacaccttcaagaacaaagatctaaacaattcaatcacttttctttcagaatttacaattgagcggattatcaaacaatagcaaagtgcatctaataaaatgtaaacaattaacaaatgagtgatagaaagctcacgttcttttcatctgagccttttcagcataacgcttcttagcgaacatcttacccttaatacccaatgcctgttccataaaattccagaattaacaacgaaaattaataaattcacgaggaagaaagtttgttgaaatgaactgaaaaaaagaaataaccttctgggcaatggaagagcgtttgtggacttcacgcgcctccttcttgcgcttgcgctcgaagtgatcgggacggtagccataacgcttcctgtgaagctcaatgtaatctccctgaggctgaaattttcacaaacaaagaagaagaacaagtagaaaaatcagtatctgtttcatattcgaaatcagttcgtataccaaatgataatgataaattaagaagtgagaaagagaaccatagctgcagaaacttgatttcggtggcgaagttagagttgcagtaaaccctaacgttgaaggggttttgggaatttgacttgagaaccttatgtaactctgtaatttcaaatgggcttcgtcacaagagcccaatgaagcttagagagagatcttaattatgggcctgtaatgggtccgttccacaacgcaagtgagtacatttttatccactttttcaaaatttattttatttaccttttttaatcgttctactaattttactcttatcctttcacgatagttttcattcttctctaatcaaaattttactcaaatttctcataaaattatacatccatctacaaagaacacaaatttattatgtttgaaattatgttatgtgagtgttggagaataattggggtataatactcctaaaaaagtttatatttgaattaaattttatataaaagtaaatttggttaatgtataaaaaaataagtactctttaacttctcctccaaaatatttaagataattttggatagatgatatccaaatttgtatattgtgtttattgattttctaacatccagccttagggtcttcataaatgtaaattaaataaatataatttttttttcttctttttgctggaaataatgaatatgttgtcgtcacatttaactgtttaagatgattttgtttaacacatgataaaacttagtaattagtttaaattagagagatgatctaaatggtaatttctaaagcccaaatgaaatatataacatatcatatagtatactaaaatagtaaacttacaaaaatactggaatttagattaacttttacaaaaatactgtcacatgtattgtgtttttataaaacaccag

SEQ ID NO: 18610 - DNA, 3095 bp, Cannabis sativa
tgcttacaaacaattttggttaggagtagtgctattagtttagatttttttttttttgtttactcagcttggctgtattggtttgtcttcgttatcacatacccttgtataattatttctaaattatgccatctacctatttgtaattttgtaagattgtacaacccagaaacctcaaatgatgatgagaaaaaaattaccttccatttcaaatcacgtagttttcctatccaacccagaaattggtaacttagtcccaacagttcaatttgctcaacgcctactccatcaccaccctaatttttctgcaacaattcttctcatcaccgttcctcaaagaccagtggtcaataccttcatccaatcactccctaccatcgctccaaacatccaattagtccaccttcctcatgtggacacacccacacctgaccagatcgccacctttacactcgccagcatatctcaccaccctcatttggatgcaccctcaactggctccacctctgaactgggctacatatcccttctcataaagaagcaaatgcccagtgtcaaacaaatcatggtagaccttaactccactaagtctgggtcgaaatcaggtcgagttgtggcattattcgttgacatgttttgcacacccatgatcgacgtagctgacgagcttggcattccttgttacctattctttgcatcaccagcaacttttcttggcttcatgcttgagcttccgactcttgatccctaacatatttttgaatcagaagctaagttgagagtgggtagctttgccaaaccactaccttgtaaagtgcttccatcgacggtgttaaagcgaagagatgggtactcttggtacttgtaccatgctcgaaggtacacagagacgaaaggtattgttatcaatgcatttcaagaccttgagccatatgcattggattcaataagtaagatggatggggtgcctaggatttttccaattgggcccataattgacgataatgggcccatcaaatggcatccagagaaggccaactttcagagccttattagttggcttgacaatcagcctacatcttcagtagtgttcttgtgcttcggtagtatgagaagtctcaatgaggctcaagtgagagagatagcgattggattagaacgggctggctatcgattcttatggtctctccgtgaaccacccaagactaaattagcaatctcaagtgactatgtggatcttgtaaaagtattaccaaatggattcttgaacagaacaaatgggatgggcttagtttgcggatgggtcccacaagtgaagatcttggcccacaaagcagtcggagggtttgtgtcacattgtggttggaattcaatcttggagagcttgtggcatggcgtaccgattacgacatggccaatatttgcggagcaacaaatgaatacttttgagatagtggaagagttgggattagctacaaagattagattggattatagggaacaaagcaatttagtcacggcagatgaagtggtgaaaggaataaatgatttgatgagggaaaataataaagtgagagaaaatgtgaaagttatgaaggagaagagcagaatgactttgatgcaaaatggatcgtcccaacaattattgaaggccttggttgaggaattgattgctagtagttaataatatagtagttaataatatattctctttgcttgaattttttaatatgatgcttgaagtggtgacaaatttttacacataatttgtctaatgatatggaaaacttaaacatctaaataaattgtgtgtttgaaatacataatacattattttatctgtattttataattgtgtataacaaatatttttcacatcattagaattaaaatattcgtaaatatacaaaatgtatgagcttataagccaaaaccattgacatccatgataaaatgagaaacaattttaactaaaacaatcttttatcttacatagaatttactcaatatgatatttcaaaacattgtttgaaaatatggtaatttttagtttgtcctttttattggctttagtattttttaatttattgttatttttatggtgttcattattctatatttttgtatacaaatacaaaccacttttatcgtcttctttaattgagtacacttatcgtaaacattttatttagttgatgcagtctatctcttctattgttggggtatcaatcaaagtcccacatcataagaataagcaagagttgtcttaaatatgtgttctacctactccattagtatgagactttttgggaaggtgcccaaaaataaaactgtgagggtttaggcccaaagcgaatcatatcatactaatgtgggagttaaggtgcatggcgacccaacatggtggaagaataggcccaacaagtggtattaagaaccaagattcagatcaataaaaaatttcaaagatgatgtcttccacaaaatttgaaatcgatcttttggatgggaagaaaatttcattttatgacaaagtacagaaaaaaaatgtgttggtacaacatgactcctaaaggcactgcaaggaaagaaacttcagagtatgactaatgaaggttgggaggagtttcagtcgaaagcagtaagtactatgcgtttaagtttgacatgaattaaggtattgtatattgaatgaaacatgttcgcttgagctatgaaaaaaattagaaaaattttatatgtacttctatgccttttcataactcatttagatttcaagtgtaccccgagctaggtgtagtgccttctccctgcacctccatgccttttcataactcatttggattccgtaatccctgtgcatacttttccttatatcagaggccaaatgatctgagccgtcagttgcgaacttatccttaattagatgggcaactatcagaggtgatcaagggaacatgtatgcacattataaaatgtactcgaaaatcaagggaacatgtatgtacattatgaaatgtactcacctcaaacatgttagaaagtacgttcttcttcgctcttaatttccacccacaatctgtatccttacatgt

SEQ ID NO: 18611 - DNA, 4629 bp, Cannabis sativa
tggttaagtgttacaaaccgtaaagttcaggtggtttaaccgctaatatccctattaaaaaataaaattattgaaaattgagctcaagaaaaaaaacaaatagtctaattagtaacttctgcaagagaatatctaaaatagtatttgcccatattattttagtgttaccatatttagggttttagtaagctttatttttttttttttgctaggaagggttttactaagctgaatattggaaaacccactgaaatggcggattcaattggcagagccctacgtgatggtgccttggagggagaacacgctccagctctcactattaaggattcaattgcttcaccctttgggttcgacgtcttctctcacgtcctcacccagctttcttccaacattttagccggaaagtctcagtcaaggtcgttatatgttctttttttccttttccaacttcaatttttcatttttcaatgtttaaaatgaatttttctaaataattgcagaggtctagtgctcgttgcgttttctcgaagcccttcattttacgtgaattttttgaagagaagaggagtagatgttgcttcttctcccaaatggttccattccttgattttctacagtttacttgttaatacttgttaagacacgtaaagagccatcttgatttaattatatctatctatatatacatttgtatgtactgttctttgtaaaagtagcacaatgaatttacattattagtgcttggtgaaagttttctgagctagaaaatcgtacaggattgagattttggattgttacacggaccctcttggttggaaatgtggtttagtggagtcctcagatgctccaagcctctctcgcgaagcttccaacacagggactatttgtaggaatgtgaaggacgtaaatgagttgttatctagaattatcgaacttggtcaaggtaccaccatcatcatatgttagtgttcatttccaatgataaaattataaatttgataataatgtgtttgtattgtctcttaagcattttgaaaatttgaacttcctagtaatttcagaatgtcttcttatgcttgtaggattggttggacaggggaaatttcgtttttgtactgcaatagattcggtaaggctgcatattcctgaactatagggccagatagatatgtactttggggtttaccgaagacaaaaagaagtattttgtttaagttagcatactttgatgcatcaagtaattttccaattttaaatgtggatctttggatatataacttcgatgttttgtctgccgaacaatactttcatttgttgttttgttgtttttcattcttatgcctacaatgctccaaatggccttttttttttctaaaaaaaatcattgtctaatgacaagatttttgtgagggagccggaggaagcttccttacaagggcatttgacatggaatggaatagagatgttataagtaatttagttcctctagtcctaagaagaagtttataggaattatagtttgtgatttttatggaagatttattcagtaggctacattgtttttattggaaaatgccctgattttttttttctttcattgtcttgtcctactttggcagcgataagtcatgtttggcttagatactcaattttatcttaaaaaaattacttaacttggcaaatacaacggctttcatctcacaaatgctaattatacttagacacatggaagtctaggttttgtagatgattgtgtgactttactcagcacgggactgaacacaggaagtgattgtcatttgtgatgataatatgactgcaatatatgtcaaacaacatatatggactgtaataaaaatttcggcagtattactaatggattgaagaatctggtttgtccaacaaaattaatgaaaacactgtgctctcatactctcctccccattttattcaaatcaactaccccaaacttaaacaacataattacctgtacaagtaacgaagttcatgtagacagccaatcattactagacactaaaatatccactcacacactgccacatcctcataagatctattaggctgcagtggcattagttgcatccttcttaggcctccaccttgactatgtaaaacgtgtagcacgtctatgagatgattgatgaatagacaagctaggataggtatgctggaatggttattcaagttgtgatctgtaattaatgctttcctttgttcaaggaaatcagatatggtggtgctcttgaattagtatttgggattttttttcctgctgtaatctttgtcatacaataattttgagtctatttcggggctataaagaacatgatcgacaaaaactctatctgaagatctaaataatgtttaatgttttacattaaaatttaaagtattttctttgttgtaatctagatccaaaatgatgagccatgaaggttttacacttctaatatacttgctggaaaaaatcaatatgaaaaattaataggtattgctttgtttcaaaggttttgcaaaataaataaaaaatattttatcaagtgaacgaaatgctaatatgttcgatattgatgtagcatacttcttgtgccttgtagttattttaactgtttcactttctctctggtcactgtttttaattatttacatatcttttccaggtaagtgaattgttaagacatgcgtcaatgtcctcggtgtcaggccttctaagcaaccttcgtagccatggtatatacataatatacttcttttggtctatgttccaaattttaattgctcacatttattttcttttagtagcattttatttcagtgtagtttttatattttgttttgctcagttccatgtagttttattacatccacttcaatttcttatgccacaatacattacttcagttcatgaatttatttttgggaccatatctcattaggaagtcttaataacttcttgacatttcatattatttattttgcacaagattttgacgttgcatttttttggttatagatcagatttcgagtatcttttggttgctgcattcagatcttcatgaggacagggtcattgctgcatttgagtatatgtcctctatggtggccagtgttgaaccattaaatcaatatgcaggtggacagagaggtactacaaatagcctttctttccttgaacaaaattctgctaaagggaagttaaatgttcggttcaagcgtagaaatggccgggttcgagtggcggtgatctttctctccctttttctatctctctgcgtgcagtttgtatgagtgatgttttcatatcaatctttaaaattttgatttcaattctacaaatattgttcagtccgaggaacttcatgtagagcagtctggtgtaaactttatgtctgtttctcccgaagatggagtaataaatcaaggtttaatcccaaaggtgcgttctcttgttgggtaattttctcaatctagcagtctttctgtttgtctcttgtctcttgcttttgctttttcttctctcttggagcattgttttctcaattggtattacaagatttaattgtttggttatttatcacttgtgacaatatacaatgttttataactgaaacaattaatttggatatatcacctgattatcaaaggtattggtttgttactgaaatggaaattttatatgcaaagaatggcttgcactctttactataatttcctggacttaaaaattgtaaggttaggcggggatcctagttcttgtttttttaaaaaaaaaataaaaaaaaataaagaagaattagttgaaattttgatacttacataattagtgcacatgcccccgaagaaatgaagatgctaatttgcattgtggctcgggcaacataaattgttttcaaagaaattatatttgtatataatgtacatattatttttttcttcaattccttcttttcctagtaatagcaaggaagtgtctttttctgcaggtacaatttaatcttcagctgtcagagaaggagcaaattgatagggctaatgttgtacttccctttgaacatcaaggtgaaaggccaacactcatctatgtccattgttttgtcttttcattgttgaataattttttagttttttaatgatgggtagtttacccgtggtctcatattatgcccactcatgtaatatcctattcttgatgtttttttgaatttacaggaaatggtaaaccaattcaaatctacgacggtcggcgatctcttgcagatatgaatatcgaggaaacagctgtctcaaccaagaaatcagaagtaaatgagtctagcatgggtgagataatatatttccgcgattcagaagatgagatgccagattctgatgaggaccctgatgatgatttggatatctaactgtgtttacctcttgtcagcaccggaaactggtaaatcattttttctttacctgtaatcttttgggaaattatagtgagagttgtttcagttttccattttaacgagtgttaatgtaagctgtaacaaatttatgaggctgattaatttaatatcccgaatacaaatattttaagaaacagtagcgacagatctctaatacatc

SEQ ID NO: 18612 - DNA, 8648 bp, Cannabis sativa
aaaggttattgatgactgtcgttttattgattttgggtcgaataaaacagaattgatgtggtgtaacaagtgtgaatcaaatctggttttttgaaagattgaatcgtggtttatgcacagaggactggcttaggacgtttgatggggtagacattactatttaagattggatagggtctaatcataaggctcttgtggtggatataccagttagggatagtagtgatacatgtggacaaactaaacgcaacaaccacttccactttgaagaagcttgggggtagatcttgagtgtagtactattgtggaccaacactggcaagatcaaccgattatgttgataactgggggttttagacaacacgcttctaactgtggaatgtacttcaaaagtggaataaaagaagaaaaagagacttactcgaggagattttttaagtgaagaaagtcattcatgagttgtcttcaaggaaccatcaaggagtttggatggagcttaaaaaacaagagaaaaaattaaatggactccttgacaaagaggagaaatactagaagcaacgtagtagagcgatgtggttacagtgtggagataaaaatataaaatatttcaatcacaatgcctcacttcgacgaaagaaaaataacatcaagggaatgatggaccacttggggctgtggaaagatgataaactagttgttcaaaactttgtcgagaattattttacaaccgtattctcctccttggatctgcgggaagatgttcttgatactattttggcagctattccactaaaagttacagcaaccatgaatgaagatttggaaagcccttttcaagagaatgagatagttgttgttgtcaaagatatggatcctaccaaagcaccaagtagtgatggtctcctgacactttttttatcaaaaattctggtccaaacttaaaaatgatattgtggcggtttgtctgaatattctgaataatggtgctaacattgtcggattgaatggtacaattattatattgattccgaaagtcgataagccaaagaaagttgaagaatttagacccatcaatctttgtaatgttatttacataatagttttaaagtgcttagctaatcggctacggtatacattgggagaggtcatttcaaattctcaaagtgtgtttgttaagggaagactcattcatgataattctatcatcgagtgtatttgttaagggaagactcattcatgataatgctatcatcgggtttgagggccttcacactataagaaagaaccagttcaggaatggatccaaattggctcttaagctggttatggcaaaggcgtatgatagggtggagtagagatttattgatgctatgatgagacgcttggggtattcaaatgtttgggtgaaaaagataatggcatgtgtcacctcggttagtgtttcttttcttattaatggggaagttatggggaaggtgactctgcaacgaggaataagacaaggggatcctttattccccatcctgtttctattttgtgccaaagtattttctagtttaatttataaggctgaggaagagggaaaacttcgggggctggcttttggtcgaaggggatttaaggtctctcatctatattttgccaatgataggtattttttaaagccacagaaacagagtgtcactattttcaagatttgctgaatatatattctattgcctctgaacaagttgtcaactaccataagtcggagatgtgttttgagcgtatggttggggaggatttgaaggaaagactagcagggatgatgcaagtaaaggttgttgataattacgaaaaatatttgagactcccatctttagccaatcaagttttgttatccaaagttaatgctatgtagattggggttaccccctaatgttcgtcctgctcttcggtgatgagccattttctttgtaattgttttagttgaatgaatttcatttcataaaaaaaaacacacattaatacaatcctttatttttaattgattacataattatttcttcttttttttaacttcaaaaataaaaataaaaattcacaaggtaaatattgtaaaagtaaaaaaaaattacattacttttatcaaaaaaaaaaaatacattacaaaatctcattggagagggagagaaaagggttttactttgctgcttctttagtttatcgctactctctcttctccggccccgtttccgtgatcaggtacgtttctccattcttcgattattggcgtatgtatgcaaatatatatacatatctctttttgaaatgttgatgattgattttactgctgacaccaaatattgaagcttgattcgaacaatatatagtttttcctttttgtgaatttgtttcatcccctttggctctaatttctagttgcatagatcgtctttgtaagcttatagatattagttctacgatttgggtttgagaaattagttatcttggttgcctataacctgtttgataaaatgtctaacaagggaaatgttcacattggtttctaatatatattaacattggattggtttcatagttggacattgaaaaaaccaatcttgaagggtcactcaagagggattttactgctgaggtatgaattgtttttgagaacttaaactgtgtttgaagctttcttataatagtcaaaacttcctatacacattatgtgtttcttgaaatttataggtggaaaaggaggttgagtaacaaacatggtgatttccagttcaaatcctcacagtaaggagatatccattcgaaagcggattgctagcatgtaaacttctcactttccttctctatgctgtgttatgtttgctttcatacttatatttcatgtaaaaattttaaacccagaacatttttaatgcctttgaacccttcaatatcgacattacttgtttgtctggtattttccgaaattaaaattgaatctaatgtgtgattttattgtatttcaagtttatgaaatgaggttttgttctagactgacaggcttaggaatctgcaactacaatgattatgatgtgttgtaattgattactaattttggaagaagtcatggaaattggaaaataagaatgaaatagaataaaatttaatatgagtaaaattaaattattaaaagaattatcctttcctcccatttttagaaggattggccattccacaaaaaaattagaacagtggaaagtcactccatttggaataacattctaatacttaaatctgtaactagacatatgaatggataaaaattgatttcattctattccattactctaaccaaatacaccaccgtcttactgtgtttttccacataatcttcagacattttatcttaaattcattgtagaaactgcaattgtctcatgtactgataatgaggttatgtaaatattttagatttaataagagagaagatgattttccatcgttgaaagagtacaatgactatttggaggaagtggaggacatgagtgagtgtttcatattaattgcccccattccaattttttctttttgttatttattgatatggaattcttgttgatgtaattgttatctcacaagaaaagataaaacgtttttgttgcagcatttgatttgatcgacggtatagatgttgctgctatagaagagaaaattgcacggtaccaggaagaaaatgctgagcaaataatgataaatcgagcacggaaggtacttagaaatttctcttatcaataagtttctaagtctggccattttcattagatgtaactttgtaaatgacaaacaagaaagtgtgttcctagtattgtgataaccaaattcattgtttatttaccataactcctactagattattcattctgactctgacattaaacaggctgaagaattagctgcagctatggcagcaagtagggggggacctgttactcaatctgaaaatgatggggtgagtatgaagttaatgatagtgtcatagtgactatgtttcatttcaatgtaatccttaaaaagacgcaatagttttgcatcattttctagtggagttggggaatgaatttccttttggattgtcagattcgaattagcattaacttgtaaaggggaaaagattgtgtagaatattggttatcatctattagtgtgataactgattacgttttctatgtaatttgaatagggtccaagccagagctcccaaacaggacaaagtacacaaggccagtatgctccaactgttgcaggtggacaaccacggcctactggcatggccccacaaccgctgccgctcgggatgagcactgacatccacggttatgccattgatgacgaggagatgttgaagctacgagccgagagaggaggaagggctggagggtggagtttagaattaagcaggaagagggcacttgaagaagctttcagcagcatttggatatgctagccttgctactgtttttcattaagtcttaaaccatatctatggtgtaaaatgtgtgttaaatttggctcaaaaaaaaaataaaccaaatgctatatttagtcgaaattttacagttgtactccattatattagatgtaaaattaacttaaaaagtcaataaaaattttagatttttattgaaaatatatataaattttttataaaaatatataaaagattatcgattacattaatgaataatcaacaaataaataataaaaaatgtaatatttattatcgtataaatttgatttatattatattttgggttcaatttgacacaatttttaatttgtcatatttaatccaagttatacatgtattattaaagtttaattttttttttgaaagaacatcttgttcaattaactagaaaaaagatgggaataacagggggcactccctccctttgatacaaaacaacaatatcactagagattctagtgttttttgccacaccatcggccacagaattcaaacatctcttaatgaaaaggaaaacacaacttagcagtttttttagacaaattcaaaatagaaaaataaacagtagataatctccaatcaggcggtctcccttctgaggcaagggccttcaccgcactgtaagaatccgagagaatatgcacttgattccaacccctctcaactgcccaggaaacaacaagaagaatggctttgagctctgcttcaagagctgattgagccttatctttgcaagccttaacaaaccaggtaccttgtcttgtgtcaacaccaacagcagcaatcccactctcaccatttgaccaagacgcgtccgtgaacatgacatggtgagccattctccctcgggcctccccttccaaaaccaggtttccagatgggaccagatttgtagaagttgaaccccctccatcaacaaagttcttctccatgctgcacatatccactattgattttccaattcttgctatagcctggataggatctgcgaccatgtttctgatacagaaagaatttctttgctgccaaatttccgagaataaacagccacagaaatttaacagcttaaatctgttgaattctgaaaaggaaagaagcagattctccacaaaactaatcatagaattaccaggaatactgtctatccttaatggatatttcccacctaaccaaatagccttcgaaaaggcacaatctctaaacaggtgcaaggaattttcctccaacataccacataaacaacaagacttatctctgagaaaaggcaaccggtttctggttggaatcgcttcacttaaagatctccaaagcatcacagaatttcttgggtgaatttgaccattccaaatccacttccaaataatttttcatggggcgaatctccaagattggtccactaaataagctgctttgacagagaattggcccttttgattgtttttccagaaaacctgatccggaaaaggatgaggaattctaggaatattaagaacacaatgtcccatatcagggccaaaaatctgcataacaatctcctcattccaatcatttccaattgacacatctgctagattggtaatagtaaatcttctacctcttaactgatgcataaattctacaaattcttgatattctagattggtaatagtaaatcatttccaagggatccatggttgagtcaagaaattgatcgattcacccgaggctgcaatcgacatggatccctttcgaatagtttccctagcctccaggatgtttctccattgtgtcgaatcactactcttggccttaacactccagaagtcctcaaacttgcaatacttcttcagaagacacgaaacccacggaagctttaggagaacaaatgttatcctaggccttgagagctaagaatctatctttgttaacatttcctatccaacaatatttcctcatcaaagcatctagttgacgacaagtagaaatagggattttgctagtggacatggcatagatcgacattgaagaaacaacagacttcaagagaactaacctcccggcatacgatagcaatttcattttccaaccatccagcttactcatcaagctgtctttgagtctcttataatccgcaactcttcttcttttgaaaatgaaagggtttcccaaatgtttttcatctccattaacttgagtgatcttgagaaccctaagaactgtgtcttttcttccaacattcaggttctttgaaaaaagcaccccaaacttagctttgctgcacgtttgcccagacaaagactcgtacgaagaaaggcaattgatgatcacttcagcctcctttacattagctcttgcaaagagaatagtatcatcagcgaacatgaggtgagagattggaggagctgagtgagaaatcttaattccatgaatcagaccttcattctctgccttaagaagaattctcgagagcacatcttgacaaagaatgaataaaaagggagatagaggatccccttgtctcaaccctctcttaggcatcaattttttcagaggtaccccattcaacaggacagaataagagacagaactcacacgggacatcagaagttgagtacatttatcattgaaaccattagctcttaagaccttttcaagaaaaccccactccattctatcgtaagccttgtgcatgtctaatttaattgccatcagacttccaatgccctttttgcgctgaattttatgaatcaattcttgcgtgaggatggaagattcagctatccatcttcctcttatgaaggccgactggaacggggcaactaattcctccatgagaggactcaaacgattggacaatatctttgcaataatcttatgggagaaattgcaaaggcttatcggacggaattgatccacactcattggaaaatccaccttaggaataagacatatgaaggtattattgattctaggatcaatagtaccaagatgaaaagcttctttaactgtagcacaaaggcaagcgcccactatatccctatactttctgaaaaaacaccccgagaatccatcaggcccaggagctttcaaaggatgaagatcgaacaccacactcttgatttcttcatcagttgggattttggctatgtcttcattagcttggcagggaactcgcttcatgactaattcatcaagactaaactcttcggggggcatggaagaagagaaaagatccaaaaattgagtatttatgacccttgcaatgttgcttctatctttccaaattcttccctccttatctcaaattgcccagatattatttttccttcttctcaccacggcagtagtatgaaagtatctggtatttcgatcgcctagagcaagccatgtttccctcgatctttgtttccacatgctctcttgtttagcccaagagaccgacaactgagaatgaagtctagcctcctcttttttaagagtatcggttattggttggttttgaatccattcaattcttttctccaattttttaaagtccgcttcattgaccccttgtaactgtttcttccaagtttgaagagcccttctggtgttactgacatttttgatcagtgaagaagtagcgtttgcaccagaattacaccaggccttcactatttctgccttacaggtagtctcccaagtccatgctttaaagaaacggaatggaatgtaaccttttgccgcaaaaaggtgtgtgtccaaaatgatgggagcatgatccgagaacacgattggcaaattaattactcccgctttatcatattcagttaaccaatccgcagaacatactgcacgatccagccgctccctgatcaaacctcccgtgaaccttttgttttgccacgaaaatttattgccaatgaatctaagatccacactacccgtgttgtcaagaaagttacccaaccactttgtatcagttgaagtgactttgcaaccacctaatttctcctcctgattgagaatacaattaagatccccaattagcacccaaggaatttcacaagataacacctctacctctaaactactccagaagggttctttgacattaccatatggagttccatatacagcatacaatttccaaaattggtggattcggaaaccataacgt

SEQ ID NO: 18613 - DNA, 1649 bp, Cannabis sativa
ctttatatatatatatatttatatcacccactcttttgagagaataatgtgtgtagtactttggcttttgtctccattgtatgaatagtaaatattcacctctactctttcaatgtaagagttctatatcttgcataagttcatgcagattttccatgtattttaccaaatatagaaattgatcaatagtactattaataagcgcttttcacttgtacttgttaattaggtaacacgaagcttggcagcaaaagctttccagacttctcttccactctgtagagagacatttttctctgcgaatatggaggatcaactggttttacggtatgcttattttgacacccatcataattatttatttctatttaaatataagaaatttttctgctaatcaattttgggccatgataatgtcaattcaattaaatcaagcatatgatgaactttcaatttcatggaacatttgtagtcacctcattcactgtaccttttaactatttaaaatgtttattgattgttcaaatagttattctaacaagggaccaaaacctgtgaaatctggtttctgaaaagcagtagagcataattttaatttggcattcatttaacgtaacaattatagtcatatccgtttgacgaatgcttttgtgcaaatgagttttctgaagttgcattactaatttcttttgttttctttcagttatcaggagctaatgaaagaaagctcgagaatgccattgtttgatctgaggaagctgaacaggtcacttccagttccttcagttccaaaatcttctattgagcttcttgtgttgggtgcaaagaatgatttcatagtggtaaacattctgactttgtgattactatatcttgtcataatctctagcagtgtcgtaaaacattaggttagatgtttcacttacatgcatatggcatcttcatggccacataataacaaccatcaaacactactaatagtatctcagttgaataacttaccgatacgttgtcatatggtttacattttagtatcattttttggttctaagatttgcttgaaggagaggttatctaaatcaattggtgctggcttttttatatttttgacaggatactgaaggcctcaatgaaacaggcaaattttatggcgtgtcaccagtatgtgtggaaggggttgcccatgacatgatgttggattgttcatgggagaaaggtgcaaaagttattctatcatggctaaatggtctgaaggaaaatgtaccaccttagtttagatattctttttctttgggttaattgcaggcaaatcagctggttagttaaacccatgttttagagagtactatgtaatattttgcttaaaccagacaagtgaataggtcctaatgaagtaataaaataacttaatcatacccacccctgaaaaggtatctggttcaagcccaaatatatgggaagagttgctgtatatagtctattttgtaaatagggttcttaaggcactaaaaggccaattcttccaaagaagaaaaaaaaagacatattcactttcattcagacccaaaccagagaactatccacaagaccacttcatatgccaaactcgagaagaagctttcaatggcgcgtgtaccattacttgttat

SEQ ID NO: 18614 - DNA, 4364 bp, Cannabis sativa
tgggaatatcgcaaaaagaaaatcattacatttgatatagtttgctactcttatggattttattcttgcattttcttgcatgtatgttgtaaaaagttttatttctaagacttttacttgaatagatgtaaggggttttaaattgatctgtttgaacctcattgtaattgataataacttttctctttgttggaaattctctcatccagtttgcataccaacctgaaaagacaagttttcatatcaataattggaataatattgtcataatactgtgtatgcttatgagacgcaccaagagatgtaacctgatagagagaagttaggttgcattattgataggattgatttgtcataattatgcaatttatttcatatatttatgtggatttagctgtttcatgataatatagggtaactgaatctcccaattgggaaatgacggtagtaggcttttgagtatctatttctttgagactttgactaggtcttttaattttgaataggacatttccaatgttaatatgtaatactgtatttctaaaaaaaagcttagtgagcttttaagtatcataagtattcatgttcctttctcttttccctttctttacatttggcagggtcatgaaggaaaattttctgtttatgttcatgcatctaaggacagaccagtgcatgtgagccgacactttatcaatcgggacattcgtagtgatcaggtcccatctgaatgccaatattatctttcttatttttctttatgtgattaatcttttctctggaatcttgtgcttaaagagaaacttaagatcaacaggttcattgcattatttgtatatatttttatttttatgtgcctagacataaagtttatttgatcatacttttgcattgttggtattgtgtgtgcttcttgtaatgcgctgacatagccttatagctttttgttcaaataataagctctaatcaaatccgaatgagcactggctggaaatgaactgcagaaacctaagtaggactgttttctcttgttttccatctgaaatcttgaatcatcatacattccaatttagcaacttctgataataaaggttgttctctcaaaatttgacttttttaaatgatgatgatttcatttattgattggggaagcccataatgacaattattcttgtcaagagcaaaagagcttcattccaatcttggatcactggctctttgatgatatgatgcatttttttaccttcgaatttaatcagaaagagcttctgtacattccatggaatttaatttatatgttgaattgtacaaatttttctatagtgtatgtttggtgatttaatgtatagcctggtttaaaaaaaaacaataacaagacagtttttgcattttatgctattcttttgtcatctattaaagtgacattttctgatctactgctaaaatattcaaattggtggttaatcatggttgcaggttatctggggaaagatttccatggttgatgcagagaaacgattattggcaaatgctctccaagatcctagtaaccagcattttgtcttactttctgaaaggtattcacatgattttactatgtcgagttctttctactttgttgtttttcctattttgttattattaacactcatttaataaactattgcttttgcagttgtgtacctttgtatagttttgactacatctacgactatctgattaatacaaacatcagcttcgttgatgcgtaagtgcagtttcatatgagatgagttgtgatgtgattctgtgttgtcgatcttattaatgttttaaattaaataagcaattatgatacattatatatacttgattctttcccctttgtcgatcatgatgacctgcaaaggtgattactttctgttttgcgaaatatattgggatctaagcttcctacactaaaaatataaattgctttctttcttttcttttccacagctttgaggatcccggtccacatggaaatggaaggtattcagaacacatgttacctgaaattgagaagaaagatttccgcaagggtgcacaggtattagttgaattattttaaactaattcatggggtttcaattgttggaaagttttatgctataattgtgtagggttcggggattttttttcctcggttgcttgttgttttggttttgtgttttggggtttgcaaggaattatccattacacttttatttgatttcttatatttcattgttgttcttatatgttaataatgctataaaaatgtaaatggaaacggcttaacatgagtcctctcagtcagaagatggtttgatatttggcatagcaataggcatatatttcttatctttttattagtttatgttttagttatacgagctaaattatcatctgtgtaccaaagttttcttactatttgttttattgggatgtttaaagctgtactatatactgttatatgcataccaatccgttccttccctttgtgcagtggtttacaatgaagcgccagcatgctgtgatagtactggcagactatctttactactcaaaatttcgggaatactgcagggtaaagaaagtttattccgttattgaatattgtgtcttgtttgataaacgaatctggcatgtagagaaattgttactttgcaaatgtgttggatcttattaaattacgaagttattgtatttttgcatgtagtaaattgagtgctttccggcaatattatggttattgaaattttagatgtctgtcagatagacaggatacttaaggcatatatgcatcatagtgttgatgtacatatatattgagttatacttgtaactattgaacttttttaacttgggttcctgtcaccattaattcattgtattggcctggatcttgaatctttcagccaggtttggaggggcacaattgtattgctgatgaacattacttgccaacctttttcaacgtgagtttatgtcaattatgttttcaagtcattggtatatttgtttctgctttgtatttattctgttctgctgaatgaaatttattctgtgtttcagttggttgatgctggtggcatttccaattggtcagtaactcatgttgattggtctgagagaaaatggcaccctaaatcctacagggctcaggatattacctctgaacttctaaggaatataacggtacaaatctactactgactaatcttttacattgctagtgaagtatttttgcacgtggccatgcaagatttgacttttgaatccttaattatagtttccttggtttgtttgagaagtttgggatgggtctctaattaatgctaataatcaaaataagttagtcaatttttgtaattgctagtgaagtatttttgcacgtggccatgcaagatttgacttttgattccttaattatagtttccttggtttgtttgagaaggttgggatgggtctctaattaatgctaataatttttgtaatttctgtcttccctgatgacttgttgtttggtattactatttgcagtcggttgatgtgagtgtgcatgttactagtgatgataaggtaagttttctaacataagcgtctgaatttcgcatcaagaaatggtcagaacaagtataaactgaatgatcttctggactattgcagaaggtagtgcagagatggccttgcttgtggaatggtatgcaacggccgtgttacctatttgcgcggaagttcatgccagatgctctagataacttattgcaccattttgccaattatacaacgatttgagcacgatatttttgactatattctttggtcggattggctgatgctttcgaccctatttgctccgtcttggtttgccatatagcttttaaagatgtaaattgccaaattattgaggcatgattttcccctaccacaattcttaagtgaaaaagggcaactagcagagcagtcagttagctagggtgacctgagtcaggcaggacgctaacaaggttagagttgcttctctatgagaatgggtgacttcttgtctctatgaccgctccgttttcgggttttgggctttctttgtactagctttaagaagagactcttttgggggaaacaccttttgttgaatttttcttttttactttttttaagtttggtcttttgtaatagatggaaaatgtgaagttgcaaatataacaaaactatagctccctgattcatgcttcaactcgtaaatttctgcgtcaaccaaaccaaccagtgtgcttgtggatgaaactttagaacaacggcatttattattcaaccggagaacattgaattttgtacagttttcagttgcacaaactgccttt

SEQ ID NO: 18615 - DNA, 4099 bp, Cannabis sativa
ttttcttttatagatttttcttttgaattccaatgtaatttattcaatcaaaatatgcatttagaaaactaatcgcaaaataaataaataaattaaaatatattttattaagttcaaaataattagaacacttaacattctacaatattaatttattttcttgtgttactaagagtaaaaaaaaagtttaggactcattattagaaaaaatattaaaatttaaaatttaatatagctttataatttaattatcactaatgatttgtttcctaattttgaaaattttccaaagaaaattcagttaagttaagtgtatacttttctcaaaataaaaataagaattttttttatttttatacttcacaacaggtattttttttatttttcttttttgtatttttacgaaaattcacataactagcaaagcaacataagtaaaatttacataaaaattaccggatcaacctaaaccgtaaatttgaaaggaaaaaaaaatagtataaaggataatttaattgaaacatgttgcagctcataaagtaagccatattgctagcttcaaagtcgttttagttgatagtttgtcgttctaataaatggtgatttcactcttccttggccaagggactgagccttacatttcattcaactaaaccaaaaaaagaaaacaaaaaagaaagcaaaaccaacgtaggaaggaaccttagacaccataagtagtagttactagttcttataacaccaccaaataactaatacctgaactcaattacaacaaaaaattcataactttaagctgaaagtttctcaggtgggaaccattttatgctcatttcgggtgcttcaaattactgacagagttgttcgactgcagtgacgatttgggcaggctgaaccacagtccattcctctagtgacccggcatatggggttggaacatcctgtgaagacagacaaataattggggcgtccagataatcgtggaagttttcgttgattgctgttgttaagctggcaccaatgccaccagttctcatgcattcctctacaatcagcacgcggtgtgtcttcttcacagagttaccgattgtgtgaagatcgaatggcttcaatgacctgatatcgatcacttcgggatcataacccttgtttaccaatgttttcgcagcctgcatcacgtgatacctcattcgggagtatgttagtatggtgacatgctctccaggccttaccatttcagcttcttcgagattacagatatattcttcatctggaattctttccttgagattgtaaagcaatacgtgctcaaaaagaatcactgggttctcacttctaatagcggctttcattaagcccttagcattatatggggtcgagcatgcaaccatttgaattccaggaatagattgaaaataggactccaaacgctgcgagtgctcagccccaagctgcctacccactccaccaggtcctcgaataactattggtatcttgaactgaccaccagatgtgtaatgaagcataccacagttgttagagatctggttaaaagccaggagcagaaatcccatgttcataccttcaacaactggtcgcagaccagtcatggcagctccaattcccatacctgtaaaggaattctcagcaataggggtgtcaagaaccctgagatccccatacttttcagccatgcctttagtcaccttgtaagaacctccatagtgcccaacatcttcgcccataacgcaaacagtagcatccctttccatttcttcatccaaaccttctcttaaggcttcaaaaagtagaagttcatggctgaatgaaaattacacagacgcatagttaacacctggcttaattaatcaaatattattacaacttaggattagcataataaaattggtagaaagaaattgccgaggaccgcatcattatgaataattccagaaatatcataaacatgactaagatagaacatacatctatctaagtacacaatacatcaaacatatggtaaaaatttggccgataaaatagttttaatggtggcttatttgaaaaatgctgcatacaattttctaacatgtttattcagagtcttatttaactaattaagtttagtcccatatatcaaatttagtttctcaaccaatataacctgttatcctcaaagttagtattctacaccatttctctagtgtataaacaaataaaagtggttaaaactttagtaatgagattcaaatttatatttgtcatcacacatagcagagattctaacataattactcagagtcttatttaactattcaagcttagtaccatttatcaaatttagtttctcaaccaataaaaactgttgtcaaaaaagtcagtattctacaccatttctttagtatgtaagcaaataaataagaaaagtagttaaaattttagtaatgacattctaagtaatcaaacatagcagagcttaataatggatctcagagagaaatattaaaataactagaaaaagaaaaagcttttccttttaaaagaaaatacaattttcttacaaatcacagaacttaggaaaccaaaccacttttcaccaacaactagatatcattaaacaacatattaaacagtaacaacacacatcataccaattatctttctatagcaaaatcaagcacaaaaaactggttaaaattgaagtttatgcatgtccttataataacaattttaaagcaagaaatgatgaaaataacataataaacaaacattgcaatatgtttgagctttaatttaacgaaagagaatcataccctggtttcgatgctgtcgaagccgcagagttatctgtcttggtctacaaaaaaccaaaatcaaaagaacaaacaatgaaaacccaaacaaagcattccacaaactcaattcaatagaaaaaaaactaagagaaaaacgcaaacccaaaacaaaaatcgaaagagaaaaggggcaagaatgttgtacagcaacagcgttcataacaaggtgatcagcccgtcgagctttcggattcaaaccagagttcagctgggatctgacacaaaagaagctagctttcctctctgaatcaaagaattaaacaaaacccatctcagaaaaagcaataataacaaaaacccaaatgccgaaaatcagtcgtacctgagagagatctacgagattggagatggaattttgtcgaatccaaagtgttagactttgaggtagctgataaagccgtggcagcaccaataccctgaaaaatggtcgccatttcgaaatgggaattgagcagagcagagcacaaccaaactgaactctctctgtatatttatataaaacaatatatatatagatatagagagagaaagagaggacggagaaactgaggaagcaagaaatgggtgttgtggatttattcacgttgctccacttagcttttaggcgatttaattgaagaagaagaagaatgggaagaagagagagaaagtcgatacagagagaaggagagagaaagcccttagctgccacatattaacaaaagctttctcacatagtttccatcgcctccatctctctctctctcttttttttttttgaaattttgatcagttaacagtgtttccgtaactacgtgcagctaaaaattaaaaccaatgaaagtttgccacgtcaggtaatggttttgtgagaatacgtggaaggttttgattgggtgaaaggatacaatgttggttgggactaggtagcctacctgggaccaaccctaacaagaaaaggtcgttgtaaatgtaatgtctttgtggggtccgttaatctgctgatgtggactcatgctggtatgtaattggttagtttagcttagtgggtggtctgtgtatctgatcatctccagcttagatccgacccgacccgactgatttgcctttacttaattttgattgctgtgttgtagttggaggaaatggttaattaattttggcatttgggaaattccaccaactaagttatttcagttatgaaataatataaaataatataaagtagatgataagaaagaagaagaagatgaagagagaaagag

SEQ ID NO: 18616 - DNA, 12333 bp, Cannabis sativa
cataataaataaagacatttccaattccatcaaaataaataaataaataaagatataggaaaatgatcaagctgttagtttttaattgataccatgattggcttcttaaaaactaatattacactagacaataatgtgtcgaagaacccaaaataaagaagaaactcaaaagttttggatcgaaatcaaaaattcatattcaaatgtgggttgggttacaaatgagaggaagaataagaatctaggaaacttacatatatagtgtgaaatagagtaaagtttacacatattgtgatactggaaattttacaattatactgtccattaatttttttcttttatattgtaaataggccaaaataagaaaaatctcatcgttctcagctaccacggtcggaaacaatcgatcaaccacagaacagtcaaaaaataaacatcattcacagtgagatgaagtaaaaccattataactgacaaaaagccacacctagaagcttcgtcaacatacagaaatcgacgcatcaaaaggtaaaaagctcaaacttacacaaattaaaatgaatcttaaaacattgataatgttaatacactgatctcaaattcaattatattgacgaatttattcatgacatacttaatttatatatgttaacccagaaacatttcctagtgacatgaacatcaatatttgacacgtggcaaaaaaaataacatctcggagttgagtagtcccgagtcatagtagacgacctgggagggctccctagccatgcgcccaggttgactctgggaactccagaataggtgttcaaattctaccaagttgttctaactaaccatctttcaatattctatatgatgaagatatgaagcatccaagtccaggccttgggagctaaaaacacacaaaacaatacctcaaaaatcaacctaggcgcttagggtttcactcaatgcccaagttgacaacccaactagggtcgcagtttttgggactgtcatagcagaaatgggtcaaactttgctatgagacatgaactagacatactacgaatatatttgaggcatcagaatcatattcagagaaatttaatttttgagcaccagttgctcgagcactcactacccaggttgacaattcaagcatcaaactaaaaatccaactcgtatatctttttgtctttatcgaaaatggggaaataagtattttcagggaagaaatagaccaacatggaggccaaaacaagggaccaacgcccaggttgacacttcgcactagcctagcccccaagttgacattttgtcaacctaggtcaattttgaggattttttctaaaaagtctttctggtatattctccatttccatcaaagattaagattcaactatttctggggagcaaacagaacttccaagatgcttgaaactagaattagcacccaacgcccaagttgacacatgacactaggcctagagctgaggttgacatattgtcaacctgggctatttctaatcaattttctgaaaaagtgttttgggcattttttttgtcataaaaaacaacgaagatacaactaaacttggggagaaaacaataattacaggggcttcaaaaaattgagcccaacgtacaggttgacaatcaacctgatgtgctggtttcaatcactcaaatgcaaattctgctccaagcattctctccgaaatggtccaaaacggggtaggagaccttctccctaatttcaagaaccttggaattttcaaaatgacatcctagaagctccaaaaagagcacccaactccaaagttaacatatggcctagtgcattggattttgcttatccgattctgattccgtctcgatcattcgtctattttttcatagtaactaagagctataaagtaaaaagagtcaaattcaaaacttcatattttcactttttcggcaaagtgacttactcaaaaattgggtagttttgagtctcccattttcacaaaacagcaatacctccaaaaattggtgaccaacttcaccagaacacagattcaggaaaagtgatgtccaagtgtcacttaggcatcaaaaaatacatcctgacacgttttcctactcacccagcatccaggttgacgtcacatgtcagcctgggccttgggccaagaacaaccttcagtaaaatggtcataactcactcaatattaacccaattgacgcaattaaacatgctttttgaagttatgtcaatgctctattaagttatgtttcacaatcaaatcataattttgaagttactgactccaaattttaccctcaagagagttacaaatttaagccacaacttacccgaagcgggtcccgcagacgcaactcaagctttgaaaattgacgatcgacctctggagtcaatttcactgttagatcattatctacaatcaaaatagcctaaatgtattttttcatatttttttggataattttattattattactttaatatgacctcattccctataaaaggagagctccactagcttattttttaatttcagaaaagtacccataaggtcagagcatctctctctaatttttctctctagaaatttaagttgccagacttagccatttttctataatccatctcgtgagaataaaaactcgaagtagacataacaccattattatcacaatacaaggagataattactataaattgttatcgccaatctactgagatggagtggccaaaaatttgtgtctatattcttatgtcaatattttggtactttcattgagagccacaactcaagtaatcatttacaagatggttgcaaaatgctcctcaagtggtgaaagaagatccacgacaactggccagtagactgggggcaagtcagtcactaagctgatgatgggactacacctgcatcttagatgcccggtggagaccttagatctactccacaactcgtcaaccaagaccatcaactgctcctggtactgaaaccaatgaacaaactccacttggggaaccacgtgttgaactggaagactccaaggaggctgatcctcaggttgaacaacttagccaaattatgactgacttgcaacaacaactatgagattctcttgacaaacaacacatacagttttataactgttttgtgtagaattggtagaatattgagaatcaactagttgagtacgagcaatgaaaagctaacctgtctcaatgaattaggaaagcttatctctccgatcacaagattagtctccgtagaggtctttctgagctggctggagagactccttgtcgaccaactggccacatgggaataagtattcaaggggaaacccttaatgcacaaaaccctactaccacacatggtaacaatgcaagtactaagaaaacaataggtgttgagactccacagagggaagaaaactttgggcaagagtccaaaagaagtcaagctcaaacgagccaaccaatgggccctccacctgatgtagagcgaccacagactacagagagaaccaacagaactcctccatcaatttcttcttatttctctaatgacattaaacctcgcgaccctgcaaagggaaaaggacctgctactcacaccgaagggggaagtcaaagactctactttgaaatcaaatggtatgaaattggcgagtaaggactaacaaaccacttcatacttgaaagtacttctgagatgatagaggtgagttatgccgttactttgctcgtggccttgatggccaacaatatgaatacttccctcgagtatatggagaagacttaaacttgagcaaccaactcaattctcttcaaacttgtgatcctgctaaagactatttcgagggaagtagtcgctacaatgctccggatgatcaatctcacagcgaatcatcctgagacaacccagacctcactctagaaacatcactagtgttgccttcatgactgcgtggtcaggagacaaaaaccaattctaagttgactagagttcatgatcgacttgggagaccaaaagacctgcatgacatcctcactagaagattgctagtggaagcgagagcttctataggtgaccctgattgggcaatagaagttctgatcgggacgtaaaccaccacccatggtgttaatatgatagagtttgaaagtctagcagccttagtaaaagaaatcacgaccctgaagttgtcaaagtttgaactagacagagagcgacactcctcactctcagattgaatcaaagctctacgaatccctctaaagttcaagaatccttcctgacaccaatacacagggaaagaagactcgttgtctcacattcattactttgaagtgcagacccatctgtaaggactaggagatgacatccagtgcagaattttccctgccacactgacaagcttggctcaggagtggcaccgtaagcttccctagattaatcgattcatggaaagatctagtggatgtttttggcaatcaattcgctccttctcgatagcgccaaattgaacccaacaatttggtagacttaaattaataagaagatgaaccccttaaggactatgtttaacgattcttaaaggcagccgctaagaaaaaaatacttagcgaggatgcaagggttgtgaaacttgtagtcgggctcaaggagatcagtcctttgttgtttgaccttagtctcaagtcagtttacactatgaatgacttctttgatggagcaggtggctttatcaagtttgaagaagctatcactcgagctaaggctcgaaaaataaaaagaagaaatcaataggctccccaaaacctgacactggagtggagggtaatggggaaagagaggttcaaatagaggaaaaagagctaacaacagagggaaacaaggaaactcccctggcgaatagaaagccaaaactaaaggcaagcccatgcgagagtatgaacctcacttcaaaacctattatatactcttggccccaagagaagagatctatacgaccactcagtcaatggtgttgtaccacaaacctcttcctttcaaataattagggaagagggatatgaataaattttgtcactatcacaaaaattacggtcatgatacaaatgagtgtaatcaatagcgagatgagatagaattcctgatcagacagaagcatgctacttttgagtagtatgtacgacttggagctccaactgggggtaatgcacctctccagtgtgcgctagttttaggcaggctcaagatcatgattggaggccccaacttagctagaaactcaagaaaggacttaaaaagatatgcaagatccttacaacatgagccaaaagcaaaagtattggaagttgtagaacatcctttaaaatctcagcactacgagtgtgatccaataacatttggagactctcactcatatcatgtcaactaccctcacaacgatcccttagttgttgaggtgcaaatagccaacatgacggtggcaagagtgatgattgataatagagcaacctcagacatcttattcaagaaaaccctaatatagattggtttttcactaaaagatttagagccatgcaagcaactaatgtatggctttagcgaaacatgcataactccatgtggtaagatcaaactaccactaacagtcaacattgccccaaggaagaccaccatcatggccacgttcataatggaagatttgatgtcttcgtacaatgtgatgcttagacgactgactctgtatgaccttcgagctatctcgtcaatgtaacacttgtccgtcaaattcctaacggtggctggtaaagggactgcccgcgagtgttacaatgcctcattaactcttgccaataagacctcctccactgctttggcaccattaggaatgagaaaggctctcctacaaaagctagagagatgaccaagacctctagggttgaaaccatagagaagatgaagatgacacctaaagccacttgaaggtgcacccaagacggggatgacatcaaccctcattttggggaaattgactcgggagttggtccaactgtagaactcaaagaactttccctagacacgatgcacctgaccaaggttaacaagattggaacaaacctgatagaggctttgagtgagatgctgatggcttgcctcaagagaaatcaagacattctttcttggtcgtatgaggacatgattaggatcaatcctcaggtcacatgtcatgctcttaacatagacaaagaatactttaaactagtgcaacagaaacgcaggctccttgacagagaacggtctaatctctcaaggaagaagtttaaaggttatgagagaacaacttcattagggaagctttctacctggtttgggtatcaaaccctgttctggtgcctaagacgaatggtaagtggaggacttgtgtctaattcactaacgcaaacaaagcatgttgtgaagattgttttcctctacctcgaataaatcaattggtggatgctacaaccaaccatgaactcctcacattcatggatgcttattttgggtacaatcaaatcagcatgcacacaccagacaaagaacatactagtttctgaacagacatcgatctttattgctacaaagtaatggcctttggactcagaatgcaggtgctacatatcaaagactagcaactgtatgtttcatgacttaattggaaacaatatggaagtccatgttgttgacatgctggtcaaataaaaaagatctgaagaccacatcaaaggcttagaggaatgcttcaacatcttacgagaatatcaaatgaagcttaaccctttaagacgtgcttttggcatccaatcaagaaagatttttggattcatcatcaacttaagaagaattgaagcgaatctagaaaaaatcaaggcactgcatgacatgaagtcaccatcatgagtaaaagacttgcaaaggcttaccgagcaaattggtgcacttagcaaatttgtctccaagtccaccgacaagtgtgttcctttctttaatctacgaaaagaaagcaacaagaggttttaatggactgatgaatgtgagcaagccttccaagctctcaaacatcacgtagtcaaacctcctatcctatccaaaccgatagaaaagaattattcatctatttggctatcactggacatgcaaccagtactagtctagggcatgaggaaaaagggatacaccacttggtttactacattagcaagcatctcgttggggccaagtctaggtatcccccattgagaagctggcttattgcttagtattggcttcaagaaaaataaggccatacttccaagtttattcagttaaggtgttaacggactaatcactaagataagttttgatgaaaccagaagcattaggacatctactcaagtgggcagtagagctaagtcagtttgagatcacctatcaacctcgcacaataatcaaaggatagacattagtagacttcattactaatgcactggcctcaaagaagatgaccccatggtctgtgagaaccaagcccacacgcttgagactggagcttagggggcattgaaccttcctagaaactttatggggatgaatcctccaatgatcacagctctggtccagaactcatcttagtatcactttgatccgtacatctctaagaatgactttatgaataatatgttgatgagtgtttcatctgtacatctctaagaatgactttcgtatcacccatagaagtgccacatcatcactagtagattttaggataacatttatctcccgattccacatggaaactatatgttggcatgtcgacttgctcgacccacatgataggtaaataggatgacacgtgcttagcctgcaaagtgggtgaacaaaaacatcattttaaatctttaagttgtcctttcatatcctaatgcattgagtatccttatctcgagaatcacatccttgggtcgtgtgctaacggttgtactgctcaagagtattgattgtacttttagggggggggggtctaaatttgaaataattacaaagataccctttcaaaatctataaaaggttttatagaacccattcattatcttttaggcattttgaaacttgagaatatcatagtgaaattcaattctctttcaaatctttaagcatttgttgaagcttcaaaggattttcaagtgcacttctagtcgataattctccaatagtgaataagttcttgagcttttattcaatttctttttaatttatttcattttactttgaattgcttctgtaaatatttttgggaatatctaggtttcaaactaggttgttcttgatttctcgggattagaatttagattttgatacttactgaatatatgtgcacatactaaaattgtcaaattcccatgaattcccctacttttcttgagaaattcctttaaatatattttgtgcggtgcttcgtatgaattctatgttagtctcgtattcttgagcaccttcaaattagaattctcgtcattgggacaaaatttcttcactttgatcgtttaactattcaagttagagtattaaagatgttttcaatcttgtggccatgcctagttcttacctctctttccctcttttgtagatgaacctaaatgatttctgtagaggtaagaatcaagtagatgaaaatttgttacaaatacttcacgaggactagcccagactccatgcatcctcgttgtcatttagtgagggtttgttttccagcttcgatgagttggaagtgacaagcacaaatctaagccatccaaaccttccgtgcaacatcactaatacctacaccgtattagcggttaagtttatggacgattgatttgggaattgagtcgaggactcctgcaatattttcctgctttttggacgtataaggtgcgagcatgatgtggaggcttatttagtcattaacgttgcttattttccttcatccaggaatccaccaaaggagaagaaagtggcgtaaactaagcaaatttataggaaaatttcatttgaagacccctatcttgcccaactaatgtcgttagttcacgctctgtacgttgaggggtccaacgaggaagacggtatgcatgttggtgatgctaaagtgcaagaggttgaggaccagggtgagggccaccctaatcaagctaatgaggaggccgctgccccaaccattcctctcgatatgccttttgacggatataggggatacaataaggataagtagcccatgactgcgtatggataaattatggcggctagcttccattattctttaatcaaatttaaaaaagtgtgtctttttgtgcaccaggacccactcgaggaaaggtggatttcttcaccgtctgttctcatgtacaataggtttgtcaacttggataagaaaggcctttttggggaggacatggtggcttttctaccatttgagggcaaactcgctaatgatcctggtgaggggtcctgtgtgttgtgtggtctgcacgcttagaaaggtgctttatggccactctacctatactttcaaaggctggcaacttattataatattttcccgacttagttcatgccgaaggcaattaaatatttggcagcactgttcatgccttacacatagctgggatggggaaaaccttcacctcacgacacaaactagtttattgacttgatgttcagcctgggaaaaaattgctcgggctatttctatttctctcaagtcgactgctcgtggttggtcggcaccaatgacaagcgagtcaagaagatttagaattacatccaggagtactatatcttcaagaggataaatttcaaatatttaccattctagttggctaaaatttatgaaaaggcacctttaacccttgggttaagggacacgtcccaatctattttccaaattcctcgcgaagcatgcaatctttttcagttggccacttaggaaaattttatcaagtatggactgtacttgcttggagagattttagatgaggggtttaatgttgatgttcccattcctgcttccatgccgcccgcttctgaaccaaagaagaagaacaaatggagagccaataggacaaaggcctcagtcgaggtccttattcgaattggggaatttgttgaggatttttcctattctaccatgcaacctatagcaggaaagggcaaaactattattgaggaaatggagaaggactcattggacgatgatgtcccaccaattcttctttgagaaggggctcttctggccatccagggtaaaatccattgatattaattgtgttttatcttgctttcatataacaaccaagttttttgttttgtgcagctatgtctgacaagctaacatttgttttgaagaggaaagtaggtgggtcatctaggcaagggagtctggcaaagttacaaaagagagaaaataaggcctcaactaaacccttggtttttccaccttctctctcgacgtccagtgaggagattgtgattgctgatcttcctcgtcctacgttcactgcccaactataatagaagaaggacttgaaagacctacctcctactccaccagctactcaaaaggtcaaggagaagactctttttgtggtgtagagatgaagagagcagataaggttgttgggagttaccaagaccgtgtttgggctaaagggaatggggctttgaaggggttgaagggcttcccttagacacactggccgagtcctttttaagagagctggctaaggtatatcatattccctttatttactgtttgtggatagtgcacaattttttgatacttgtcattttctagacgcaattttaggctagatacatctattctcggaccaaagtcttaattggtcaactgctgctgataaggctgaactaaccaaagtgttggggtggtaaaaaaaggaagttgtcatggggaatgctaacaagctatttttaactcaaaaatgaaaattgaagagcttgagaatcagctgtttgatatgcccactattgaaatgttacaggaagacttggaagttgagtcaaaaagggctaatgacctcactgatgaaaggaatggcctccacacactcctccaaagtaaaattgagaaaatcaaagacctcgagcaaaaggttaaggatgtggaagatcgggcaaacattgttgaagctgctcttgaggaaaaagatgtcaaactaaattcatatataaaccttgccacaaaggttttttatgagttctgggcgactaattctaatgctgacttctcctatataatggagaatacccgaaatacgttgcttggaggatgaaaggagataaaggttgtgtgagaagctaaagcagctgaagaaaaacagtctgaacaaccagttgaaaggactgttggtgaactctctgagcaggtggatgtagaccccaatttctcagtgaatgatcaagataatgctttccctcctaaagatgtgaatctggccactcctatggagtcttcttctttttttttttttatatattttttatttttttattcaacctttgggccttaacttttagacatgactgatcatgcgatctttaatcctaattttatattataagaaaaatagctaaccggatatcttttaagcccaaacttattctgcttcttttccttaaaaataaatacttttgtcttttcaatttttttctaattttccatgttttacatgctttctaccaatgcttgtgcgggtgtaggtgcccccaagtgactaagtagatttttgactcttggtcacttgaaattaacaagtttcttatttgtctgttcggccattaagtctaggcagacctcattacatgcacgttaggtagttttgtaaataaaaatataaaattaacataatttgaacgataattaattgttttattcatttattggtcggtatgtgttgtcacttaaaagtaacttacatttactgaataaaaagatattagatgatctactcggatcttagctaattaaaacaaaaaaaaattgaatggtatattctgtccaaaagacattactgaagaataatttttaagatgaaatatgctttagaagtggtcattggaccttagcatcagccatttttctaaacctttgaacgaggtccactcagaaggccatcactcaagaataatgtttaaccattatgcaatcatgtaattaggggtgaaaatcggtcggttatggtcgatttttacaattttataattgaccggtcgcttacggtttttattttac

SEQ ID NO: 18617 - DNA, 5488 bp, Cannabis sativa
aaaagttatcactaaaagtaactattttttgtagtagatggagacttaccccagttctacaaacttcgttacttgcaccgtcgccggtgctctagtactatttcaaaaaataaaacttaattttattaaaaataatatatataaaataaatttatctatactatttaatacgcatacatgtatatatactaataaagaaagagtggtatatacgtatagagaaagagagagagagatattgaaagtagtaccaaccagagccgcagtggaggttggtgggtggtgctcgttggaggtgaagtaggtgctctgcaatggtgaccgctgcagaagcgagagggaagagagagaaaacaaagagaaggtgatgagagatagagagacacagagagagagagaatggggaagaaatgtgtctgagttctttttattaatgcaaaatatctttttcattaatgcgaaatatttgtgacgactttgtcgtccttaatagaatgcaagaccacccgagatactattactaggggtgactttgtagtgtattaggggatgacaaagtcgttcctaatgtataggagggaaaattttagcctaaatttaacagttaaatttcaaaaaaaaaaacaacgtaaaattattaggaacgatattgttgtccctgtagagttcatgtcgacactataatacaccatttaataaaaaaaaaaatattttatcaaggacgacatgtcagtgtcgtcactaatacccctaccttcagtgaaaatttcttgtcattcttgcatacctttagtgacaacttcttgtcatacctgatacccttacctttaatgacaacctcttgtcgtcgttgatattagcattcgcgatatccactcactacaagaaaaaaaaaaaagatatagctaggcacgaccaaattagtaccaaaaagctcaaactttcgtgcctagggagttattgacacaactcgtcgtgccccatttgtcgtgccaaatgatcggtgccctaaaatctaaatgggcgcgacatactgcgtcgtgctcttaagcttctctttaggcacaacagatgttcgcgctagaagcttcatatgtcctaacatacatatcaacaaaatataattggataaacacaaaccttttgataatttttaataaacaacaaacacatatattcatacattcacatttataaacggctcatcatatatatacatacatatattcacatttcttttttcttaattttaagttctccatctcaaggagaaaatgttttgttctataaccaagttcaagcatcatattgaaatttaatactcaaatgaaaataatcgaaatcaaggaacaatatttctaacaaaatccaaccaactttttacaagtaataactgaaatgaaaacaataaactcaaataatctatgtaatttttataaatcagacaaaaatatttaacttcacttcgacatacaaaacgaattgatctcattcaaaataaagaaattggcagcggagcgtcagttggagtaccaatccatttttgtatatcccaaaattcatgttttcaatttagaaatacaaacaagacccaatcccaaaagaaaacaagaaaaaaactttcatttaatcttgaaaaaaaaaaacttcactattatttatcaaaattccaataacatattaccatcacaatttatcattacagaaaaaaaaaaggcatactttatgattgaaacataacttgtaaaacaaatctcaaagccaatcttttagaataaaagattttgtccaaaaaaattgatatcaaacttttaaaaaaatattcaaggagattacttatttttatgcatacaaaattaatgaaaattaaacagtgtaaaaaaaatactacgaagaaaaaaaaaactcacagagatggatggtggcatatacaaaaatggattagtactctgactgacactccgctacgaaccgaaggaccctacgccctctactccacactgaacgaccctacaccctccactgcccaccgaacaaccctatagccacaacctgcaacccaaaacacggggccaaacaagaatgaaaatgaaaaggaaagagaaagaagacccaaatgagaagaaacataccaattcccagagaagaaaaagatcagcgttgtgagggcttgagagaggaagaatgccaatattttgagggtctgagaagaagaacgtctgagaagaagaaggctaaaagtgtttaagaggaaatggaaatgggttctctcgatttagttttttttaaaaaaaaaatggtgaaaaagctaggcctgtgacatttccatgcccaagcgtcgtgccctttaggtcaattggcacaccatgtcagggagtggggcccgaccatgtcgtgcccaactgttaattgcgggacaattcctacctgaatcaacgttcatctttaatatttagggcgcgacaatatcgtgcccattgaatatatgtcgcgctcagttgtctccaaaattaaaaaaaaaaaagaattggcacgacattcactacaaaaaatagcttcctttagtgacaactttttggttacaatataattttttttgtgtcgactaaatgttatttttagttacaaaaataagttaattgtgactaaaacatagtatttagacaagttgtcactaaattagttttagttgtgactaaaaacacatttagtcacaataaattatgatttttgtaactaatacctttagtcacaacatagcaatgctgatttataattagttacaaattttgttgtgactaaaagtaagattaatttttgtagtgattaggagtattggccccaaataatgctatgggcaccagactctgtcgtgccccagttggacgtacctatatcctattattgttgtagtgacttttctggtagtattcttctagctcaataagaatccaattaaataaaacatgaaacaagaacgattcatacatcattacactacaatagtaaagagcattgttaatggacatcagtagtgttggacattttctataggtggcgcctcacgattgattagtgatattccttgaaagttattttcttaagttttatgaaacccgatatttaattacaccaatagcggtatgacacagaagagagtgctaggcaccaatgctgcattttagagcatttacaatagtagcattaatctttaaaggtgttatatctccacatcctccaaatatataatatttatttattttttccatattatttttggcactcttacttctaaaaatactataatggtataacacattttaaaaatactataattataatctcaaacattattatatatataaatcattttttattaaattattattatatatatattccacttttaattttttatttaaaaaaaaaaacatagcatcaatgccattatgtggccaaatttcaaaaataacattcttttatctcgaattatataacatccttatattttatcacctaaacttttcatctcatcaagcattctctcaaatactatcattggagatacccttagtaattctggaacaataaaaggtctatagtaatgatcattattgttgctaattctctcgaagtcatcgccaaagttattagtgatgaacgagtcaatgctaatagtcgatgctgataattcattgttaatacattttaacaacaaccaaacagagagttctaacaatgacatatgtaattgctctaaatacctatgaattggtcactaatttcatattaatttacctcaaaatttttataatatgaaaagatatggtcaaaagttgcttcttatatatgaatattgcacattatatttatatatttacaacaaaaatttaaaattaatttaattgataccaaactatatatgaataattaatttttaaatttcattagaaactagtaaagtggtttctataagatttaagtatgttgttctaattaaagtacaaaatatataaattaaaaaaatttgatcatcactacgctctattagatcctgatcattaggtcctagacttgattctgattccaacagtctatcaagctcatgatctaccctctttgagtcaaaggcagctagtccctcattcgaatgaattgtgagagaggaaaatgaatttaagaaataaaaaatgtcgtcataaattgtttcgcatgatattgaatgtctttatcgacgacatttaatttttgttgtcatcgttaataatgtcattgatccagaagtattgatttttttgtaatgtacgttatgtacattcacctgattataaaaggggtagtttatgataaaatttaaacaaccttgtgttataataagggttatgacatcaaattatagatgtcacaaatatatagtatagtatgacgtcaaatatatttggtgttatatgcatactaaatattacaaaaagaacaaaactaaaactacttacaaaataaatttcaaacccagaataagaatatacaacaaatcaactactcatataaaacatcccctacgactgcaaggacgacatcgctcgaccttgcctaaaaactcatcaacgccccactgttatgctttcgagtatttaacaaagacagtaaaaattaagacagtaatttgctttttcttattgaagattttttttccatacacctgaaagaagaaaaatgaaattagggaacaaaatattgtcatattctttcgtgtgtatgaaatagtctttagcgatgtcttttttgttgtcatcgttaattaggtcataattaattactacatgagtatagtattatgcatcactcaatgatcttttatgataaattttcacataaaatttaaacaatctcattcgttataataaaagttataacattaaattatttatattacaaatataatataatgacaagcaatacttggcctcatatgcacactataaataaaacttcaacagtatatcatataataaacaaatgaaacaaaaaaaaaaaaaacaaactaacagaaaaatagaaaaatagagtaatacaataatgaatagttgagaatgtatggatttgagaaaaaaaaaaaaaaaaaacaatttcaaactatgtgtgtaaaaatatacccagaaaaatataatacaacaaatgattatatttagaaaacatggatcttatgatcgtaaagatgacattgctcgatctctattatcaccgtagttcaattgtaaaaaatgagacatgggaaaaaaagaagaaggtagtttgtctctaatttatttttattgagggatttttctcaaattggtcaatttagttagaatttgctagatcatcatataattatataatttgggtgactattccatggttatatttttattataaccatatggttacatttttctttgacctgtaatagcaagttactaatagctaaatattcattttttagaattaa

SEQ ID NO: 18618 - DNA, 4074 bp, Cannabis sativa
  modified_base (92)..(92): a, c, t, g, unknown or other
tgtaacaagaaaaaaaatttaattatttttttatcaattttttttatccattttaaattttattccattccattcctattctcattcccatncccattcctattcctatatttttaaattgaagaataattttcttaggtacggaaaacaaaaaatgctcatacttcaggttaatatcccacctaaaaagctccctctatatgtatattctttcttgatgtgatcattagttaatctgagtccctataatataagttaaatgattctgttctgtaatagaataaagcaattgttcttcttgacattacaataaatcacaatggcaaaagatgaattgatagtgcagaactcattcagagctaagctggcaaacccgaaaaggataaagggtctgctgctgaaattgaaaatgcaaccaatatctgggttggatgaatccaagtgatacctggtgggtgaatcagataccgaaattgtcactaatttctttatgcgcaacttagtttttagaggtttgctatctggcacctcgttgtccaacatctagagacgaggtatattgtgattggtacaattatgtattgagaatatgtgattcgatatttatttacaccaatagcggtattagggtgttgggcacactcttagcatttctctaacatttttcctttgataaggagaggaattaggaaatcaaccatctaactaggatattaactttactttagcaaatattatgttatgtgatgctctttttcgtaaaattcagtgtaatttgtagtttcctgtgctggtctcccatatgtgcatattctattttattatgcgcttgaggcttgaacaagtacacaaatgaatttgcaggtatttggcgagaaagctttcgagaaatatggaaagggcttcatctcaatgcatttttcagatcaacacttaggcacaaccaagaagatgctgctgttcaagtttgccctcccaaaagttgaagacatgggtgatatgactaatctggtggctttggtaacctattatatcgatctgatcggaagatacaagcttagctcacaggtgggttggttttacattcttatcttatgtgcatacatacacaaaactgataatttatttagctatgtttgttttaacaaaatatactcattttgttcaatctcaggctcggtctaaaaccgatgcaataagagcaaaaatagctcaagaggagtacaaagaacatcagaatgctaggcaagaagcattgcagagaaagaaagccgagaggagaaaactaatggaagaagccgaggccaaactcagcgcagaagccattagaaagaaagaagcaaaacgtcaggcgaagaagtccatgcctagagttaagatgacccgcggtcactaggagttactcatgagttagttactgagatgtcaaaatggaactttgattaatttgtgttagttatttctttttaattttctggtattgttatagttttggatcataatttttttggtcacatctcatcacggccttttgtactttatgttgcactactttatttagtagtttctaacttatgaagtaccaaaatcaaaatgcctgcttttcttttttctttatttaatccataaattataaataagaggagctcttttattttcaattagtttttagtcttttttcatggccctttctggttatgtatttatttccatttttatgtaaattaatagggaactttactctaatatactactaacaactttgttaaggaaattatatggaaaaaaactaaactttctaagaatagaatagtaatgatataagaaagttctagtatcatatgggttaaattatctcaaaaaaaagacaaaaataataaataaatgaaacgccgtctgtgggaatcgaacccacgaccacatggttaaaagccatgcgctctaccagctgagctaagacggcaatgaatttttcaattaaaatttcactatctaacacagttccttatcgagccattgggcctagttttaatcagcccatttggcactaaataaaggcccagcccaataatttaaagaagcccaaacccattcatggactgcttcttctttctttgttcattttggtcgagtgagtgagccgagcgagttgaactcagccaccatggctgtccagacaacgcttccacacagcttcattcccactcgaaccttcgtcaacgccagagtcaaatgggtacgagacccatacctagatttcgcagtagaaagagaaaagaatctcaaacaagcaatatcattcaaggatcaaatcatctcagacccatcaaaatcactccctctctcactagcttcacttctcaaacctcgtctcgatctcaatatcacttcatccaaattcttcaaaaaatacccatctttcttctccatcttccaaccaagtccaggtcttcctccacgtgtcaaactcacaagacaagctctctcaatccacactgaagagttctccattcacacctcccaaactcatcgatacgacgccgtacaacgtctcacaaggcttctcatgctcaccaaatcatcaagattacccatttacgtgatcgagaagctaaaatgggatatgggtcttcctcacaatttcatatcttcgctcgtaatcgattttcccgattactttcaggtttgcgaaattgaaaaccctaatggtggtaaagatctcgccttggagttaatttcatggagaaaagatcttgctttatctgaattagagaaaagagcattaaacgaaggtaaatcaactaagcacattgggtttccgatgtttctcccaagagggtttgatttggtgaagaagattaatgattgggtcgaaaaatggcagcttttgccttacatttctccatacgaaaatgggtttcatctatctccgaacagtgatcaagctgagaaatggactgttgctgttcttcatgaattgttatggcttctggtttcaaaaaagactgatagagataacttgttttggttaggagagtatttgggatttgggtctttgatgattaagaaagctttggttcatcaccctggtattttttacctttcgaataagattagaacacagactgtggttcttagagaggcttatagaaaggatttcttgcttgaaaaacaccctttaatggggattagatatcgttacatacatctcttgaataaggttcctaatcctaagattatgcataaaccggctattgctttgggctcaacaagacactgaatttgaagtgagtttaatcatggtggttgtgcttgaataatgtgcatgcatatttgctttaatgctcatatttggtctttgcaatgtacaatatattatatatatttggaccagaccaatagatttgtatgctgaaaccattatacctctcatttgagtacttatttaactgttacaacttgttgagttgggtatcaatggcttatcaaacgtaggcattggtcagctttgtggacttctatccaccaagtttccattccaggccaaactagtgaacttctacaaacacgaggtatcatattctccatcttatcttctcatgggataaggcattttgagaagtcgaaattgggctgccaaaagtctaatactttgtatgttcctctttcctgatctagttctttgtcaccattattaaccacatttaccatttttaaaattggattatacagaacttccctttattgaaatatagcttggccacatttactatcaacatttttccactttagttttttgtcattttctgtattgcttgagtaataatgacttcaccactatcatatgcttgtaaagctttaaatcccatgttcaaattatgctcctacatcatcaatgagatttatactctaaaacaatgaattgaaactatagttgttgtgatttcaattgtagcaggggaagaggtgtgaagatggtctgaagcatcatcagaagtgctcccaaattcccaacttgaagagctatctacctgtcagattaggcatgtcatgactcatgattagaaacattag

SEQ ID NO: 18619 - DNA, 3598 bp, Cannabis sativa
aaaagaacactacatctgaaaatgttataaagataaagaaattaatataaggagagaaagtgttctctcttggtcactgaatggagctggtgggtgtgggggccattacccatccaacagcacaaaaaagcttcaattccttttcgaataaaagaggataaaccttttttttttaataaagaagaaatttaaaaaacaaaaatgaggtaatagctaagggtattattattattatagacagagatatttatataaaagaaccaatatatttacatattcacacatcgatcgtgctggccactaacaactatataagactaccacaccttttttatgagagattccccaaacacaccatctcaaaactcagtctcagtggccgtcctaagattctagataatgacccctttatttatttttgtaacttattaattagaatattagtttgcacgtagctattagctaattaattaattaataaattaaatatatattataagttatatgataaaataagctgctgctgatatcagctttacttaacacaccaaaatataccaaacctcatttggaccccattttgtataagtaatatacataataaagtcaaggaaactacacaagttaattataagtgtatggtttcaaaattgtaaagaaccaacaaaacaaaacataaataaacataatcatgacaatgactatttggctatcgatcttctcttttgtctagtttattatatatgttcaatagtgttaatttggaatcatctaatatataaattgaaaattgaaaaatatatttaacataaaaagacaaagaattaatgtatacataaatctaaagatatgtggatgatcaaaacccattacctatttatattttgtcgttcaataaatttagagagaaaaaaaaaaacatcacaaatttcacaatataaattataataaggactatcatgaagattaattaaatttccttcatttttcgatccaaattaaacaacaattaatattctcttctaaaactcgatcgatccactttttttttctttttcaccataattctttaaaacacaatcatatcacaaactccctaacgctcccatgcacgtgcttaaaataaaaaacatactacacgtgtgaatcactctcatcaagcatgagagataataataattaattaattaaattaacttaattatgcttaagtcaattaattaataatatcaccatcatcatcatcacggcttccaagcacttgtccaaaccaccggctgatccttccacgtcaggaatattccggcaccggcatcggaacattgcgtcattgcccaaccctccttatacctcctcaacaaggccctaacatcatccaaaacctcgtcgctaaacgcggccgggctaaacccggcgccatgcaagcgtcgggaccacctaacagcagtttccctacgctcgactgagtcggaaggagaacaagcgatcaagtcaacgacggcgcgtccggcggcgcgttcaagcatcagcctctcgttactagttctaggaaagctctcatccaaagcctcaaagtaaaccctaaaccatctcacacattcctgaaaacctctaacgaactcgatcccatcgtgtccgacgtcgagctcggcttcttcctcaaccaccgtaaccaccctaggcctcaggcttcggaaagcagccgccaggtagtcacgtcggttctcgacggcggcgacggaatgcagagtgttgacgcagttgacggccaaggcttcgtcgtctctaacgtcaagctcagccaaattaagctcggaaaggtcaccaaaatggtgaacgacgttaaatttaaacggaactcccatcagcctagcgaacttctccattctcgttccaatctctttcataaccttctgtacggaaccaccgtcggttccgcaattcctggcggaaacaacggtggttaaacgaaggtgtggagtgtcgtccgtacgagtagccaaggcttctagaagagtcggccactgagtgcaaaaagtgttgcttatatcaatgatgtgaagcttaggttcaccttcgaaggcttccatgattgcaccgttagacgccacgtgtccgaaggtggtccaagggctaacttcctggaatttcaaaaccatcttccttgttgactcgaaagaacacgtcttatctgaggctgagagtaaagtccggtagcaacggtttccagagtcgttgactcggctaaaaagggcttggagaaagtaagccgcgagcttctgatcagcatcgccgtaaggtgagctgagctcgttgagcatccataatagctgttgtactctagagctgttcttgtcagccacggctcgagccgtctcgaggagaatctcaggggcccacttgtttcctgatgagaatatatcaaggttagtgataagatcaccgagtggtgagaaagagaaatcagtagttgtggatgtgctggcgttggttgccgttgtggtagttggagttggagttagggctactggggttggagttggagtagtacttgtagaaggatgaggatggttataagggtaatagtgtctagaagaagaagaggagaaatcttcttcatccatgaaaaagttgaagcattcttcttcttggtaatatggtttattattattattactaatattattattatttgttgaagaagatcttgctgagctacttgaagttcggcttgagttaaaggattgttgatcagattgaagactcactaatctgaataaggtatccatttaagacaagacacaccaataccattcgacccacatcaaaataatacaaataattttctctctttctttttttctttttcttttgagagtagttttcgactcctctccactactctactcgattatttggtgtgtgttgaggggtaggaaggtttgaaataatacatatatgggggtgtttatatatatatatataactgtgtgattaggaataatagaagaattcaattacttggaaaagaaagagagagaatggggatctttgagttggattttagcaaaagttaactaaaaaagaaaaaagaaaaatattaagaggtagggaatgaggaagagggggggtgtgggaatctatatactataaagcttagtaacatatatgctttatttcttttttggtgtaatcgatgatgaattatgtggggagcggggagcttttaatataatatataaaatagataaatgtatagcctatatagtttggtttgaatgagaggactagatagatagagactgagtggcagatcttaataataagattataagaccaagaagattgtatcttaaatatgaatattaaattgtattaaaatatgctttgagagaaaagaaagagagagtgattgaaagaatgtgaaggaaggaaggctaggtgggattgatggggttggtttagaaatagatctattctcttcttcttcttagtgtctgacaaaaagttaaggaaaaagttaaacaaaggtcgagatcaccaaatgggttagtggattagcttttcattcttataagcagagagagagagagagaga

SEQ ID NO: 18620 - DNA, 4766 bp, Cannabis sativa
tctagggtctttccggccatcatacaactctatctgtggcattttgaagttttagggtagtggaacttcgatgatctgtctaacgcacggctctgtatcttcgtcttccgagtctaaaagggccccaccttgtttttggaaccaacttggtaagagcagcaatctgttcttccagtcttttggtttcactgtccggaagatcgcatccgcgaaccttatcgttcaaatgattcctcgggtcgttccctcgtggtctcaccttttttcttttggctttttcatatttggcatgaaaatgcctctggaggtctacagtagaccaactgtcttcggggaaaatttcctccaccccatcgtcctggttaatggaatcactagggcggttttccttcccttaggctagtactttcatataggccttttgtgtggcgcaaccttgccttgtggagcataagggcatccaagcccggaggcgttggtggctttctacgtctgtaagagctggttggttgtgttcacttttttctaggaggcaacatgtaacgtctccatttcaagctttcattgggcctttccctatagatttatagctcttatacacgagtacattactctgttgctatttggactgacgactggccctgtaaaccaacaagagtatttctatagcgtgcttttgtcctcactcgtacgttttttggaaacttcttaggaggtcacacattctaaaaactcatcctgaaattagcctaggtcaagcaagatccaatctaattagaatccaatttttaatattcaatttatctaattaaatatctaattttttttgtaatttaattagattagatcgatttaatttaattgaattgaactagatattgcccgttccaattctaaatacaaataaattcatgattgttacttgaaatttgctagtgggttgagataagatgggtccgagtgtagatgatgacagatgtgacatgtcattgatagaaagaaaaacatgagtaatattttcatgtgctttggacataaagatataaataaatgagactggaaatttgggtccacatgattttattctaaatccttaaaatatcttctggagaatgtatatgtgtgattgtgtggtaattattggattgggagatagacacaacgtacttaaattttaaaataaatagaatttattcacataaattattattagtcatatgtctctcaaacttttcttatttggcagtttgtttgttaatgcttacttacatcaacatagtgtgccaagtcatattatcatcaaaatattaataaattcaaatagctttgtttaaaaatatcaagcagtttgtttgtggctaataataggacataaattatatttattcagtcattaagtgtgattataagtatattttaatgatttcacattttttctggcaaagaaaaatctcaagttcgaccatgcttcccccaatatcaaaacaagtgtgaatgttatattattaacttttgtagttgtttcattatgaattctaattcttatttatattttataatgtaatataacaataagaattaagtaactaaagtaactttaaactaactagttattgctatttgaatttatttttcttttttaaacaaagctatttgaatttattaatattttgaattaacaaaaatttttttacactatatcaaaattatgcttatataaaaaaaaattaaattactcacttatattataaatatatgagaaattaatgataattaataaatcataaaattatattaaattttcaaagttttaataactattctactaattgttttcgcattaataaaacaattttaatattgcaaagtgttaatttaatattgccataaaaaaaaataaaggattaagtgtataaaaataaaaacataaaaaaaatttgccgccaactattcaaaaatactatttaatatagcatgcttagagtttttcttttgatgttatctttttaaaatattagcggcaaaactacttaattttttggtttgtatcacttagccctataaactaattttttgacgataaaacttacttaacctccattctatttttctatatttacacttttgttggaacgctgctgttaaatgccaatgtgtattgctaatgtatacacaaatatacacatggcatgcaggaccaaccctgagtaataattttgtgtgtgtgttatatctaaagtaaagtaagtattattgggtctctttttacaaaatttataaataccatttttttttcaatgcaaaaaagtatactatataaaaattttaggccatggatttaggtgggccctaggcacagacctaagcaggcttagcccttgatccacatgttaatatttagaaaataaactatagaggcacttagcttcatcacctactcttgccacttgcattttaatatttagaaaataaattacagaggcacttagtgtcatcacttactcttgccacttgcattttaatatttagaaaataaattatagaggcacttagcgtcatcacttacccttgccacttgcatcatctgatcgtatttggataggtgggtcctagggtctatccagccatcatacaactctatctatggtattttaaatttttcggatagtgtggctataatgatccgttttttgcatggctttggatatgtttgtcttccgagtctgaaaggcccccaccttgtttttggaccaacttggtaagagcagtaatatgctcttccagtcttttggtgtcactgtccggaagatcgcatctacgaaccttatcgttcagatgattcctcaggcagttccctcagggtctcaccttttctcctttgactttttcatatttggcatcaagacacctctagaggtctatagtagaccaactgtctttggggaaaattcctccatcccatcgtcatggttaatggaatcacgagggcgatttttccttcccttaggctttgatactttcgtactaggccttttgtgcgcaactttgccttgtggagcagaagggcatccaagcccgaaggtgttggtggtcttctgtgtttgtaagggctggttagtcgtgttcacatttttcttaggaggcaaagtgtatattcctgcttcaagtttttattgggctttccctcatagatttatggattttatatacgagtatgtcactctggctgttttttgaactgataactgcccctgttttcagcgtgttttgtccttactcgtatattttttcaggaggtcactctggctgaaattgctacaggtcaagtttcatccaattagaaactaacttttatcatttaatttaatttaattgtaattaaatattaaattttttataattaaattagattggattgattcagtttaactaaattagaaaattaaattggattaaattggatgttgtgcactgtcactccaaatacaaataaattcatggttgttacttgaaattcgctagtgggttgagataagatgggtatgtgtagatgatgacacatgtgacatatcattgatagaagggaaaacatgagtaataactgtaatatcttcatgtgctttggacataaagatatagacaataaattgaactggaaatttgggtccacatgattttatgctaaaatccttaaaatatcttctggagaatgtatatgtggtaattattgggttgggagatagagacaacgtacttaaattttaaaatagatagaatttattcacataaattaaattattattagtgcatatgtctcccagaaaaaatatacacgtttttttaaaaaaaaaatatgtctctcaaagttttcttatttggcagtttatttgttgatgcttacttacatcaacatagtgtgccaagtcacattatcatccacaaaaatatcaagcacttgaaagtaaaaatattataataggacaaaatttctatttattcagttattaagtgtggatgttatatgttatatgtggttataagtatattctaatggttccatattttctctcacaaagaaattttaagctaacaaaaaaacaattttacactgtatttattatataaaaaatatttaaattaaactcacttatattataaatatatgagaaatttaaaaaaaaaaattcattggcatgtaattatattttatttaatgattatttataaatcatataaaattatattaaattttcaaaattttagtaactattctactaattattttcgtattaattaataaaaatattttaatactgtaaagtgttaatttttctaattattttatatttaataatatcaacttttgattaattttttattataaatatatattattagttttcaaaatatacattaaaattaaaaaaaaaaacatatatataataattgataaatttacataaggaaatatattcatttactaccatattttttcacgaaaaacatatttagtatcttatgttttcaataatatttatttggtactttatattttgaaattatacatattttgtaccctaaagtaaaatataataaatataatttcattgatttgaccaaacaattttttgttatatgtaattaaataattaaatttaaatttagaatttataaaattgaagatagtttgattgtattgataagatttttcaaccacttgaggctagctcaagtggccataggtgggtgtgtgagtgttggaggtc

SEQ ID NO: 18621 - DNA, 2397 bp, Cannabis sativa
gattggattggatccaaaaaatgaaatccgcacttagtgcggatcagatgcactatgagcaaaatagtacaaattagattagatgaacacccctatatctaactgctttgcaacaaacctattatacaaattccttatgtactagcactgaaaaggtaatcaattgttgttgtaactttgatttttggctcttggcatacttaaatttcttgagcaagtaataaaaaatgtagtctatgtgctaagataagaacaataaaatatgggaagctaaaataaacagctgtaaaacatcacattaaaacagatctatattttgaaataaaaataactacaaaacaacggtaagaaaatttacagtcaacgttgggaagctgttagggtaactaattaagattgtggaaccacatcttgctgttaactttctcaacaccacaacaaataatggtggagatattttctccttacccttgcaatctacattagttgtagtgctggaaaataaaattatattatacaaaaataaacccgactagaagaaaatgaaatataataataaacaatagaagcacttacattgatttttgttttcttagacctttagctagccaaagtcaaacttagacaccaattagagatcaacaggttcactcattttatcgtccaacaggcacaagccagcaacatatttgaccattttaaactgggacgcatcagttgaaatagatgttgaacctgatgtggaatcaccagaagtaagccccataaatggagacttcaaaattggtcttttctttcgatccctctttgaaggatgtaatataggagtctcttgaattacaactatttcaagattatttttttggcacacattctcagtggcagaaccaccaacactgggttagaggataccatctatttaaaaatgaaataaattatatttaaaaaatcatggcaaaacaacactaaaacaaatcaaagacaacaaaatagaaaaacaaaagtgaaaaaactacaaaacaaccacgtaaagataaatagactacaaaacaacaataaaaattgataaccaaataaaaatacaatactcattaagatctacaagaatgcctaaatcatcagtcatttcaacatgattattggtgccttctttagaagtagatgcatcttatgcacattcatcatcctttgcacctacttcaacaacaacactcccctcctcatttttcacatttttagcactagactcaccctgcccacgaccatctccaacatcatcatcctcctcctcatcatcttgactatcgtccccataatcctcatcaacatcattattttttcccatcatcatcctcagcctcatcatcttcctcagaactagcttcttcatcaccaatatcttctttattatagacatcaacatccacatcctcatcattttttaaagtgtggagcacatcatcagattgggtcccaagttgtgtaaaagcaacatgcgagcactaaaataaaataattaaaatttcaattaaaacctaagcaatatcttaaaaaaaaactacaaagaaactacacaaaaaaaaaaacaaaaaaaaaagttacctcaataagaatgtccattttttgctcaatacagccacattagacataagaatctactgctggctaataaccaaggatacatcttttctcaaatcctcgtactcaatacaagtgacatgctcatgcgcctttgatgatgatggagcaacatattcaacttctaaaagagacttgaggacactctcagaatcgcgatcacaagtccatttatctttgaacttgataaaggagggagtcgtgtcacccaagaaataatcaaccaagttcaaacttaatctctccaaatgttttttagttgtaactgcaataaataaaataaaataaaaacaaagggttgaaactgaataaactaaaaatacaaacaaataactaaataacatctgcaacaataacactaaaacaataataaaacaaaagtaagacaacacacaaatacctctttcaatggccgattaaatatgatgttgttgacgttatctattttcaactgcgatactttcagctttgccattttaggccagtcaagaagcctcagaatgacaatatttgaatacctcaaaagttttccaacaacatatggataacactaaaacaaatcaaatttacaatgcaagcagaaaacccaaaaacctataaaaacccaccatcattttccttcttcttaacctttataatacctgtatctatcttacccttaaacgattcaattataatctcaaaacactccttaccccacccatactcattgtaacaacccctatccaccatgtcaagctctgttggaaattattttac

SEQ ID NO: 18622 - DNA, 3692 bp, Cannabis sativa
agagagagagagagagaaagatgcttttcttgaattttcttaacttttaaaaataaaaatcaatgaactaggttttattactttaaaaacaacttaatgttcagattatataaacttaatctaaacccacaaaaagacaaatcataaattagaaaaataaccattgtaccctttccacactaaaaatcataaaagatcacttaggggtattttggtcacttctagatttttgactattcccgacatttccaatgtctagctatattaccccgctatactaaaaatactaggatgtgattctaatagccaaacatcgtgttccaatattgtcggacacaaaacatgcaaaataatatgaaatcccatataagacatataaaatacattctaaattcaaataactcttcataaattaataattcaaaactaataagcaagtttcataattaaaccctaattatctgctaatttttaaattaaagttaagcggtctttacactatctatgtaagcatgccacgtcatgaggataaaaattaggataacacttagaattacacatgtcctccatctagaatcacgaataacatgtattgattttattacttttatctacctttttatatacccgctatcaatctctcaagttgaattagcactagttattatgtggagaattcgatacaggaaaaataaaatggtgcataataattttttgatgtctcctgagttggtggttaactgggctcgtgattttatgagtgattacgaaaagtctcttttgaagtcaaaggatcttaattgcttgagaaattcaaggtagatcgaatcttcttcctcttctatccttttgtcttgatgggtacttcctatggttggtttcttcaaggttaacattgatgcagcattagatgtggtgggaggttgttgtggtatatatatgttgttgtggtatatatatgtttatctgagatattcatggggttgtctatgcctcaactatttagcacatggttggttttttcaggcttaagttgttggataatgttcaatttgagactatcttaatgtggttaataagttcaacaataatgtttctttggactcgtcttctttaagcttagtttatctagacattcattataatttggatctactaaagtttgatggtctagttatcttaattgtcctctcttttaacatcaatacatctctcttgtttataagtgctttaattagtagttgttttgttgtttttggtttatgtggctttctgtgtgtaatgcgtgtacattttttttttttgttcttatttgttatttccctccttttcatcatggacccaatcccctcaaaataaaactatactttttggtcctctctaattttgggttatcccataaatatataatttgagaagacaacacgcacgtaaacccaaatgagggaataggtagcacataacaaaatatagcaaacgtggaagccttaaagtgaattgtggaaataaatgaaacaaaaaaaatagagaagaaaaatctcaccctatcattcctcctcaaaatacgatctcttgctagtctatttccctcttctcatgcctcttaccccaaataacaaggatctcatatcatttttctactcccattaattattcccatcatctttgccttgcccccacccccacccccaccccattttcttccatctcctcaattttcaaaggacattttcttctttggaggcaaaatggtatgttgttctaatgaagttaattttactcattttcataagatacgacatttgattgtcaaagcgacaatgagttgttttgttttatatttatttatatatttatttatgttatgattgttaattatgatggcattggggacaggccaatgcggcatcgggaatggcggtgagcgatgagtgcaagttaaggtttttggagttaaaagcgaagagaacttaccgttttattgtgtttaagattgaacaacaacaagtggtgatagacaaacttggtggacccaatgagagctacgatgatttcaatgctagttttcctgcaaacgagtgccgttacgccgtctacgactttgatttcatcactcatgagaattgccagaagagcaagattttcttcatagcttggtatatattctcatgaccaataattaatttacactttttattacaactacacgaaaatcactatacgaaactatactggggtgattaatgaaaaatgatcatgtgataataaataaaaaggcacatatatggtaatttatcataatatatgattgatgatcttggttgatgtaggtcaccggatgcatcacaggtgagaatgaaaatggtttatgcaagttcgaaagatagattcaagagagaattggatgggattcaatttgagttgcaagcaacagatcctagtgaaatgagcttggacattgttaagagccgagccttctaaacaaacaaacattaattaattaattaaatttaagtacccctattttttttattacttcattcattcattcactgttaccatctttcttaccttgttctttccttttcattttttcttttgtcgtttcattcaaaacgaaacccttgtataagaaagatgtaatgtcgtttcttgagaaactttgattaagagttcttagaacatatgatttattgggctggtaaaaagctagagcaatatttattataataataacaagagtaataaacattgctcgtatttaatagctagtactagtagaatggcttcgaggctctaggttactttacttgcttttcgagcatagactgttatgaatagcatagtaatctattcttttgtctgtatcaaatgcttaatcagcttaattcaatatccagtgctattattatacattcttaaataattcttaatttttattttacctaataaagttattgtattgtatgtactcctgagtccagagtccagacttgttttagtcccacatcgacagctgagagagattactgtaaaagttatgagtataaatagggctatgtcaagatttttaaaacatgatccttcaggcagaaacaggatatgatgagtggtctttactcttttgtgagaggggtgtccgccccaaagcctgttacgacagtgggcactctcaattgaaccatctgatccctatttttaaaacagttttagctttttataagtaaatgtaagattttctttttctatattttgatagaaaaaaaaaaattagttttttattattttgcttatcataagttattttatttttaacattaaaaattatttgaaccaattattgaaattaggggtatttttatctttacgcttttttttcttttgcatttttacgaaattttacataaaatttgcaactagtataacttaactcgcaataaaaaaaaaaaaaaaagattaaaaaaacagtatatgggtaattctccttgaaattatcaattaatttaatatttaaaattgatagatagttcacaccttttctttgggtataacccttagcgaccagtctagttttaaaaatttcgacttcgcctccaacacttcttttttttcttgtagatccacttacatccaattggacgatagtcatcaagtgcgtctacatattcccatactttgttctttttcatgga

SEQ ID NO: 18623 - DNA, 6288 bp, Cannabis sativa
caattattcataattatctaattaggattttactaatccatttttcaattctagggtattacacgaagagctcttgagacatgtgtaacaagagctttaaactatctttccaatgcacttgtaattatctcgttaatcgaagttgtattgagtgagatatgaacaatttactgcatatagtttggtagcctacgacaaggttgacattcctgcaattgagaagttgtctgatgtcaacctagacgctagctacttgggaaatcatgtcgaaatcatatttttcaaagtctatgtgatattatcacatcacatacctagtttcttgatatcgatgaagttgttcactagttctcggagattatgctcgtttgtgtattgggtgtcgatttgcgactagtttgccgatattcaatcttgtcgtaatgtgaaatacaaagtatgaatttgacttaccacaagttttacatcttattcgtgatggaaaactagctcgatgcctaagacaaaactaaaatttgacaagcagaaccatgtgcaccaggttgagtgtcaacctaggggctaggagctgttctcaggccctttgggtgccattttgatacttcaatcatattttcgtctaaaaacaagggctcctccttagtttgcaacaaaaatacgaagaatgcctaaaaaatggcatttgagtaatgaaaacacatgcacaaggttgaatgtcaacttgagcactaactactgtttttggccactagatcgtcttgtttgctatttcaaagcacttgtatattcgttcttgataaaaaacagacaaactcccagaatatttctttggaaaactcatcgaaagcaccctaacatgtcaacctgggtagctgaagttggggcttgtcaacttgggcccatgggtccaggttcaaagtgttttgatctcatatttttgatggttttacttctttctagtggaaactagtcatgtaaattcagtttcgtcaaattcttatgagcgttactcaggaaaattgagcttgtgacttggtgcccgagtgacacaccatgtcaacctgggcgctgttctcatgattttcacctcctgggcacggtttgtaaaacctcaagtcatagcttcattccttgtttgatttgaggaataaaggtccaaagaatttccccaaaatataaacccaacagttgtgatacgtccaagttaactaaaaatgtcaacttgggcaccaggtgcttgagcactccagattggaaacattccaatgttggtttctaggcttgtagctttcctgtggtatgtcactcatgtgttttagtgcaatgaatgagaaattttcatggagataatgacttcggggactgaaacttatgcattctaggaaacaaaattgttaacttcgacgctaggtaaggcctttggcaccatgtagacttccaagatgttgagttgacatcctcatctttgaggtcaatgacttagattattattttcttgttatcttacactattgaaagacgatacattgaaacgattcgtgggatccaaatacctacccagatgtccctttatatcaatctggggactaggctagggctcagctctctagtcgaatgccctatcttgaacttggggattttttttcttcttaccacatacaaaaaatgatgtccacatcataagggtaatttctgggtaaacattttcccccaagtcagtttcgcgctcgtgcaatgttgactgcatggcgcaaactctacccgttttatgcgaaactatcaattgctcatcatttttagacattcagcaattatcttagcctggttttcctagctcaatgtgccttcaattagttatagatgttgtcatccttccctcctaggttgcacccatggaggtctttagcatcccctcagctgtcttcacaatggaggaggtcttattcatctccctggccttgctcacatcggaggaggtcttcttcctctcttcgactgtgttcgcagtggaagaggtcttttctgtctctaggctattttcacaactaaggaggcctttttccgtctcctaggctattttcacagtggagggagccttcttcatctcctaagttattttcataacaaaggaggtcttcttcatctcctttgctattttttaacattgaaggaggccttctttgtatcctcagctcttttcacaatggatgaggccttctttgtctgctcaattgttttcacaacgaaggagatcttcttggcatcttccaatgacgtgttgtagcagttataggctgctcttcagtcgatcgaggatgcaaccaatgcctgctactgttgggaacttgacaggtaggtttaatattgataagttggctcagaggttgccttagcctagttactcttgcccccaacattagtctcttagtaactagggtgagaagctttgatgtttgtttattgaagctatctgctagcaacaagatagaccacaattgaggtgcagtgagttattacttgtggatttggcaatcaaacatagatccaatttattagcataagtgttattactactagccagatttagaataaaagtgaaatcaaaggttgttgaagaacattgcttgaagatttcaactcatagaacctcattagaggcttataaagaaaaactccaagagaggaaataaaaaaaataagattggactaaacacgtgctaagtacaacatcctatactgagaagaagtttagcaaccaaaggaagaccactactagggtagcatttccctcccacagggtttcttacaagcaatgagaaaatctctactgtatgcaacatcatgctttcagagagttttttatgattgatgatgcctttcatttctttctttttttttttttttgtgctccgtggaggagcacttgcaataacactttagttttataaacttggccactattacgcgatcaaactcaagtgtttatattttaaatcataaaagtactagctcaagtgtgcaaacaatttgtacgtgtagttgaacaacttaatgaactcaccaacactcacactagagctttaggtttgagaaactcggttactatattcatgggtaacatctacattttattagaccatcgaagtactaactcacttatggaaaaagttttaaatatgcatgttgactatggtgtgtgccccaagtaattaaagaagtacattctttggtcacttgccttaccaaattttctagtttctttcttgatcatgagccttggctgtgatttgtcatagtttgagcattcgtatcgcttatctagagattgatagcttggcaatgtatactcactaaaaaataactgaagttacttaaagatcacatcttggctggtctgtgagctataattgattaataacaatgaagaaccaataagctcgagtgattttatacattagaaattaaatgtaattacatagggtgagtttgcttttcttacctctatctactttgactaaaaaagatatggcaatagcagatctaaaactgttttaacgaaactaagtttccacccactacattgatgctcggttcaactaaagagtaggggtcgtcacataatgatcagaacctcttggctaaaagagagagatgcaaagcatcttttcaattctagagatgatccatttgttcaaagtaaagtgaactagtgctgaagagaaatgtgcttttattggtaatatgtcacagatgctccccattcaagtaccttggtactggtactagattcaaatggtggtcatagcatgccaacttgtatgttctaaggttcaacacttctatgatgacatagggtccgtccctctctcattggaagtcttcaatgtcgttcccttggtcaatatcctcatgagacttataggacacatcttcatcagcgctcccatattcttggtctttgttggaaacaaatggataagtttcgtcactaccctctatcttgatttgtctttggaagtaggggagattcttcatcaatgtcctcctgctcgatctcatcttgagaaatggaaggggattcaccatcattgtctccctactcaaggtcatcttcgaaaacaaaaggggaaccaatttcagtggaggcattcaaccttgattcttcttcaccttcttcatcaatgtgcatttgggacttaacaagtggataatcagtgtaattggttgctgctagttgagaagctcttccaaccttcttgacggcctctttgagcttgatgaaatcatcaaatatgtctaaaaactcttgaacattgtatactaatttgagtttaaaatatttcgagagcagactcataatagtgagtctggctgccatttcccttacattggcatctttactaagtacccttgtctgcatggtttcctttatgaataattgtaagtaatcctttagaggctcatcttgttggtgcttaatgcaaaccaaattgttgcactcgattggtatgtgaattggtggggagaattgatcacaaaatgattatttaagtgtctcctcgaaattgatagatcttggagaaagcttgagatatcattgttgtgctggtttggatagcgtggctggaaagatttggcatcgagaatcgtcttaaatgccttataggtcagttcgtacttcgaaattgtgtttttgagatatagggtcttttttatcagtgtatggatgccacactggattcttaaatttggaggaaatctctaaagccttgacgtgatctgagagaggttaatgttgcttctattctagctcaaactcattcgaatttggagttatgatactccatagcaggtggccatagtgtcgaacttgaccctactaacaccacaagttgtggtttttataccagttggatcctttgctatttgattagcggggtctttgctagaggcttcctcttccaccatttgtttctaattaatgttatctcttaggtccttttgtctattgagtttaacaaggatgttgatcaactttgaccttatagttattgcttggttgtgtgtccttgttagcaactgtaggaatttatcccatgtaacgacagaatcatctattgagcattttctttgtgtgtggtttctcgtagtattgtactgactatttccttcaaaatagtcttccttagggttacaggtgtagttggaaatcattgctcaaactcaacacatctccaagcacccaaggcaagcatttgtacttttggccatcaagaccttgggcaaagcacctacacatagtactatgttaatcatataaatatttccaaatgtggagtagttttttggtcctcaacccacaaatctcaaagtccccactttcatggtagagcttcaagatcctccccactccctaaggttgactacagatcctcttccttttgtagggtcacggggtggcctagacacattagacctatgaggagaatttcgtggaggagatcggtgacccatttttttcaaatttcacgaagcagaattatggttagtcctaccaatagtaggtggagggctcataggtctgcactccctagtttgagtccttctgcatgctcgctcatagtttgcttccctagttggtgattgctccacgacaggtagaagactcataagttggcattccttaggcagagtcgttttggatgctcgctcatggctctcttctctattaggaacctcagtgatttgtgcttgttgggtagtggcacgactaccatgagttgtggtgttgttctgagcattcagggtttcaccctaagtgttggttcccacatggccagttagtggaagtgatgaaactctagcgaatctcataaaaaccattgtgttctcaagcgtgacgactgagagctcaaattattgtactagaaccgcacattcaaatatgctagtaatagagcttctgaatttctcaaaacaaagctcctagcagagaactctaacggtaactgggaagtcgggtggcaataaaagcaccaaaatattgatactaagaaatggccaactccatagcgtctaataagaaataacagcaataataatagagaaaataaactaaaagagacaccacaatgtatagtatttcactcctcatgtcatgatggtaatcgagctacatttaactcaagattctattattcataagattacaaaattgcgtacaagagatttagctaaggagagctctcactcacaagttctagagagttatgttggaaattattttac

SEQ ID NO: 18624 - DNA, 3280 bp, Cannabis sativa
aaataaattaattcacaaataataataaaatagttaaaattagtgctaattgcctttactaatccatatactagagcggtcattacattagtgttggattaaaattctcaatatgaacttatacatattggtgtattgctatttgaagtttgatctaaataaagtgtcatgggctaaatgtgtagatttctacttaaacgatatttctaatttattgagggggtaaattagaaatacttaaaattaataacctaattatgatgttatatattgatagtggtctccaagaaacaaaatgtcattctattctcatcttcctcattaagagagaaaattaaaaaccctaaatcttatattattgaaagatcattacccataatcactacaaagatcgtctctatcaatggattaatgtacgttttggctatttgagttcttctcttttaattaaaaaagtattttttttaaatatattcttataataatatgtaatatgtttatctatgaaattaattttgatattgcatattgtatgtgtgactaagaattctatcacttaaaatttttaacaacctgaaaagttcaaaaaacatgatttgatatatgtgaaagttcatgtgacaaaaattataattaatttttttattattattattttgcttaaaattttaattattattatttttataacttttaatttttctaaatatatagttaattgaaaaagtactaatatagtaattaagctatagcctatatatatcatcttatgagtaactaatttctaaactattaagtagtatatctatctaatctcgttggaaaaacaagtttcttccttcttcatagaattaagagtaagactctccctagtcccaacaaccattattatacaacaagaaaaactaaagtagataaaataataacaatacatatgttagaaaataaaaggtagctaattattgcacaaaatattcaaatctacaattggttatggcttcgtttttatctatatatacaatatgcatatattatgtactttcacccttaattgttgcaatttacaagggagaaacgatcatatctaataatttgaacgaagcatccaatctttttaaaaatttacgtgatcttcatattcaaccactataactatatattattatattcattagattattgtgtgcatttttaataatgtcaatataatattttagttttatgctatgctacctactcaaatttcttaccgcataaatgccataactttatatatttataaattctttacctaattgaccaacaaccagtcacgttactagaagtttagcttgacaatatgtatatggggacagatagcaacatttgccaataatataataagtacatctttatatatttatatgataaactttaatatagcaaaaaataataaaaaaaaaaaaaataaaaaaaaaaacaaattaaaaatctccaaaagggttatcaaatttgtggccatatatttgcctaccaactacgcttgtcatgttcttcaacaacaaattttgatttttctttcttttaagagaaatgtttccttctaaaatagagaggacaaaccaaatacaatctttcaaataagaagatgaacatagaaccaaaaccgttattacaatgtcctaaagttcaatcaaaaaatctcaattgattcttctactaaggtctaaataaaaaacctcacagtaatgagaagagaccaaatttctctgagtaagaactagacagtctaactattaaaatggcataaatacattcttttcaaaaaaataaaaagtgaccaaagcacacatccagctcgatacgaagtactaactgtataaccctaaatactacaaccagacacaaatcgtccttgtgagagtagtgagagtgaaattgaaccctcaagacaacaaaatctaagcatcaacactcaaaaatcatctcagtcctgaactagaaattagtactaattctcaaagttacacaatattaaaacaaaaaagcacataaaaaaaaggaaggttgcaccacaatagtcacctaactcaggtgatgataactccaaaaatgcgaccaataggggttctgatcggagtactatttagatttaagactcccaccacaaatggaagtcgaaaccagtggagaagtcgacggtaaactgttggagacactctcgaatcgccaccataacaatttaatagcatctcaataccaatgtaatattatttttttataatattttattgaatttttacgtttaacccctttcaaaaactaacaaaaagaagttacgttaattatttttgtatatatcagaattccataacagagaaacagaggagtaaacagaatctgttattcatttgctcaagaaaaaatacagatacaatcttgctacttatagtagctgatattggttacaactgtcataaccaactctctatcctacaactaactaataactaaccaaaaacagattctaacaacttagcactccccctcaagatggacaatatatgtttttcaatcccatcttgcctttaatgtaattgaactgattaaggaacaaaggtttggttagtatatcagctagctactctttggaagccacatgaactgtcttgataactccagcttggaccttctctcttaccaagtgacaatctatctctatatgcattgttctctcatgaaaaacagggtttgctgcaatgtgttgagctgatttattatcacaaaacagcattgctggtccttcatgatcaacattgagctcctttaagatcgacagcaaccaaactacttcacatgtcgtattcgccattgctctgtactcagcttctgctgaggatctcgaaactgtatgctgcttcttgcttcaccatgaaatgatagagtcccctatgaaaatgcagaaaccggttgttgatctcctcgtgtcagggcaagcagcccagtccgaatccgtgtaggctctcaactgaacctcagaatctgcaggaaaataaattccctgacctggtgtagcttttacatattgtaggactctaacagcagcattcatgtgacttagtcttggcacaacaagaaattgactcagcttatttactaaatatgaaatatctggccttgtaatggtcagatattgtagttttccaactatccctctgtatagagtcgggtctgccaacttgtctttgtcattttgtccaagcttgagatttgcttccataggtgtgttcataggcttgca

SEQ ID NO: 18625 - DNA, 1704 bp, Cannabis sativa
catgttgtagacataggactcactctattagctcaagctgaaatgcctttacatttttggtgggaggctttcacttctgctgcttacttaataaatcgtctcccaacccccactcttaactatgtctctccttatgaaaaattgtttcatcaactccccgattataatcttcttaaagtttttggttgtagttgttttccacttcttagaccatatgaaaaacacaaagtttcttttcggtcttccaagtgcatattcataggctatagtatcacatccaaaggttatcgttgtttacatccgagtggtagaatctatgttgcccgaagtgtaactttcaatgaaaaagaatttccttacaaggatcttttttgtaccttgtcttcccaaaacacacgggtcacacaatacattgacccaaatgtgtttcaaatcccatctatttttcccactactgaaccatctaatcccaactctcctacaccttccaatttcccacatcacaacccaaaccagtccccaaactcgtccacaaaccagttcccaacccagtccccacatcagtccccaaaccagtccacaaaccagtccccaaaccagccactaaaccattctccatctcccaccagttctgtcctaccaccaccccaaattaccaacaccaccaatgtccatcctatggtaacaagatccaaacttggcatatataaacctaaaacatatcttgctaatactatgactgaacaagaacctaaatctgtcaaagcagctcttgcaaatcctaaatggaaacatgccatggacaatgaggttgatgccctcaagaaaaacaagacttggattcttgttcctccaacttcagaaatgaccattattgaaaataaatgggtatacagaataaaatttaatgctgatggtactgtcgaaagattgaaagcaagattagttgcaaagggttttcaacaagttcctggtgttgacttttttgagacttacagcccggttatcaagccctgtactattagacttattttcaccttggctgttacaaatggatgggaaatacaacaaattgatgttaataatgcctttttacatggtgaattgcaagaagatgtctatatgagacaaccacaaggctacataagtcaagaatatcctaatcatgtgtgcaagcttcaaaaagccatctatgggctcaaacaagctccaagagcttggtttgataagctgaaaaactctcttctgcaatggggatttaacaatagcaaatctgataccagcctttttttacgaaaatttgaaggcaaactcactctcctcctcatctatgtcgatgacattttaatcactggtgaagacccgctgcaaattcactccctaatcaccaatctgcattctcaatatgccttaaaagttcttggtccagttagttactttctcgggtttgaggtaacccgagatggacagaacttgcatcttacacagcacaaatatacaaaagacctcctcaactctactcaaatgatggattctaagtcccagactacaccaatgtgctctaccactaaactctctcaacatacagggacacccatgaccaatcccactcaatatcgaagtgtgcttggagctttacaataccttaccatgacaagacccgatatcgcttttgccgtaaacaaattaagtcagtatcaacaa

SEQ ID NO: 18626 - DNA, 6273 bp, Cannabis sativa
accaattcagactgattttgtcaacaaattaaacaatggaaagataataatctttggcttaccttctttcctgtattattgactagtaaagggatgttataactgctgatttttgcaacaaagttgtaatctagtaatatatcagttattttaagattgtttctgtatacaccgggcgcgatccaggtgtgaagaaattgaatccctttcgctatccctatcgccactgatatccgttgactccaacttagcgatcgctttgaatgtggctctgtgcaaatcaaactcaaaacataattcagggaaaatatttaacataattcaggaaggacgatcttattagtgtcaaagttcagggaacaaaatacttgttaaacttacccgaaatccagcttctcaatgtaccatttggtacatattcaaagataagaaatattctgctaacactagaatcttccaagtaacattcaaagcaatgtccaagagcactgaccaaatttcgatgcctcagtttcgaaataagctcaatatgatgcataaagttttgagttccatgccttcttttcatttttaggcatctaatggcaacataggaaccatccttaagcaggcctctgtacatctattaacacatttttatttaaccaaaacttagcttctcaaacttatatgtataagagttcatatgttaatgtaaaagttatacctgcccattagagccttttcccataaaagcatatgtatcaaagttgtttgtagcctcctcaagctcttccaacgaaaaggttctgtaactaggaagaccgaatgttcctgacttcatcgtatgagatatgtacccttaatgcaacaaacacaagaatagtaagcataacaatacacagctcaagatgacactttcattttctttgataaggatttgaaagatatgaaaggcttacttacttgcatcagagattaactttgaggtgtaaccagttgcagttgatgcattttctgttatggatcttgttggagatttgctaatcacctttgaatttactcttctatatattaagaaaataatacaaacaatggcaagacctactaaagttcctccaacaatgcctatggcaagaactgttttagaagtttggttttgtttccttttctcaggtaagattcccacagccaatgcttcagttcgacaagactgcaacgggcgctgattttgtttactagttgacaaacaatttttggtaaacctcacaaccttgtccttagaattcgaattaaggcattcgggtacatttccagtgataagatttgaggacaaatccacaaatttaagatcaagattacaagattggttaccaaacaacatgcctgtgaatttgtttcctgcaacatttagataagtgattgaaggtaatgctagcaatgctgaagggaatggccccacgaacgagttcaatgacaaatccaatcgtccgagctgatagtatgagctaacttcagcaggaagaccagatctaaatctgttcttgctgagtacaagagtaactaacttgtttccaagtttgggaaactttggtccaaaagcattatcttccaaatcaagaacttgaagatttgtcaaacgactaaaatcgggtacctcaccatagaaatggttatgtgacaaagcaagaatcctaagattttcaaggtatgcaaatgaagaaggcaaagatccattgaaggaattgttcttcaaactcaaaacagtcaaaagaggtaatgaagtaagcgaatcgggtaatttaccagctaacatgttgttatcaagtatgagtgtcctaagacttgttagagatgaaacctgtcttggaattcctccatacagaaaatttgaactcatgttaactatctccaatgatgtcaaacttgctaaacttgttgtaccagacaaaggaccccataatccaagtgaaacaaaggtaacaactttcaaatttggtagcctagcaagagttgaaaagaaggaatctatcgaaaaatttcgaggtaagagtggtgctcccttttcaccaatcatatggagctgagttatggtaccttcataacacacaacagtaacatatggatttggttcatagttacaaaaatctgttttgttgttccaatcacttaaaattgttgggtaattgagaagtcttttaactcttaaaagggtatgagtttgagaagattgtagttgctctgaatggctgatcaaaagaaaaatagtaataacagtaacaagtacagaatgtctcactattttctccattaagtaaatgaggaagaatttattgaggcctcatatcaaacactttccaaacacacttacacaacaagtcctacaaaatcatattaatgaagagttaattgaattacaaacaatttacattcaaccattctaatgaaatgaacaccaaattcataaaaatcaatgctttatgacttacctcaaaaggagttgttgcagtgaaactcagtcaatacaggtcactttttctctctcactcacccaaaactgataaaatttaacaatttaaactccagaggttttttcaaaagaaaaataaaaatgaggccttgagtggttagttaaataaaaacaagtaaaagggtatgatgatagtgacttgtgaggaaaggaaaatgtcacccacccagaaaagaaaatcttaaaaaacccaaatgacccttctcttgtttagatcagaaaacaagaaaaataaggaagaaaatttcaatttcacaaaaaagacactctcccaagtctcaaaaacatgactttgaaaataaaaacacaaacttgatacaaaacaacacttcaaaatctattctttactttcctttcctttcaattgaataatattataatttgtgctttatgggtaagtctaaaagagaagccatggctacacagaaagcaaaaaaagattcttggaaggaaccctttattccactgtggtaggaaactttaagaagaccagaatgtggtgtcctacagattgagttttggtatgttggattttactaattcttttttattttttatttttttttgagatttgctcaactattataaaaatgaagaaattgtaaagaaggaaggtgggatttttggttggcaactggagatgagatgatacagttgaggcataggaggcatagccataatagacagagtgtaataatgtaagcctttggcttttctcttctctctttttctacttaatgtatagtatatagtatgtagtatattatagtgtgatttagactgtgtggtccctcttttgccgcctttttttctcaactaaaacaaccacatttatttatttcatctttatttataagagcattattattggcagaagatcttcggtaatttttataagtagtgttttacaattggttagagatatttcttaaaagttatttttttaagttatatgagactcgatacataattacactaatagtaatatgatacaaaggaagatgctaaatactaataatacattttaacaatttatttaagcaaattaaagtagacaaagtatcttaatcttcttcagcattgctttgtggctgagatttaagtagcgtttggttaaaaataatgaaatagaatggaatcaagtttcatttcatatttttatttttttgtttagtattatattttaaagtattaaaatatcattccaataaaatgacttttttactattttgataaccattccatatggaaggaagaaaatctcattctaatgcaaaattagaaaaaatttaataatttttttacatatattttaaatttaattccattcttatttttatttttattcttattgcaatgttttcattactaccaccaaacatcactttagagcatcttaaagtgtccatactatataaacatgtcacaatttgttattgtttagtattttttttatattattcattaaattaaaatgtgttgcttgacacctcttttgcaaattaacttagacttatatttcatcactctcttaggcattgatttgaggctgtaatttagtaatcattctgcatgtttaaatattttgtaaaatgttataaggtatcagtatttcgaacatcagacatcattatagagccaaccatgagtattaatgggcctaaaaaatattttgtgtgtattatatctaaagtagagtgtaaatattattgagcctatttcataaaatttacaaaaaatactatttttttttaaacacgaaagtatattatataaaaaatttaggtcttgggtttgggtgtgccctaggcacaactgccttgccagagccaagcctacatcattacgagatatgtataattaaatattgaatctcacatattttaagttaataactattataaaatattattaacacgggtagaataaataatcaaatttagaataaattattaatgattatatgtaattattcttttatacataaaattttgggagggttaccgtcagagattgggataaaataggttaagtttgtacttaggatctactcaactgaagagcctcccaaatttttttatttaaaatatacatatattttgttaataatttcatcgttaagagtttctagagttatttacaaattaaaagaaggaaaaagtgaaaatcttaacttatgaatgattttccaatatatatatatatttatgcatatataaaaaaaatggaaacatcaaaaatttcaaattttgtaaaaaaagttgctgaaaaagatttaattggttttaattttttaaaccaaaaagaaaacgattaaatggaactcttaatataataatgctgatattattgttattgttgttattatgtcactgtcaaattcaatgttttctattaaaatcttgtgttcgtgtgtgtactaggatatctagtaagttctgacaattctgttaaatattcataaatataatgccacactattatttaaggtaagtttatattacattttaaaaaaatatattttggactagttttggcaattaaaagagtattttagtccttgtatgatgatgtacattattataataattatttaatatcacctttaaatttaataaaactcaaatattttattgtactaataattatgttttttttatacgtatgataaataactatttaaattttatttgatatattataaactatttagaattttttgaaaatttacaaacaatcctaaattatcacaacatacattcttcgtaatatcaaaatagatatatagatagaggctactaaaacaatctttttaggagttatactctagatttttccataaatattttagtcattatatattttttaaatgaataaccatttttatcttttaatttgctgatcatgccccttagactatgctacttgttaaaaattctctaacaaatataatagttagttaatcatgctctttttgttaggtattatttatcttacctttaataaatagtatttttatcctataaactttgaacaacaccaaattttttcctcttttattaaaaaaacaattaaaaaattataattttttattaaaaaaatcaaagaaaattattaaaatatgacaaaattcttaaaattaattaaaaataataataaatttacttaaacaaacctaaattacttaattacttaaaaaaaaacctaaattattctttaaaataaaatatttaaaatattctagttttttttttttatttatttttttagaaaaaaatctcaaaattccatcgtaaagagtaataatagctctcaaaaagaaagaagagctagggagatatcattagagattcatggcatcatccaatctgaataatttggccaccaaacttttgctagttgccacaaacaatgcatacttagtaagattgtgagcaacaatattaactatcttagaacaataaaaaaaaattatatattttaaagggtacgatctgatagtgtcaaaagaaaaattattaaaaattgaataaatttaaaacaaagattttgtcataaataaataaaagattcaagtttatttatatatttacaaactattatcaaaaaataaataaaaattattaaaaaactaataaaaatataaatcatgtaaaaaaataatctaacaaatattatgtttactttaacaaatttaaaattttagagaaaaactttttttttacacaataataattgagtaatttagaaaaatatataaaaaa

SEQ ID NO: 18627 - DNA, 2509 bp, Cannabis sativa
  modified_base (1079)..(1079): a, c, t, g, unknown or other
tattatttaactacttccagggtattgactcggcaccttttctacgtatttgcattttaaaacttttgatcatgagcagattaaaagaacataatacatgtgttacaaaacatatttgtatgctttctctgtttgatgtctgaaactagtggaaacacttgatctgcagtgggctctcatgacactcctagatccaacttttagcatggaaaatctgatatacatcggttattctggtgatatttcatcaacaatacgcgtgactaggaagaggcgtttagatcgaaagaagcaacaatcagaaagaaatgttttccaatgttttgtctttggccctaagatggctggaaagtccgcaataattgattcttttcttggaaggtcatcgtatgaatcatgttttttgtatttttaccctcccttctttctttatttgtcaataagatttgctgattattttctgaaaatgcaggcctttctctgatacctacaatccaaccacagaagatcggtatgcagtgaatgttgttgatcagcctggggtatgtttattacttgtgtgtgcaagtcttttatgattttattcagtgagcttttcctagttcacatttgtatacatatggatttatctctttcttttgaagtagtttttactgccagttgtttctggacattctttgttgactgttgattttaagaactcgcagtgtaactgattgaatggaatcagttagagttttattgaaattagaacttatatcacatgctttgttgctttgtttccagggcacaaagaaaactcttgtgttgagagagattcctgaagatggagttggaaaactgctatcaagcaaagaatctttggctgcttgtgatgttgctgtgtttgttcatgacaggtaagatatcatcataatatttgtcttaaggtgtgtttggaaagccacaatgttattggaatttagtgtaattatgagaaattacagagtttggtgtgtttgttcaagcaggaaactacactgtaaccatgtaattagaagtaattgagatgtctctgttacactctctctctctctctntctctctctctctctctctatatgagaattgagtataatcacaagtattatttttagataatttaatgttatttttctatgtaattaataactaatttgccaaacataaaaataagaattcaaatgtaactattacttgacatccaaacacactttgtataaagtattgtaattactatgttgtgtaattactatcctagtaattatactatctactatctagtgtttacacaattacttacaaacacacctttataagtcaaggtttttgtttacaagatacagcttctattgaaggctcatgtaatagcactgccatatttgtttacttattttgggggtgggagttcgtaacctatgagaaattctctttaaagtaaaagaaaatttctttctatcagaataccatgcttttgttcctataacaaaatgtacttgttgaagtagtgaataaagatatccgggataccaaatatatgacttacatcccagtgtgaaatggtgcaagcacatgtctcgtcgtattaaattatttactgttggttaggttagttgtgatcatgctttgacatatttatatgttactaatgattgttttgctctgtaaatatttactgttgtattatgtttatgtattaagtgtgtgtatatatatatgtatatattaataaagccactaggtttgggagggggggttgggaattgggattgagaccaaggttcggacgttgggtctcttgtattggactcttcgtcccagttaaacacaagtgtgcctatgataaaaatatgtaatgtgtatataatttttattttttctaatttgccagttctgatgagtcatcatggaagagggcgactgagttgttggttgaagttgctggtcacggtgaggatactggatatgaggtgccttgcctcattgttgcagctaaagatgaccaggattcatttcctttggccatacaacattctacgagggtataacattttgttttcatatgtttatgtgtcaattatattggataattatatttgattttctgtaccacttacctcttgctttaacctcaagtaatctactttaaaaaactcatttttgcagattagtcaagatatgggagtagaagctcctatacctattagcactaagttgggtgattttaataacgtattccgcaagattataaccgctgcggagcaccctcatttgagcattcctgaaactgaagctgggagaaccagaaagcaataccaccggcttattaaccgttctctgatgtttgtttcaggtatgaattggatgatggatttgaccttgactacctgtgggggctcttaaatcttgaatgactcatcaaaataatatttggctaattgggcttgcttttaattttttgtggcatttcctttgcagtgatttttgtatg

SEQ ID NO: 18628 - DNA, 4065 bp, Cannabis sativa
  modified_base (48)..(48): a, c, t, g, unknown or other
  modified_base (3246)..(3259): a, c, t, g, unknown or other
atctcgctttcttatagctcaatactataattatattttaatagttgncgaaaatctcggtcaacaattgtaaaaatatttaaaattctacaccgtatttttgtaatttttttattatgtatgaaataatccctaaaattttagctcttgctatatttttttactaaatttaaactatattatatatttttctgataatgtaaataattattcaaaaaaggaaattaaaaatgaaataaactggtagtacacttgttgtaactatgatttaaatcgtaattagataaaaagaaaatataattttttcaagtattcaaaattaaaaagaaaaaaaaaaaagtccgtccattgaaagcaaaagttatgtccctacgaaatttcaaaaaaagttataccatttaacaatatatatattgacagagacaaaaaagttatttaatatattatactcaacttttgtccttcctaatacaaaaattaataatattaataacctaattaaatgtcctgccgtacaatatattccaacaagttgttttaattaataaaataatatttatatactatatatgagaaaactatatatatctcgaggattacatgtgctattatttaaacatgcatgacatgtaatatatatatatatatatatataaatttcacaagtacaaataatgcatgataaaaatcaattacaaatttgatctaattaaattattagatcgtgaagatattttcgatttctttcaatatcaaattaattattgatcgtgacaatatctgattaaattaatataaataaataaataaaaaaaaatattttgctagtaattaatcttctaaattaatttttctttttttttgtgataaaattccttaaattcaagttctgttataataattaacttttcatttatttttaacggtaaaactccaaaaccctagctaaagaggaaacccgaaaccctatttatcattctcattgaattgatgaaaactataacataaattttagaatttatgggacaataatgtctttctttttatttgatttaattatcaaacattacatgacatatatataaattatgattgatattgaatcctctttaaaacaacaaagagctgaactttttggttgcaccaacgttgaagcaagtgagagtggtccaaatgcattttggtcaagcgtgtgaagagttgatcaacaagtagtagggctttattattagtattattaaaatgttgaatgaaattgccctccattacagctcgcacgtgcttcatccacacctgtatcatctcttctacttgttccatttctttattatcaagccaagaagatggctttgaaagctccaacctttcaatggtgaaacaaccatttctttcaaccaaatccttcatatcttctggacttgctgagttgtataaaggcatgttgaatgagtccacttcactttcttcaatcattccctacaaaataatattactaaaatgttgatccacacttaattttagttaattttgacttaattatatacccctattaaaagaatctctttttattttaattttaaatagagcattgctataaggcactagttgtgcctagcatcttctcgacatgtcgcgttgcgattggctagtgatactccttaaaagctattatattaaattatatgggactcgatatatagttgaaccaatagcgatattgacacataggagggtgctaggcactactagtgccctttaacatttctctttcaaataccttttagctatataattggctagtggtcctaaccctaattggctagggctaaatcaaataataagaaaaatgatttaattttattacctcttgaaccaaatccttgagaatagaagccatgaaatcaaatgtagtagcatttgcagtagaagagagaggcatatccttaggagaaccacaaaaaatcatgaacaacattcctccaacaacaagctcttctgccctagcttccaaaaacatctccatttccttaccgaattgcgatttgtaagcttcaaccactccactcggtgtgccttcaccagtgtagtggattcgccctttattccaggctggcgaggcctcgtctcccagttccttgggcaactcagagagccagtgcagagagtgagaagtgtacgcgaaatggagagaggcctcggggaataattggccgcgaaaggagccaggcacggctgcggcgaagtagtctttagtgtgatctttagggagagatgagaatagggtgttgaaatcattcttgactaggtcattgaagaacacttgaaactctagccaatttcttgtagttatttcatgatcatgatgatgagtagggtttggaatatttagggttttgtatttttgttttatggattctataatgttttgtacgctcaagaaagtgtttggtcctgttgcacatccaaaatctgctattcgaataattgttttattataattattcgatgcaagaatattaatgttttcaatgttgaatttctctatgatttcatctttgatctttagccattcaaagtttgcagctatcctctgatgatataaaaaataaaaaagttaatttcaacgttaattaatatttataattaactatatataaatatactttttgatcactttttttacaattcatgtgattaattataattagtagcagtcatttataaatagaacatttcgtgcataacattgtaagtggttagtgattttttatattatttattaaattaaaatgtatggaattgcatttttcttataatcactaaatatattagaattaaatatacttatactaagtattagtaaaattatattaaaaattgctattacttaattataatttacataataaaactaaatttaatacaatttaattaatttttttgaatatataaatttaatataattataaatttattaccaaacaataaacagatcaatggatctaatagctaattaaaattttattaagttcatcatctcaactaattaagcaacagaactagatatatatatatagatatagtaattgtatatatgtgtatgtacgtacctgaaaagatgagttttcatagtagctgttaatatcatttcctccattcatgggggacaaataagtgacattattattattattattatcatttgtaataatagtaacgttattattacaattattattattattnnnnnnnnnnnnnntattattattattattattagggcaaagaggtggtggttccgggccttccggtggcatattttgcagagttatatatatataaagatatagatatatatatatatagatataggtgctggtgtttttgggagcaaggtaaggtttagtctcaaaatataactcagtttatatagaaaacaaaatttaacaacgtacagctataataacacacaaattatattaaattatttgtataaaaataattgatttaattaattataataagtactggtgtagctattaggtagctatagctatagcctgatcacaatattatattttggttcttttaatttatatattcggtaaaacatggtggtccaatcaaggcatatgtccttcaaaaaaagacataaatattgtttagtaataaaagtaactattaaatactatttttgtacttttttatttattttgtgaaatgttaaatttaacttttatttttacaataaaaaatttttacttttgtcttaatataaaatttgtaattaaaaataaaataattataaattaatatttttatgtttcaactaaaaaatttatagttaaatttattcctcaaaaaaattataatttattatcactaaatatatttttaactacaataattttttttgaatgcaaattagaattttattaatttgctaaattagctaaaagacaagacggtaattcagtaaaaatatctcttccactgaaaactctatttgaaaaagaatttgacgctctagcaaaactgtgtgctgtcatattagcatattgttta

SEQ ID NO: 18629 - DNA, 6835 bp, Cannabis sativa
tatcgactgagtaattgattgatgttagttcaagtggtgaaaggaaggtggggtggagattttgggttcgaaattagcaaatgaattaaaattgtcataataattccttacaaaaaataaaaataaaacatcagtaaagttgactaattaatttttatttatttatttatttattttaaatgaagttgactaattaatttactagtgatttaagtcaaatatatatcatggtggagttttggtggtaagcataaaacaccaaacgaactcattcactcacactggttggatgcatgaacaagcaactttttattatgacatatctatggacacaaacactacagtaaaaatccaccatgtttgctttactttgattttcttttacatattgttaattttatagtacaccttaaaaaaaaaattatagtacaccttcacaaataatttttgggtatctaggagagttttcttttttttttttcattttttttttcattttttcttctcatgatcatgtgttgttatttataattttcagtaaattttaaaaaatttcaaaaaacttacaatgctaaaaataaagtataaatattttgttacatatgtgattgtttttatttcttatattagtagtaaacaactatttaaactttactttgatactgtaatatgttcaaacttttttaaaaattttaaagtggttctaaagaattacaacatacgtgatgataaaaaaaatgaattaaaaacttttctaaatgtcaaaacagatagagggtatactgatgcgtgtcttaagtcgtaccaaatttactaattttttctttcaaatttaccaattacttcaatataacaataaatacaggtcaatcccacgaagactattctcaaattattattccaggattagaactaagaattaaaaattaggttttcaatataaagattgaataacacaaactagaaagcaaataaagatagatcttatactaataagaaatagttcagagtcaatcttcactctcaacaatcattcaagatcaacaattgttaactcaaaatttcgtcaacataaataagggttttgaagaatgatgaatctgtaaaaatattgttaagaaattaattataaaataaagataagtggtttttttacgtagttttgtagttaaatctacatatttcatgagtctttttcatttctaaattttctttttgcagaatacaacttggtagaatttctctcagttataagaaaattggtcgtcctttctacaacatgagtcctactatttataggattaggatagcagttatctcatccttatttgaaatatagttatcaaatttgtacatttctcacgtttcatatatctaccaattggtgcaaacaatttacaataaataattattattttataatctggatattcatcatgtttttacagagcaacttcattattcctcgagaaatacattgagggattgtcacatgttaatcgtgatgtcccctcaaataacttggatgggctagcctttcttgctggtcgcttacaagaatgaggtttgactaaatgattcatttccttataagtaagctttttcaagatgtaagcttcatgcgagttgaggtaacgatatttcatctcgcaacaagcttggccttcctatttgctcaggttatgtcttatatcttgtgatatttgagataagccttattgatgcaatattcgcctcgtttgtcatcctggcatacttgatgtttgtcgagaggacttccttcatgtattctctttggggggagatcgtttgatgttttgtatacatgtcatgtgagtagacccattcatttattgctcaaaatatgggtataacaattactccttaaaaagtactttctacatgtgaaagaactttttaataattaaaattataattgtaccaccaatattgtgcgcattgaataagttttatttttagagattttattatcccaagaaagattctaccaataataaatgttgtttttcaactgactcgcgagttaatgaccattgattattcatcattacgattgaatggttctcacaaggcatctatataagggtgtcttctcctcactatcatcttttttgccattcttgtttttacagagctagtttagagcaagtttaaaaaaattctattttcttatcctactcttgcttatctacaacaatcattttttttgataccgagaaattattatataccagacccatggtattttcaatttctagtgaggaattcatctcgactgcccttcatccctggccctcgtaagttttcttaaaaacaattcttaaaaatacttaactatgtgtgtttattttccgtattccctgtagttttgttacattttaaattggattgtaattttgagatcattataactctgagtttttaatttttcaaattttatagagtttacatgacatttaaatgtcaatgtatgattttgactatgaaaacctaaaatttttagatcaagaaattcacttattacctactttacctttcaaaccaaatcacttagtatttagaaaacaactggaggaaaatgatgagataattagagaacatactaagagattgataaaggtagatgtattctctcgctattgacattttatagatgagatatttaagggtaaatgtcgttatttataagagcagcttggcccgagcaacatcatttaactacgcacttgttgacctcgcttttagccaatgacaatgagtcaattaaagcgactaagaagtaataaattgtactaattaagcaatatgaacacaaagttgttatagatgttcgaccacgagataatggtaatagcctaatcccctttcacttgtatttacttgtgagaaaataagaaagaagttcatgattttctttgagcttttatagagattttagtagcgtaggtgctcttttaaatgaatcatttcggatccctaaatagtgaaatgactccactatttatagggaagaattacatctaattggtttcctgaaaccattaagaagtaaaatgggaaacttatatattttcctatactacataatttgcgtgtataaatccaattaaaataggggtttaattaataaataaaaaaagtatccctaaagatattccacatgtaattacccttgccgatgtatgcgagcctactacaagatcgaccctagtcaaacgatgccatttaacctgtcaagatattctagctcattcttctaattaattatttacaaagcataaatcactctaggcgatacatgcgatagcgtatttcccattcaagtcataaaacatttctcacatgtctcctaaatgaatgccatataacatttaccacccaagtctgtgtgagaactctttgctcacacatggggttatttggccactaagttggttcgatgagtgacacgtgtttggtcttacaaccttgtcttgatcaaatgtgactgaatgactatctgttcaatatctagggtatttagtgcctcgccttgaaatttagacttcaattggcacaacaacggttactgaataccgcgcacctatcgtatgtgctccccaaaatgtaatgattacacttttttatggggaaacccaaatttagaacatcagactcctaaattacctctttaacagcctatataaagggttaaaaattctttttcactcatttggctattttcatcctcaaagatatcagagcacatttcttttctcatctaaaatctttgaggatcccttcccttgaagcttgattttttaggaatcatccaagtacattcgagagcttcaaaaccgcgagggaaacctctttctcctttttcactttctttaaatatacacacttctattcttgaactactttttgtgaaatctgggttcttcaagttgttcttcgacgatttgagactaagaaaaatattcttgatttagacatgtagttatggtctataaattcccctagtttccaatggtctctcgttattttctctaccagatattcaaaattacttgtttgaagtttctcagaattttccaagttcatggcccctctttagttcttcaatttgggaatatcattgttggaatgaaattttatccttttttcttttaaatcggtctagtcgatacattagacatgtttggccctttccaaaaattcatacttttgtccagttcttacctttttgtcttccttcttttttacatgaacccgggcaattagtggcgaggtaactaccaaatagataacgacctacctcatattctttacgaaaacctaccccaagctttgacgagtgggaagtcacgagtgactcatcagagtccccatagcccgtggtacatcaccactatttccctagccaaattagttgagaaggataccactggttcatttggaaattgaacagaggctaaagacattatctgccttctactttgacgtacaaggtctaagttgacgtctcagacccacaaccagaagactgactatagcctttgaagaaaaactccacactagcagaaattgttgtcattgtcaatgaagcataccacaaaaccaaatcctctgcctaggcataagttgatgttgaaaaccaaacaaacttataggacgacttcggataaggacccacactttgcccagctttttgtgatggctagtgtagaacaatctagacctcttagggaggatgttataatttccattggggatgttaaagtccaagaggttaaggactagggcgaagtctgtgcagccatttctcctaatggtgaaggagaagaagtattggaagaagaagacgaataagaggatcttcaagttcctctgtttgggggtacaatgaggccagagaacctatttcttcgtctaaggatgtctttgttctggacaaagattacgtcaaagtggagtatgaggaagcccgtcccctaaggactaatgaggaaaatggtcctcgatgggtttctcctacatctattcttacctacaagaggttgaagaatctttatgacaaaggtcttcttggtggagtggaagcctttctgcctacccctcggcagttggctgctaaccatgcaaaagggctctgtgcatcatccagatctcacactgaacgaggcatgatctttcctttgcatcaataatttaagaagattacaaattactacaaaaatattcccaatccaatttactctaaagggcatcaattatttagccgcacggttcgtgttgtacacaaaaaaaatggtggggcgagccttccaacaattatattaactggtcatttaatttgaagtctagtaaaaaatagaacctgttgggctacttttacgtctcccaaatcgtgtatcagtggttgagcagcacaacaccaaaggatgtctcaaagattggtggattctacaggattgttacattatgaaggacatggatgtcgatgatttttcatttgagttggctccaagatactgttgtccccctttcacctttggattgagagtaaggttgccaaaaattttacaactttcagaatctactcggaacatttctctcctagctactactgaaaactttctcaagtaaagactttatttgtccaaaggagaaaaaaaaattagcaagtaacaaaggatcccacccctgagcaagagattcagaagaagaagaacaagaagaaagaccccaaacgacaaagttaggagccaacaaagctgcctattcaaatcaaagatgtttatgaagttgcagctcatccttctgcccaagtggttgcttgaaaggggaaggcagtagtcaggtgcctgacataggagactccttcaatgaggatgctccatctctgcttttttgagagggtgctcctctggatgtttagggtagctcttttagtatttagccttatttggtcttttgtttggcataagtacttctcaagtattttcttttgtgtagctatgtccaccgggttgaaaagcatgttgaataggaatgccagagatagcactagccggaaatctcttatcaagcaactaagaatgggcaacaaccttctggtcagtttggccctgagctctaaaactccttgttccaatgctaatgagacttctgctgcactgacttctaggaaaggggaagtaacagctataaatattttaaactcccctcttctagccaaaaagccttccaaggcttgcctgccagctgccccattaaaaaattccaagtcttctaaaggcacagttggggccgatgttgccaatgttgagtggcataacttgcccaaactgacttctactgtaactaacatttagcttaaaacttagaaggccaaggagatgcttggtttccaccaagaccatgtaatggccgaggtgaatgaataaatgtttggtattgaggccttgtcagtggaacttctagtcaaaggcattttaaaagaggcaacaagggtacatatatcattgttgtctttgtatcctttgtacagtttactacttcaacttttctaacttattttattgctcttagtctaatctgaagtttctgtaacttattctcgagctaagtctacaactctttaaactagcattgttactagtgaattgaagaaggctttggatgagggcaaaaatgatgctgaacagaagggcgctcagcttggtgaagtgaataagtaactcattgctacaaacaagtccattaatgacttaacgtagcaaatagaagatatgtcgtccactgccaagcaagaagaagacttggagca

SEQ ID NO: 18630 - DNA, 3942 bp, Cannabis sativa
tgaaagggcttaatgagctgattttggtttgttaaatttgaaagacgctcctagattgtttgttttcttcaattgtctatggaaaaagagtgtctaaactaaaactataattgatccctgtcccaagatattttgtggaagtttggagcctatatatatgtatggtcgtaaggttgtggaatggtcatatcttgcattcgtactcattggtttgttttgttttgtttgcttatcattattgatgctgctatttgcatattttattttgttgtattaatgtgtatcttaaggcaagtgctaaggtctttctttttctttggctgtagatgcatggaagatttagtaagcaccacccgttatgtaacctggtctcttcacaacaaggttagcatggctgttctgtggtttttctaacttaaaaatgatgaatttttaatttctacattcaaaatttctttgttatgttatcttatttgacttttggtttaaaattgtagaatcgagcaggacttcgtcagtttttggactcatttgctggaacagaacagtccactgcaggtgctactgttcctgttggtctttctcctgattcatcaaatgggttgggaaatgagaagcaggagtcaaagcctagggcagatgtgaagcttagtcatttggcttctggaatggactcaacatcttcaatgcaagcaacagacacaaggcttgccgatcttctagatagcacactttggaataggaaacttgctccttcatctgagcggatagtttatgctttagtgcaacagatatttcatggaataagagaatattttttagcctctgctgaattgaaggtttgcttcataaataattatttttaatagatttcaatcacacacataacattcatccaattatcaaaaccaaatcattggggtgcttcataaataattattgtttgttatattatctctgcctacagtcttttaaactttttgtattcatatattttggtcttttgtacttccatgttttccaatttgcttttttgttttctgaaaacagtttatcgtattatcaaatcggtaacagctgaatccatctgagataaaaatgtttattgtcacttggggctagcttaagtggtgtgagaaggagaggggttcaaatccacattatatataaaaattggtgataaaaatatttattgaattatgatccgttaataattgcttcctttccatctgttgttatcatctttctttttttcttctttcatcaattgatctttttcctttttatttttgcagttcaactgctttcttctaatgccagttgtagataagttgcctgctttacttcgggaggacttagaatctgcctttgaagatgatttagatactgtttttgatatcagcaatctaagacatgcattaggccagaagaagagagatacagagattgagctgaaaagggtatatgttttcttccccttggacttgtgaattgtggccccaacctttgtttctccatgtttgcttcaatatatattggtggttttgcagataaagaggctcaaagagaagtttcgatctgtacacaaacagctctatatgaatcaagctgatgtaacacctggtagcaactcccaacaatgattctacatccggacaccccaaaagaagttcgaatacacatcttcaatcctcgagataatatttatgtgtagttatttaatttcagcttttctcattatattggcaactattatattatgttaattgtaggacacagtaagagtgaccttaaatttatggattcccagctgctaattttgttattaatatatctcctttcccattataaatgtagagttgctttagctttgtgtgaagcatccattttctaacaagagttttaaatggttgcttttatgaatgttgcaactgttaaccctctttttaataccatctaatgtgacagggtgaatggtccagcatttaattggtgatgtcataaaatctatttgaatttaacattaaattgacaaattaaaacataaaatcaattgctacgtgggatggtattaaaagggtgggacaagaggtgagatctctagcataaattatagcaaaatgtacatttttctttaataattagtgatactatggatattttctcgttgatagtgctgtgtattaaaagatttctgtagccgctctttatttattccttttttcttcatttgaatagttacacattgtttcttcaacgttgccatggaaggagaagggcatgaacaatggatgagatattatcaatgtgatcaaataatccagttacagcagcttagatgaatttatgttattttttaaataaatatttattttttcacagttttaatctccactttcaagtacaatgtctacaattttacagatacaaatagtagtttaatacttattttttatgtacatgacatgagtgaaatctatatagtaatgcttgtgctcttatccacagaaacccttctatcaaagcttttgaagctattattcttagaagaagtcaagtcatcctactacaggaccgatgagaatcatctgagctactatctgagtgttctatcatgactctaggatgatcgatgtgaatgtcagttgctagtgctggaagattggcatgtcgcaatagatactgaacaatccttctcatacttggcctgcaggcaggatggggatgagagcagagtaggccaagattgagcacaaggctaacttcttccgagttgtagttatccaatgtctgatcaacagctctggtaatgtctcctccacaatgttgttcccttacccaatccaccaatactatctctcctgcattcttataaggctcgattggcctccttccgcaagctacttccagcagcaatgtaccgtaactgtacacatctgtacttggggtggctctcccagttcttgttagttcaggagccatgtaccctagtgtgcccacaatgttggttgtatctggattgtgtccatgctcatatgttcttgccaaaccaaaatctcctagctttgcattgaggccttcatcgatcagaatgttgctgggtttcagatctctgtgaaccaccatctcttggcactcttcatgcagatataacaatgcttgagctacatcattgaggattttgtatctttcctcccaggatagctttttcttttggttttcattgtcgaacagaagcttgtcaaggcttccatttggtacatagtcatatacaaggaggagatcatcttgtcttcgacaccacccatgtaactgcacaagatttcgatgtctcagctttcccatgcttgttatttctgctacaaattctctaattccttgacgggaattgttagaaattcgctttacagctacttctcttcctgtactgggaaccacccccttatagacactcccaaatcctccagatcctataaagttcttctctctaaaacccctagtagcaaagtgaagctcagagtacttaaatctctgagctccatattcaatttcccaatcttctagaatctcatctgcactttttattctgcgtataatataagcaccagcaaagatgaccaaaataaaaagtgtaatgctagcaaaagttatgcctactttaaatcctttctgttggactacctcgttagaacttgatgacaaagttggcagctctgtcgggtccaaatcctgtgctctttcgccgatcttaaagctccagccatggacattgtgagcagcagagagtaaaccagtcgaagcagagaagccaatgtacatgtattcctccaacacctgtgaaagatcaatgggaaatgatataagaggccgtggtggcctccccataccaagaggagatattgaaacatttagcaactcctgcaggctgtcatagtcaatcca

SEQ ID NO: 18631 - DNA, 6559 bp, Cannabis sativa
  modified_base (6478)..(6486): a, c, t, g, unknown or other
aatagtttagaggaaatttttaacggtcagaaaagttcaggggcatgatttaatacatattaaaatttaaaaggcaaaaatcttaattagtctttattttatatagaagtgtgtatctatttacttagtattttcataaaaattataatactatactatttaacattctcaccattaaattatacgaattacgggctgctgcatgtattgcatgtattaattatgtatattccttctcaattaataacacatttcttccttgggatccattctttgatatgttttctatgtaaattgatttctcagtcaagaagagggtcttgtttattttaagttttggtgattttattgataaacgagatagaaagtaaaatggaagaatggtatttaagtgaattagcccctagctagcagtaggctcttgttattttttgtcttcgggtaatgtcaagtcttcaaagtacgtacaatgagacttaattatatacatatttgtatatacaaattcgacctagatgttgtgagtcactacagtaacagtactacacatccaaatttaagagattttagcactattaacccttaagttagttgtggtttctcactttggttcttgagatttaatttttggcaattaagtccttgaatatgtgaaagtgataagtaatacccgttgtgatgggggtgtactgaaaaaaaaaaaaattaaaaacaagatctgtaacattaaaatatagcaatttagagcatgttacaaggttcgaggattaaagtttgaaatacaactgtttcaaataacaacctctaaattagttcctaacgccctttgagcaagaatatttaaacttcttggaacaaagctaaaagaaacattgggaaaataagataaagaggaatcaatcttttgaattaaatatgaaagtgaatctatctctccatttgtgcttaattttcttaactaaaacttggcaatctgaagaaataacgctgatagggaaacgaactgctaaacactagctgagagccttggagagagcttcagcttctgcaaaaagaggggaaagtccctcgatactaaggagaaacaacctgcaacaacttcccccctacaatcctgaacaacagcaccaaagccaattttacagtctttatctctaatttaggcccccacacttagtttataagttcctaatgaaggaagaacattgtcttgagcacaaccatcatcgagacgatttaataaaatgttggaatctacttcattactaccagctaatgagataataagcttgtcttgggttgcataaaattcttgcaaagagataacccagaactctagatctgcaaaagaacgcttgtgagcaaagaaaatagatttgttatgattattccaaactgtccacaagataccaaaacaagtcatctttattaagaacctcaaaccctctcaaaaggaattcctttatatcacaatctttgttagtattaaagaaatgagcaaatcttgtagttaaccaacctttagaagctctggaacaccctaggagagagtgagaattaaggtcgacatgaagatagaaaatggagcaataaaggttatcaaacatttttctcaaaaagagattaaagccagatggaagcaaatgattaaaagtttttcacacaaaatgcttaactttgggaggcatcttggaagaccaaacatttttccacaagcatttaagaaaaccaggattagaggaagaaggagaagagagagcagagttagcaagatgatagccgaattatagtgagatttccaaaaggatgatgtccccaaataaggcagtcatttctagcaggatcaatagggattctaagaatggaattaaccacattctctgagaaaaaagaattaagtttgccaacatccgagaatctctcctctttaatgaaaaaaaatgtatccttaggaggacaaagatcatttttataagagacaactctcaagtccaggatccaattagcactagtggtttgaatagatttgtcatttcccatcttccaaactaagcccttgcaaagtagatcccttccccaaagcagacttctccaagtaaaagaagggtagtgaccaagggaagcatagaaaaaattattatttttgaaatatttatctttaaggagggtggccagaagggaatcggtgttaatgaaaatcctccatgcatgcttagcatggcttgataatgatgaacaatagcacaaaagccaagacccttaaaaaaattgaacttacaaagaagggaccatttttttccaatgagttttcctatgattattccccaaagagccccaccaaaagttagccattagcttctcaaattgcttacaggtagataaaggaaatctaaaacatgacatgacataagaagggatagcctggataactgctttaagaaggatttccttgccagctctagagaagagtttattgttccaaatagaaagtttactactggctttttggagaagatagtggaaggaggatttttttcaagtgagtaaaatattggggcacacctaggtatttattaataaaaggtttatcatcaagaccaaagaagtcaaggaaaaaagttttgtcctgaatgctaatgtttggcgagaaaagcatagagaacttagagaaattgacaaactggccagtagccttattataaatgcgaagaacatctttaatggcattacaattatgagaggtaacaatagtgaacagaaggctatcatcagtaaataactggtgagaaatagaaggagcagaacgacaaataaaataccctaaaaattattagtacgtactttagtatgaagttgacaagggatccccttgcctaattcctctagtaggggaaaccacagaagacaaatggttattaatacaaagcttaaaaagaatagtagaaatacatcgtagaataagggaaataagatggccaggaaagccaaacttattaagaatatgcctaataaaggtacactcaaccttatcaaaaaccttctcatatctaacgtaagggcaacccaaccaattttactacttctcctattattaatggcattaatgacctcattagctagaaggatattatcaaagatgattctatcatacaaaaaagtaccatgattataagagataaggttgttaaggataggtttgagcctatttgcaatagccttagctataaccttataaatagtaaagcataaacttatagccctatagtctctaattattgttcttcttaggaataacacaagaaacgtctcattaatggacgacaggtcaacaccattgtttaaaacatctagagtagccttgcaaaagtcgaattcaataacaacctagtttttttggtagaaataagagtttaaactgtcaaggccaggagctttgtctccagaaagctgaaacaaagctcgcgtgacttcactttgatcaaaaggtttagcataaaaaatggaattgctgaccactaatacttctaaagatactcgagagaataacattgacacaatcaacatcaacattctgggaagagaaaagatttgagtaaaaacctacaaaattatcacaaatatcctacaaattatgaacagtagaaccattatccagggtgatggacctaattaaattatttctcttcttagtaaaagctttattataaaaatatttagtgttcttgtccccagccttacaccaattaaccctagatcttttcttcaaaaacaactcttctttatataataaagagtctaaagaggattgaaggatattgaccttagcaatattattattagtaataacatgggacatataaatgttatctatagcaaactacagattcttaatattacttttgaaattattcttattcctactccaaacctttaagttatgaatacaagaattttgcttatcaagaaaattcatcagaccaacactattattagaaatagagttgcttgaagacttgttatctttaacgatattaaaaaattaggctccataagccagtgatttttcaaagaaaaatctaccaaaagaaaacctaacattattagagtcattaaaaaccattttacgagccctatggtatgaaccaaaaaatgagagatgaaataaagaagcataaggaaaaaggtcaaacaagggcttattaataatgccacaatcaagtctttccataaaatcactgtgtttccaagtacaaccacttccaataaaatgcaaaggaaacaaatcatacttgcccctagttccacttggcacttgaggtataagagtagtcctcgttctagcttcagcaactaacgtgtccctaatttgctggctagttgttcgggatcctctttcaacacttgaggagtgtattgcaatcatcttgtaagtgactttcttgagttctggctctcaatgaaagtaccaaaatattgattcagaaatttggatacggacttttaagtcacacctccttgctagatcggtgagaataagatatatattaagtataaatagagagacacaataatttatagtagttaactccttgtgtcgcgatagtaatagagctacgtctacttcgagtttttattcttacgatatggattacagaaaaatggctaagtctcggtgctctaatttctagagaaaaaaactagagagagattctgcaatcttatggctacttttctgaatatgaaaaatgagctagaggagctctccttttataggtgaaggaggtcttattaaatgtgaataaaataatccaaaaaatatagaaaaatatatttaaagtatttttgacagtagatgatgatctaatagtaaaaattaacttttgagattgatcgtcaattttcgtagttcgagtcacaacggtgggacccgctccgggtaagctgtagcttaaattcgtaactctcttaggataaaatttggagtcgatagcttcagaattgtgatttaagtatgagacatgacttgatagatcattgaaatagcttcaaaatgcaagtgacaatgcatcaatagaatctatattgagtgagttatgaccattttactaaaggttattttgggcccagcgcccaagttgacatgtgatgtcaacctaaacgctgggtgagtgggaaaacgtgtcaaaaatgtatttttatgcctacgtgatatcttgacatcagttagtccattttcgtattctggcgaagctggtcaccaatttttggagatgttgttgttttgcagaaatatgagacttgaaactacccgattttcgagtatatcaccttgtcggaaatgtgaaaatatgaagttttgaatattactcttctgacttcatggctctcagtgattgtgaaaaactagatgaatggttaaaacagaatcagaaatggataagaagaacctagcgcattaggccatttgtcaacctgggcgctagatgctcatttcaaagcttccgagatgttattttggcacttccaaggttcttgaacttgaggacgaggtctcttaccctgattttgaccattttggagaggaatcttagagcaaaaatggcatttgaatgatcaaaactagcgcactaggttgattgtcaatttaggcgctaggtgttgggcttagtttccaggcccttgggattgtagttttctccccaagtttgcttgtatcttcaatatttctgatagtagaaaaaaatgctcgaaacatttttctgggaaactagttggaaatagcccaagttgacaatatgtcaacttgggcgctgggcctagtgccaggtgtcaacttggtgctgggtccaatttcagccacttgaaagttctgtttagtcctaaaaaatagttgaattttaatatttactaaaaacagagcatatgctcggaagacttcttaatcaaactcctcagaattgacccaggttgacaaaatgtcgacttgggtgctaggcaaaccccaggtgtcaacttgggcactggcccttgttttggcacccgggatgggcaatttcttccccaaaagtacttgtttccctgttttttaatgaggataaaaaagattcacgagtcatatttttgatatgatgcttggaagtggcccaagttgataaattgtcaacttgggcgctagggtgcccgggcaccgcgtgtccaggtgctcaaaaatgaaagttctctgaatctgattcagatgtctcaaatatgtttgtggtatgtctagttcatgtcccaatgtaaattttgatccattttcactaagacggtgccgaaaactaaaaccctagttgacgttgtcaacttggacgctcggtgaaaccctaggttcctaggttaacttctgaggtgttggttcatgtgtttttagctctcgtggcctggacttgcttgctctgtgtcttcatggcactgaatactaggggtgtacatcaaaccnnnnnnnnngcccgcaccgcaaaaaaatgcggtttgaaattcttcgcggtgcggttgcggtttgaatttttcccaaaccgcg

SEQ ID NO: 18632 - DNA, 2125 bp, Cannabis sativa
aaaatattatatatttaggtactcataaaagtcaataccacatatagttttacataaaaatattgaatgaaatacaattcaatataatactatacaatacggtatactacgacatgatgacatcgtttggtacgccgtattacatcgtagtgtattgtatagtattatattgaattgtattttatataatatttttatataaatactatatatggtattaatttttataggcacctaaatatataatattttagtatgacgttctcaactagcctaagtttatttctctacaaatgttaaaataataatatttactaacatattccttaatttgagatgtttagtataattttttcaaacaaaaaatagtgcacctaaacataaataccaataaaatataaaaagatctcgcaattttaagttttttctcttttctttttcgcagattttatttactaaaaaacaaagatgacaatcttattattttttaatgattttttgtttttttttgagaaactcttttaatgaatttcttatactaagaattagagttatatttaatatgtatttgccagcacgtgggaccttcgtgcaatcttcttctagtataagtaacacactataactctccactaattctaagtcaaacttttcactcttaagaaagaaatggggctttgtgctccttttgactcttctagccacatgggtaacgttctatctcacatgtcactacttttgttttgattcttttatttttattatatattttgtgtaaaaaatttgtttgattcttttttttttttctttatattttgtgtaaatttcttttgtttgattctgtcctcttcaccatatgccatatgcactttcctgactttctgcatccctaacacttggagatattcccctcaccaagtgtcatcacaccacaaataaattcatgaatcacaaaccttgtaaccttctaggaacctcatttcaattcatacaagtatatattgttatattatatgtatgtatttcatctaagaagaaaatggtattatatataatatatatatatatattgatatcagatgttaaccttttagtaattaaagttagcccataactctagaaactaaagctctctttatggttgtaaatggagtaatgagcaacttttttaggtctaagtagttgtgaaaatgggaatgagataacaaaatggaaaagagaaagctttcactataaggcattgcttccactttgcccctaaattgggtacaaatattatgtttcctatgataacataacatgaataaatgcttaatataataattattttctcttctttcttggctctcttatttgatcattttttttttattattatttaataattgtaaaataagtgactagtttaggagtgtataatttgaaaggttgccatgttatagatattatagtgaggtggggtatatataatcaattgatgggttgatttggatagagttaggtacttttattcaaccatgccggcctatgccataatacccaaatacattaaatgccatacttttatttcaagactaattatttcaaagttcaaattaattaatgttaaggggggtaaagttaatttctatcagatatttatcatgtgtggtaaagaaatgtagtaattagtatttatatgatttgtaatcacatgctacctattattttaaagccaacatataaagtaattgaaaagctattatacaagttactatttctagcactggttttatttattaaaaatgaaagtagttttgaaagatgtttgtacttaaagaaaaagtaggaaatatctaattgaaagtgtgaaagtaaaagatatagtctctcaactttgttatcaaaaattaaaaaagaaaaagcctctaaacttggaatttaaggccgtgtaaaaccaaatatattatcatggtaacatgtgtaatacattcaaggtataattattatttttattcttgaatcttttacactaccaaactgtgttttaatacatgatttgttaaaaaaattctcttaacacaattcttccataagaatagaatataatagaagaattatattattgtaaaaattatttttcgat

SEQ ID NO: 18633 - DNA, 3743 bp, Cannabis sativa
tttcattcctattcttattcccattctcatttccatttctatgttttcattccttctaaccaaatgtcaccttagggtttttttttagaagtgtgatcaaatagaagaagttgagaacttaccagaagttgtatcaagtgttgatggttttctgttcgtaatcaacatcgactcgaaccctaaggaccctttttgagaaagagcaagatttcagattgagaagcttcaaattatcgagctttggatgaaactattttgggaatttaggggattcttaagtgggttggggagagaagcttgaaataccgtcagtggccaatttggccatgacagagtgctgccatcagtgatgcaagagggagactgaagaaaagacgaagagaggttgacggagttagggttcgagaggaagaagaaataaaaaacaaaaaaaaaaagagaaaaaataattatttataaaattatttttatgattttttaaatttaaaatatttttaattattttttgtaatatttaaattattaatattaagtggaccaataaaaatttgctacgtgtatactttagtatattgtgatagtccatcttaacacttaactgttcaaagtaaacgaaataatagagactgaaataaaatcgaaacttagaaagttctaccccaaaaattagtaataaaagttgattgtgccaaattcaaagacttagaaagtttgaccataaattaattcatcatgttttgcactttttagtggagaaagcattaattttgtctagtctccatttgttttgatttgcttttattgcccttaattgaacatttttgttacctcacaatattgttagagtatctctataggtactctttattttttagctaaatattggctaaaatattaaaatagagaatcacttttattatttactgtagttaatatttaattattttattaaatataaattaatttaataaaatattaaaaattaataatacttttaattaaaataagcaaatgaaaaaaaaaaataaaccctacatttaaacgaattagcttatacatttaaacatttccaacattttcacacattatcaatcaataatcggcttggttttaatgtacatgagatgagataatagtgttttttgtctaactcttaatgttaataataattaagaaatttactacgaaaaatgtgaaattaataatgtttaaatcaaaatataaactaattcgtgtggttatgctttagactcactaatcatactatgtgattcttctacagcaaagatgaaaaaacaaacaaaaaaaaaagtagcaatatttgatcttgtagagcaattttgctacatggctgtaggtttctcacaagcagaaaaaaaaaatgaaactttgtttactttatttaaatttattgataccgtattgtacactgtgggaagcttcttttacagaatcacttgaaaattcaattcattggaattgatttatactgtttgatggtggatgttatagcttgttcaactggtagcctctccatgctcgatgcaccgtagaatccgtgaactcctgttgttctcttcagaataaattctgcctctctaggaccagaaataggccctgaaagttgcattgcatttaagttaaagctaactgaaagcaacaatctatttctatacagggaagtataacggaaggattcgaatttaaaagctgctgagatgttacttacctccatggcagagaacaattgtgccaggattgatcttatgggaagcatctgctatttcctgtacgcgaacgacactttcttccaatgagactgctgtttttgcaccgatagagccagatgttgtgagtcccatatgggctactatgatatcagcaccagcttttgccatttccactgcttcatcttggttgaatgcgtatggggttgtcaagagacccatcttgtgtgcttttccaatcatctcaacttccaagctgatcatcaaaacaagggaaagctacaccgtatgatggttgaaataaaagatggcagatgctttttcttcttttgttcatttggaattctttaaatgacctattaagtttcttcaaatttatctaaagagaattgtgaggagttttctcctatttgaaggggggatattttgttggtatctaattgtcactagagagaaagcttttccggttccattgtgagtttcttgttttctattattttctttggaaaaactctaaactaactatatgtggcattggtcacttatacaatattactcaggcatatggcactatttatgtatccttttctaagaacacaatttttcattaaacaaaacctacctgtatcccattcctgtttcctcaaggttttgcctaaaattaccgtcaaatagcccaacggttggaaaattttgcacaccagaaaacccaattgactccacctgctttaggaagaaatccattcggcggaaaggatcagtagcacacacaccagcaagaactggtacagccttcacaacctattatatttgtaagttttgtattagtaataagaaaggcttgcaaagagtatttaaaacaagcaaaccagttgaaaaaacgtacaggtagcacttcattagccatgtcaagtactatggcatttgcatcagcaaaaggtaacaaaccagctagcgagcctcttccagccatacgaaaacgccctgaattatacagcactatcaaatcaacaccaccaacttcctcaaactttgctgatatgcctgttcctgcaccagcccctataattggtattccgctgtttatctgatctttcagttgctgcagcactgcccgagttctttgtaatgtttctgttgcaaaagaaacaggatagttattagacttgagttcaaaatggtcgagaaagatgttcacatattaaccataaaaagaccggtggtagtactatctaaagaataaaaagcatgacaaaattgatgtcatcatacagaatttaaagctttgccaaatccaacggtacttttaggaaataaactgtcttaacaaacacctggccttgcatctggaaagtcacttggacttcgtgcaattgtatgaaaacttgttaaattcacatttgaaacatgattcttatcaatatcttgtttcgattcaggagtagattcttgcagaaagctggaatctgtagaacccttcacactgatttccagaaatgcgtcgactaatgcattcgcaaattcaagatcgtttatatgatgaggatatacctttacctgttatgaacacaaattgcttgtaaatatcaacaaggccatgcacacgaaacagagcaaagaatgaaaatgtagaaactgttagcaataccttccgatcttcatttgtctgaattagcttttgcagctcttctatgagagaagtagtaatctcaggatcataaaatgacttccctggtgcatccaatgcagagacacccttttgtggaagacaaacacaaaccttagatgatgtcttgttgagcttatctgctataaagctagcaaatttcttgttctcatcaactgttgttcgcatgagtgaaacctggagagaccaagattaggtcaaacccataatcacctgactcaccagaacagaaatcgtgtaagacccaagataaatataccatctaaagtgaaatagcatgacaatcactggcaccagatataaaaatgaagggtttattactgagagat

SEQ ID NO: 18634 - DNA, 2302 bp, Cannabis sativa
acactattagtccacggggctacgtccagagaatgaaatcaattagtaaagtatcaaagattacaaaagcgattgacttaagcaaatttagactccctctaataatttcctgcaaccttttgtaatccactttgctaatctaatctctaaaacacaccaaatagtaaactccctttagctattgatatgtgcttacttcctcctaaagtaaagcttaaacaaattttttctcgaatatgctcacttcctctcgaaatgagacttggaaaagtcttctcccgaagatccaggcttgttcaaagcttcttcatcttattctatgaattgtaagagatcataacaagaaaatcaaagcctagttgaacattctataatttttacaaaagaaacactcttctcacaaaaatagatatgaaaatgtgaaactaaaagagatagaaacatttggctgctctctaggtcctatttatagaacatgaaaaccctagagacagtcacaaatacatttttccaactataaaaaactttcttaaaaaattccttaatttgcagcatcaaaatcaaactctgttgcattagatcaggaccaaacaagaaacttttcaaaatggaccaagaccacaatttagcttcaatacctgccaaataaagttaattatttaatctggtataatcatggcaaaattgaattcatcaattagaaaaatataaagtaaagtttcctaaaaataggcaacttccataaagataattccttctattgtattgtatatgtatgcataaaaatattataattatactgtatattttttatctataatattttaaactaatacttttattatcagttggttgtaggattgaattaatttatgtataccctatgtaaatcaacattaaaaccgtataagttagaacttcagattttccaattcaattaaatccgtacaaataaaaatatgtgcaacttgcagatttagttgaattgaataatacggattacatcaaattgaattgagtattttatatgaacacctaacttctaataataacatgttcttttacaactaataaccattgtaaaatatatattacgaatacattacatgaaataaaaagaagaattacaacaggtagaagtcaaatacagatattattaacgttcatctcatccacatatagaagttcttaattaataataatagaaagaaactatgaatagaaacttaaaacacgcgacaagccctcccaattctcacatattaatagtatatacgtaaatctaatgtctatataaaataagcacattcaattaagtacatacattccattaattctctcatcaaattaacatttcatttaacaatggcaaaggaatacttagcaactacacttctccaattcataatcattagtgtcgccgtggttgttaaggccgatgatgcatcgccaattccagcctcgaaaggggaattggaaggctggttcaggcagaatgtgaagcctgtagccgagagcaagggcctagacccggccctagtggcggccgagtcaggccctgcgaaagtgattaaggtgatgggagatgggagtggagatttcaaaacattgcaagaggcagtaaatagtgtccctaatgggaacacaaagcgtgtaatgatcgtactcggaggaggagagtacaaagagaaagttaagatcgaaagaagtaagccattcatcacgttgtatgggtcacctaaagcagttcccacgctcacctacgatggcacagcggccaaatatggaactgtcgatagtgccaccttgattgttgagtctgattattttgtggcagcaaacataataatcaaggtgtgtaataattctaaaatgtttattttaatgtttctattattatttttataggtataatttagtatcaacattcaagtgcttctatagtactcactaatataggtgcactgatggattggtatctaaatggtatctagaaaacaaaatttactccaatttttctttataattatgtatgttctagttgtttaagacattttgcaaaattttaaaaaattcggaataatttacaatatagaaaataatgttcaaacagtctatttcatacgtgaataaaataaaatggaattaccccatataatattttttttaattttcttttttttaaaaaaaaaaaattacagtttaagctactccagtgatttctatgtatgtcgttgtgtggattttgattgcaatttaagttttttcattagttgctatatgtgtttttatgtgaattttt

SEQ ID NO: 18635 - DNA, 15577 bp, Cannabis sativa
ttcaaaaatttacatggataataccgtaactataacgaataccgctataaaaaaaatttgaaaaaaaaatatttcgccatgtgatttcaaacgtgaagattgactaataggttgttgaataggaggttgtaattaacatttatcataatacattccccttgtatacaaataataaccacttttctctcatcttcttcacactccttaacttagcagagaaagttcatattgtgctttaaaaggtaatggtttatttcttttaaagactttttttttatatatatattttggaggtaatctgctttggtgaacatttgtcttagtttagagtattgttaaagttcaaaccttttttgtattttcttttttcctgcactatttgaaaaaagttttgggaaagtagagagtgaaatgaatcatttttctagtggcacatgaagagtgtctatgtaggattgtaaaaaaagagagaggaagttaggatcaagattattgtgggttgtttagaagatttggggaggtggttttctttatttatttttaaaaaaatggattgtataatttttggtggtgagagaaaaatagagaatgaaaaaaaaatatatatattttcattgttgtggatttgttagtcatttttgtgctttatgaaaaaatataatttttttttattatttttttatgaagaacacttagagtatcctcattagcaactttcaaaatagttaatatgtaaaaaagaaaagaaaaaaaaaaagctaaaaggttcaaaatagcactcatcatctccttcataaccttcttcattttaaagatgcttcaaacccttctctacatgcagagaaaggatgaacttcttcaaacatattttattattttctctctctttttttaataaaataattaaatttaattcatttttttttttcttttgcttctttattattatttaaaataataaaaaaaagtttaaaatattatatttaaatgatagaaaaagaaataaagaatttgatgtatggtgtgatgttaagaaaaaaatagagaatgaggttttaaagaagttgatgagagtgaatattctttttttactttttttttcctaatcaaaatccatttctcatataatttggaaagttaggaaggagatacataccaactataagatatgataatgataacctttatttgtttgtgtatatcctttgattaaatccactcacattagaattaggattacccgttaatgattgatccactttgatgaattcgccctctgaaacaagaaattcggggccttaaaacaacctgctttctagatgatccttatagaaaaaaaaaaaaaaagatttacttcattctcaatttctattttacagaattcttagaaaacacatttttttttctatcgagctaaaaaatttcattcttttaatatctcaatgaaaatcatatagacaattcctatttattgtagctatttgtgcaagtattttacaattaagaaacaactgctttttgtaagattgtgtatgaaaatctactttcctgtagtataccttatagtctcgtattactgcatttagttgagtgatccacaaacgccgaaaatatctcttttacttgccactacgcataatttggtgccttttctaggtttagacttactatatccattgtcttctacttagtttatcttgcatttaaaatgtgttgaatggcacaacaagagttgttcaagctaacctatacctatctagatttctcatacttgtaggaatattttctgtgcctctttcaaatggagaagttagcacaatatttaagatcctttgagctgcagcggggtattatcggaaacacagttgacgagttacaatatcaacttatttcagcattgaataaattgaggaatgactttgatacaaatcaaagtttgctacactccatctttaatgagattgtgcaacgtgagaaagaattggtcatcaaagagaagcatatgaaagatggagtactccattttaacactgagtatgcaagaattactgagttgaaagaaagccaattggataaggtgcaaagatgttatgaaaactgcttgaaggaattaaatttgaaaaaagaggagtttgaagttgttgcaagtaaaaccaaacaagaagaggaaagactcgaggcgattcgaaagtctgtaaaggaatgctcttgtcaacttgaattggaaaagaaagaagttgagtatgttaaagtatgcaaagagagcaatattgcctcaatcaagaaatcaaaggtggatatggaaagttttgtgaaattgaaggaagaagaaatgtggtctaaattggaagagcttgaattgttggagatacatgtcaaagatatctttaaagaggcagagttgaaagtgaagagtgtatcttctgcccaaaaatatttacaagaacaaatgagtaaacaccaacaaaaagagttggaatttgacaaaaaagttgatgaatttaaacaaaatctgcaacagttggagttagaaaaatcagcatggttggctgagaaagacaaacacaaaaacaatatgtttgtaaggattgaagaacaaggtaaattgtgtgttgtttgtactagttattgagtatttgctgcctaacttaatgaagagtctaattatcattgtttgttggtctcttcagatgtggaagtaactattcaaaacctcattgaaatagaggaggttattcatgctgttactctcatttgtgaactcaaattaactcacaagttttcgcccatgccactactgcttgattacatcaaccatgctgagaatcaaacctccattgtttgtggaggagagagatcaaacaaagacaaggtatatatgatgaaacttagtctgttacaaatatagtttcttattatatatccattctttttctttgtatgtatgacagattaaagccactaagaaagaaatagctctattgaaagtagtgaagaagtgtgttcaaaattgcaatctccaatcagttttcccaagactcgaattctaccaactgggtgagcgccttatccgtttggaagggaagcttaaactatataaccatgatgaaccctccagaaaaagaaaaggccaccattcaaacgttagccaacggattaaaatcaagtatcctcagaaatattgatatagctaggttgtgctgagtgacattgcttaatgcttttattagaaaaacagaacacaaatgacattgggtgttctataatgcttcatcaaaccatgtttgttttgcttaatcacatggtttaattactatagtgctaattaatatgaatgtaattaattatccatgaacatgatgatgactatagttctatttatttttcttattattagactgaagtatggtaatattgaaacaaggcaatggagcagcctaaaaaaaatcctaaaacagatgagaaataaaatctaatgcatcaaagtaaacacaccaaattttacttggttcattagacaaaagacaatgtgtctttgctacctaatccaaggtgatacaacagcctttaatggctgagaatctttattccaaaaccaggtgacacaacaactcaaaatgagagattcaagatcaaagaaaaataaaacagaattaaagaaaggacattagtccacctcaacaatatgaaaatccaaaagaatttttttttttttttaaattggtattttgttggaacacaaaatttggtattattccacctcagcaatatcagcctatttttgtaaatatattgataaaagttgtatggtattgtaattttacttaaaaaaaaattttgcatggttctaatgaaattgatattaataaacaaattgggatcttcaatttctatattggagattccaatgtcagtttccctcttcttcctcgtttgactttaactctcatctcatggtagttacagttgcagagccagaaaaatgagagctttcaccactacaactacaattacaagagaaggactcctcttccttctctttcttcttgtaaccaatctttctctctccgaatgttcaccccattgcaaagcctggctcgtccagtcaatcccaaccgatatgccacacctccatcgtgtacctggagtcctctctactggtaaagatcctatttttccttgtttgtttcccgagaaacttaataagaaattaaaaagttcattgctttaatatttatatatatatatatatggtctggtttatggatggattaggagacgtattccaatggcttgctgggaattcaactcatcgattggacataatcgcacagtattggcagctgattgcttctcctaaaaatcctaagtcaggggattatggatactccaaaaaggatttacagagatttggtgctaagcaaggtgctgatgtttataaagctttagataaagctgctaatagaaatgttagtatcaggtatgtgatgtgaatgtgagtgtaattaattattgattaattaattaattaagtaattaataattaatgttaatttgatattttattaggttactatctcactcgggagtatatcctgagtttaccaaagaaccaacggagcttgcttcaggaagaccaaacgtaaagactgtaactttattacttgatcaatggtggggttcaggtatagttcatgctaaagtatggatttcagatcgtcgagatgtttatattggatctgcaaataatgactggaaatctttaactcaggtatacaaaacttgcttaatttgtcataacccgtcatttaatgaataggttattattgattttgcacctttcaattaagatcacttggtttgaaaataaccattttattttgtcttgaatgaaaaggagtatttttgaattgggtggctccctgaattcaaataacgtgtgtctgtggattttgtattactacagttgatacaataatttagcaagatagatagggactcattatttgcactctttcaagttcaaattgattattacatgtgtttttcttctaacatggctcgagtagttctataagtttatttggtccaaaaaaaaaaagcttcttatgcaagcttcctttatagcagaatgtccatttgttgtctttaaagaaaaggcgaattgggtttttcttttctcccccgaactttgacatgtaccaaattgtgcctctcgaaactattgaaattgttcgattcaaggattttagtacaattacgttcaattttactaacgtgacgcttgtctatgtacccaatcgtgtccctcgaaaattctgtctacgtcaggcacccattagtaaaatcgaacggatgtgcttgaatttaacaatctcaataattttggagagagtatttaacaactttaaaaattcggagaagaaaaacgctaattagcctaaagaaaacgagtattgtggaattgagctgtcagcgaattcgaatgactttaatctgtagtttctgtactaacaattgatagattctcattccaagttgagacttcatgacaaaatgaaggtcagtcctttttgtgtaaaaagtttaatattagcctgcactgtttctctaatttgaccttttgttataattgatactgaatttataggaaacttcgtctaactgtttgtctagatgttggattttagctaaaccatgttgaacatcaataataggtgaaagaagttggaatttatcttgttggctgttcaagaatagccaaaaaggtagaagcctattttaacaacctatggacactttcagctctcaattcttcacatcttaccagaaccatatcggatcaacagtggcagattaaccgaaaagtgccttgttggtcacatttcatcgaaacagacagcaggtgtaggtgggtgtgtattaactgttttgaaaatttaaatggaaaattagtaaccccttatgattgtcaaaagcttagtaatgttttggattgaatttgttgtgttgtgtggcagggaaccttttccaccagttgtgaaaattcctcatgtagtgggatatcccatcatatcagatcctgtcttgtttaaattaccaattcaaactcctggaaataactattcaacttctgagcttcagtccagctatctctctttctcccctccagaggtaataaagcaaatatctaaatattatttgatatacataaagttaaatattttcatgttgtacttttcattaagattggaaaatttatccttttttttttctttttttgaataaataagatttctttttctctgaactatgaccctggtaaagttttgacccttaaattgttgcaaatatctcccttcagattcattctgctcattttttaaaacgatttgtttatgtggtcgttgcagtacgagagtctatttaacaactttaaactacctgaaattcagtttattgatagttaagcatgcaaacattagctctaaaaatatatatacatattccaataagttattattatactgctatttatgcatttagtatttatctgcactctcagattaacaacacattagtgctacttcacaaaattagcagaatttaataagaggagatatttgcaacgattttgataatgaaagaatttttacaacagaaaaataagttgggaaaaaattctatttttttccatgtagaaacaaaacttataatttatgcttgaaaaataaaacactagtcttacaagtcaattaacaaaatgagtaacttccaaaattctgaaaagttccaagtaaatattcaactgtatttggagtgtttttaattttatactattttcgaatagcaggtatcatttggcaggtaccaggctgatgagcaggcatggttagaaactatcaaatctgttagtaacagagccactttgaggataagtaccatggattggcttggccaatctcaatatacaaagcaaacagtttactggtcatctctttcctctgcagtatctgaggtaaaattccactagtgtatattctgtctactcctctcatgatctcaccatagttttgttttgtttatatctataatggttgacaggttgtgttctcaaagcaagcaaaagtgaagatattggtggcatactgggatcatttcatcaacaacacagaccaatatctcaagtcactcctctactccaatgtactatgttcttcatcaaaatacaataaatgtcatgggaaagttgagatcaaatactacatggttcctggtttcaacttgacaggaccagccattagtcatgggaaaaagactggaaatgtttaccctggttataccagggtgaaccatggaaagtatgctgtaagtgatgtacgagctcatatcggaacaagcaatctagtgtgggattatttttacacaactgcaggagtgagctttggcactaataacactgcccttgtttctcaattacaacatatctttgatgctgattggaattccccatatgcaattcctattgaagagttggaagatggtctttcatgttcaagttaatgtcttactatcccagctttctttttcagcacttcacctctgcttggcccacttctaattatgtacaattattagttcaaggaaagtacagcttttaaataaagtttatctaagcaaattataagttatatataatatatatagggagtctgtgctaaagattgtcgtctctaatacgatgatcgtagaatattttaattcttatatattttatgacgatattcattgttgtaatagtggacttcctctaaatttttaaaaaattctaaatattttacagtactgaaaacatatttcaaaatgtttgctgcacgcatttataaaaacaaaacacaaaaaagagcacgcgtgcaatgcttcccttcgtgggaatcatgagcccttagcagctcttgccctaccaatttaccagctaaaatataatctcttatttctaaaatatcacccttgttattgcattttctacaaccagtagcaactagcaaaaaaagacacttcaccatataacatgaaaaatgagcttttgttgttatgttggcgcagtttttcgtcagctaaaaaatagagaaacgacatttaagaatttttttttatatggtttctcgacttctaataaagtctagtacacaagtcaatgtattcactgtgaagaacttgcaatggaggtcaaaattctcttatggttacaatttgggcagagcttaggcggagttgattgtgattaacctagaaaaggccatgcctcctatgacagtggacaaagtaaagtaatggtgtcttcactgtggaattgcagtgtcagagttgagtgagcgcacacaaacacacactggaatggtactgcttgcattgttatctttgacctaggtaagtattagaagggagtgtgtctttgtactttgcaagaggtctcccagggatgagacacaagttggagtaaaaaaatagataaaaaaaaaacacctttcttttaagttgaagtttaagaaaggaagattcaaaagaagattttgtcctctttgcatgatttttcaggttttaagaatctctgttgtgtttgtggatgttgcggtcagggattcgattgctttcagataataatttggtagaaggtttaactgcgaagtttcgtgtttcttctcctcttgaggcagaggcgtttgaactgaagggggttccggattctttctagagcagagagataataatgtaaaaatatataaatatataaatatatatattacatactaattaagttactcatatgcattttcatagaaaggagtgcacaacataaaattagtgatcagtattcgcatacaaacataaacacctttaaggaaatcctcagtgatgcctcagcaaaaacaggttctaaacttcaaaatgatgccaaaacagatgcagacagtgataaagaaagagtaattgactcgccaaacaaaacatctttgaaactatttctattcagcaaatctgggtttcaaactttaatgcaatccccatgctgaagagttcctggctcaacaacttggccccataaggcacatcgaccttaacaatgtcgtcagctgactcgcatatcctacaatacggacccctgaccttcctgccaccagccaacgcacgttggataatgtaagcaatattttggcatttttggcaaatatgcatttgggaagagtcactcagagtaaagagtcgttcatgcaagtttgctgatgcaccatgggctagcaggcagtctcgctccatctccccaaacttgaccccaccaaatcgcttacgatcagccactggctgacgagttagagggtggacagggccagtgtttcggaattttactttatcttcagccatgtgaaccagacgctggtagaaagttggccccataaagataagcgaacgaaccatctcacctgttcggccattgtatactctctcattcccccatcttgaaaatccagccctatgacacataaatacaaattttacttgaaatcacttcatactatttaagaaaaattggaaatatgtagattctctcaaaataaatctcacttaaatcaatttttaataaataaagaacataaagactagaattgtgtgtacgtatagaagcaacatgaaacttggtatatgttgtataacaaagctacctgtgcagctgttctgtgatagcatcaaccgagggagtggagaaaggggtggcatgtctcactgggatcccctttgctaaagcaatcccttttcctaaagcagcctccagaagttgacctggagtttgtcgcgatggaaatgcatgtggattgatgacaacgtctggaactattccttgaatcgtaaaagggaagttttcttgggattccaaaaagcccaaaacacccttctgtccgtgcatgctcgagaatttgtctccaagaattggcgtacgaacctgcaacaagaatttggaggatgtaaaacatgaaaagaactgtcatgcaagtaccctaaaacatagagaggccctactaaattatgcaaataaaaatatgcatagaatgtaaaatacctgtctgagagagaccacagcaaagttttttccagcatcattagaggagagtacgaccttctgaaccatccccttttcagtgtgcttcagtttaatactatgatcaaccccagattcagcacacctacctataactatatcaccactctgtaggttcgcaccaacaaaaggaaaaccatcatcatctaagctatccacacgaccaattttacttggtatctttccaaaattgatgcattcatcagccttcatctttttgtctaatgattccgtattgtcaacctcagccttatagcttctaatgtgttcagatcgaaacataccgcgctccaaagaagctcggttcatcaccaaggaatcttcttggttgtagccaaggtgaacattgacagcaacaatggcgttctggccattgtagcattcattctttggataacctggttttccaagacagtcagagattattgttcgaaagaggggcctttggggataatgcaattggtgagacaaagtatctactctgatattaggatttgttgttgaaaagccaatagcctgttgagaatgcttctgagcctgatacaagactctccttgcatggtcatgatttgcaaatggtatgattccacagcttacactcaacaaaaaagacatgtccagttcacagtgtgtatattcaacaggctttcccttatcttccatgaaaagaaatttgataccccatgcagttcggcaatcctcctcttcttcagctccaataaactcaactattcccctatcaagaagagatcggaaggtgtattttccagctttagattgtgtaagcttacccaaattctcaacaactagaaggggacgcaaaattcttccagcatcagaaaatatattaacttccccgtgagttttgtctcttttaatttccacctacaagatacaatcaaaacagaacatatcaataaatataaggaacagcagaaatcacagcatatcaatgtcaagcaaaggaaactaaagatatttgaactgcgtaaaacagaaattccacattgttaaataattctaagatttttactattgcagttcataaattcaatgaactagtgcttctgtcgtataaaattttgaaagatgtttacatctttcaaaagtctcctcaactacagaccatgaaaattaatatggttccaaaatcaaaataacataaacctgaaaagagaaagaaagaaaaaaaagtttctgtagagaaaattagagagaacctcgcgcggcaattcctttctgcgccgcattttcctcagtctccaaacgaaggcaagggaatcgacacaaactcctacccaatccccattgagaaatactttatctttcccatcaagtggtgtcgaagtatcattcaccaatttctccatgccactatcgcacaacttggaaacgagggattctgctacttctaaacttactaatccagttgtacccaaatttttcacaagcccacaattttcaccgtccggggtagccaaaaagcaaaccttcccccagtgggaaggatgcctgcacacaaaatgttacaataactatgattataactttcagcaaataagaaaaaacaatgattacaaattttataactactgatgcaagcatcatagagctaatcaggaaatcatcaatcatcctaggatcatccatacaaattctaagaaattattgtactaaaatggacagaaaattgattttgttcaaagcaactcacgggtatctagcatctccaaccttcccagtgtactgaacttgctggcgtgtttttctcatatctacaattgtctgcagtggatttgttcggccaacatttgccactacccctgaaatcctttctgtccgcttgaaaggatgacaccatgccccagttgagaaagctctcgataaaccatttgtgactatagaggcatccaaatagaattcaatcggccgcaatggcctttctccataaaggtccctttgcaaagccttagccatgcgcttccgtgcatgggaaacatgagcccttagctctcgctctagcaactcaccggctaaatctaatctcttatttctaaaatcatccttgttattcaattttctacgaccagtagcagcctgcagaaggcacttcaccatataacctagaaaacgagccttttgctgtgtgcttctcagatttggaaacatatacatactaaggcattcttcaatgctttctttaggaggaaacaaagtcttcttaagctgtttatcaacgtgagtgagagctgcttgggatttacgaaagccatcacatgccttgtcagcagtactaattgatgcaaagagtatattggaaatgctagcatcgtcagtggcaaaatcaatgagatccacaacttccctgtcggatgacacgccaagggcaaagaacaaaatccatacaggaatctcagttgacaaaaagtaaacagtaaggaccttctctggtttagcatcttcaacttggctgggcgctagcctaataattaacctattcctctttacttctgattggaatgcaactgtcagaaaaggatgactacttatccaaagtctcttcctacatatctgctcttgagcaataaatgtctgcaatgaacaacatagagatgttacagcccagtgcttaattaaagtaatacctaaaataagttacatatataaatagagagagagatcttggcaatccttcaaagttcaaacatgttcatacatacattaaccttttccgattgtaaatcatatgtccacactgtagataattatgtaaccaaccttttcatcatttacaattgacaaatcatttggctaatgaacttgataatgcaccactacaaaatacataatagtataatggcaatcacaaataaaatgtcacataaaggagatattactagtgatttctaaagctgaccttttctgcgcccttgactataaaatagcctccacgatcaaaatcacagtcatctttctctgcctccttcatccaacaaaggtcagactttaccatcaccggaatctttccaatcatgacctctttagactccgaacttacaaccttcttgtcaaggtattgcgcctttccagttttgaatttgtcactactagtcatttcttgagtatacacctgaagaacaaaccaaattaataataatactatatttaaaaaagcagccttatattgaataaataaatacctacagaaatgggtcaatatgaagaaaacaatattaagtatagaacataatgtacatgccatttctttacatatgacaaacacatgcacagacacatattttcggtgagataagttacactgtatagactatatagattccaaacacgaataccgtaatgaatcaaaatcttccgaatttaagagagcacagaatgtattgaacaatagaagatatcaaaaaggcctccaataataccaaacagaaacatgtaccttaagatgattcccaaatctatacatgcattggcaataaccatataatagtatagcatgtcaattaaaagttacaggggcagtgcagaacaatcaattttcttttaacaaaacacttcacacatactatgtatgcatacataatcaaaaaacagcacaagtacaaacaattaaactaaaatcagaaaagtggagaatcagtaacccaaaagaaatagaatattttgtcacataaaatgtttaattgtcacataaatgacaagactaataaaatgttcagatatcatttgatgctccgaaatattcacctcaatattaactgtcacataaatccttgacgagtaagtcatgttctgtagtcgagcgtgcctcggtaacatattgtactctttatctttggcagaaccaccccaaaaggttggctgaacaagtctaacctcgccaaaacgcactgaagcatatcgccaaatctctgtctttttcgatgggtcatagccaggctcaactgtaagctcgccaaacgactcaaaaaccctctttgcgccatttctgatgaaatcgttgtacgagtttatctggtgactgatgagtccatactctttgaagaatgctactgaagcatccttgcagaatttctgcaaaaaaccagctcccagatgctttatgcttgctggttccatacacttgtcatcatcaaaatcatcatcatcatcatctatatccatttcagtggtatttgaaaacttatctcccttgctactcatagctatatcttccttgggatccgaggacgctcccatttgagattaaatctggaaagaaacaatagaaacaacgagcaagtaagaaagaatctgggtgggaaataatcctaaaacccttcataaataagaccaattctgaaaaccccaaaacccctaaaccctaaccctttcatcagctgaaaacaaactattaaaaccaatgcaaaaacataactaacctttttgcatgaaaagcaaaactaaatcaactacacagagtactttccttcaaatcaatagcaaaaaaataaatattataacagcttcaggaatgaatgtgtttcctttcctaacatgcatacccatttccttactgtaataaaactaaaacctttaccatcttccttaaactttggtattttgggtattcattccttactaacaacaaacacaaatcaaaattaagcttagtacacctctcaggtctcacctttgtcttagctagaaaaaccctttccggagaaaataataaataatcatctattcaacatcgcgcaagctaaaattaaaatgatttactgttctaagcaaaaactcaccgatcatcggaaaacacaagaaaatgcatgaatattttagagagaatcagaaagataacaaagacttacggtaaaagggggagtgtgagagttaaaaaagcaaaacccttaaccgaaaacaaatttgaagaacaagagaggagaagatgaagacgaagatgaagttgaagggtcttactcaggctaccgaaccgagtacactctctcagtctcaccacttgactggggtctgttgaaacttgaaaatggcgtcttttttgtgctcttttcaatttcacttacctttatcaatattttattattcttccttcattaaaaaaataattagcaattttaatccctaaattttcaataatgttaattttatcttttaaaatatactatttattaaaaattcctccttaatttttacatttacaaaaatttagtcattttattaggtttttcctcattatttcatttacatattgacgtatctttgtaaattagtagctttatccatgacaactattaaattgtacccctccaaataaaaataagaaaaatttagtccatatttggcatcataactaaaaaattgttttttgttttttaaaacagaaaattgttttttgaaaacaatttg

SEQ ID NO: 18636 - DNA, 3547 bp, Cannabis sativa
  modified_base (2049)..(2054): a, c, t, g, unknown or other
acgtcgagttcatgaacattactgatttgaggaccatgattaaaggtttgaccgctaattccagcattggaaagggttcctccaactgataagtacaagtaatcagtccatgacttgggagccagcccatgcattagggtatccattaacacctgtatccatagctccccaccccaaacgtccacgaacatctcttctacacaaactcgaggtctcggccgctgatccaacgactcctgctccttcgatttcgacttcgacttcttcttcttcattccccacgaacacgatctgctcattgcaatcacaatcccgttcttcgtctgggcttgaccgtttatggaatgcccttctcctcttgccgaaacagtcagcccccaactcgacctgtaagccgctctcactacccttgccacgtcctcagccgacgccgggtgcaacacggctaacggcttcgctcgtttcattaaaccaaaatccttagaagccatttccacgtcagcttggtcaaggcttagctggccgtcaattgctagccggagaacatccgttagttccatggttaaccctactttaacaatcaatctacaaatagcaaaagttaatactaccttattcatgataatatatttatatttatatatatatattgggtgatatgactgatgagagatatgtatctatatagttgtgtatttatagacgaatagaagtctttcaaaatgtgaagtgtgtagggtttggtgtaaaggataagaaaatgtgcgcactccccagtactggaaagaaaatatgggcgaggagtataaatattatacataacaaatactactcagaacaaaatctcgtggcagtgttgtgaggctaacgtaagccggattgagctttaaagattttctacgcaacaatccacacatgttctctctccctttattattttttccccgttacagtatatattattgaccaccctaaacgcatataaacctctttttaagaaaattttatttaccataaattataatctttgtataattaaaaataaaaaagatttgcatatataagagaagtaggcgaatgtgtgagggtacgtaatgtaaactttgactgttttattttgctttagttatttgtttatttatcttcatacagatcatacaggtattcaaagggcaaaaaaatatcatgagcattgctatttgcacagtgaaattttatgcttttataataattattattaaattacttatttaataatcaataaacactgattaatttacttcaaaaaagtaattattaaattaaaatatatcataatttaatgtttaattacactaataaaaagatattatacattttaattatactctcactgctacaagcattgctcaggctatatttggaagatagattttagtgaaaaagaaaaatgtaagaaaaaattataaaagtgtggagaatataaaaataaattattttttttatgtttgatatagataattaattttgttaaattaagtgtctatagtctatacatacatttttttttcatactaaatattacgagaatttattattttttcctacatttttcttactaaaatccatttctaccataacactatatttagtaggaggagggggagagagtagttgatgaagggagagtcaattacccaggagggagaaagaacgttcgggagaggagagttaaaatcttaaaaattcaatctctccacttttggaaggattaaagaaaaatatataataactatatgaaataccaaaattaacctgtaaaaaccaaaaaatatgatagtatagtaattttaacaattaatttactgttcataatttactcttacttaatacaaaacaacatatataaatgagttattattctctcaattaattcttcctactccccatgctctcctaccaaacatagcctaaaacaaaagtatgagaaatgttaaaggacaccagtagtgcctagtaccctcctatgtgtcaatatcgctattggtctaattaagtatcgggtcccannnnnnttaatataatagcttttagaaagtatcgctagccaatcgcaacgcgacatgttaagaaagtgctaggcaccactggtgtctaataacaatgctctaaaagtatatacaaagttgactctaggcatatcagtaggctagacttgtaattagaactcacataataaaaattattacaacgcttttatttaattaaacttaagtgtagtatgaacaaagattgtgtaggttgagacatatgacacatttcaaagtaatgtaggttcaaatcctgtggcacccatttgaatatgttttaatattttgcaattatatacttaaaagatttttattattttttcctaaaaagtttctctttattaatttaaagttatataagctctctttgattatttttttctctagtctacaatcacacactcacatatttaacattgttgaaaaaacatttattaatttaatataataatatatatggtactttctataaatattgtttgatttgattggaaattactttggttaaaatctaaaatatagtcttcattacatgtttagattttatataggtaaaaattaattttgtgttaggactccaaaatttaaatcactttattattcctacattctaagggctggcttgtatatattaagcatatgattgattggaaggagagagagtaagaagtatagagagtttagaaaagatgaaaagtatggagatatattgttattttttttttttttttgtattttttggtattaaatataaaattagaaaaataaaaagtaaaataaatattaaaattataatacaattttttttaatataaatatatattattttttaaaaaaatatattaaatattttatatatatttttgtcttttttttttaaattcttctctatttgaaagagattgaaatttctatgtttagagggagatagtctccctcaaaaattctctctctccctctattcttctcctttcacctcaattcatctctcctcctctcccctctaccaaacttagtgtaagtatataaacttcaaaacaagaaaagaaaagagaacagagaatatatacttatcgagtggggacgtgtggccaaggcgacacgtggcagttcaagtggatagcattatgtaacacgtgtcaaggttaaaggaggtgtatagaaagtgggaccaaaagagtccaacctcggggctaggcaaacgagggaaagcggtgggaggggaggcagagatcatggattagggaatctgtgtggggacggggccgagggaaagttcacgtgcttgctgttgctgcgattatatattagacttggggttttcttagtgtgcacccaataaagattctctcctttttattaataacaataatttattattaataataagctaattagtaattttttccctaaactttgacatgtactaaatcatgccctttgaacttttttttccgttaaaaattctccccgaacta

SEQ ID NO: 18637 - DNA, 5613 bp, Cannabis sativa
  modified_base (993)..(1002): a, c, t, g, unknown or other
  modified_base (1196)..(1196): a, c, t, g, unknown or other
gaaagttgaattttgatgacgaaaaaaaaaagaaaaatgttagaaaaaataaaagtgtagaataaaaataaaattatgttccgtatgaaaatttttgttgaattgaatctttttcgtcccattatttttttcccataccaaacatgagagtttcttattattattatttatttatttttctatatttttcttacctttttttatctattttaaaatccaacttttaaacataggaaagacattagtatctataactatttctaactagctattgtttatcttattataaatatgttggcaattattggattatttcttttacattcatgattttatgaatgtaaaagataattttttttttcattttaataaaagtgttcatatataaaataaaatattagaaaataaaacctctatataatttaatttgtgaaccaacttctttcaacaaaaccagatacattatggattaagactgagagtgagctaagtgaatataaaaggtatcacacaacaatatttatgtattacatgtatttgtaacatgtttctaatgaagaattaaagttaaatattaatattgttgatcaaaagaagatcaattaattaatttagctgattatggagtttgtgttgtttgtgattgggaagttaattaggaagaattaattgctgaaggccatgctttattattatacttaatgataaagtggtatctttaattttcataaacaaccattagggcaagattatccattggtttggaattattgtctttctctaatgaaggttacaagttttgttgctagtttcaaattattaatttaattttctatagtttcaatgtaattatgtttttaaaatattgcacttctatactttttggaattttaatatatttaaggtgcgtttggtaacagatttttttgtttttaaaattaaaaatatataaaaaaaaattccaaaagcatattctataaaactgtttttacnnnnnnnnnntttaattgagaatcaaaattttttaaataatttttttatcaatattttggacgcccaccccaacttagaccttgtaactcggacctagaccccgacctagaccctaacacaaacccggacccagaccctaacacagacccggacccaaactccagccttggccctggacctgacttaaataaaatcaacaaatnaaaataaaaataaaatttacataacacacttttattttttgtttttaaaattgaaaaacaaaagttgttatagaacacatttttatttttgtgattataaaatttaaaaacaaaaatgttaccaaacgacacattaatgttaccaaaatattttattttttatgctattttttttctttctttcttttaaggctccactgggcatccctatagacttatgactcttatacacaataacgttactttggtgtttcatggaatgacgtttgaccctgcaaaccaacacgtgtctttctagcgtgttttgttctcactcgcacacatttcttgggaaaacttcctaagaggtcacacattctaagatcactcgtcaatcatgcttaactttagagttcttaaatgatgaaccaccgaaaaaaatacattttgttgtcattgttagttctcatcaattcatttaagtcattttcaactgtataatctcatacatactcagtcttaaaatcatcacatttatcttttccaaacgatgttgaattatacaatttactgatatttctccatacaaatcacaagactgtgactatcacaacaataccacccattttggaaactctagaacatttcttatgttgttttagaaattatttattgttttattagctgtaatttttttatattaatcgtatagttaacaagctcactgatagattgtcaaaaaatgctaaattttctagccattttgctcgtattattcaaggagagagatcctcttgtgattcccatatttctttcttgatcaatgaactaaatttttttagaaaaaaaaacaccaaaccaaaaattgacttctgctaaagttttgagttaaaaattctcatttggtatggcaaagatgccaaaacaaaccacatccccaaagctaattttattatgcttaacatctagagctgcattaaggaggaggtttccaactagattggaggtgccttaaagggttttcattttcacaaaaacaaaataatttttgttaattattgttaattaggtacaaaattaggtcgattatgagtaaattaattaatattatagctattaaaaaattcagttaatgtatataagtggaaaatgaaaaggcaaaaggagatgaaaaagtgtgaaggttcttgaattaggaataggaattaattaggaaatgtgtgtatgaaaccttgtataaggacattggctttttttttatattattattatgatttatgagaaggacattggaatttagttaaagtgtttttgttccactacctttgttatatttgtcctatgtggcactaaaaattatggattgtgaacatgaaaaaaaaaataaaaaaaaagggctaaaattaatgagaaagatggagatgaatagaagaaagattctatagtgtactcaatagtaatttgactcatgagtgtgaaaagaagccaagattgtatgacgtgtccttaagattttcataccatttgttcactatgatatgactctagtcaaaaacgaataagatctttcttacaattttgaaattaattagcttaaaaaaattgtacccaactaatgtaaatgctttaacaagtggtcgagagttcattaaaactaaagttaattaataatttggtatattgtgtaatgtatattttataagaatgggtgaattgcgacagaaataattttagatttaatgtatttaaatattttatttttatttttagagttaaaaatacataatgttacaattttttttacatatgttactactaattctgttaatggataaatatcaaaaactaaatgttatttgttttaaaaaaataaataaataaaaaagatacaaaactaaattaccataattgagtgaagtaatatatgtgaaaattattatgaaaattagtttttttttaaaaaaaaacaaaaaaaataagtagcatttagtttttgaaaatagtaaacatgacctaaataaatagttattcaggatagtttaggatgaagatgaagatgaagatgaagatgaagatgaagaatgagtaaatgtaaggatattaagatatgaaagcacaaaaggaaagggaaggttgaattaaggaaggaatggcattatactcttttccgacaaagttgctttggtaagtttcatatagcttaaaacccactctacttctatcactattatcactattcactacatctatgatgagtgtatttgtatatctatattatgaaattgataaaaccaaatcattacactatctatctatattgctttattaaatagttagcaatattattatattaaacttatacatagttacagtaataatattatgatatttagactaagattgtccttaaaataggatgatcttaaatataaaaagagaagtgctaccgtcaatcctctgctataatttcttagttaatcttcatgctcgaaaacatatgttgaaatactttttttcaaaaaaaaaaattcacagcggtatttgttatgcttacaacattattcctgtaaaattttaaaaaatttcaaatagtttacagaacagtgtcgaaaatacgtttgaagttttttgaacacgcgtggataaattagaaatattaaaggaacttttgttttcagtactgtaaactatttaaaaaaatttaaaaatttacaaaaataatactgtaactataacaaatactgctataaaaaaaatttagacatgtgatttcaaacgttaaagttaactaaaaaattattatagaaagttgtaattagcgctcctcataaaaaaaattattgagccttttaaaaaaaatcataatatttttaaaagttattacaaaaaaaataaaagaaaaatatatttatgtataaattaaccaaaggataatcatatttgcacaaagtcaatcacgcgttactacaagttgtccaccaaatggagtgttgaggctttgacaatagacccaaatcactcacccattaaactcaataccttaaattaaccttcctacttaaatgtactatttcaatagttatgagactaaaaaatgttttgttaacgaattggtccctaacaactctgtgagagtattcactgtagagattaaagaaaagaaagagaagaaaaatttctgttattgattaaagaagacaattagagagtttatatacaggacaattatgagctcaaaccagaaagataacaaactaactgtccaatacaatactgaacaatgtacataactcctaaccaactctaactataaggtgccagcatagctgtctttatgtcctcaaccgccctctttaaacttagtgtggttgagcaagccacacaaagtttgtctctgagaaaagaaaacttggagttggaaattgattttgtgagacaatcagctaattgaaggtcagcaggaacatgatgaatagagatttctttcttgagcaccttatctctcataaaatagaaatctatttcaatatgtttagttctggcatgaagtactggattggctgcaagtattatggtgcttagattgtcacaccagacaattggaggagtggaaactggaatgtgaagttttaaaaagagagattgaagccagcttcattcagtcataacagaggcaaggcttcgaaacttagcttcagtggaggatcgagagatagtattttgcttcttcgactgccaaccaatcaagttgtcacaccaaaaaatacaaaaatttgtagttggccttctatcatctggatcagcagcccaatctgcatcacaataagctttcaaactgaagtgagttgcctttttcaggtgcaaaccatagtttagagaccctgctagatatctcagtatccttttgacatcaacaaggtgtgattgcagtgggttatgcataaactgacagaccttgtttacactaaaggcaatgttacgtttagtaatggttgcatattagagagcaccgactatagacctataggcagaaagatctaggataggatcactgccatagttggagattctcataataaaaaatttattgtgatatttttaacacgcaagtatatgtatcgttatcaagttatagactcacaaaaagtgaggttgatcccacaaggattgtagttaaatactttaaattaaacttttacttatatttggttatatcaaatttaagagaaaattaaaactagaaaaacaataaaatcaatgaaaacaggaagcaagtaaattaatatgtaaattgacgacgattgaagattaaggtcattgatttcaattgtatctatctattatggtcttacatgattcaattcctaattaccaaattctatgtaatagtaggtttactcaagtaacttatagtcttctcagatatataaatctcaat

SEQ ID NO: 18638 - DNA, 4029 bp, Cannabis sativa
aaaaaaaaaaaaaactatttagtaaatttgctgctattattctcttagttttgtaactttcttatttcttatgatcgtcattttaaatgttgagtgagccgttagtggtgttggatattggtacttttatttattttcttatgccatacctgttcctttattaattatatatggtcaaatgcaaaggtgaaaatacacacccttattaagattcatactactcccctcccaccctttcatgcactccagatcctgtgattgatttattctaaacatttgcttttacaggaaataattgacgaagaggatgaaaaattgaacaacttaaagaacgagtgtggtgatgaagcttacggtgctgtgatcaaagccttgaaggaattgaatgagtacaatccgagtggtaggtacataatacaagagctttggaactttaaggaggagaggaaggcaccattaaaggaaggagtagattttatactgaggaattggagacagaataaacgaaagaaaaattgaagatagcgtcgaatcgcttttgtctaagccttttacagattattacagctacagcttgatggaatagatagaccatgttactggattcattgattctcttgccctttttgatgacggattgattggacttttcaacccaggaaccgatctactatactagattgggctaaaggatagttgacttgggcctttattgttcggcaatgaatttagattggtggtcttgtagatcaacagtgaccctcctatactccttacactgcatacacataatggattgactagtttttttgaaaaaaaaagggacaaatctttacaaaaggtcgtaggcatctcatattttgtcatccttctatagatttacatatccattatcctaaccagtcagatatatggctaagaacctctgtattggataacttttcaagtttaaaagtctcgtagtttttaaccgtatgcatctaactgatacataacgattagaagataaaaaagaaagaaaaatagttgcgagggacccaaagaattggtatttctccttattaggaatacaaagttatttgttataaaaaatgactcaaaataaaatacggtgatagaaatcttacctccgcatgtcaagggagcattagcaaaaccagccccacccacccatgtgcaactagtttctgtgatgtgacttacttctattggatctgttcatactttcatggctatggactacaaaacgaatccagttcattttataaaatttatatggtgtttatcagattttcttaatgtagtaagaaattatgtttaaatagcaatatgagtatcaaaagtctattatttatttttagggggcatgagtacttaatatttatatttaaaatttaaatattatatgtatcgtactttttataaatattgaatacttatactattaaaaaaattgtgtagcttcgtccattaaaatctgtagataaggaatgtcacatatacatgcaactgtttatctagccctaaagccttcctagccaggtggtgagcatcgtgattacaatttctggccacatgtctaaaacaaacttcagggaagttgtgacgagggggaaaagaattgtttccagtatttattatctttgctttcaaattaagttaatctataatctatattcaaggttgtgcgtgtctgcctctttttggtttgtcaggaaacttccctcagcacaacatgtcacatacggtttctgagctctactctttttttttctgagggaatctgtagctctacttcaggaaccccatattgtcaaaagttcaactaagctacagattttaatggacgaagctacacaattttttttatttattttttaaaaaagaatctagtagaaatggagcttttaagagcattcttggaagtttcctacaaaaataaatatagaattgagatatcttctctttttcagattgcatgtatatgtgacattccttatccaagattcgataatgattcttgaaagtggaaaccagatccgaaagtgaggtttttgttttttttttctttctcttctaaaggggtcaatttaggttttaaataattcaaacaataaaaaataaaaaccgaagctctctttctcctatttcaaatgatgcttcatcccatccttgtttctcattcatcttcaaccttctggtttcttgctacaaaaccagagggtatttgtggcatctcaaaatttcataccatgtaatgtgaccggttaaaagtatttaattcgtatgtggtgattatttattattaaaacagagctatcatacgagagttttactcaagtctcacaaattagatacgagttatgtctcattttggcaaaaccacaagaaatgaaataaagggcataagcaaaccaaaatatgacattccaaaagtcatccttttacaaagatatactacaatacacttctcttcttgacaaatatatatatactaaaatttcactggtatacttgtaaaggctgcgggcttgcaaacctttttggtgcagccgcttcaagcctaacccctaaaatcccttcactgttttcactattaaaaaaacagtgatactcacctcagtcccaccaatatcaatttgttaaaaacaagtctttctcacacttagtcaaacccctctccacattctaacttttacattctccaacaccaccctcagtcagaccaataagttcttagttttgcggatttaaaaagggaaaaaggaaaaatacatactcttcttttagagccgaagaaagggttaaaaaaagaaaattataaaagtaataatagcattatggcgggaagcctagaaaatggttgtgtgttgttgttgtttgactggtcaaactctgaagttcttgcctgtgaaagtttgaccgaactgccaatgagctggaacgatgttccacgacgtggagctacgtctgtcacttgctctcactctaaaagacagtgattggccaaccaaaacggcgtttgactgccagttttgaccccagttacggctcatggtcatccaaccagtctttgttcctttaacgctaaccttcacgatatcccctgcacccgcgacgttggagatcaaaaccaagttgaagtaacggaaaccattaattgtgaacctgatccctccgtgcttccggcatggcactctgtgtaaatcattatttaagaaaaaaaataaaaaaaacaggtcaggagggcagtttcgtaattacatagcgtgccacttgccccgtgatttaggcattgggaaatgttaattttcagcttcgatcggtgagtttaggacttttggttctgttttgtttcttcttgggttaagtgtttgattttaatttttgggggtcaaactcaatgttaataaaatgctaatttctaaacttaataaaaaaaaaactttaaacgaattttcgtaataatataatatatttttttgaaaaaaaaaaaattcgttgaagattgttacctataggtcttagaatgtgacatgtattaaattttttagtatggagtggtgcgtagcaataagtaacaaaaaaaagagtggccaagtaattttggcagctgcgataggaacaatctcatccaaatgtatgcaagatggaattaattcaagtagttttctaaattttttttattcttttaagggttgttttctaatctttgtagtttgtagatatattcttttaagggttgttttctaatctttgtagtttgtagatatattcttttaagggttgttttctaatctttgtagatatattcttttagtttgttaatgtaagggaccaaaacgggtaaaaacaaaaacccgacagcgacccgataggatccaatgactcaaggtgggataccaataaaccgttttaactaactaaataatatctctaaaaaataaaaattgtactaaatagtctaaatttaggatgacgctatggatatcttggctaatctattattttcattaaagagtatacctt

SEQ ID NO: 18639 - DNA, 8059 bp, Cannabis sativa
ggtcctgtccttagtgaagaacttgaattggctattcaatcttactaaaaacaacataaaaaaaaaaaaatagacagactccataggctataaagcattaaaaaattgaatcaatgacacacggtaagacaagaaactggctggacaaaaaacctaagattggaattcctatcaactaacatattagctgaatataaataaagctcataattttccatgtatatcagtgagaccttgttgtagagcaatatgtgattttctttttcttgaaacgagaaaaaggtcatgtcatgtacatgtgtgatcttctcttaaatatattgagagccctcgcttatggcggaggaagactggttacaaaacccgagtgtcgctaaacaaacaagttataccgcttggaaaattccagaaataaaactaaaattgcaataacacatatcaatctccaagtaaagcagaaaagtggatatctttaaaatcctttacattacgaagccaaagggctacgcaagatctgatcttatccaaaagattgtccgactgcatttacagcttctgtactaacttttaagcatactaatctacagcttaatgaaagcaaggaaaagcaaacaagaagctcatgaagcatagattgtactattttatctgggctacaaattttcattatagaacaacaaaaaaaaacatctatgcttccatcttattaaaaatagctcaggtagttaccgagaaatataactatatatagtatacaataattagagggaagagagattacctggaaaaatcttttgaaggtagaaaagaattgatattccatcttcattttccttttgcaactcagaagaactatatagtacagtctcactgtagtacggggtgaagacactattctcaagcacacacacaaaaaaaaaaaagattaataatttcatgctgagaaaaacgaaatcggcttataacaagaacaactaaactcatatgtaccagaaagggaccatttcactaactggcttggctgaaggcatgtccataaataatgaatttgtgaaaaactctaatcttcttcttgcttcaaggttcttgggaatattagctgcagagtctttcacagtaagaagaagatgcaaccgcttcactagctctttctgtgaccacccaaagagaaaagagagagcataaatgcaaaggaaataacagcaagatattcatggttgcattttcactaagagaacttacagtttcggtatctttgggccattcaatcctagaaaataaacgcccttcatttctagctcttgctaaaatgttccacgtatcaagttgctccctgtggttgaatacacaaggaaacagatgaaaaccataaagatctcgaaggtaataaaaagagaaactgatgtgtacaaaccacataccttaaatcaggtgacagaagttcatgtgtgacaacttcatatagttcatacacagcttttgcagctcctttggaaagatcaggatcttcattccgtaactggagcacacatttgtttgcattaaagtgatagtatttaaatagattaattgaaataacaagtataccgaaatccaataatccaaatcaaaataatcaacaaactagagctagtttcaatagaagggccacttaatataaggatttgatacacgttcagaaggctgacagacatcaagaattattaaacaagaaatattcttctcgccaaacatattttagtagcctctcataacttttaccaagagttataatgaaagaatgaaatgaccatactatagaataataaggccaaaaaatgttctcgtaatactactgccaacattgtgagtcaactcatgcatatatgtgttttcttgagaaacagaaacagggtttaaatgaagaataagatcaagtaccaggagcccagttagagctgtaaacttttttagcaccactggaagtttcttaagtgataaggttataacaagtgagccctccaatatactgttgtttatctcacggtagatcctttcaaccctaatataaaggtgaaaaaaaatggtaaatctgtggggctctagaaattaaaatccatgaatgtataatagaggatgaaagaaaattcataccagagtctcccttcaccatcaataagagagtataggagtttttcaatactgtagtagcattcccgaactgcatatgccatgtattcatctctacatattctattccaaagatctccttgtgtatctttacaatccaaggctaaatcaatagccaacaaaatctaatgtaaaaaggaaaaagaaaaacacaaaatgatgtctgagtatgtgattgaaatgtgcagtcatgatctttgccaagtaagaatcagattaaacttgcaccttactactaagaaggaacaaaggccactgtactaatccaagactccctgtgttgctaggacaagaaagcaagtccatctccctgaatgaatagaaatcattaagaatccatcatctatgcatcataaccattaaacataaacacagttggcatccatatttgtagtctttgacaagaggtagttgaaatttgtttacctattactaatataatcctcttcacgcaaacttttaataatttcattccaaaatggagaaaaaattgcagcatctgtcttatccgtatcctgagcgtcctgaatagaccaagtaacagctcgagctcattgtgtaattcagaacaagaatcttacagcaagcagcaaataggtgatacaagtaaactatcaaagccacaaaaaacagaaaaacacatacctactagaattctgaagtactacaagctataacaagaaataaatttgctgcctaaacagaaaaactgagcagatgcaaaataaaacattaaagaatctaacctgagatgattgtctgttgaagggcagcctaaaagagcaaacattgaaaaagacggttaataaaatacttaggtaacaattaagatattataaatctctttttgttaatcacctttttgtttgaggagagacaagattctttacaaaggcttctggaaaactttcaaaacgcttatgcaccatttcaattgagcgtatctgaaacaaaccaacaaacaagaaactctgttgaaggagaatgcttaaaaatgagtagatcataggatattaaattgtaataattatacctcgcctaatcgagcccgtgcacccatcacaccaccaataacggctgacaagagagtataccatatgtgtatatccatgagatagatctgagaaatcagagaatacaagtgcagatatctactcagtaaattaaagtgatacacagcctggtgaacttttgtaatataacataggtacaatgtgttagattccatcatactactcaaggaaagttctaaaatgaagcgagcaaagtaattaagtgttgcagtcacaaaatgtttaatatacatatcagtaaaattctagagttcaagttccagcaaacttcagtctactgcccagcctagactaatacagattcagcttaaaaaacagttcatggtctgccacaagtggaccaaatagtacagctagagagagagagagggagatactcacagccaccactggaccccaaaggcaggctatggtcaaggcgttatcattgcctacaaaaagcaaaagaatatattagttatacacagcaactggttaattgcacaagaataaaaagaaaaagtggcaactctttctgctctaacaaactttgaaatatacaagaaggtagttgaagaaagtcattccagggatagttatttggtctattgcattgtgtgtttactatgaatatttggtctaggttcttgaaacccttcaacaaccagtgctgcatgcaaaatagatgcaatggcttcattattcattttgtgctttgtattaatctaagaaaaactattatggaggacaggaacattggctgtttggttggtaatttgttggatgaaataaaagattgtttgaagggtagcaggtagcgcagaagccatttgggataaagtgagatactgatagctatttggcagtttgatataaaagagtttagaaatgttcctttctctgatatatgtagagattggcaggttttcttgtaatgttttcatatttccatttgtgtttcattagaaacttttgtgcttgaagtttttcttcattctacttgtacaatctcagtacccctttgttactacttgtattattgtacttattaataatacccgtaggagtaaaataaaaacaatagtaatgagttatccacaggatgggaaggaggagaaaaaagtgacagtacatataagtacaattccaagcttgcctagaaagcaaagtactctagatgaagatgaatcaaaccccttgaaaaccatccttgactaaaagacgcaaccatcagtgtaaagtaaaaaccaacagagatttatcctcaaaactacatttatttctctaaccaaaagttgtagtgaaacgcaataattgtgattttgacgaaaaataaggtttaaacttctcaaagagactttgttagtgcacaccaagggaattgttgacctattcgaggggttttagtgcgatatcgatgatttaaactaattcaatttggaattgcacagtttcggtccttgtttataatgcacagtcataagagagtaccattgcataactactacacattcaatgcatcatatatccacacttaacatgctaaacatgaccagagactaacaatataaattttatctaagaaacaagatcataaatataatgataaattacccttagacaccaaatcatgccatgagtaatctaaatttcgaagcccagcaattgtattggtaggactgacaagtggctgaatctgcaatgaggtccatgataaagtagcttcagattcagtatttaagccaattagtacatcttaaaagacaacatgtagtcacaaaaatacgcctcttaatccagtgaagacagaataataaacaaaatagcttgcctggagaaagtatgcaaaacaaaatttgcatgtgaagaccaccaaccaaaagagcacatacctaaatcaattagaaataaattaattaaataacataatgtaaaaaaatataaatcctgtcaaaaatataaggagctcattcacagtacaataaggactagcaatcccattatccttttcaggtttacactataaaaaaagcctgcaagtacactaattataaatcaacgtccaatgaaaataagtatatgaaaaaatgttaaaattagttgtttgagccatacttccagcagataaaagcatatttcaaagcacaatacagatgaaatccaagttgtttatagacctttttctataaggatggagagatgcaagtttgagcttaaagacatcaaaaataaagtgaagacaccagcagatacaataatgtccctagagtaggataccagaacgtactccagaattccaaagttaagcactaaggtatacgtggaatgaactactatcaaagagaacttatatacccccagatgatctaaatagctctaaaagggaaggactaccttatattcttaaaaaagggaaattggaaccatatacaatccaatatgacagaaaacattctgccactgatagatttagagaataatagaaagcggcaaagcaagcaaaaaaaaactcctcagttctggataaagggcggggtattaaaatgttaattatataaagaattatataaagaataactaattaaaaaaatgttgcattgaaacttggtcatcagaatcggactaagctcaacaatctttgggaggcaaaaagccaagcatatttataaggaccctcattaagaatcaaaacccccacttgctgacctatctctatcgtgcatatgaatatcaatacagttaagcagtatcctagttttttgttttgcctatgtgggccttcttccaaataatctttataagatagcaataaggttcaaaagagatatcaaaatagtaggacaaagaaaccaactaaaaagcaacaacattaaaaattatcattcccatgagcacaataacaaacctgcagtaatcactcagactttcataaagaccacgtccaacatagtaacgctcctgaattatccagaaagagaatgggaaaaaagatcaatagaatcaggaatcacttcaatcctaaatcttcagttactctaaaaagttacaaaaaggaaatacctgataaatccatttaaaaaattggaagaatgactgatcagacattgcagacaatgagtggcatgctggaaattttagcaagagtccaaggactacgcgtaatccagcatacacacccaatacaagaatatatattctgaagtaaattgaattgttagagttgcggctatgtctttcctccaaaaccttcctgaaatttgttaaaccattattcaaatcataatcagaagaaaagaactttatgttcttgctcacattttctttttcgaaaaaaaaaaatagttaagaaaatgcttacaaataaacatatgtcacaaatgctgagcacaggccaaaccagaaaaacctaattactaatcttgagatagccatgcctcttgccgatgtgtaggccccaaacatgagtatgacatccaaacaacctatgccaacagcaaagaatacattataaacagaaggggtggatactggtaatgttgttctgactaaaagtttaaaaatcatatgaaagacagaaaaaacttactttcaacaaagttcataattgcaaatgttggtccgatgctaagtacactcttaaaagtatccatattcaagcgcccatcattgaaagctataattgctaaagtctaaaggcgcacatatgcacaacagtgaaaccaatattatcaaatttaagaaaaaaggtgaacttcattgagataacaatgcacaggcagacagtatttaacctggaacatcaaggccagaaagatccacaaacgatgaaaacttcgatacagatgaagaaaggtccgatgctcaacaaaagagctttttccagtctatcaagcaaaagaaagaatttaaaaacagaaagtgcaagtaaaagtgtgcataaaaaataaacagtgaaacttgattgaaggagactaaagacagaaggatccccaacttcctcagttgtaagaacaaaagatttaaatcaaagaaagcatttgtagcattctcaatagctgccactattaatctagatgacaaacttgagcatgaaactttataagttgaaaatatttgaatttgagagttgagatatcaaactactttccactgaggaaagcacaccttgatctagggactgagaataatactttcttgactgaaatgaggatctcacaaccctaaatataaaaaatccaatatgctaaccctgacagcaaaactcctttcttttctaatgaaagataaaattctcttaagaaaaaaaaaaagaagaagaatacaaaacgagaacaagatattcacgataaaaaaaaaaaaaaaagaaataaacagaacactccaaacaaaaactaacattacagcagttttttcagctgtaagaacagtcataaatttttcctgttctttaaaaaaaaaaaccaaaatcttattaataaaagttagaagactgggaagttgtccttctttcaattacctgatcccccaatatgctacatttacatcaataagtttttatccaaataatagattctaaaagtcaaacagtggcacatctcaccaagtcataaattacaaacatagaataaaggaaatttcgagcaatttggcaaagaataacaaaccctaattccttttttcttaggctccaaaaagaatcgtgactctctcttcataggccagcttaactcaaagcaagaaggggacctacacatacattgcaaatcagaatcaggagacgcaatattacaagctgaaccagaagtttgtaaccatccacagagagagagagagagaga

SEQ ID NO: 18640 - DNA, 1595 bp, Cannabis sativa
agagagagagagagagagaaacccacctgcattttctgtcatcttcactagtttccatctttttgcttcaaaattctcagtaatgctactactactcacaatgtttcagatcagaactatgaattttaaaataagaaaaaaaaaaaaaaagaatcaaagtactcaaagaagaatgtgaaatgtttttgttttggtcagagaaagaaagaatctctggtggaaaaacatagatgcccacacttaaatatttgtttagaaaaccaagactccatgagagactcactcattactcactcatcagatgaaagtttataaaaatcccttgtttccacaggccagaaaacactcagaaataattaagtatgttgttgttggtaaatgtgaccctttctaatcaacccaatattttagttttcaattttaccccccgtttttttttttatttatatatgtaaaataatattttactatataatttgtattaaaaccacttttcacaaagtttcactttaaagtactccatggctcagatataccgcaacactcaaagctttcgatatggaggagtggagaggactcttaagtaggaagtatcaatctatgattctatatgaatcattcatattagtatttatatataaataatattattgatttattagacattaagaatgtttcataaactagctaagtttagagtaagcagtaagaatgtttcataagcaagataaaattaagtttagagtgagcagtgaaaactgagttaaccgtgaagaagaaggaccaacgatttgatcagatcagacgtaattcaaaattcaaatagatgcagaagaagcatttattattagtaaagatcagagtggtgggcagatagacaacacatgcatttgtgtatttatgtgtacacatttcaaattttgaataagtacaataccgtaataataagaaatgaagataaaaataaaaatggcaacgtgatgtacctgatttgtttaatgggtaagacctcttctcatttacttattagaagtatttcggattctattgtctttgcctcactatttgtgagaaaaggattgttggaaagttagcatgtgaaaaaaaaaaaaaaagtaaagtggatacttccaaagttttttttttattaaaaggatatttgccatataaatattatatcttttttagtttcttacacttatatagtatatatatggatgcacttttattgggtattactcataaataggtaaaattaaaaaaaaaaattaagtttttatacttaattttctatctaattagaaaaatctctcacttttacatcatatgggctcagattattccatccgttgaaaaaaaattaaaaaaaaaaagtatttagcaaaaaaaaaaataataagtaaaagttgagtttcacttaaatatttttatatgaacatatttttaatgtagtatgtgttgactgaatttttaaccaaccgacacagagtcgtaataaatgagatttaaatcaaaaccacaataataaatgcagttaataacaccgaaattcgcaataaatgtaaataaaagacaccagaatgtaaagaggttcg

SEQ ID NO: 18641 - DNA, 4088 bp, Cannabis sativa
caaaacttaattatattccatactttgaatttaaaccaacaaattcttttattaacaacgtctacacacgcacaaagaataattaatcattctcctcaaaaaaaaaaaaagaataattaatcattatatatattaaaaaaaccatgcaataatatataaattaaacaaatttttatcaaacatatcaaaacagagcagcatatatacttagcaattatataatcatatcatcaaccagacctgtctcaacaaaaaaaaaaaatagaatttataacaacaaacaaaaacataaaataattcaaaccatatatatccttagcctatcttattttaaaataaaataaaaaaatcatatttgaaattctcctataatgaattgtcaacgtatctgacttcacccaccaccaaattaataataataatccttaattaaaacacacatgcatggcctataaatacttgtgaaattagctgtggctaatcacccaaaaactatcataaactcaaagatttattatacatttagatcgataaatcatatcacaaaaaccaaattatcaatataatgacgccaagtactacaactactcatatgataagtgctattgttttcattgttgccaccctactaccatgtccgaccaacggagccggtgggcgttggcaattcttgacaccaagcataggcatttccgccatgcacatgcagcttctcaacaacgacagagtcatcatgttcgaccgcaccgacttcggcacctccaacatctctttagctcccgggaaatgcccagctggagccaaagactgctccgcacactctgtcgagtacaacgtagccaccaacaaattcagaccactcacggtccagaccaacgtctggtgctcctctggctctgttatgcctgatggaactctagcccaaacaggtggctcctttgaaggagaacgaagagttagactctttaagccttgtgttaataataactgtgattggcaagaggtcaatcttggactggccaagagtagatggtactcaaccaatcatgtcttgccagatggcaggcagataatcattggtggaagaaaacaattcaactacgagttttatccaaaaactactgacccaaatgtccatgatttaccattcttagctcaaacaaacgataagggaatagagaacaatctttacccttttgtttttgtcaatgtggatggaaacttatttgttttcgctaacaacagagctattttgttggactaccttaaaaaccaagttgtgaaaacttacccgcaaataccgggtggggacccgagatcttacccgagcactgggtctgctgtgcttttaccgttgaagaatattcaaaccaagaatgttgaagctgaagttttggtatgtggcggagccccgaaaggatcttttactgaagcaagtaaagggaagtttattcaagcgttgaatacttgtgcccggattaaaataaccgacccgaatccaaactgggtcttggagactatgcctttagccaggtgtatgggagacatgactttgcttccaaacggcaacgttttgatcataaacggagctggagcgggtactgcttcttgggagttgggtagaaacccggttttaaacccggttatttaccgacccgaaaataagatcgggtccagattcgaaactcagaaaccaacaaccattcctcggatgtaccattccacggccgttctcctccgcgacggtcgggtccttgtcggcggaagcaatccccattccaattacgagttcacaaatgttctattcccaacggagctgagcttagaggctttcattccgtcatatttggagagaccaaatctccgacccgttatcgttttacccgggtcgcaaaccaaggtcaagtattcgcagaagttgacaattcgatttcgggtgatgggtaacaacgtagacgcgaaatcagtgaaaacgacaatggtttctccgtcgtttacgactcactcattctcaatgaaccagagattgttggtacttacacccactgggcaagtgaaaaaaataggtggaatgatgtaccaagtggaggttaacactcctgcttcggctaatcttgctccttcggggtattatcttttatttgtcgttaatggagaatttcctagccaaggtatttggatccacatcagctaattaataatcaaccaaaaacaaaagtagggaaacgattttgttctgttattgtacttttacgggatatattccgtgatgtacggccgctattaaatagggagttatttaatttgagggctgggattgatctaggggtaattagggttaaaaaatagtaacttaccctgagaccattattacgtaccctgagagactcatctaatgtactcggtagataacggaatacattccgtgaaaagtacatcacaggacaaaatcgtatcccaacaaaagtataagcgtgaatagtattttgtgtctaagttggaaaatgttattgttgatcgtattaatttatttcttaccagtaatacagtatttcaccaaattaatctatatatttagtcaaatattgtaaatgtttagtctcatgtaactatcatatataatcgaataaaattgtgaagacatttctgtatttaatattaattggtatgtatttaaaaagatgtattgatgcatcatctacttgtttcggcatcaagaagaattttttagattaatttttttcatattcatgtacgttataactatttaagatatcttacaaaattttaagattgtcacttgatcgaatatttgttgaacatcagttgatatatcatagattgtgtgtaaagaagaattttgatgaaatgggttctatctctttcaattgacattccttgagcgatgcaagcaattatccttcatagagagttattaatgttgatactgctttattgagtgtaatcaatacgtttctcgaatatgttatgtcatgatctcactcccactcattctctacttgctacataaagtgtaagtatgttagcatgatttaaagttacctcgttaaaaccttgtcaaaaaaacctagtgggacaaaacctgagctaaggaaaaaagagtgcaatatatatttcatattcataattatttacaagttgcctcattaaaaacattgtcaggaaaatatgagacaaaacatgagctaaggaaagaagagtgcaacatgaatatgtctcctctcatgcacatatgatctataattattttgatgatataatatatctcataagattattgttatcacttctaaaatatcaccgtatattatctataactcttccaaagtgtatgtgtagacttctaaattatggatgaaggattcctgcaacatcaataattatccaaccttattattaaaatccattcatgcattatgtatatacaatgttgttcatacaaaagtttgaaattttaagtaatataaacataacacattaatgataatataaatttttatttgcgacaatgatggtactccaataccatatatttgttctatttttgttgtatgtttttaatttttatatcaaatgatcatatatttataattattgatgtatatgaagtacttctggacttctctactaatacttatgaacaaactatatacattaaatatttctcaatatataaaaagaaataaaagtttgttcttcaattatctatataatcaacaattcttcaaatttacgaatttatattacatagacaatcatacgtgttttttaaataataatttatttacatgtctttatttcatacaaaaatcttatatagtgtgcacgattgtaaatttatattacttaaaacatgtattaaattcttctagaatttttaaataagatgtatttttaaattttcaatataataggagctccaaataaataatcttttgttgcaatatttatgtgacacttataaacccttctaaaatatattccaggctataatcaaatcattattatattttctcaatatttaagtcttatttcaatcaatttgatgtctatgcaaactttgtaca

SEQ ID NO: 18642 - DNA, 12498 bp, Cannabis sativa
aagtgtttgaactcatcttttttgtagagacccgaacaacttttagaaagaacacaacttatggaacgctgggccaggtgggaggtatggatttagaattagattagatgacatatagggtacaatttgaaattttataaatggccatgttttttccattattcatttgaaggggaaaataactaatggaatacactggtgcagataagcaattttgagtacttaatgcagctcaatacattagctggacgtagttataatgacattacacaggtagatttctttggatatactcccatttatattagataacgtctctgagtctatcgcttagtcccttatattttgtggcagtatcctgttttcccttggattctttctgactacacttcaaagagtttggatcttgcagacccttcttcatacagagatctttccaaggttgtataatttttcacttctttttattcacatgaattttatagatactgtgattaaaccttgtacgctttcatgcagcctgttggtgcactaaatcctgatcgattgaaaaagtttcaagagcgatattctagctttgaggatccagttatgcccaaatttcattatggttcacattattcaagtgctggaactgtgggttttctttcttttcccaaagttggttatttgtcataatccattatatttgctgcaagctatgagattcataccttgtcttcttgaagattgccggttccttgtagaagacttgatatgaattttcagtcaatttatatttaaaatataaaatgttatgctgtcctcacattatcctattacgagttctttaattatgttcgtttgtttctgaagttttttcgttgtgcccattggttgtatttggcataatttattggggaacagatgtgctcccatatgacatgcattttagcctatggtcttagcaaattgctcccgtatgattattggtgcctttttatttcttatcatgttatccttgtcttgattctcaatacatacattacaattggtagaatcattaatgtctctcttttatcctattaagaaaattcctgtcacttcttttgtttctggattttacaattttattctcttacaggtgctgtattatctatttagagtcgaaccatttacaactctttcaattcaactgcaaggtggtaaatttgatcatgcagatcggatgttttcagatattgttgcaacttggaatggagtcactgaagatatgagtgacgtgaaggaattggtatggtattcattttgatcattttagtatgactgcctggagaggtttctaacgagtgtaatgcattttgttttgtgtttaggttccagaattattttacctgcctgagatcttaaccaatgagaattcaatagattttggcacaacacaattaggtggaaagcttggtatgccctcaaattacatgttgctggtgaaatgatagttcaaggcaaatataaactgtgaactgaatcctgtttgttttgatataattattagataatgtcaagttgcctccctgggctgaaagtcctattgatttcattcataagcatcgtatggctcttgagagtgaacatgtctctgcacatcttcatgagtggattgatctcatatttgggtatatgcttcttactttctttgtgaaagagaaaattcatatatatatttatacctttatatgtacacattgaaatttcattgttttctaattttttaattttttttttaccttggagaatgatgctgatataaaatctttcttccttaaaattaactttttttttctttctaacaagcacttgacattagctatttggaatattcaggtataagcaacgagggaaggaagctatatcagcaaataacgttttcttctatattacatatgaaggaactgtcgatattgataagatctcagatccagtaagtggattcactttcccatacttctgaaaatattgattggtttttataaatttttcacaatttatttttacatgaaaggtacatcaacgtgccacacaagatcagattgcttactttggacaaaccccatcccaacttcttactgttcctcatagaaagaggatgccattagcagatgttcttcatttgcaggtagatgctgtttttgtctttgttgaaacttctattttgatgtggtttgcattgtatctgggactgtggtttaggaaatgcactgaaaatatgtatcagaatgatctggctcgcagctgatgataatttagaatttttgggtgacctgtttgatttattttgggatgacttgttttccttatagaccatattccggaaccccaaagaggtcaaaccatatgctgttcctgcacctgaacgctgcaatctaccagctgctgccattcatgcctcttcagatactgttgtagttgtggatataaatgcaccagcagctcatgttgcacagcacaagtggcaaccaaacacacctgatggccagggtgcaccatttctctttcaacatggaaagggtacaattagttccagtggtggaacatttatgcggatgttcaaagggccagcaggagctggttctgatgactggaatttcccccaagcactagcatttgctacgtctgggattagaagctctgctatagtttccattacttgtgataaagaaattatcactggtaagtaccaatatttttcaatcacgatctttaccttcttaattttacttttcattaatatattatgtgaaaatgtgaccctcataccaaaaggaaggtaaattgtatgtactttcccttcatgtcatacataaaactaaaactcagaaatctaaattttagtgtgatctaatctcatgttggttgcggatactttcatgcgtagaaacattcatattcaaaaattctgagctcctttaatgttttcactcgaatatgttgattgtttggatccttaaattagccttctttcagtttaagcaatgattgtctgtattctcaagataaataaaaagaagaagcaacagtaggctaccccaggttattaaaatagttctatttgtaatgggatgtgtttatttatatatatcttcctggtaaggaaataaatcctaagaatacaaattctgttgtcttgtttcagaaaggtaaaaagaaaagaaaagaaaatcctaatatgctattataatgaatgtaatccacaagtaatttgtttctttgtttttattctttttttcttataagaatatataataaatcgaaataggaccttactaatactaggcaacataagtataataaaaaaaaaaagaaaaaaaagggtcagttgactatattaggtcgcccaactttcaaaagttgaacttgaataaaaactgggaagcctaccatataattgaatagtgcgaaaattctctggtaatgatattaattgagttctacgagctcttccagctcttactttttctcattattgcatgcttttgtattatagtaggtctcatttataactttccatctagttaatttgcttgttttgtctacgattaagtttgatgagaagatgatcatgatgacacaactaatctttctggattttaactaggtggacacgtggataacagtatcaagctagtatcttcagatggagcaaaaacattagagacagcgcatggacattgttctccagttacttgccttggtctttcacctgacagcagctaccttgttacaggaagccgggatactactgtgttactttggagaatacgcagggcatctgcttctggctcaagcagcatatcagagcctctgactgggactggtactgcaaattcaacaagcagtagtaatttatcaaacctgttggcagacaaaagcaggagacgtcgtattgaaggtcccatacatgtcctccgaggccaccaaagcgaaattctctgttgctgtgttagctcagatcttggaattgttgtttcatgctcttattcatcagacgttttgatgcattctataaggaaaggtcgattgattagaaggttgcctggtgtcagggccaatgctgtctgcctctcatctgagggagtaataatgacttggaacaaatcacaacatagcctaagtacttttagtcttaatggggctctgattgctagtgttcaactacccttctctgctggtatcagctgtatggaaatttctcgtgatggacaaactgctttacttggtataaacacacggacagaaaatgacggaccctccaacaatagctgggactcaaaattgaagaagcagggattagataatatgaaccaggattgtgatgaagatgacaaagggaacagattgaatgttccatcaccttcaatctgcttcttgaatctgcatactttgaaggtaatgatagattcctcttgcgaggtgaacattgttcatcagccaaatttataaccttaaacatagttcaaaggctaacttgacatgtgaatatttaaggaccaaaattaagataaaaacatagtttgggtttcaaaattatacattacaaattcttgggctaaactaagacttcggcccataagtgagataccttttttttttttaaacaaatctcgtgcatgattttgatggagagaaagaagtgaggaatcatcgtattgtctttgactgtcccacaccagttatcttttcattacatgcctgcctcagccttcaggcctcggctcatcatgttcaatgcatattcttcggggcatggattctggatttcttagcatgttcatcaaacatatattgctcgttacatttatggtagtttccttggtagattgtttacttgctaacaagttactaattctcatttcttgcagatttttcatatcctaaacttgggagagggacaggatattactgctctagccttaaacaaggataatacaaatcttttggtgtctactgctgataagcaattaataatcttcactgatccttcggtatgtccaatgtttcaatgttcattttcaattaggtattgtataatatcattgttctattagagtttaggttcatgtaagggatcgttgtgagtctattaaaaggttggttgtgggaaacgaaatgaatcattttcattcatttgcttgtttggttagaaactaaagtagtggaaaggccattcccatgattttttttctttatcagttcttattatactaattttattctcattcccattcacaacaacaatgtttactcctattcttacgaaatttcacatttgcaacatcattattaatgttcctactgttgctgattgcagttgagcttgaaagtggtggatcaaatgctgaagctgggttgggaaggtgatggactcagcctcatcagatgatcatagtctttttaggccatactggactgaagtaaagataactcacactagaatactacaaggtcctcatacttcgagggcatgaaaaatgtcctcactttctgtaaatcaataaaatcttttggtagcgatgtaacatatatgattggaacaacccaaaatatctcaagagttctaggtttttagatatacagcggggttgctctttttgttctgtttttcttttttcaattcaattgattgagttgtatgtatgtctcctttgagatataatgaggaggcctgagctgttcatttttccccattaatttttttttataaattagtgaatgaaaaatacacattttttattttttactatatatgctacaagttttgtttaactatagactataatagagatgcgttctccctgggaaaaaagatgttatatttatattatgtatttaaggtgaagtttgtttgatacgatgtagttttacttctgtcaatgatatttgaaatttgaatgtataaatatgtatttgtttcagagagtgatattcttgattactagatttttttaatcaaccgaaaaaataaaaataaaaataaacagtactattaaaaataaactaattagttttcattatagggaaaacgaggtttgtctatattaatggtaatttttaaaaaataattataattaaatattaattttgaaataataatttttaaaagtgagattttaagtaggaattttatgcttaattttactatttaattattaaaaaatttatctttttacactatcaataatatatttatatttaatattacttttatttctctcctaattcaatttaattttttttatctctcttaattaaatttgatagaacaaccttaaacatataatataaaaataaattattttttaattaaataataaaattaagtaaaaaaattccaattttagctataaatggaagtaatagccattaaaagtacactcataacaccaaccagcaattgaagtctaaccgcaccagtacttgataatatatattttacataaatatacacacaatatcaatcttgcaagtatactcatgaaacacataataatacatacgagtaatgattatgtattaaccagttaagtagtccaaaagtttccaaaccaaccaaatccattaatgcatttgcagataggcataaagttgcaagtacatatcaaagctatagaatccaaaaatgagtctctaggcagcatctactaacatgcctgtcccattctcactgtaaagatataaagatatgattgattgccaaaaatatataaatattattctgctacaaaaggaaattaattatatatatataccagattcaaacgatatatatttgaaaatccattttctttaagcctactcataatattttttttattaataactagactcttcatttgatcacaagggatatcaagtagattatatgaaaacattcatcacataaaacttttaatataattaccttggatcatatatgttttattttaatatgtttctagatataaaacaacatggttcaaaatgtatccatatatataatatatatattgcaggaaggtatataatttgtttggaatatttggagttggtcgagatcgtgaacttcatgtgggtgaggtatgccatgatgtcatggagatggtgctgatgtgggccggttaagtggatggaatgaatgaaattgtagtcttgtatggacacttagacaataaatcaatatgacctttttctactcaccaatccacattcgttatacacacacgtcaccaataaacccaagcaggccagtaggaccactcaccctcctctcgacacgttgcactgagccatgtattttgattttattcccatatgctaggttaattgttaataagctaatttcatcgtcaactaagcacgaacgatacgatgaacgagttccaaatcgagtagtgtacgtagtactaattataatactctcataacataaactaaatattagtacgcaatcaattctttcgttccttttaaaagggttgtgttgggagaggaaaaatgattgggagggaaaagttcaatattggggtgtggtccaaaaatattagtatatatatttatatgtgtagaatcataaaaattatgggcgttaatggatgaaggatcaatttcgatctttgatagctctttatttgtattcctaaaaaagggtattcgtctttaaatatacttccaaactttgatgaatgtgattgatcaattgttttcgttaggctctctgctggtccatgtgtgtaaaaatattccgatagaactttacataaatagatatacacacacaaaagatctacagatacattttaaaaaaaaaaaaatctagacatatatagattcttttatttctctctctctctctctctctctttgtaatttctaatttcttttgtttattatatgtatatagtatataatctcctcattattattcatcagaaaatagtaaacgttcgccctatatatacatatgtattaagttaatttaattaatggatgccaattcttggtcacctaatagttctgttgagatttaaaaagtcgcctcgagctaacctattgggtgccttcatataatttaagtacgtcaaaaagattcaattaattggagcgggttggattttcgatacaacacattaattctgatctaaaatattcggatacttattggatctcggatcagatcccctctgcctcgcctaatttttttcagatccgatctgatccaatccaatttctatatattaaaaaaaaacttaattcaagacttggaccccgaatccagactcagactcgaatcggacctgctgctcgggatccaaaccggacttgagaccggactcgaacccaaacttagcctcagaaccagggcctagacccggacccaacacccgaacccgaacttgaacccgagactcgagacccgaatccaagatcggacccgaacctgggacccgaaccgggaccctgccctagacttgggacctggacccagaatcaaacccgagacttgggcttgagacctagactcggacccaggacccaggaccaatacccggacccagacccgagactcaaactagggactagacttgaacccaggaccagaccccaacctggaccagactcgcgacccgaaccggactcggatctggacccaaacccgggacccagatccaaacctgaacctagatccagaaccgaacatgggagtcgcgacccgtacccaaacccagacccgaaatcggcacttgaacccgtagttggtgttggagtcgagtttatctagaatatattataactttacataatctgttaatacaagccaataccaactataatattatattaaatagtactaatacaaaattaaaatggatataaaattataagtttgaatattaattttttttttaaaaaaaaaaattcaggtcggatcagatccgatttgaataattcaagtcaaatttgatccgatccaagtatctaatcaagtggcgcgggacggaacagatctttacataatctagatcaagttgaatcatagccgaatcagattcgatacaatcaatttacactcttagtttatataaatagatgcatacatacatagatattgatacaaaatattgtaagagttctaaaatgtttttatctatatttttttgtttttttttatcataaacatattatgcataaatatataattatataaataaattaaaatatttttaatttattgtgcatattttattctcataaaatattatttttttcgtgtatatcacattttacaactgtttttttttttatttaggaattttgtataaaagaaaacaaattctttttagggaaagtttgtttaaaatattggtctatttctttgtataattgatacttattgtatatggcgattaatctgattaatttctatgaaaagaaataaagtctaactcgtgatcttggacacttatttagaaagttttctatttcggcctaatttaccactacaaattctaatcttgtcgctacaaattagagattaatttaggaggatattgtaaacatttttgtgtctgtctctagagtatctataatctataaatatgacctaaagagcagcccaacgttctcatctcttttaagttcattttgatatttttatctttatgaggagagaaattatttttttattttttttttggtgaaaacctagagtgttcaactaaattttagtctttgtttattgttcttacactattcttagaatatgttgaagagtttcattgaacaagagaacggtcttcgagagaagacttgtcaaagccttacttcgggaggacgtaaatattcacacatcaaaaaacgaaaggagttcgttatatggtggtgttcaaaaatcagattgccaaagtaaattacaaaagattgcgataaagtttttaaaggtgtctaaacttatttaagtcaattgtactttataattgtttgagactttactaattgatttcattctataggcgtggtcccgtaaattaggagtgtttgaaagaacactgataccacgtataattctcttgtgtaaaaatttaatattttgcactgttatttctgttatgttaatacaaatttgtattctgcaataacaagttttcaaatttgaaactacaaatctttatagtcatattttttttactattattaaagaaatttcgaagtcatgagtagtaaaaaaaagaggaatgatatatttctagaattggattttatatttgaatgaacttggtaacgtaagaaagtaagtttttttagctataggcctagcaaaagaaaaatttgaataggatcttatatataggatctttccctttcaaaatcggacgtgaaagttttctttcatccgattcaagtaattacactaaataaagctggaaatacctttcaaaaaaaaaaaaaaaaagctggaaaggagattttcatttattgatatatataaaatacaattttctaatattgaatatttggaagattgcaatttatataaagaatatctatacaaatcactaattggttttggccgaaacctttaactatgcattatatatatatttacattgggtgatgttgctattatttttaattattaattttaaataataataaaaaatagattaattttctatcatgtttgttaaatatatgttaaatatataaaatctaattaatttaaatttaaaagactcataaaaggtatttatgtaaatttattaatataataaattaaatttaaatatttgaagcaaaataattataaatttgttcattaattgatttaactgataaaatatttggcgaaagtatttaattagtatgatttgtgtttgtagtatttagtagttaataagttatcttgttaagactaattaataattaacatatatttaattaatttaatataatatatatagcttttggacgtgaaaactcacgtggctaattaattaacgaattaaaattagttcctaattaaaagtttaaaataataatataattcacgataatcacatacataattgtcacacaaatcttatctgatcaaaacccgcctgactagcatggccaccaccttttttattttattttttaagaaatttatataataaccatcacgggtttcacaataatatatgtgcatttataaatgtatacataaattagagagtaatatttgtgccataaatatttaagtttaatttttagtggttttcaagaacttttttattaggtactgacggttaagtgttaagtaaattaccttgatattaattggtatcatgtcattaattttgtttttaaaaaattagtttaaatatactaataagaaaatgatatatatatagataatatataattaataactttacattttaatggacaattaatacttacaatttttttaaaaatataacttaattaaatattatagttaaatttaaatatttatgctttagtctaaaattaattggaacaacaccaaatctttaaaatctttaaaatatatgtatatgtgagtagctttttgagtttgatattatatgtacagtcaaggttatatatatgtgatcatcattttatatttatttagcaaatttatacgtatagaaatattatctatatattcaaaatctgaaacagatcatcaaaaaatcaacatcatgcatgtgatacctaagattatcgatcgttatatacataccaacttgctctgtgtacgtctcaatttgatttgaacacattgctatatatataaccgatatagggaccagtttcatgaaattgctttgacattatatcgtcatgtatacatatatagctatacgtacgtcaaatatatattcaaaaagtaaaataatataggttaaaaaatatattaaatagtttaaaaaatattgtaattttaccaaatatgtgtttttggatgtaaatatatacctaatgtctttgttttcaaagtaaacattttactgctacaaaaaaaaagtaaacattttaccaatagtattgtaaccgtcataaaattatttgataataaagtaaaaaaaaaaaaaaaattggaattctttcatcattcacttgacaaatcctaccctagtacacttttgtaaagaaaaaaaaaataaaaaaaaagtgacaagatattataaatttttttacttttagtgacaacataatttaattataattaaaagtaaaaaaagtgtgacttataataaatttcattcttatgttgtaatgattaaacttataaataaaaaaaccataatttgttgtaactatatataaatatgttttagttaatatttgttgtgtttaaattaaattagtgacaaattaataattaaatattatattttagtcataagtaattttttattgatactaaaagttatatttagttacaaaaaaatgatattataactaaaaaattaatac

SEQ ID NO: 18643 - DNA, 5175 bp, Cannabis sativa
tctctctctctctctctgactataataataagagagttcatgtgaacattcccccaagtctaactctcatctcatatctcatccttatccaccgacaccaccaatttcttctataagaattacgtgatacatattaaatttcaaaccttttcttttcttcacatcaataaatctacaataaacttaacacactattttggtttcatttgaatcgatcaatctaaaattatattaaatttaactatttttatttttctttctaaatggaaatttcccaaaccttaaagaatacaaagaacaagaaaatattcatgactatttcttccttccaaaaatttgagatgaaacatcttatataaagtatatatgtaatatactatagtttcttacgacttaccaaacaagggcatttggtctagtggtatgattctcgcttagggtgcgagaggtcccgagttcaattctcggaatgcccctcgatttcgatcttttctttttcatatgacgtaatttttcgtttagtggtgatttttggacattatcgtaaaatccaggtagcagaaaagaatagaaaagtgttaaagcgctctgtgcatggcccatgggcccccacctacgctgcacttttctcgtgcaagtcagtgctttattatcacaatcaccatcacaattccttcatccattcccactctttttatttgccaacccatacaaatatttaccattcatattatccccattttcattaagagggagaaaagaaaattttaagaaaagtggtgaaaataaaagaaaaaattatttgcttggttggttggaaaaaatatgaattttttctagaaaaatttgagataggaccactaaaattttctttctccaatttgaagagattaatagagaaaaaacttttaaaaaacaatgatgtaaaattactaatttatttttgtaaacaataattatgttaataatttaaaggtattatagtaattttattacaatttaatatgagtttgaggtttagattcaatataaatttaataattttttaaaggacgatgtatccatgtatccaaatttaacaaaattgtaatttcatcgaatgattttaggtagctgacaagaccaacatgtattagttcatgattggtccagtttataacgaatcacacattaacacgtattgatctagtcagcttcttaataaagctaatctagcgcaacaataataacaaaattacaattttgtaagtttggatactttactttctatgccaaaacaaaaatattattaagtctatattccctttatacaaatattaattaggtcaaatattattaaattatattatttagtatattcataaatttatatttaaaatttaaggaaattacaagttcaacattcacattttcattttacttttttattttgttattggaatttgaacttaataattattttaaggtgtaattacactaaaatttattttaacataattatttattattttatattttattataatcaattatataattattaaatattgaagtacacaaaatataagagtaagcattgctattaagtactataatctttagtacaactatgagattagtgacaaattcataatttttactttttgaaggcttatttatcaattaaaaaatatttatacatacattataatcacttttactacatttatttaattttgtaagaacttttcaactattttgatctataattatcaaattaaaaattttacatttatttttttaaaaaagcaatatttttattagtgagagctatatagtccccacattagtattagtggatctgtctatgagctaaccccttataaataattattaattttttataattttttatcaaaaataagtgaaatttgatattaaattacactaataacttatgacagtttaaaaaacgtaatagaaaacatacatatcttatctttaatatttcactataaaaataaataatcgttccacttaaattttatttttgacttcattctattaatgataaacattagacaatagttatccatgtttcaaaaaaaaaatatatagttatctcgcaaatatatgtgtataatattttaattaaaattagattgtaattaatatgtattatttgttctaattttttcttccattgttaaaaaaagggaaaaaaatgtcatagtacaacaattttactaactaggggtgtaggtcagtctggtcagtttgtactatatttatttaacccaatataaagatatggttacaaaaacctaagtgctcaattttgagttaacccgtccaaatcgactactaatatttttttaaaattttatatttaattattatattttaattaattgtaataataagatatatatatatatagattaacttcaaagttcaaatcaaccactataaaaaaaaattagtttaaattttatatatttttttaaatagtcatataaattatatgatgtataaatatagataataaaaatatataaatatatataaaaaaatctcttaattaagttgatcgggttagtttaagttaattggcaggttagtattatattcaacttgcctaatataaagattgagcggattatatttttttttgttgaattttcaatttatattttttgttgaattatctcaatttattcacaagatttacaaaaatttatgtacacttgtactaccaaatagtaacagcaaactgatcacgtggcgtcgttaaacaaataaataacactattatattgtactttgaaaaaaaaaaaaatagaatgcccaaaattaaaactaattatgtatatgaaaaaaaacccaatccaacgaaatctagataacaacacaatctaccactataaccaatccatggtctccacgtgtcaaccaaagtgatccatcactgtcataatccttctgagactttatgactaaaaacacaaaacagtgtgcaattgggtcaacacttttctcatatactttctctcttcacttcacaaaacagaaaaaaataaaaaataaaaaagatcatgtgcaacaagagcagtcctctaaaacctccacgaacccggatccgaacccgaactagaagaacccggtctcatctccagaacgacgtcgttcagcgccggccacttaaatcatcagtacccgctagacgatccagaacaaagaccagaagacccaaatacctttctctccgtctccaactctcgaaagaaaaccaaaacgaaaacgacgtagtattattgacaccctcaccctccagtgaaattacagaaatgacctcgtcgcaccactaccaccaccaccagctcaacctcttccccttacatccggagaatctggtcaacgacgcgaccgccgacgacaacgttgccttgcttttcgactccgacggcggcgccggctccctcaacggccttctcccgacggcgactcctgcaatgtcggaggaggaggaagattctagttcccaagcggcggaacgacggcgtttcgatcgcgagtacaattacttaagcgacgacgaagatcatcataatcatcatcaccacaagttcttccacgtggacggtcgcgatcggagagggaataatagtagtaacgattcgcttgtacggacggcgatgaggaacagagagagggatttgagcgaggagaagtgggtttcgtactcggaggtcgttgaggaagtaactagctcgagctgtagtactgagattttggagaagaagaagttgatcgaaacgacgtcgtcatcatctaaacaggggtataatagtaattacagtagtaggagtactaataataagaatttggcgttaaagcttgattatcaggagattttgaaggcttggtctgataaaggctcactttatatccaaggagattcacctcagactgtacctgacttacaagataataataataatcatgtaagtaatttttaattatttagttaactaagttcattattctattaattaatcaatcattgaaagtactcatcaaaaggaatggaacttggattgtgaagaattgtttattatttaataatttgttttacttggttttgtttgtgaaagccgtttttctatattattattattttttattcattgatttgtttttcagaggtcccagttggggatttcagccaggctgtgtgtgtgggttcttaattctaattttggccccccaagcttaaattatttttaatatactttggaatattcttaaaaaatatccaaataaactatgtgattactataccttaacaataaaatattgtggttataataaaggtttatttcattaaagtcttttgcttattaattatgtgtgacatattataatgagtatttatacagtaaagtaaagcttaagtaaatggtaacaaactagtaaccaaaaaggctgttactatgtattaataatattaatatgggaatgtgagagactaccactctcagaaagacattacactattaccaaacaaccttctttataataaataaagtgaatcgtgaaatagtaattattaaggaattaattaatgttttgtttggtttggtttaatttggggatgcagggattaggggatgtgtgggggaatttgtggcaagtgcctgaaaatgaagttagtaaagttgtgaagatgatgaaagaggaaggagaaggtaaagataatcatagttggattaataagatgggtcaaagagaagccagtgtgttgagatacaaggaaaagagacaaagtaggctttttgctaagcgtattcgatatgaagttcgaaagctcaatgcagagaaacgtccacgcatgaaggtacctaatttattaactctttttttattctatctataaagtctttgttatgatttttgtgtggggtgggggacaaaatattaaaatatttcaagaacctaaatgcatatataacataaatttaataaaaactacacaacaaagctgtaagaaggagataatctaaggctcctaaacaactctgtctctagcttttatggagtctagaccaaaattttaaaaatgggccttggactgaggggctgcctcgaccaccctactctaaagacaggtctggttcctatatgaagtggaaattg

SEQ ID NO: 18644 - DNA, 5427 bp, Cannabis sativa
  modified_base (35)..(44): a, c, t, g, unknown or other
ctaaaaaaggaatgtctatttaattaattattttnnnnnnnnnnttaattataattaattaaatctaaaaaaggaaagtctacctattactaacctgctattactgaaaaaaaatgtaactatatgggtacaataaaaatataaccattgaataatcacccatatatatatatatatatcatgtgtattgtttaaggatgttagggtgtgtacgtgactataatggttttgttttgggtatgagttagatcaacttgtaggttgaaggatatatatgtaatattttttttaatgagtattatttattgatgaaataaatttttttaaaaaaactaaatatatatatatttattcttaaaatatatataacttgttaaaaaaaaggaattttttcaatgatatactatattaagaaagtatttacaaacattgtcttgtcatatgacatggttgtttgcttcctctgtttatgagtggttatgagtattctttttgactgttcttattgagcttttgttggccctgcttttgacagtattgtacgtgtctgtattatttagttaaattggttttgctgtttttttttttcctgatacgtgaagatgaataacgaacccaatctagaagaccaatatgcagcttttaatattgaggatgaagaggaagaagagttgatctttgagggggggaatgatgattcggctgacatagacgacaggtggtgtttggttggccgtttcctcacacatcggtcaatagatttccaagcaatgcaaaataaaatggcacagttatggcagccaggaagaggattgtatgtgaaagaattggaacataacctctacctattccaattctaccatgaagtagatatcgaaagagtaatggagggtagtccgtggacatttgatagagtccctttgatattcgagaggctgaagcaaggcgaaaacccccggtctgtggttctgaacaggatcgaattctgggtgcaaattcataacatgactacgggttttatgtcggaagtggtgatccagagacttgggaattacattggaacatatgtaaaatctgatcctaataacttcataggtgtgtggagagattacctgcgcattcatgtcaaagttaacatcgatcaaccgttaaaaagaaagaaaaaagttgttaaacaaggcggtatgtggtgctatgctttattcaagtatgaagacctccctacattctgtttcatatgtggagtgctgggacacactgagagattctgtgatagactctttgataccccgatagaccaaattgaaaaaccgtatgggttggagatgaaggcagccccaagacggagaaactatgctgctggtgcgaggtggctgaggtcgggaagcatgaacagagccggcaccgatcgtaatcccggtaatcctgcagtgtctaatcccactaatcttggaactgggataactcataatcgcgtgagatcaggaggcagccaatcagggatatcaaatacaataaatcatgaatcaaatgcggctatgaatccggtcaaccacatcccaagaagaataatagagatcccttcgaaggaaactgaagtgataaataaggaaggtcaagggggagagcaaaatccggaacttgaaggagaggcttttgacacgggtgttgtaaatgctgatgaagctcttctttttctagaaaataaaaaaagaagaatgggccttgaccaccatcatgggcttttagaagcacaaaacatggaagtttttaaaaatgacacaaacccaaatgggccaggagttttgtttgatgtggaaatggttactgaaatgggtggcaatacaaaaaacttgtctggggcgggctctgtttcacagacccgccgggaattatgaatgtgttgagttggaattgccgggggcttgggaaccaacgggctattcagttccttaaggagattgtatctcaaaagaaacctaatttcatttttctttgtgaaactaaaagtgacaataatagaatgcaaagggtgggccgttctttgggttttgaaggccttttcactgtagaggcccgtggaagtgctgggggcctagctttgctctggagaaaccaaaatgatggtagaattctgggttactctcaaagccacatcgacttcctggtgtgctcgactgaaagaggagattggcgtctaacgggggtatatggagaaccattgcgtaaccgtcggcatctcacatgggacttgctccgatatctcgcaagagattctaatttaccgtggtgcgtaataggtgacctcaacaacgtggtgagacaagaagataaaaagggtggccggcgatatccacaacctttaattgctggtttcatacaggcgctgaatgactctcatcttcatgacctcgagctctcgggttacccttttacctgggagaagggacgtggaacaagcggctggattgaagtgagactagacagagcactcatcaatgaacaattcacccaggtttttccccttgctgctctatttaatttggaaataacatcttctgatcactgtccaatttttttggaacccgaaattaaccaagctttcacacctggtactgcctttaaatttgagaatgcttggttcaaagagcctatttgttgtgaaattatcagagattgttggaacatatcagcgaatagtactttgtctgaaaaattgagattgtgtgctgagaagctcgggccttggggcaaagagataacagggaattttaaacagagaattcgtaagtgtaaaactgagttatctagtctgaagaacaaaagagacacactatcggttcagcgatacagtgaagtcaagaagcaattgtttaaagtacttgatcaacgagaagcgttttggaaacaacgatcaaaacagttggttgaaagaaggcgatcaaaatagtagttactttcataagactgctacaactcggaagagacataatcaaattgatcgattacagaataaccaaggagattgggtagattgggacagtggcttatcatcggtcatcaccaactattttaatggtttatttgaatcgactagaggttctcatcaagctgttactgattgtgtagaggtttccatccctgaagtggctcatgttgaatttcggcagttggttactgaagaagaggttaagaaagcggtgttccaaatgcatcctgacaaaagcccggggccagatggtatgacacctgccttttatcaaaaatgctggtcaattgtgggtaaagatgtggttctaatggttcataatttcttctctactggaatgtttgatgaaggttgtgctgatgcaaatatcgtcttaattccgaaaacaaagaaacctgtgaacatgactcaacttcgcccaatagccttgtgcaatgtttcctacaagatcataacaaaagtggtggtaaaccgcatgaaaccattcatggacagactggtgtcagagaatcaaagcgcctttatcccgggaagacttatttcagataacgtgcttatttcttttgaagtattgcattatctaaagcggaaaagaaaagggaaagacggtttcatggccttaaagctcgacatgagtaaagcgtatgaccgaatagagtggaatttccttgaagcaatgctccgaaaactgggctttgaggattggtggactcgcctgcttttgaaatgtgtttcttctgcgtgctatacggtggttcatggtaaacatgagattggtccaatagttccttcaagaggtataagacagggggatccactatccccctatctttttatcctatgtgctgagggcctttcagcgatcattcgtcgatttgaagcacggggactgttacatggttgtaaagttgcaaatggagcacctcggatctcacacatgttgttcgcagatgacagctacttatactgtaaggcgacaccagaggaagcaacaagaattcaggaagtattgagtacttttgaagaagcttcaggacagaaggttaatttttccaaatcttctatatttttcagtaccaatacaaccttggctatgcgtgacaacattagtcaaaggcttggcatgatcattgcgggagctaatagtctatatctgggccttccaagtaccatatctcgcaacaagacttcggtttttggctatttaaaagaaagagtccgcaaaagagttgaaggatgggaaaccaaatatctctcacgtgctgggaaggaaatattaatcaaaacggtggcccaaactcttccatcttatgctatgagtgtgttcttgttaccaattgacactacccgagagatggaaaaaataatgacaaagttttggtggcaatcttctaataagcctgggaagggaatccattggctttcatgggatcgattgtgtaatcataagaagaagggaggaatgggttttagacatctcagagacttcaacttgtcactactagggaagcaaggctggcggctcatctctcaaccgaattcattagtagcaaggatctttaaggctcgttactaccctcatacttcctatttggatgcatcattagggaataatcctagctatgtttggcggagtgtttgggaagctcaacaacttgttagaaaaggtctccgttggtgcgtaggaaacggaacaagcatcagcatccttaatgaaccttggttaccttgcctagagaatccttatgtcactacctctcatcccagtctacttcaggcgaaagtgaacaatctcatgaccatggatggcacgggttgggacttggaaatcttggaagatctctttgaagaaagagataggaagctcattgagaagattcctttgcaaccatcgtttagtgatgatactttgatttgggcacttgaggcttcaggtacctattcagtcaaaagtgcctataaagtacttcaacaaattaatggcagatgggacaacgaggatgacactacttcacggttttggactactatgtggcggcttaaaatcccccccaaagtaaagaacgtaatgtggcgtgcaggtaggaattgtcttccaacgttatgtatgttgcaaaccaaaagagtgaatgtacaatctctctgcccgatctgtagagttgaagaagaaactgctctccatgctctggttacttgctctcatgttaaaagggtatgggaccgtgttggaattggaacaaatatccttcatgatcatacctctttcttagactggtgctatggaactttttctggtgtggattcaaacaagaaatgtttggtggcaacactctgttgggctatatggagcgctagaaatgattttgtttggcaaaaaaagttggtaaacgctgaaggaattgtagtattggcaaaaggttatcttgatcaatggacaa

SEQ ID NO: 18645 - DNA, 4613 bp, Cannabis sativa
  modified_base (3741)..(3741): a, c, t, g, unknown or other
tatttaatctctataaaaagaggtatgttttaattaaatataaaattataagtaaatttaattaattgattaataaaaatgatacttttcaacttacccctatttcatagagattatttcacaaatatacaaaaacaataaaaaaaaaattataaaaataggatttttacggaattttaaatatttttacgatttttttgtttttatttacagaaatacagtgtttttatgttgtactcattaatttgttaatttgttattatctgtatgctattttttttgttgttgttttgatgttatttaaatattattttcatgttactttatgtagttttcttgttgttttcgtgttcaatctataaaaaactattaaaatatataaaaaaaaattctttaaacataatataatataattttttattttacaaaaaaaaatagtatcttatgtaattatcgttattatttagatattcttacaccatacaccattttatctcaaaaatttagatttatacgggctaatggaaatttaaacttttttatatttttaatatatttcccatatcttcaccacaccaatctcttttcaaatacaaattctcattctttccaatttcaccttcaatttattatttcattgacttacattttatccttgtaaaggctatataatatatataaattgaaatgatagataattgtaaaaaaatgctattaaatatagagcagaaaaaagaattaatgtgcttttcaaagttaaaaaggacaactctcaaatggctaaaaggatacccataagagaactaaaaagaaacatgaacaaggaaataaggataagaatatactttagtttttagatgtaaaatagagtaacttttacttatagtacctatgtgtttatatgggccaaggagggggaatactaagtgtaaaaagaattttgaaccaataacgaaatacacttaaaaagatttttctctcatgtacaagatagagttgtggaaaactttctttaaacaattaagtttatggttattgtgcttcacctacattcacttgctccactttaagtctctcaaattctcaatatatactataaataagtacttcaccttttgtaagataatatgcttgcacattaaattagtttgtgaaatatgttagactcattggtgtgtgatattgttaatgtaattttttggttattaacgtctctaatagttatgcatttagatgatgatatggtattatttttcgttgttttgtaatttagtttctaaattagtgtagcgtaggattggtgttgtgttacttttcgttaattttttgttggtttgtaatttattctaggttgccataaaatgagattgatgcatgtcattttttagttctttgttggttgtttcatattggaatgacacaatgtggtgatatgttgaagttttggatatgtttgagtggtgtgtgtgtgtgttttacagtgttatcgatgcgatatcgataggatattgaccaaaaatcaaaatgggcagtgttgggtatgtttgcatgtttttccaatttttgttatatgtcgacatgttgtcgacgatatgacgtcaataggttatcaatagtagttgaatttttgaacataattggggtttttaatttttttaaaaggtatattgataggatgtcgacataatatctataatttatcaataatttttgttaagatatattctgttaaattatattaagtatgtcgatataatatcgacattttgtcgacattatctgaattattatgtcgataatttatggacacttatgtgtgtatgttttttcaatttttttggttatatgtcgatatgctgtcgttgagatgtcaataggttatcgatagtagttgaatttttgaacgtaactagatttttcaattttttttttaaattgtatatcaataggatatcgacagattatttataatttatcaataatttttgttaagaatactatgttagaatatattaagtatgttgatataatgtcaactgtttgtcaacatgttttatgcattgtctgatttattatgtcaataatttgtcgataagttttcgacaattttatttgattacattcttttatttttaattgtgatattatcgacagaatgtcgacattttgtcgataattttctgtgagggcatctttaatattttatgttatatattttctcaggtgggtccacgactcatagttccagcatccgaccattttactggccgcgtgacatatagaggcatcggtgcttttgcaaaaatcaagacgcagtttcaggaagacaatttgaatgagaagacgaaagcaagcggttttggcaacttttttagaatgccgtacctctcacattttcctcggtattatttcaccaagtaatgttgcacaagatgaaggttgatgttgaaaaggcaggggtgtttttttacattggctgaaaggagctcaaattggagtggttgagtttgcactcattacagtggacttcacctcggggccaaaataagaggagaaggttgcgcatgttgctcgctcggggtcagaccgattgatcaaaaaatatttcatctggtctgatagtgtgaagacagaagtactccaagagaggttctcaaactgtcagaactcggaagacgtgtacaagcttggcttgtgcttatttgttgaggtagtgctattgggtcgcgaggctaacattttgattatgcctgacatacttaaatatttcaaagatctccaattcttcttctagattccttgggggaagtactcattcgctagacttatacacttgcttcaaaaggacatgttgaaacacaaggccaactacaagaagaagctgagtttaaaagttcaacatgagtgcaaatacataacttatggcttcgcacctgccgtacaatattggaggtatgaggcaatgttagagattgggaagaggtatgacactaatcatgggattcaattttcgaggatgcttagctggacgagtaaaggagagatagggaagaaggagctcagtgcattattttctagacgggtatgaattttttattttatgtttagagtaattattcaagagaaatgcttgtaataaatgctaaattatttttctctatattttttaaatcttaaacagcaacttgaagtgatgaagaggctacttccacgtccagataaggacgaatatgtaaggaccatcacttaggatggtgtggagatcctggttgaggttgtgtggatgccacaggttgaggaggaaacccaagaccaattgttttcagaagacaaacagaaaaagcaacggaatatgtcaaaaatgctcctttgcccgaggcagagactcaggtgctatttttttaactttttttttttttatgattattgtatgtcattagttgtgattacttagttagttataatttacataggttgtcagtcattgttttatattttattgtgtttgtcattgattattttattgtgttttgtctacataatatcgatatgttgtcgacaattttttatttttttatttttgagatagatattgttgtaggtacgtcgataggttcttaatatttgtttgtgttttttgctgtttaagatattatcgattgtatgtcgacagtttgtcgatgggttgccacacgtgtcaattcttgattggtccaagtcattaatttttttttttaaaanaaattaatttaaatataccaataataaaatgacacgtggataatgccttaacatttaatggttaagatcctacagagttctaaagatataacttaagtattattaccgccaaaagttaaacttaggtattatttgcaattgggagttaaacttaagtatttatattgtaaattactctattaaaatatatgacttcaatacttaattataacaataataatataataacttgtgcactagtagtgatacccctttttatttgacatatatcataagattactttagcaaaatataacttacaatcagttctaattgtgcaaaaatagtgtacaatttgtagaaaaacatatatctatcatacattattaatgtagccctacatatatttgaatatattttcataaaaaagcatgcctagatttataaggtatctaaagaatcagaatcaaactaataaacagagaaatagggtgtagatgaccaactaactaggtagagataaattcaataattgaggaccacagaagatttttcattttatatttttgcgcgtgtattgatagtcaaaagctacaaggccaatcatacaccataaaaaagagtgggccacaaatgccctcccatatcccaaaagctccatttttttatcttttcatttcttacttgtatacaataaaatcaataatgacacatttatttcacaatatttaaaattaaaataaattaatagaaaaatataatagaataaataaaaaataattagaatcaatattcgtaatttactaaatttatttagaaatagaataataataatttatcttatttactgtattaagaaacgcaatcgaaatacataaattaactaaattac

SEQ ID NO: 18646 - DNA, 4021 bp, Cannabis sativa
  modified_base (1118)..(1122): a, c, t, g, unknown or other
aattaatttatcatttaataaaatcaaaaagtcagatcaataacttttacaaatacttagtccaaatattatttgccccaatgttgagaagaaaatgtgaaagaatagaaaggataggaggagatagggtgggaggagagccaaaatcatttatttggcaagaaataaaatgagaggaaaaagaaagattgatggaagagctattcctccaaatcttcaaaaatgaatccttccaaaaaagtgaaggattcaataataagacaaatctttttattgaaaattacatatacatcaaatatagataatataataaataatttaaaaaatttacttataaattttaaatatattcttgtctcttctctcttaacaccaaataacatcaataaaaataacaattcattccatccaccaatcttcttccttctgtttaaactctccaccattctaacatttttttccttcttgccaaacatagtgttaggcatgacagtccttcaaagcagcacaaaagaaagataaaatagaaaagtaactttataaagatgagaaaagaaaaagatataataaagtctgaagcttgggtgtttggcattaaatgagtccacgtggaacattgtccaccttttactttagaatctcacaaaaagttctgagcttcatgtacaagccatcttggctggactcctcatcactctcaacactcctctctctctctctctctctctctctctgcgttcgtacttgttgtgagttttgtttttcttcaaagaggagagactgaacaattctaagtaaaacggtttctttctttctttctttctttcttctgtgttctatttaaacgacaagccgattgtgggtctccacactccacactccacagctaattcttttctcctaatggggtatttctaaatttttaatattcttctcttgtttttgtttatcaatagtagttttattatttgttttgtgatactatccttctgtttactctttctgaaaaaaaaaataactttcttgtttggataatgattctgtttccttttttaaggtcttatacaagaattaatttgtactactgacaattcaattctatattattattattattnnnnntattattttttaatttttttattctgaagatcatgaatcttttatattatgtgtgcatggtttgatgttattatattgatttatttattctgtttaattaattattacttttagttgaaaaagtattgtgtgttaaattattggcataaaagaaagctttttaagtgtacttaaagtgtaattgacttgacttttatatataaataaatgcatatccttttaatttcaacatgtgattttcatgttctttcaagacttataggatcatcaagtagacaagacaatagcgtttatatgtttcataaagctaatgttagatacttgatctaagtgaaaatttctgaacatctagttactatactttccataagggacaaggaaaaatacacagtaggctcaaacattgggaatatatactctttgtaatcagtactattttgatcatttaagctacgattgaaaaagagctgactgaactcagtatacagatatattaagaaaaaaaaactcagtgcagatgaatgtgtgataggaaaagtttaaggaaagagtgtgggttggggtctggaactaggcaggattatgaactttttataatgaatgctgttaagattattggcttctctcttttagttatgttatcaattcaatttcagttaattaagctgctcgtttagtgtagtttcacttaaaggaagggtagcttcaatggttaggcatgtggttcaagtcttttctgaggacttgttatagtttaggtttgaggtttgagtcccttttcagtacttgtatagtaattgctatagttccttggtccccaaatatcatggggtttgaggtttgagtcccttttcagtacttatatagtaattgctataggcattaggattcgtaatttcgaaatgtacttgttaccggaggctgacagaattaagtgttataggtcatgaggtcttacttgtgctacacttttaactgtaactaagacatctcactttaaatgaattgcaatgaaatctctaaatcatcttgtcaccacagtgattgttgatccactttgtttgtactcattcatacttgatattttgtcaacatgaaatgacatgctaatctggtaattttggccatagcaggattgctcatttaagagtttattgaacgaaaaatgaatgtagacaatgagaacatagaacctgtgactgaattaggacttggtctgggttattccaatcagtgcatacagggaatattgaacaatgattcaggtgcaggtgcaaatgcaggttcaggattaaacgtaacatttgtggccaacaacccattgtctgagctagtttggtctccacgcaaaggttcgactttaaaatctgctgattccacctttgcacaaacaaaatgctcacttttctgggttgcaggtccaagtaatgtggctcttttaccaccgagcatcataggcgggaatgctactactactacacagaaaagtttacacagagagaacttccctatattgaatacattacttcaaatgaagagtggaggttccagtgaatatactcggacaaaatctcctgtaagcgatggaggtgtcatgcccgtatatgagccaagtgaccagtataagataggtgagaatagttgttgaggtacattgacttgaagtatagattggtgaatgtgtacaagatcacttctttgtgttgtgtgctatctttttgagttaatgtttaagttactgttcaagtatcttgtgttctgaagaacttatttgtggctggaatgcagagagaatgaagacatctagagtgaatgatcaaatagaggagtgtaaagagaataaaggggacgacatttccagtcacgtcgaatcccaaatagcaaaaattactgagattagagatagctattttgcaaactctccaggtgaatgttacaatttatatggatctagaaaagtcatgcagttttcattggattgaggtgcagtgtttatgtttgtctcattaccatagtgcgtattttctatatccaatgaagactactaagccatatgtaattttaaagcctcgatctgtatattttttttcttacaacatgaggtttacatggtgatttaattttgtttccagatcaggctagcataaaaattactgaagttttgtcagtaaaaggagatcagcctaaacctgatgaggcacaaatcgaagcatcatcaggcaaaaacattgacagcaattgcatgatgcaaatagcacactgtgtgaataagactaaggctgttggtgatcagcttgctgatcaggttttccaaggcagtataagatgtcttgagaaaatggagtcgacttctgagaatgatttgcagaatatcaaaagtgaatatgcttgtggtggtgcgaccacagataagattgtagcatttgaattgtcccatggagttgaaggaagttctcagcagaagaatgaggtaatagtcactgcaaacgagacttttccggatcaaaattctccaacaaaaagagtgcacgtgaataagaggaagggaaaggaaaaagctttttctgatggggatttcaatgaaattacttctaaagatgaagaggatggcaaccatgagagtgttgaaagttgtaatagtgctggattatttccaactggtaagagaaaaagaacctttgaagaagatttggttgttggggataaaggattcaagaaacaagttcattgtgcacagggtgtgacatcgtttaccagacaagatagttcattcatgaattggatatcaaacatgatgaagggcttctcaaaatcagtacagaacgaggcgccttttcctcttagtgttacacctcataatgataaacttgaaagtcctaataaaaaactcaccaccctc

SEQ ID NO: 18647 - DNA, 4190 bp, Cannabis sativa
atatgtgtcacacttattcatattttcaaaataatgccaaacgtataatctaaatactaaattaataaattctcttggtcgtatcagctgatacgtttgttgtctctctgtttttgagagtgtgtttgtttgttggctgttgtttgttgtgcgattatggcctctaacagtatggcagggaatgatatggcagtaagagttgatcctgttatattagaaaaggaagaggaagaggtattacgggccccagtgaatagatcagaggagatgataatcgataccagggggtgtttggtgggcaaactattgcaggtcgagtctccgattttaatgtttttcagaacatgatggcgtttctttggcaaccggggatgggaatgtacgtcaaggaactcaacccgaatctatttttatttcaattctaccacgaggtcgacattcaaagggttatagatggtagtccttggacttatgatcgtaagccttttatctttacaagattgaaagaaggggataatccaaggctcgtgaaaatcaaccatgtcgatatgtgggttcaactccacgacttacaaaccgggaatatgactcttagtgtagttacggctctcgaaaatttcattggcacttttcttgaatcggatcctaataacttcttaggagtgtggcgggattgcttgcggattcgggtaaggattaatgttgaaaaaccgatcaaaagaagaatgaagattagcatcgacgattcatcgtggtactgggtgaatttcaaatacgaaagattacccaccttttgtttcatttgcggaataatcggacacgcagagaggttctgtccaagactctttttgaaaccgctgcatctccaagaaaaaccttataccttagaactgagagcctcgtctcaaaggcggcagacgacattcggggcacaatggctccattcagaagcgacggtacggggggaaacacatcaagctcatcacggcaacaatctagttcagaatgtcactttgttccctaggagtgcggagatgattgggggattgaatggtgcgaatcatggccctcatttttctcataatttgcctcataatgagaatcgaaacagtatattggagaatttggaaggtaatagcgatgatgtggctttaagtgtccgtaaaagtggggatttctttgattctacatatcctattgtatttgactcaaaaagaaagaggccagacaatgggccaggggttattgtgggcccagaggagaaaggacacaatgttgtagtggacgtcatggagcatgacaatgcgggtaacccaaaaaacaattttttggcgggctttggattacagacccgcccagagccatgagttgtatacgttggaattgccgtgggcttgggaacccgcgggccagacaattcttagcggaccttgtgtcccaaaagaagcccaatttgttatttctttgtgaaactttttgtaataaggttagtatggagagaattagagcccaattggggtttgattgttgttttgtggtggataactggggtcatagtggagggttggcactgatgtggaaagttgcgaatgaagttgcgattcaggggtactcgtttaatcatattgatgcaaatgtcactcttcagcagtctacgacttggtgtttcacgggggtctatggcgagccaaaacgagagttgtgatacaagacttggactcttcttcggtcactcaaaaacgatagcactcttccatggtgcattatgggggacttgaacaacttgggttctcaacttgagaagaaaggtggtaggatatacccggatggtctaattgcgggttttaatggggctttgagcgattgcaatttgcttgacttgcctcttgttggctacccgtatacatgggagaagggaagaactagtggggactggattgaagaaagactcgacaaggccttggtgactcacgactggttggctctgtatgctcagccggttctttacaacctcgagttctctacgtccgatcattgcccaattcatttggtcttcaaaggtgtgtttccagctacttcattcatttcttttcgtttcgaaaatgcttggctccgagagccattgtgtaaacaacttgttgaaggatgttgggaaggctcgggttcacttactattcaagacaaaattcaaaagtgtggtgaggttttggggaagtgggggcgtgacataactgggagcttccacaagcgtattagccagtgcaaagaccaaataagaaactccaaatggggcagggatccgatttcaattcagcaacatcaggaagcaaaggctaatttgtcaaaggttttagctcaacgtgaaatcttctggaagcaaagatcaaagcagttttggctaaattcgggtgacaagaatagtaaatacttccatttcgttgcaagctccaggaaaagaaacaatagcataagccaacttgggattcggggttgaagcatgtcatcactgggtatttccaagattttttccaatcttccaatgttgatataggcacggtgcttgatggagtccgcccttctgtatcccgtgagcaaaatgatgaacttttattgcctatttcagaggaggaagtgtgaagtgctttattccaaatgcaccctgataagtccccgggacctgatggcatgaccccagcgttttatcaaaagcactggagtattgtcggtcaggatgtggttcattttgttccagagttctttcacaagtaagttcccgaattcaattaacaatacacacattgttttaattccaaaaaagaagaacccgtctcaaatgagtgatatgagaccaatctctttgtgtaatgtcctctataaaattgcctcgaaggtcattacaaatcgcatgaagggagttcttgattatgctatttttgaaacccaaagtgcatttgtatctggaagattgatttctgataatttcatggtagccttcgaagtaatgcattacttgaaaaggaagactaatggaaggaaaggttatatggcacttaagcttgacatgagcaaagcttactatcgagtcgagtggagttttttggaagccattctttgggcaatggggttcagcaatcgttggattgaattaacaatggggtgtgtcaactcagtttgttaccatgttataaatagtggcatgaagatggggcctatcattcctacaagaggcattcggcaaggttgcccattatctccgtatctgtttattgtgtgtgttgaaggactgtcctctctgattaaacattatgaagccaaccgtctactcacgaggcgtaaggttgctaggagtgcgcctcctatctctcacttactttttacggatgatagctatgtgtattgccaagcaacggaggaagaagcaaatcgtgtcctctcgctactacatacctttgaagaagcttcaggccaaaaagtcaatctcaataaatcctcggctttctttagctccaacatccgaacggacattaggattcgaatttgtggtttgatgaatattcaagaagcaggggttaatagcatgtacctgggccttccgagcattgttggccgcaataaaaatgttgcgttgggatttctgaaggagaaaatgaggacaaggatcataggttgggagggtaaatttctctcgcgagctggaaaagaagtgcttattaagtctgtggttcaatcgctcccgtcttatgctatgaatgtcttcctttttaccattggtacttgcaaaaaaatagagagaatgatggcaagtttttggtggaaatcctataattctaatggttatgggagtgggatagtttggatgaattgggataggatgactaaacacaaagtggaaggtggtatggggtttcgcaatctgagggatttcaaccttgtaatgttgggtaaacaaggatggaggttactttttagacatgaatctttagctagcaaagtcttcaaagctagatattaccccaatggtacttacttgactgctgagctgggttctaatccgagttttatctggagtagtatatttgctgccaaggacacagtcaaacttggtcttaggaaacgaattggggctggtttgactgtgcagattacttcagacccatggttacctgtcatggatagaactactccttctc

SEQ ID NO: 18648 - DNA, 2135 bp, Cannabis sativa
aattagaatataatttgcttaatcccaagtctattcttgaatagaggttctactgtatattgttattgatataattaaatatcaaattttatataatttattaatatttattaggtgaatgatgataggtgatattagttatgccttataacaagagtattgttattgggcattagtggtgcctatcactttctataggtgtcactctatgattggttagcaatattctttaaaatttatttttttaagctatgtgggatccactatttgattacaccaatatgtatatgacactaagaaatgtgttatgcaccagtaatgccttttagggattttcttataacaatagttgtcgaaaattaactactatgacagttgtgcaccaatattactaaattacatcatttttttttaaataaattatagctttcaattggcctttttccaatgaggactagagcttgaataattataataaaatgtggtcaatatttagtggggacgcattgtaaaataaaaatttaaaacaatagttacatgaaattttgtattagtaaaatgattttataaaaaaatttatttgtaaaataattttttatagtcgcagaaaaaaatgattataaattatattgtgtgactataaacgattattatagttgcaaaccctagtatgattatcatattcacatagactaaattaaagtaaaattattttataaattttaatatttaaaatggttagtttaacaaatttctcacatatatatatatactacattatatatttaataataataaagagaaaaaaaagtgacaaaccgactaaaatatcatttctttagtttttctctttgtctttcgttgtgtttcttgtatacttgcagagttttatattctcaatatgtataaactaattattaaatcaatgtatatataaatataatttttaatttaattgaatattcattatatatttataattttatttcaacaaaagtaaaaattaaaaaattaattagaaaaaaaattactaaacacaccttatataaatcaaacaaaatacttatagtaaatgcataataatagaaatacaaaatcaaaaaaataaaatcagaaaaaacgtaaagtataaaataaaaaattaacatttttagaatttacacaaaattgtaaagtgtatataaacagatataaaatattaaaaagcgtacctcttggcatgtacagtatcaagctagttatacaaatatggaaccagaaaaataataataataagattgtagcttttcatcatgttttacagtttcttccctttttggtaaataatatgcatatatatttataatattcatattgaatttgcaattgactgtggatgatcagtaacattttcaggaaaacaaaattgatgtataattattttctatatttatatataaaaaaggacaaacagaaaaaattgactagagttaggcatatgaagaggtcctcacctgtagaatatatagaaacagttttatttatttaattataaatggatgaagacgttggacaattcagaggttactattttaacataatatagataaagctatagaaaagtacataagaagctatagggcaatatatatatatatatatatatatatattgtaaggtaaggtttcaaaatgaaatggattaggactagtaaactgtcacagccctaaaaggcacccctagctagatagattgcatgcccacctgatgatgtgcatcaattattacccagttttcttcctcttttgactgctttcttagtagatagcgatatatagtcattatctttatttatttagttatatgtgttatcttaataaattaaacttcatatatattgttttcatacggaacttcatgatatgaatgaatttgtctaaattatttgatacacatggataaaaattggaatgtgcccctccaagggttacaaccaattaagctcataatatatatattataatgtttagattggggctgcggatacaaaatcttaattatatcagtctgtcaaattaacccttataactttctcataaagggaacaggaagaaaaagcacaattatttagtcatatgtagattaattgtagggtg

SEQ ID NO: 18649 - DNA, 4558 bp, Cannabis sativa
ttttgctgtagtgtattgataaaatatgtatatatatctaaaagaaacgacaagttatctcgacaattgaacatttattaatcatttaaaataataataaataatattttttaaataaaaaagaaaaaaaactataacaatccactattgaaaggcacaccagtttgaggcaaccaatcatctccaagtaagaaattaaaaacagtgaaattggccacgtcagaagaattcccaatcacgtgatatcctggccacgtgactctgttggctgtgtccgagcctggtcccgtattattaaactctccataatacaacgtggagagagcaaaatctccattccactcacgccaaccaacggcctcgattgaactatcaaaataagattgcatataaaccgtcctcgaatactccttccacggtctccccaaataagtcttcgtaacactaatcgtactattattattcatcatcgacatatttctagcagcagccaagtcatccgcagccataattgtacagttatggatagaaaacccagtgttctgattcggatcggtgcgcccttgagccgtgattgcgttgaactggttcgccattgcaagccttggatatatgtgacagttctggaaaaccacagctgcgttcccgaaaatgaaatctactgtgccgtagatatcacaatcgcgatagaattggcggagagaatgagtgtagagagtgtcttggtacccttcgaaactgcagctgtagaaagtagataagtcggcgctgtttcgaaccgctaccgcctggtgcttgattgcgccggctgtgttccggaatgttatgttcacagctacgaatcccggcgcccctaccactgaaaacataaacaaaaaaaaaaatattaatataaaaggagaattgctaaaaagcaccatcagtgtctaacaacttttttagtgttatatcgctatttgtgtaattaaataacgagtctcatacaacttaaataaataatttttagagaatataactaagtgctacccaatagcaatgctctaataaaaataataaaaatagtttagttgctcgatttttataataattttatgtggcaagctcacatgagcatgcgacaactaagatgtaaaacgaaatagtattgctattgaatacctatctaacactatttaaaagtagtgttttaggattagttagctatattttttaaaaactatttttgaagttatatagtgtcttatactattaattacactaatagcggtataagaagagacttatctcaaaataaaataaaatgtactcctatattagtttgacttaccaataagatattaaaggctattgtaaataaatcaagaaaaaaaaatcaaactatatacttaagtataatttaaatttacttgttagatagatccttagcaccacttagaatatgcattttataattgattaacaatatttttacttaattaatttatatgagacttaacattacacacctaaataagtggtagcattaattaatacacatcattattaaaacgatgctagtctatttttatatacagtaaatgaaaacgatgcatcattattgtagcactaccccacaacaaccaatgtagataaacacatatttaattggtatagtagatcgagggcttaccaaatgtggcagaattaaacgttgtccaaccatctacgacgctgcggtttccagtaatcaccgtctgattgattccatctccaatgatcattagattccatttattcttagcaacaaccacatactcttcataaacaccagcagtgacataaatcaaggagtacccttcactcgaatccgttttgttcggagtcgcattaattgcatcgttaatggtagtaaagttaccacttccgtcttgactcaccgtcacgatgtccctaaccaaaacctctgcatcggcaacatcttgatcggcgaggtttctacggcttacagtctcatacaccactctgttttgactcgacatcttcatcttcatgtgtccttttctaaaccccttaagttgttctcctttaggggtccaagtagtcactttcttcttcttaggcacccaacctctcgtaaccagagctagagagacgctatatagcttagtgtcgttggcaagagggattgatataccgttctttacattccaagacgacgccgttccttgtattccatccaaacaagtttgttggttagttaagatggcactgagaaaagtctggatgtcttcggcttttaaggtcgaaagaactcgactcgttttgttaaccgtttggaatgagcttgacaagaattccatgttgagagtcgctagagaacgacagtcctctagagctcgaaccgctgcaaccgataaggttgagcgtcggcgtaaatacttttctattaaggataagaattttcttgcttgtgacagtgattttcgaacggagaatcggccgtagtcgtagacattcccgtgggtgtgggttggaagtacagatttgcagtaggaaggatccggtgtcgttttgcataggtttttgggagttgtagttgtgttaggagaggtttctgctgaagttgagattgaattaatagctgagatataaaagagtatgagaaatgatgtagctaaaatggagagtagctttgaagtcatggttaatagtggtaaaaagagagcacttgagttggagaggatattgagaaagtagtagtgggattagttattgaaagtttgggctaatttatagggatgagtaatattggcaaagtatagcattaatgaataatggtaatgtagttgttggggttggggacagagagaatttagtataggtattatatgtatttcgtcaaagtcaactttttcaaagactgtacaaaagcgcgtcgattcaaggtggggatatgttaagtgtatttatacgtagttttgagtacatagtaaaagaaaagaccccatattttgttaccgttaataatactgacggaagttgtttaaaaaaataataataatactgagagggatcgatgttagatcgcaaaaataggcaacttgttattaagcaaatacatatgttaatgtcattaagatatacagttaaaaaaaaaaacaagaagaagaagaagtgcatgtagtgtaaagtatattcaacatttctctttattttaatagacgtcacttttcttataagatggaatcatttttagacctaattttattaattagataaaacgatcacataattaatattactaattttgtctcatatgtgatattcaacttcgctatcacggcgcgttattcactggctagctcacattattataaatgcatggaaaatattaagataaattaacgatcaagatgtataaaaaaatatggtcaaatagttaataagatcattactgcttaatgaatgtatgcagatgtatagatatgtcataaaatatagtacctgcgttatgggcagggtcagggacggagtaggacactatctcaagaaaagcacataacactttatttaaggggctaattaatgtaatagtttttttttttatctgaataatatactaatgaattttttttacaattcaccttttaaaaggaatctattaatgcacttttatttattttgatatttgatagaattttttagtttaatattttatatggtcctctataatatagttatttaaaatatcttgtaaaattttaaaatattaaaaaaaattaatacatcaaaaatacagttcaaataatttatttcacacgcttataataaactgtttaaactctgttgcaaaaataaataagaagtgcatggtagaaattaacttttttctaagaaaaattaagtttcaacgtcaatttttgcttagcattgaagtaaacccaagaaagtaaaataccttttacaaaatgaactagttaaaagagcactttttactttggtttatatagaaaaaccgaaattaatgaaaaatcactcacattaccttttttttttttttttttcctttttactttcggtagtttttatttttggttatacagacaaattattaataacattcattataattatagtagatattatgtttatctttaaaaatttctaaataagttaacatgtaaaaaatataattctgaattatttgaacatccacttattttttttattatttaacaaattattttaaattttatttttaatactgtaaattatttatataacttttttaaaaataagtaaaatatttgttacaacacatcatatatattatagttaaaaataaaataaaaaaatatattttatttaatttcttaatgtgtctaataccacgcatatatatatattataattagttaaatatttttatattatttattaaataaaaatactgaaatttaatattaaatgttagggtttaaaaaacactcaaagaaatatataaatcacagatctaaacatattcctaaagtgctttaatatagaaaaccctaagtcatataaatctataaagcctttg

SEQ ID NO: 18650 - DNA, 8683 bp, Cannabis sativa
ttataactaaaatagaaccggttgaatagttttattaaagcatacatataaaattaaagaaaaattctaaattaatacataaaattaaaaaggcaatacttctgaaacatagaaggcatttataagcagagaagaaattggtaacaacaatgataaaaaaaaaatgcaattagaagtagcaattcatctatatcactaaatcatttctcatcatcagaacaaataacataaaaaaatagtaataaaaaaattatgatgctttcactagaacatttccattctttgaggaactggagtctttataacttgtagaatttggacaacttctgccattgaaggcctacttgaaggcacctgagaagtacatactaaagccaatttaagaacaggtaagacctcatcttcagggtaatgtccaatacttgcatcaacacaatccaaaacattcccttcttcaagcaaaactcttgcatgatcactcaatatcaccacattgtcttctccatactcaaccggccttcgccccgttacaagctcaagaattagtactccaaagccataaacatcacacttctcgttcaccctcaggctcctgcaagccagctctggcgccacataccctaatgcactttgaaaccggttgcttatcacgtgcttgtccagctttgtcagcagcctagccagcccgaaatcagagatttttggattcatgttttggtcaagcagtatgttacttggcttcaaattgtagtgaactatgggaggtgtaattgagtggtggagatgagccaaccctttggccgttccaaccaaaatcttgaatctttgaggccatgtaagaggctcaactgaagagattctttcgtggagtttggattgtaggctgccattggatgcgtactcagttacaaggagttgaacttgtggagtccagtaatacccttttaaggatactaaattgggatgttttgcttttcccaagtttctgacttcgcggtcaaaatcttcagggtactgaattatgtttgaggtaacaagtttcttgatggctaactctgttctttcttggtgatcacataaggcaactttgtagacagttccaaacactccttctcctatctcagaggccttattgagtagagacacaagatctccaatctcttcagacaatcttgaatcgaaaagaacaagtttccctaccgctagacttgccccggatctagaagaactagagcacatactttccaaggcttcttccacaaaagccagtctttttctggcagatacgttgagaagactaatgacaattaccccaacaaggatcagagaagcagccgaaattgcgatgatcgcagatacactgaggaacatatggctgttattcgaatttgatatgatctgtgagggttcagatggattctgcttctgatgttcaccaccaccaatttgattgtcgtatgcatttgggtcaaggactagaggtttagacacattcattttacatggaccttttaacagtggtgagcaaattcccaagttaccttccaaagagctttggtctaggctctgaaatattcccccaactggaagcctcccaattagcctgttgtaagagacattaactgctagaagatatggtagttttccaagctccattgggatctctccacttagttggttgaactccaaatttagcatcttcagtttttttatctctgtaatggacataggaattggaccacttatgttgttgtgggacaagctcctgtgacaaaattaattgaaacccaagtaagtacatgttatgaaaacattaaattctatagaaaatgttgtctgaactctcaaaaaactggcaatattataggcaacataggattgcatgacttttttctaatagattactacatgacatttcagaaaattaatgaacaaaacttgaacaaataaagaattaatttgcaattttgaatattttatgactaaatctttcaatagtagaaaacaaaattggaagtgggaaagaagaagattagaggttgatactcacaataaggaaagagacgaacaatttccaatctcattaggaatctgaccacttagtgagtttccatctagttgaagaatgtccaagcttcctgaatcacagatatcttctgggatagaaccaagcaggccactacttcttagatccaatactgtaaggtttctaaacaatccaagctcaggaggtatcctggattcaagattgttccaagacaaattcaagtactccaaccgggagaaaagacccatttcagctggtatagttccttgtatgttgttcattgacaaatccagaaaatgaagactttcaaatactctagtactagaagttgaacctgttggaattggacctgtgagttgattttctgaaaaatcaacttcttccaaagctagattgaacaaaccctctggtatactcccattgaagttgtttcccttcaagttgattactaataatttggtcatgccaccaattgtggttggaattgttccaatgagcttgttattagataaactcaagaaattaagtgagttcatttcaccaattgaggaaggcaagcttccggtaaactcattattggacaaatctagtgactccagatttctcaattcaccaatccactgagggaaatcaccactcaccatgttgtcagctaagttaagaagggtcaataagtttagcctccggaatgattccggtaatgccccggaaagttgattgttgctcaaatcgattcttgttaagtgtggacagagtcctatatctgatggtaatgagcccgaaaagtggttttcttgaactgaaaactgtttcaagtaatgcaaagctgatatcccttgtggcaaagaccctgagaagaaattttttgagagatctaaagttctaatcctccttaacagccaaaacccggaaacgaattccgggtttccagaaaatcgattagtggaaatgttgagagtgttcaaagagagacatttgaacagagtttgaggtattggtccctcaagcaaattctcagccaaagaaagatgatgcagagagagacagggaccaaacatgttatcaggaagaggtcctgagattgaattctgggaaatatcaataactctgatagatttcatgtccagaaacgaagctgggattcgaccggaaagcttgtttcggctaaggttaagtacttgaagactatcataaggaagagaaaactttgagctaatatcaccactgagattgtttcctgataaggacagtacctttagaaactgtaacttttcaaggcctcttccaaccttaccagataagcctaagccgtctagcgaaagctcagaaactctgccggttttcgggttgcaatggacgaacttccatgaacacggtgagtcatcatcttcgttccatgaagagagatgtgaagaagggtcctgtacgtctgatttaaagacaatgaggcctaaaacgtcgtcgttgagttgaacaccaattttgttattgttattattatttccattgatgttttgaatcagtatacttgaaataaagcaggccaagaaagagaaaaccaacctgggaaacttcgtcatcatcaaaaggaaaatattgtcaagatttctttgtggatatataatatattgttatatacttatgggtgtgtcggcatatcatatatatgtagtagaattattataaatccacacagaatatcatttatatatatatatatatattatatccgtagcatcttctttaatcttactatcctaattaacatttttagatgaacacggcacactgtacaagtgagcagtatgtattatattgatacattatgggcaatattgatatatattgtctgtaaataaatgagcatatagatacagagatacgacaaaaaagatgaaaaaaaggccaaaatatgagttgtgttgagtcacggacaaaaagcacagcacaactctgggtcttgtttttgtccgttgcatcttcctccccactatataccctataatgttccttcgctttctcctaattttcatttgttattatatacatgtatatatatatatatatgagtatataagagtgtagttcattaattaatttactgcaatcaagcagagaaacatgactgtcatttttcaaccacgcaataatcagagtttttgaaccctacttgatttggatgttgttattattggtcttctgaatccaattaactgtaatgataaaaagaaaatgtgtttcacttacttatactgtacttgactttttgttctctttttacccaattattattatcattttcatatgcatgtgaatttgtccattgaactcttaccactgtcccgtgattaatcactccatcgatcgttgagcacacacatatatatataattataattacgtgagattactcacaatttattataaaaaacaaactaatatatatttaattaatctcatcgagttcatatatataataacgcacgtacgtcggtacgtgatactcttgtttgtttttggttacccaataaacaggcaaccctgattccggttcagattcaagaatcttgttttgtttaaacctataagttttttttttttttttcgttttggttctcctttctttggaatttatatggtactagtgaaataaactttatggactctaactttatggatatataaaccaaacacttaatgacaattgaaatttgtgaagagctagtttatatgcttactgtatttgaaggtttagatttgttatattgtctactagttttatatttttcttcaagggaatatatatatatatagatatatatctgttaaatgttgatggaacataagatgggtcacgagaagcaagaaaagaattcttgatgaaaaaagaaaaagaaaaggggaaaagaaaaacacaagttgtgttctaactcttaatttgtgggcctattattataatactattatatttttttttattattattacactaaagtattgttgttgctgttgtttgttgttaatgattaagaatttcgtctggcatgattaccgggtaaaaaaaaatgaaaaataagaaaatagagatagaaatcaagcattttaaggagcgttttgtaaaaatattagtgatgatgaagaagaagtttattagcaaaatatataagcacgtttggttgcacaagcgatcaacaattacattgtacgaccataaaccgattattttgccatcataattgcacaattcaaatagttattctataaattttacacttttatattgttagtttagtaaatttttccattttaagtgtgtggtatataaataatgtataatattttataatttgcatattataaatatattatatatataaatgatatataaaaatatataaaaaagttgatgtatagtgtaataaaattaagttaattaggatttttgtccttaaagtactttaatatatacaaaatcatgttcctaaacttttttggcagttaaaaattccccttgaactattgaaattgttacatttatattgaaattgttacatttactgacttttgtctaaatttactgacttttgtctaatttcattcaattttactatttcaatgattgtttatgtactaaaccatactccccagactttgatatctacaaaatcatgccccttgaacttttgacaagtactaaatcatgtcccctgaactttcatccaagttagactttttttactaaaattagacaaaaattgttaaattcaacaatctcaatagtttatggggtatttttaaccaccttaaaagtttaggggcataatttggtacatgtcaaaatttaaggggaaaaattcttattagcctatatttaatatttaaggtaaaatagaaaaaataacattttagtgaactattttacagaataaagtagagaagttgttgggagtgctattattactcatgtataaattgcaacttcttttttatcattgtattaatgagcagccacttttattttcttgttcttttttgaattgaaatttgaagttgaatagaaatatacaaagagaaatgctaaaatgaacccgtggtgtctagtactctctaatgtgtaatattattattaatacaattaagtatcaaatttcatataatttaatgtaataatttttatggaatatcactaaataattacaaagtactacttctaaaatagtatgaggtactactatatctaataacaaatactcatatacaaagtattatagaattattaatttattaaaagattgatcactattttttttatgataataaataaaaatatggaattttcgggttgtagagtgaggattaagtgggtaacgtgggtggcatggtatgtagctacgaatacgacgggaaaactcacatgaagcagacattaattcacgaggctccttattaagacctctctcttcctcttgttcttctactactccctcaagcacatgcccaaaaacgacgtccaagtgggcccaactcacttttctctcattttcacacttcattccaaatattcttgttttattccactattcatttatttgtattgttttttgaaagaatatagatcatcgtcattgaaatattagaggaaagcctcgttacattaaaaaaaatattgagaattaattctataagtattagaagtaattgaagagccaaatgaattaaaagattttgttgttactttggggtcctgaagtataaaatttttttactcgttggtgttaattaagcggtctgtggacttttgtttctcttcacagggcttttgcattaataaatttcatattacgttagtttgaatttgctaaatctgttcaattgcaatcatataatgcaatcgtattctccgatccaactgttgtttttatactatatccttgatttattcaccagaaattttcttgtagctcagctacttttacttttcataatcataccttacataatgaatatagtagctttttatactatataatcataccttatataatgaatatagtagcggtcttaattgggttatatatatgatactggttgttaatacgaataatagaaactctgttatagctatttttgtacattcaatgtactctatggatttggtactgatgccaaatagttaagatgaaagaggtaaccaaagggttcattactgaacaacagtttgttacaagcaaatatgctttcgcaaaggatatgggttgcttagaaatttatttaaaaataaaatatttatgatcatgtatgagatgtggaataaattgaacacatatgcattatgaacaaaggatcaaaatgccttcagccattgattctttgaacttcaatctcacataagctttgatctgcgaaagaaaagaaaactgattagtgtgggtaatcgggcttccaatctctctctactctctttagatagatttattgtgtttttacagaagtagtgagctcggggactaagaccttatatttatataggtgagacattccatcaaggtctctgccacaatttattgtaataacattttgacaattaattctgaaaattaaatcaggtaactgaaatatttggtaaatcaaaactaaccatacatagaatatttatctttatcacatatttaatttgtgattaaatatagtcaatggaaaaattcaatcttatcttcatacgtgtagatcaaattaattgattttgtacacatatagaaaatattctaatattctctcacttggtcagcattttcatttatctcttaaacccaacgttcctcattacataataaacatatgaatcataacgataggttcttattatatatcgagtattatcttccatgtattacaatatatttattacataacaatgtacttaatgtgacaatgtacttaagcgaacaaaccctaaaccttatgtttattttggtcctcttacaataattttctcaaataaaattaaggtgcacgcgaatataagaaaatattataattagagtttcattaaataatttagttgtacaaccaaaactgcataggggtaacggaatcccatatttactttacaatccttgaattagtgttgcggcatgcctttagtcaaggatattacgattactcaattcattattgtgtgattaatgaccacttatcacgcctctttatggctaaatacttaatgtcgatatgctagcttcgaccagtactcttatagttcttaaccataaatactgtagctgaatttgttgcaaaattttcttaatagcctgatgaaaatttatttatgaactttaggcgtggtatgaaactctataatacaccatacgaggaaaacaataaatgaatttgacttctataataaaaataacaattaaggttctccacaatataacttactagtaatcttaagaacgtaatcaaatattgatttgcgtgaattaacatagtcagtgaagtacgttgggatctaattggttaactatatttcaagaatcttagttcatcttaataaaatatgtatgaatataatctttagtatcttaaagatacatcatcactttgaaaaataaagtggtcttaactttagttatt

SEQ ID NO: 18651 - DNA, 1629 bp, Cannabis sativa
taattccaatatatgctctcaatttcattaatagagaagtgggagaatagagcaatatatatcagtctcacatattcaagaataatataaaaaaaatcaaatgaatatgccaaaactcacctcccctaaaaacatggctgaaaggataactgaaaagaagggctccatagctttaattgtgtgagtgaatgaaacagccacttttccaagactcatattagtaaaaaggtttcccaaagtatgaaccgcagccagtggtaatattgctagaagctgtcattaagttacttgcaataagcctcattttgaaaacaagtcgaaaccataaaattataaactacatatttaacaacattataagaacctgggcaccagtaagcttcggtcttttatagagattgagaccccacatgagaataacaagtacagttccaacagcaaactgaattagtgtcacagttgctggaaaatgaaacaccttcaagacctacaaaccaagagccgaaacaagtcatgcttaattctaatctcataaagcaagttctcacaagtctaaattcatccatattagcacagttcaaagttttcatagaaatacaaaggaacttgcttggtaatattcccatccttaaaattaagattaaggactattggaatttcagcaaaatcttaatagatctatgttgacaatttcatttcaattataaaaacaacataataaattagatgattaacaaacgattagtcaatatagtcaacaccaaggaccacgtcctatatttataataatatattgtataacaaattagaatcttggcgacccttgatttgagttgccaaacctcttcacacaacaaacatttgattcaaacacatctcacatttccaccagccaaataaatcaaaacatttataggaataaaaaaaatgtgtacctgcttattgtagatgttaaaataaatattgaagaggtaccacagaccaaataacaacccaagcacgagagtttttttcaagctactcgattcagcgacttctccagcgctctccggcaccggactggccctaacctcaaaacgattggcttcaccatcggaaggaacagaactccacggcctgaacttaaacgccgaagacgaagacgaggacgaagaaagggaccaagatcggcggggcaaggaagaagacactgagacattgttggaagtggcgagatcgttattattcttcaaagagaggcgtataggatcgaacctaggccgaagaagagtagggttggaagagagtcgaggcttcccaagagggagagaagaagaggagagagtaaatgcggcgctctgcatcttcttcttcttcggagagagacagagatctgatgaagatgaagaggaggactacaaagattttggctttgaagaagagagagaaagtttgagaacctcgaggtgtccgtcgagaatggaggcggttgctgttggttggttagagtaggctagcgagtaggtgagagctgagtctcatgagtgagtgtgtaacaatgcgtctattttatattatattttattgtgtgtttttgctttagctttctgtctaaataacaataaaaatgttaaaataatttaaaagaaa

SEQ ID NO: 18652 - DNA, 6637 bp, Cannabis sativa
ccctgttcttctgttagccccccaccccttaatacccaattgaagaaccccctacccagaaaaccccaagacccaaaaaccctacctcgattttctctctttgtttctcaacttgtctccctctctcttcctcgttgttcttagtatgactctgatgagccaccatcgtcgaccaaccaagggttcgagccctctctttctgtagcgtctccgcttcaagcctctattggacattctcccatagatttatggctctttatacacgagtgtattaccctgactgcttcatggactgacaactcgttctacagactaacacgaatgtttcgagtatgcttaactgtggagttctttcgtgataggctacttaaaaagaagatgtaccttgttgatataaatagtaccaatcaatccattttaagtcatcttcaactgcgtagttacacatacacagttttagaatcatcacacttgacatttcctaagcgatgtaagattgcacaaattacctgatatttccgtatatataatgaacaaaaaacttagcaacttcattatataatattggcattcttgaaaaggtgcttatttttatttttttgccttaattaaaagggtgcttaattgagattgttaatcgtaacaccaagaaatctaaagtttgaattttgtctcatccaaatttcaaacacccctcaccaatctaattctattttttttttcctgttattataaaactcgtagagctttttttattttttaaaaaatcgtagagcttaattaagtaaaaaatacctactcattaatcataatcaaataaattacaatgtttttgtttctttctaaacttaagaaaaaaaacactctaaagcaatgttgtttcaatcagtgtaagtatgtttgccacaaaaaaaaaggtgtaaaaatgtactgtcataggtatttcggtttaacactctagagttataattggacggtggtgatggaaaacggggatagatctgagggaggagatcgctccataagcgatgatattagaaggacacaggtggagtccaatttttgagcccgtttttgtttttgtttttggtatgtacgtgcacatccacaggcccattaacgcattcgtatccaaaggccacgttgaattagactaacaataacatctctctctctatctgtgtctctctctctaacccacacaaatataatctctctctctctagagcgcgcacacacgcggattcacagagcaataaaaggagggtagaggtgtttcaaagggtttgttctctgtctaaaatctaaatcgcctcttcctcttctctctcttcttctctcccaaacaaatactattactcggagagactttctctctctacacattctacagctgcgttatctctttctctcacctttcatccctccttgctaaatctctttctcctttttcgattttttacagaacgatttgttttgggctctctatctcttcctctggtttcagatccttgtgcatcgagcgatatttattttgttgttgaaattggtgaatcaatttctcactcaaaccctaatttatctattttttttgtctttctctcttatacacactcagtaggctcatttttgttggaggcctgttgtttgtgttttgggactttgaccttggggctgtgaggtgtttcgattggaaatggtgggaggtgggagtggtaggcgggatgagtccccagtgatacagagttctaacgtttttgctgcgctcggtagtttgaagaagaagaagaagtcggataagagcaaagggaagaaggctgagaaggagcctgagaaggaggttttttgggctcccgcaccgcttacagttaagtcctgggccgatgttgatgatgaggatgatgacgattactacgccaccacggctccgcctgaggcggtctggagtgcccccggttcgaagtccgctaaggatagtgaggagcatgagcctgctcttgaggtagtctcctttcactgtttgagcttgttcatagtcttatatgtagtgagatttatatttgtatattcatagatgtgtttgtacgcactgcttttgttacggtatataggcacatgtgtttgttccaagattgatgtttgctttggagtattaagtagaaatagtgttgggttaaagtctggattacctagaggacacacgatttcattttctgaatgtgaatactcttgactatttggtttgtggtatttcagtgatctgaagtttaattttgtgaatttttaatatgtgatttacatggatcctgcattttgttactatcttgagatcgttttcatatcagatttagttaaaacggttgtgttcattcagaagaaaaactatctgatcttaattattaattgggttcctgtgctgttaatatttccaaaggaacaagttgttttatttcgtccacttatttagtattgatttgctcttattttttatggatgttgtaggaggctccatgataattattttaatggtagtatttgttgacaaagaatttatatgtagaatactttaaggatactttagagtgaaggcttcaatgtctactcttcttcagttattctcttacttattcagattgactacattcgatattgatcctccaacgattttgtgttctgcttagagggtcagtatttaatccacttgtttcttacattatttacatctctgttgttatgaccgggttttcctgtgctttaggtgatgaatttacttatgtttgtcaccatgctcgactttaaagggtaaatttgtccttgtgcaattagtgtcaatgacggattaaagacaaagacaactgttatgatttttttctattcctttttgtgcaactctagataaaatattcagaagataatgatttactttgtcaggatctttcaccttttatacgtgttgattgctatagaaaattaggcaatatctggttggttggcatagattttttcattcatttgctatttggcatgtatggatttcattagcaaatattcaaattcagctgggtcaataaatgataggtttctgtacgtattaaattaatttcaagtagtttctgtaacaacctcatgttatcaagtgtagaaatttgttctacatcacaagttcacaacattttcaaagtttgatgttggtcatttaaaattgttggactgggacctagctcatcaatcactcaactgttgtatgtgtataaagaataaagagattttgtagaggactcttatgtgcaaatagatttcaagttaataaaactataatggaagaatcaattattattagaccatatgctactaggcaaacatcatacttagcataacgtattaaatgtgattatgtgagaaaaaaaaaagattctacccaaactagtcgaaaatatttgacattggactgagtagtaaaagaaccatagcctagttgggcctggatataagcaatggttagttttttctgtatatttatttggtgatactgagatgttatacgtactgtggattaaaaaggagggccaatgacatctttggtttctgtttcttgttgctattattggtagtgatctttcccattcagctaaaacttgttttctttcgcctgcaatttagaccccgagttgccatgttacagtgctaaaatttgaagtgtcaaaatacatttggtctattgatttcaggtaagcgacagtgatgaagaagctcttgatgaagttgatgatgatgcagaggatgaacatgaaaatgactctgaagcaccactgcaagctgaacctgttcagaatccttctggagctcctttgcctcctaaagaatcagaaaggcagctttctaagaaagaactgaagaaaaaggagcttgaagaacttgaagctgttcttgcagagttaggatgcagtactataagtgagactggtggccaagatgatgcccatggtaattttctttgttttttggctaagtagtcagttggctagctgttattagtagttatgttttttccttccaaatttaagtatatatttccattagaggataatttcatatgattgaatttgactgccaaatttggacatcgagtggttttgcttcagtccagtttgtttccaaattcttcttagaagtgttctagccaatagtttattttgaaattgatttaatacaaacacatatatgtgtgtatatataaatacctttagtggtttcaccacaatatgaaaaggttcaaagttttgaaagcggcaatgattctttagaatgcatttttaggggttttcattaaatttagacttttctatcactttgatttttgaattggtcaacattcttctgcatgtttaatttatctgtggtctatattttgcttctgatcttctttttcatacataggtgctgcacgagagaagaaagaagagaacctcaatggggaagtggacaagaaggaaaatgctggggagagcaagtctgcgagaaagaagaaaaagaaggataaattgaaagagacaagagaatctcaggaccagcccgacggatctgacgtaggaaatgttgcagatgaaactgttgaggctgagaaggcggaagatttatctgctgttgatgtcaaggagaggctaaagaaagtgacgtccatgaagaagaagaaatcgagcaaagagatggatgctgctgcccgagctgctgcaagtgaagctgctgccagaaatgctaagcttgccgctgcaaaaaagaaagagaagaaccactacaatcaacagccagttcggtaagctggccagttttgttctttttctttcctttttatatatgagcatgtactttttgttcatttgttgaacctaaaaataagcatttaggaactggttttgcgaacttgaatgtccacaagaaacttgttttacttgaaagggaaaaaatgagaaaatgtttttatatatctcgttgtcttctgcacatcgtacaggctctttcctgagcacattaagagctctcattctttctttctttctttttccgggatttgaataaataaccacgactttgaaaacctgaaatgcatgcttatgtgatagctcattaatgttctttttaaatcttaaaaccttagaggttttgatggttttgaagagaatggccaccataacatatgttggtgtgctgaacttttggaagtgatactgccaagtgtgtaaaatttcattattcaatatgccaattgaattgaagggattgggcaaattcaacttagttctcgtatttgttgaccatgatctttctgtccactgaactactctagaaagcaggtttcaggtttggtatataatatgttcatgcgaaggtacgaaatggttggctgataaatctctttgatgaaatcttgatatgagtagttaattcattaatttgataaatctcgttatgttttggtaaatcgttggcttataaatcttgttatgagtagttaattcattaatcaaaggctaaacgaagcagttggagatcatgaatgttgacactatccaacaaattttcaccaaacaggacttatataaagtcgttgtgtttagcctaagccaattatctttgcatgtcaaagatatttggctcttcatcgtctacaaatgcaaaacttaggggtgattctcctccatggctccttcatgggttcaagagctccattttccccaactcaacatacccattaccattaatcacatctccccagtacttcctgcaggtcctatcccagtcactcctggtcaaaccctatacctctctaatcttgatgacatgattggatctcgtgtttttactccaacagtctacttctacccatcagatcacaacaagccagtaatgcagaccctatataatgctctttctagtgtcctagtcccctattatcctttgtctggtagactccgagagacagaaaatggaaaactagaagttttttttggaccagaacaaggtgctctcatggttgaagctcgctctgaaatggccttagctcaattaggtgacctcacggtaccgaacccagcatggacaccactgatctttcgatttccaaacgaagatccttacaaagttctagacatgcctttggtgatagctcaggtaactttgtttagttgtggaggatttagtattggtttgagactatgtcattgtctttgtgatggtcttggagccatgcaatttataaactcatgggctgaaactgcaaaaacagggaaactagtcacaaatcctaagccatgttgggatagagagttcttcaaaccacgtaaaccacctctaatcaaataccctcatgtagagtttatgagaatcgatgatggttcgagtctcaccacgaccatatctcgagataagacgattcaaaagtgttatagaataagccatgattttcaatctcgactcaaaatattagctcaagagagctcactatgttctaccttcgatgccatggcagctcatatttggagatcttgggttaaagcattggatgtaagaccaacaaattacgagctgaggttgacattttcagtcaatgcacgacctaagctaaagaaccctccactga

SEQ ID NO: 18653 - DNA, 2400 bp, Cannabis sativa
tttttttttttttttctagatttttctaaatctaaagattttttagaaaattttatccagattcccagattctccaaaaaaaaaaaaaaatatctaaagtttttaaggctttatcgtttaattttgaggtgtgtggtctctactggtcccaaactaaaatgaatatttcttctcaccatttctgggcttcttcttcttctttttctagttgtattgtttgctcagttgagagaggaagatcagtcccaacaaatacacttcgagagtcctaaatcaaaggtgaaaattactgcttaatatatatttttaattgtatgacagcttaatatataaagcaaaatcattcaatggaatctccggagcccttaagcgaatgggagcaaatcgactcaccttcccctcgctcccctcctccacaccaatccgttttttcttctcacatggccgatactcaaattcaacaacaaaaccactctcctgattcctcatcatcttcttcgccgacgccggcgttgtcttcgtcatcctcgaccaatttggagtctaacgaagaggacgctcaagcccaacggcggcggcctgaatcatcagactctcggctcgcggcggtgaaagaattcaagaagcaattgagattgcgaatggggatcctgaagaccgatgttcttggcgcggctaccaagatttataattacagattggtagcggtgtggagattttggtcgattgtttcggtggccggagcgattacggcggtgttgctctctctgctctacgccaagatgaggcgtccgcgatggagaccgactgttcttcgccgccggcgcggcgaaaataacgagcctctgctccttctgcttaaagagaaagatgaggttagttatgattgtcgtttttctctttccaagctatgattgtcgtttactgttctaattcaattgtcgtttggtgttggaattgaggtgcagaaaatcagccagttgcttgttcagattgctcatatgaatgaagctttatcggctcggcgaagggttcctgtaattcgagttggttgagctgagaggccatggaaggaactcaaaggggctttttttccttagcgcaaaacccataatcgtacgtatatattttgtatgtatttttatgtcgaagtgttatttattcaaaagtcgatatagcttttttgtttttgtttttgtattattctgattctgtatgaaagttgaaacgacattacaagcttacttggcattaaaacaaaatttaaaaatggctactattatttttgtagttactagtttaaaattcatgtgaaatgtaatgttcttgttgaatttgtgttccgaattctatttgatctagttcgaagagctcgcatttggtgaaccaagtcaaattatattttgtacttctattttgtaaaatttattaatttgactttctatttttgttaaatgacaaaataaattttatatttttaaaattgtacaaataggaccatgaactaatttttttattaatactctgatgtagagatgttatgataaaactaattacattttctgtatctgttcgtattaaaataaattatagggtttattttatcttttaacaaaagagagagtctaattggtaatttttgcaaaacacacacaagatttaaataaaataaatggtatttatccttatatatatatattttactagtgaagggtggtgtgatcgcacctatcattcgtttttctctattgtttttttaataaaattggtatcttcattaactaatcaaattgttaaaaacaatagaacgttttttagaggaacaatcctctaactgaagcatacgacctggagagaaacaagagtctttggctaagcagtgagccagcttgtttgcagatcgtttgacaaaacacaaatcaacattttctaaagataaaggcaacgcacgaacatcatgcactaaaagaccaaaagtagatgagatagagattttactttgaatagcttgcatgcataccaagttgtctgattccaaaatcacttgtccccaattgtgcggatcaatccaacttaaaacttctttgatgtcaaccatctccgcaacttcaggttgaaccctccccaaatgaccccgattaaaagcctccacgacattgccatggcagtcacgagccacacaaccccacccaaacctgccttcatgctcaaaaagggccccatcaacattaatcttgatctttcctgaagaaggtgcactacaatgctcaaccaaatggcctccgtcgaataacgaagacaaagaaagaccatttctttttttagcgtctttgagctgatcaagtagcattcttgctgatgtaaccaaatttgcagcagtccaacttttttgctgccaaa

SEQ ID NO: 18654 - DNA, 1266 bp, Cannabis sativa
ttgtacataatatatatttacatcaaatgctatgggaatcaaagtatgtttatgggaagctgatagatttactcagtactttcaaaaaggacaattaccttgtggaagttgatattgtcgttgaagggaataactgagttgatccttgggttactcctaagccatgtgattgtattacgacaaacagggaggaggatgagagccatgttgaatttcaatgtctcggctgcacctttggcagtggaaacacagtatcccataacttcaaaagctgctctatgccgatattggatgaatttccatgtgaacagaataatgcaaacaacaatccaaaacaacactatccatgctcttctccaatatgacctgaacaaaatttcagcttttgaggtttgctctgttaaagggtcatgagttttttgtgtcactgatgattgcttagccggtagtgtgccatttctcaagctcactctgaatagtgtttcaaattcttgtaactgtgaaaaaagttatgatcctgatcaaaataaacaaggtaaagtgatttgaacatgaaaatgcatgcatggttttatgtatgtatacctcaatgtagcctctattttttatgtcaagaaattccataaccagagaagcatagtcttctgcttcctcatgcgtgagagacaatttatttgtacacgcacttagtaaaacagtctgcatattaatccaactaagtaatctataacccaactttgtaagaaagtaaaaatattattaaaggccaataaaatatattaattagaccttaggtgctatttagtaacacttatggtttataaattttttaatcacaaaataaaaaaaaaaatttgttttcaagaacaaaaatgcgctctgtaatcacttctatttttcaattttaaaaatagaaaacaaaagtgtgttctgttaagtttattttcatttttatattttgattttatttaagtcgggtctaaattcaggatcggattcgggttcgagtcagaggccaggttcagcgccaaggcggtgggagggatttaggtccgggtctggtcggaattcaaaatattgattaagaaaaaaaaaaaaactatttaaaaaaatattaaatgtgatttttttttttttgtttttagaatcttgattcacaattaaaaaattgaaaagtgaaaatagttttatagaacatgtttgtgaaaaatattttcacttttctaattttaaaaccagaagacggattaaaaaagtgttaacaaa

SEQ ID NO: 18655 - DNA, 4772 bp, Cannabis sativa
cacatgaacccaagctagaaaaacactccaaaaatctcatctaagctcaatcaaaatccataccaacatataatcaaagattcatgtaaaaacatgctttagtgtatgtggatggcattttggtaactagtccaaatcaagaacttaattccaagcttattttttttttatatctcaacaacacattttctctcaaagatatggggctagttcattatttccttagtgttgagatatatagagatcacactaagatggacttgagtcaaacaaagtatattttttattttcttgttaagctaaaattggagggtgcaaaaagttgttctaatccaactagctctactgttacactcaacttgaaagatggtgaaccatttgctaatatcacactatattgaagtacattagaggattaaaaatacttgacacttactcgtccatatgtttcatttatcattaataaatttagtcaatttatttgtgcccatacgtctactcattgggaagcttacaaacaattactcaaatatctcaaagggtgtatctcagatggcctttggcttaaaccctcctcacatttactgttccaagcatatagtattgctaattgggctaattgtattgattattgaaacttaacaggtggctatgtcatgttcctgggagaaaatttggtttggtggtctaccaaaaagcaaggtcatttctcgatcaagcacatatagtgagttttgtgttcctgctaatccagcttctaggattaaatggatatcttctcttctatttgagcttcaagtgatgcttcctcaacctcctataatttgggtttataatcaaggtgttgtagcattggctcccaatctcatttttcatgcttgaagcaagcacgtagacatcgatcttcattttgttagatcaaattttggaaaaatagctctacatttgttatgttccttgattggatcaagttgttgatgccttaaaaaacctttgtctattgacacattttgttacctaaagtccaaacttcaaatggaatctttcccttttcctttgaagggggatgttaaccaatgtgactaaaattagttatgttagttgacagatagaactttagttaattttttaacaatttcttgtttagtttagtttgtgtaaacttaaatcttgagctatataaataaaggacagacgctaacaattgaaaaaagcttttcttttttttgaaaatgttctatttttctcgtctttcttgcttctctcttttttagttttcaccattgccattgtaaacttctgcagcctccatcaaatgtatggctcattttttattattgttatgtgacatacttctaaacatgaaatgtagaacttgttgagttgagagaaaatgatagttgaatgtgaatgaaatctcattaatgttttagagaaactgctcttcttaaaataaaaatttgtagctttacataaatgagctaaacagaataactgaaattagtgcacaaaataaataacaacctaacccagctaacctaactaacaaactcttaactaacaccccttcaaactgagctaggccaagtaagacaaactcattttttctctaagtaacaagaatcgagtgttagaaagaactctagttaggatatctgctagttgatcaagggctggtgtgtgtttaacatgaagctacttattgagtatgccttcctggacaaagtagaggtctaatttgatgtgtttggtctaggaatgcagcactggatttgtggacatgagaagcatactttggttatcacactaaatagtaggagtatgcagctttgaaaaatcaatttcaataagcaaatactgaatccaaataagttctacaatggcagtagcaaggctcctatactcagctttaatgctagacattaagacaatcttttgctttttagatctccatgacataagattggatcccataaatatacaaaaacctattgttaagcatgtgtcatctggattggatgcccaattaacatcaaaaaatctagtaagaattagattagaacagagtttactgtggagaccataatcaagagtcccttttagattctatataacaaccataatattctcctccatgatccaaaaaaactatcttaatgactcttcttgattgttttccaagcacatttcaaaagattttgagtttatcaagatcgttagatttttctttaatcaagtaggtaaagccatatcgagaaaaagcattcacggaagttataaaatacttgtttctccacaacatagtggaataaggtccactgatgtctgtgtggacaatttataataaagattgactacacttagcaacttttttcttattttagtcaattttccacgagtgcaatcaacacaagtatcctaactagaatcctcaagaggaggaagaatgtagctcgaagtaatcgatcaactctttctttgaaaatatgagctaatccattgtgttataacaagaaggatgtttccttaatataagaggggaagctaagggagcaaatggtaatttgtaaagaccatcaaaataaaaggttccaacaattttagaagtcaagtataatgtcaacattattattggcaagagaaatgaatatcattatttaactaaaagtgggagtgaaactaaattcttcttaaaaacagaaacataaaaaatattgttaaaaataatcttaacattaaattataattcaagaataaatgtgccaccttagataacgtcaacttcaatataagtgtctactttaagttttgactccatctcacttggcttcttgagatcccttagcccctagttatgcttgcttctttcatattttccctatccttttattgggcttgatttgagaaacatagtgagtaaatttattcttctcctttttttagcttgcttttctcaactacacactgagaaattaggtcagcgacactgcatcttttattataattgttgtaagttgtattgataagactaaaagagacagaaagtgcatgaagagcacgatgaataatctaagagtcaggaagaggaatattatgatctttcaacgtggcctgaacatttaaattttttcagaataaaatctcttcccacgaaatacttttctactgttgacaccacaatagccacactcctatatgccattcttcatgagaagtccattgatatgggcaatgacatccaacactctattatggatcatgttcgcaatatcagaaagggattggctcatccaaatctaattacagcgttgtgtgccaaggctggggtaaaatactctaccttagaataaagtctacaaccttagcatatttttgacaggaatgttgtgtcttggtttattgatcctaaaacaaagaagacattgacatcctcatctagggaagagccacaatctgcagaggagcccagtcaaatgactgtgccagagcaccttgaaataatagagaataagttggcttctattactgaagacatgaggcaacaccgccaagagatgaggaagtgggtgatgtgctaggatgcttggctcgaatgaatgctatgagctttggggtcgaaatgtcttcttttccccaaccaccacaatggatgcagcaatacaacccgagggactgatgaggaggcaagagctgaaatgggagatgaccatatatagagatgccatggagttattaaaagtgttgttcagggagtttttctttacttgtttgtgttttttttcttcttatttttgttgttgcaataagttctattggggacagtattgtgtttaagtgtgggggagtgagcctcccggtttaatttatgtctttattttgtttattcggttttatgtagtagtttttatgacgactatttatgtgttgtgttgaaaaatagttttagttgacaataatgagtcgatgatgagacttttaattgatctaaagataatgctaggaaggtgaaatattcgtcatgaattgtgtgcttaactgtgtgaaacgattgctcaagcttaatttttagatttttcacgataattgaatcatcataatagttaacattttaaaaagataaatgcatgtgtaattgttaatttctcatctcaaccactctagaacttgtttgataattagttgaggtataattgataaattacacatagttttgagatatgatataggcaattttttttaaccgtttgagattttcaagcctaccctaatttgtaaatccccttgttacccaattttagccaaaatgtaaaatcttgttttctttttgatcctatacaataacctttgagccaaaaatattcttatctatcttttttcacaccatagtagatgaatgatttatacatatgtaaaagtcgggaattttatttgaaaaaaaaatatatggttatgtatgagttaagaaaaaaattaataaaaaattccccctcgaatgaatgtttataagttgcaagtatttcatatatgttgaaaaaataaaaaataataaaaaaaagtcactaagaaatataatacttgcagcaatataagtgtggggagaattaataagtttatgctaaaaaagagatacaagattgaattattgaggagattaattggaaaatataaataggaaaatattgtatatatatgctatggtgtgatttgagcctaaattaaccttcttatttaccttttaccctagcctcacattataagcctataaagtccta

SEQ ID NO: 18656 - DNA, 3851 bp, Cannabis sativa
taaaccaagaattctgttatatatgcacactttatatagaataaatattcaaatgacacactaatgtagcaatagctaaaacaaatcttcgaagatcaaaatcacaaatgccttcttaaatattaaaaaaaaatacattacctaattacgaaaataaaaatatgtattgcacttaatattccgtaattaaatataattaaatagaaaactaattatacataatatcaacttaatatatatatatatttatagtataataaaaattgggacctaaattcatatcatagctgtcataaattaggttaaatgtgatgtgataaattatattattaaatgtgatgtaataatttaccatattaaatgtgatataataatttatattgttaattgagataattgttaaaaattattattagtgcttagcacactcctcgatgtcatattgttattggtgtaattaagtatcaaatctcatataacttaagaatataacttttaaaaaaatatcgctacctaaacgtagaatgccacttataaaaggtgttagataccattagtctccaatactcattatttaatataactttgaccaatctccaaataataataataataataataataataatgaagtttttctagtcacacaattttaaattttgtaattgcattgtcaatataaaaacattatttttttttaaaggtaaaaacactattatttatgtagatataattttgtttttttagaaaaaaaagttgtgctttctgccactagtatatgtcaataaatgtgtgtctacctacatacatatacataaatggtttgtgtataaagaaaaaggtgccgaaatggcttccttaaagggaatcatatcgaagtaaacaggttaggctaaccatgaaaaaattcctaaaaaaactataatagatactctaatgatatggtaacatgaccaaagtttaaaaatgattttatttatttcttgttcttttaaaattctgaaaaaagaccttatattatgtagatgaagaatccaacaacaaaatagccaaaagttctgatcatgattctgatctcatctaataattttgaaaacgaggctcagccatagtatttgagctatatgttctcaaagactaaaggagacacccacaaagtgacaagtgccaaacgtttgatttctttaaagaaaaattaaaaaataagaataaaaattgaactgtaagagtggcatgcagtggttgagctgggtaggttacaagatgcaaagaaacatatggtacctgctcatttttgggcttttgaggtgggatttttgtttttaggctattgtacttatataagtagtggtattagtttattaatttagctaattaatgatgggattacattaattaatacctgcattatgcacaataaaacataagggctgtttaaataattacctttatttctctattaatttggagttttctgcaactacttcaactaatattccttgtcagattatcttctttggcagctgagctacataacaaatttactaatttacccgtcactcattttactatataaatatgttattaccaatggtaaatttacgctttaaagtggacccaacaacaaaaatactccctaatttttcataattatcaaattgttccaatcaaccacttgagtctagctgaagtggccataagaaggtgcgtgtgtattggaggtcttgagttcgagcctaaaattatgcattgtaatatataaacaattaattaaaaaaaaaattgtaccaatcttttcctaactacctaaaataaccttgtcataacattaattgccttaacatctctctctaactttgctctttttggtctctcttccttctctctatcacctcaagtttcctccataaataatgcaccaataccacacttaaaatttaacacatttcattgttaccactcatttccaccctatcttccaagatcttggaggatatagtacaagtttataatggtttttggtgcttggtgaacctttgatggaaaatgagattttttctaatatttattgattggtgtttgtttttacatgtttaatagcattgcatttgcgaatagttttctatatttatatatcttaatttcctaaattttgttcacttgacatgacatgtccacgtaaacaaagactgaagacacgtggaatacaactttgtcaatagcaggacaaaatcttcttacacggcatggaaaaatcatcaagcaataagcgagagaagttaagcaagccgttaagaagttgcacaaccatgtttggctgaccaaagagagtacataggctggctagggggagcttgtgtggccggccagggtttgagcacaaactggctgcccaaaagtgactgtcagaccaagaaagggtgcgttcaactaaggtagcccagtttttgcaaggaaaggtgtacacaagctcaccctcacctactaagggtggccaacacatgcaaaggttggctaacacttgccaaagttggcaggaacatgacctgccaaatcctagtaggaacatggtaagccagaccctggtaggaacatgacctgccagaccctagcaggatcatggccggctagaccctagcaaaaacatggccagccagaccccagcttgtacctggcaggccctcggtgcgctgtcttcagtcgagacaacaagccaagctacgatttgggcttcaacaacccacgaaaataggggaaaatttattcccctattcttgagagataattaacctatttactatttattttttatcatgtaaagaataccttataattcctatttcttttagagatattagctttttatcttgatgtaagctctcctatataaagagcatgagcctaaccctaatttatctaagttctaattctctaatcttcctaaagctctcaagctctgattctggaacccgaactctctcttcccttcactcttatgcgctcaaggcttctctctcactttaaattttcctactttattatcatattgtaatcttaagagagccactttagattccgtaacccttgtgatctaagtggtgttatctctagtattaatacaaccaaaaggggagtaggtcattatccgttaagttagcgggctaaacctctttaaaaatattctgtctcatttacttttttgttctgattatgtacgcgaggtaagcatcagtaataaatacgactttcctgtcagttgggcaaatttaaggtcaacatagatagactcaacttaaaggtccgcactgagttacaagatagaaagaaaaggtgcatacaagcgtggctagtacaataagaacttagagttggctcttctaccaaaatacaggaatggagaacatctcggtaactgctctcactagccaacttgtatagtggttccactaacgtttcactgtgtagaaattcaaaaaagagctactaaccgtcactcttcaaagatggcctcccatcactctttagtgatgacctttgcacagtgagccctataaaggtagcaaattataaaagagctagtacccatcactttttgacatgacctcccattgttcttcagcgatggcctcttcctggcatctcaggcaagggtagccaaaacgtgatttcaaaagtggacattaagttgtaagcttttattacacataagaccaattgtgtccaaaccacttgctaacaaagataacttttaagttattctttttcagtggaataaaatgtctccttccactcagatctctagcccttgtatcctttctgtcggagagtattatcaagatctgagcctgaat

SEQ ID NO: 18657 - DNA, 4620 bp, Cannabis sativa
  modified_base (27)..(31): a, c, t, g, unknown or other
gttaaaccaagaaatgccgttagatannnnnttttaatatataaagatattctaagatgagccacaagtcctcctaattaagcatggtaattaatctacaagcatgaatcttaatcatatttaattgttcatattatatgagtggtttaatactttttcttcctaatcattttctatatgaaaacaactcattaattataatgagaatattgttactttaagatattttatgatacaattttaactaagcttttaccacataattaaatagaagatattaaaaactagtcctatgtattttggattatttgaattattattattcaaaatattttatttatttgaattgttaattaagtattttaagttaattaagctttaattatttgattagtaactaatttactttttttgataaataaagttgagagttttttatttttatatttcaatcaattttttttttttttacacttacagaaatctacatagcaattcacatagcaactaacgaaataacttaaatcgcaactcaaatttatatagcaatccacctaaaaattactggaacaaccactagagcaaccaaatcattaaaatgaaaaaaataataataatacataaaatgattctccaataaaatttacttttttcttttcgtacaaacatattacacattgttaaacttgaattttaataatgatcatttttaatcatattaaacttaatttaaagaaaaaaaacttgagacgaggcaaatagaactctaatgtttttactaaataaaaaattggtttgtaaatttataattttgaggtgggacgtgcatgtctccccactaattattaattaatactcttccatgtagaattaatgagcataattaatataataattatagatattgtcgtgtgatatgattgatatatatgattagctaattatatatttattcatgatatataattattaaatatgttttggccaaagtgctgtatgattaattttgtcgtagagtaagtataaattttgcaaataaaataaaggtattcatgtagtgggtcatctatataacaaacaaacaaacaactttcaccttctaaatgggcatattcaggttgtttttcttttgattaacaaaaacaacaaattggtccattgcatgttttgataatatttggacttggggattgttgttttgcatgattaattggagcatgtaataatgctttaatcattataaaataaaaaaaaaaaaaaaaaagtacttagagatatggttataactcatagtaagtatagaataagattctcataaaaataaaagtatagaataagaaaatcaaagacaactaaaaaaagttaaaatgacaaatatgaaataaataaataagaatgtaaagatttatgtggaattttcatttatatcattttttttatatttatttataattttatggcttaaaatttttatttacaaaaatacacttataaagttttaaaattataaaaatacacttttttcagcatacacttttttcagcaaaatttttcagcaaaaagtaaaaaaaaaaaaaaaactaaaaaacaacgaaaaatcaacctcacgacaaatataaataaagtataaataaactaaaacaaactcatgacaactatagacaaactataaaacaaccaaaaaaataatttattatttttactgaagagatatttttgtaaataaaaaaatcaaagtgtaaaaataaaaaaaaaaatctgtgtcgaattatttttgtaatttttttaaaaaatttgggtcaattatataaatttatcaagaattatactggttcggatcaattgcaatattatcctactcgagttagagcacccccactagaatctttccttgtgcaaagagaatataaaacaggttacatatactaccatgacaatttgttcacaataactttgatcccaagcatctacaataatggtggaatcctcgctgcccagataatgttaaaacaatcaaaatgcatatcgactcgcaatcaatagagtttacactagtatgttagaattattattgtgtaataatataatcataagcataactccataactacaattattaactatgtgcctaatattttttaataatcataatgaaattatttacaataactaattgtattagaggcatatgaaagcatctttgtgactataattggctcattaaattatagtctaccattaattaaatcatatatataggtccaattagcccataacctgtaatgacaacttaatctttattttgtgaattagtagataattagagtttattttcaaaagtaaacttttaattattattttatgattatggagatatatttgaattctaggtgtattaatcatgatatatgtaaaattttatgtttttcatatttttatgttcgatagcagtggaatgcgatgtttggcctataaagtcacttagacaaagtatagtatcttatttttagcgggaccatatagttaaacatttagaatcagaagtattcggagttatggctttgtaccatattatccctaagttttaagatttcttcatgatgaagaaagggggtaaattgataattttactttagtttgtctttagtgggctaatggattttgtaataaatcctatggttaactaattgattctaagttgaaataataaaccattatctcattatgttattaagtaagaaatcaaatccaaaaaaacaaaattgtcattctctctctcttttggtgtttggccaagataaaccctaagaaccaagggctttttacatcaatttcaaaccaatgatctctagccaggttttctagaaaccattcaaggtaagattattttttaggttttctttgaagttcataattaaagaattggattttcatgcttgacttttgagtatagttgttgtatgcgttgaacttgcttagaattgttttctgaagctatatttgagttaattaggttgttttgtgcctgttttattggatgtggttgtgtttgagctaagtttgaccttttgagcttaaacttaggtcattaatggtggattttgatattgttgagggattatgcatttttcagttggattatgtttattatggtttatttaagtgttttggactgtgtggaaaagattggaatcattttggttaagttttgagattttgggtcatttttgctgtaaaaatggtaggtcgtttttccaggccgaaaaccaaaaaaaaggacttgtcgtttttacagaatggcctgccattttttggggtacttttttcgaaatctcattttttaacgttttctcagtatttaggttttagtcacgttatttatcgatagggaaacttttaattttaagtctaagtctccaaaaagtgatttagtgtgtcacttatcagttttgcgtatgttgtgacctaagggcttgtaaactgtcgagcagcagtttcactcaagttgaacagcagtgagtacgagcggataaagattgtacatatcgagacagttaaacttggagtattcgattttcagggtagcaggctttattttgttagtcgctgagcgacaacttttgtaactaatattttgtacgtaatcttagaaacgaggtcctgaattatgtaaagtgtttaattaatcaagtttaaaagtttaattaagaaaattcttaaattatccacgttttttcataaatcatttgattagcaaaacagtgcacaacattaaaaaatcacgataacacgcctgtagtagggtgttacattaccccttagggttcgaatgtgatatagatttgataataagaatgtttaattaatagtaatgagatagagataaggggattccgccacattgacttctcttcaaaattcaccattgaacctttttttttttcattcatcacattggaagattctaagtgtcaaatggctcacatggacaacatgggttttcgaggtatattttagtgctcattaatgccctaaataaaatgttagatctcgttgatatttatgagtattgttgatgattattaattaatgatgtggtgtttaatgctcatatgttgttatagttttcaataattggtatcaagatttagtatatttggatttagagcttaattttttaatgaaagtcattttttactcaaacgaataatctgattttttaaaataattttggattaatgtgttcatgataaataaatattaaattattcttttagatgtgtttatatttattttggatgatccttttttttaatatatattttttattagagaatactaagtttagaggtgtccattaatggagaaaacttattttcgggtttatgtttttgggtaatttttttgtaaaaatattttttttgtaaaaatgttttgtcattagtatgggtttaacttgtttattatttattaacttttaataatggctctcaaaacgaaaaagaaaattaaaaaatgaaacataaaatatgttatgctggcatggaaaatgcatcaagactatattgatgttggaaattattttaccaggatcttatatctactcacaagtatgtttat

SEQ ID NO: 18658 - DNA, 6868 bp, Cannabis sativa
  modified_base (6791)..(6822): a, c, t, g, unknown or other
taggttatcttcaatagctataacatatatgaatatgaaaaaaaattagactaaaaaattcttctggatgccgaaataagtcaagggtgcatgagtacactctttttaagggggtgcattgtagagtcatccttatctattaatgattactaaataaagttaactataaatataaatttttaaaatagtaaaccattaaattttgatctaatgacaaataattaaagagaaatttgaatttctatgcttaatttagttacataattaaaaaaaaaaagaaaaaatctatatttacactatataaaaaatatattttgtctaaaaaatacttaacccaactttatctatttgtttgccaaaaatatatttttttaattttttttttcaaccgatggaacaacactagcccaagtaaaaatgagatatttttctaattagacagaaaaattaagtataaaaacttaaatttttctaatctcattcatgagtaatacccattaactgtacacaagatatatacatatatatataaaaacaagtttatcatattttttaatattttgtttaaaattatacataaaaataaattgaaaactatttgatataattttattgtcaaaataattttcatatatatagttcttttttttttaataaaaaatcattctaaacatgaactttactagtttataaataaataataataataaaaaaaacaaatcaagttaatatgttatacttgatatttttaattaagggctaaactattattggtggggacaagaattagatgggggtttgttatttttccctcccaacatgggtctctttttctaacaaccccataagatgttaaccaagctatgcttgctaaggaagcttaacctattattttctttcctgattctcttattgggaggttgttgaaagctaagtaattaaaaataactcttttatggatgctcgcaaaggttattgtgcctcgtttacttggcagagcttttatagggaaggaaattgcctaaacaggggctttgttggaagataagtaatggtaaatacatcttgactgttattttcgtagtagagtctcatatttttataataataatagttgttgaaatattggcaaaatgcattattttcgtgatgaggttactgttaatgctatccttagtgttcctattggtgacttttctagtgatgatttctttttttggggacaccatcataatgaaaattttactattaagtctccataatatttagctaagtcttcctctgctcttcctacttcttctaatccttctcaaatcaataaatgggagaaagttttttggaaccttaaaattcttcttaaaattaaacactatgtctcgaaagctttccatcacattttactttgttccctgaatctttttaattaaaacttcttcaatgtcccttttgctctgtgttctaatagagcaaaatttgtaacacataccctccaaagctaaatgtatttcaagctcaatgtggatgcagctctggagaaaaaaggaaaaaaaaaatcgggtatagtggctgtggtgaaagattttagaggggtggttgttgctggtttatcttcctcttttcacacaaaacttttccatttatatgctgaaactgaggctatgctatgtgtgttacattaaggtgttgtaataaacttatcacgttgtttaattctaatgaagttgcaatatgttaaagaaaaaaaaaaaaaaaccattagagaaaatataatatttaaagcctgtgtaagataattgatatcgcccatttaagctttaaatatagtttgaaatttagtcataaattggatcaaaaaccagtatgttacacgggaaaaagaatttccttcggaaatattgtacccttggcttactttttcttaactctttctcttggttttcaaaactctacacatatcatacatcaaagaagctgctataatgcagtgaaaactaataccaatgcttgataaggttataaaagggcattgatgacactagaaaatctactgtggtattgtacaaaagttgcttagtttggtaattctgtgtgctttagaaatttataatcagtaccagcagtctgctacttcttgttcaggtggcatatgttgctgctgctgttgttttggaggaccagaagtttttggaattcctccaaaagcatccttccctggttttgctatatccacataaatcagccttccaccaaaatactgaaaaaaaaaaagcagaaaatgagttttccaaatttcattttgataattttttttacattatgatcaagagggtggtaaaacgaacacctgatgatccatgctttctatggcaagcatagcagcgtcttgactcgtaaactggatgaaggcaaacccttttggccttcttgtcatcttgtccttccctagttttactgccagtcatcagcaaaggtagaatttagtgccgataagtataaatagcttgtgtagcccgtagtttctagaatggtttaggaaaaaaaaatacttacattcggctatctgtccgaaatttgaaaaattctcgagcaaaaccctttcactggcagaatatggcagatctgcaccacaaatttaaagaccacaacatcagaatttcgggaaaattcagtggggttttcgacttaatgtctcttattggtcattggaatctatacattcacagtcctagcttattggattgcttccctgcgcatgcatcaccaagagctctatataagaggacaccgttgatgagtaataaataattcgtgcatgattgatatcaatgaatgggacagaaaaacgagcgaaataaccagaaccatgtaaataatatagttgttgatggtatcttcgtacaaacaagagctccatatgagaggaaacttgagtatataattgaatacaatgtttattgtacgtgtaacagaaatgggggaacacggagaaataactggtgcattcaagacaagacagaaatctttatgccaattgttatcctaataaatatgtcattcaccattctgatacttcaaccttcatataagggtctgggtcttttgaaaggaattggataatgacataaacttgtactgagaatcaatcagaaggcctgtgacagtgctaccccatggatgtaggtctgtacttgggacaaaccagtaaaaccgctgtgttcaattttttttctgttgtggtgtgtgagatcgtgtgagagtaacagaattaatatatttatttacaaagttcaaaatgcagtaccagatatgaaacaaacaaaattccaattctaattttcaagccataaagttcatcttaagccaagaaaaaaaaaagtcataacatctacccggaattattaaactgacagcaaacataggcaagtaacattttcctttggcatcccaacgactaaggttctgtaaatttccagcatttatgggaataggttcttgatcggaaaagtgttaagatttcaagttatctagcctttcaaatgaagagctctgctatgaaaaagagattttttgcctacaacatgttacaggagagctaatataaaacttaaggaggggaaaacatctagggaaattcagaattcaccctaacagattcaagtttctgacacccctgttaaggagtaggagtattcatatgtgcaaacctgaaatcatataagaagttattagaatattgctattaggcacctgcggtgcctagtttcacataaaggtgacaccttacgattagttaaattatataggacttgtgcacaataacgatattacaatcccaaatcagattccttgcccagacaccctcaatccctaacttgtagtcaatatgtggtttaagggttataaatttacaggttgaatttcagccgagaggaaatttcttctttgttcatcaatttttgggtcaaactgtatatctagatattttgcttgaaatactcatttaactccttatggattaaaacagaaagattcttccattagcatatggtaatttaggcatatgccaatttggttctcaaactttatcaaagaacacaaaaaacctttttgcatttccaagagaaacatttctttaaaactaaagttgttctcagctttaaacgcttcttttaatttaatttcacttcaattcataccaacattttcagtaaatgattgatatcaattttgcgtctaacaataaaatatggggtttctctccactaaggcttcacctaaagttcttcttctctattaatactgtatttatctggtttaatcatagcaagagataagaaatttcatacattatagtttttaattctatggtaaatggtgaaacctccggccaatttacaattccagccatatccaattacagacacaaaagtatacaagcaatgtacaatttgtacttcctaacatacttcttaccataaagttagtttgaagtgtgtatgataatgaaaatgacgcagataggaaaaccaatgaacttcggtaaatgagaggtcacaaacatcaaattagcaaacactgaagagacccaattaagatatatatacagaatgaaaaccgcgtttagatgaaagagaaatagtaggttacttttgactatgattctgctggcgagaggataatcgaagaaagatgctctgagctttaaagacaaagactggctttccggacgatttgtgatggagataggaaagagtcgaacggagttggcgtgggaagggaaagagacagttggtgctaacatggttggttcctaagatgggccgagccaccgtctctccaatttccgactctgagccactcaagtaagtaagccactatcgtgttcagcaaattagcctatcgaataatttaagggaatttttcacaaatatgggtaaaacataaaaaaaaaattacaaaaataacttaacaaatctcaattataataatgtcatgtcacgtcattaaaaaataccttaattctaaaataataagcctaaaatgaaactaatcacgaaattctttttttttttttttaatcaagaaagagcaatcttcattaatcacaaacaaattacatcaaaccagccaaaccagtccaaaaaaactgctttacaaatacaatctctctatgtatctcctttcatagtcttttaaactacctttctttgctatttgaagtctaaaaaaaactatatttttgatgtcatttcttatctttacagcagcattagagtaattgttggagatgcaattgttcctattgctccataaactataaatcatggctgcgaggatcgagacatggactcgatgcttcttatcttctttgttcaaacagagccattgctgccatctgaaaaaagaagtcggccaacagctggtgttcaaccagttgcaaatttgagacatcacctgttgagataaaatgcattcaaagaaacaatgtgcattgctctccactactacatcagaaaccgggcagtaagttgtgtctagagtaatctgaaattgagcaaacttatctctcattaggagttgagagttgattgcttgccaaaagatgaatctatgcttcggcatattaagagagctccaaatacacttgctgaactcgaactgatcttgggcgatactgctgttatacatcagctttgtcttcaaatgtttcgcaccagcccctgctttcatgatgtccgcctttgtgaacttgttacaaagatgacaaagtttcctccaataccaactagtatcattctttaggtcataggtccaaaatgaattgttcttgagataaatattattgacccatttcacccaaagaatgtctcttttggttgaaatagcccaaatatatttaccgagtatggcttgattccattttaccccatctttgaaacctaatccaccataagcctttggaaggcaaactatctcccaagatgccacatgaagcttgcttctattcccatgccatccccataagaatcctctacataatttttcaatctccttggtgatactatgaagaagaataaagatactcatccaatagttttgaaggccaagaagcactaaatgaatgagttgagcccttcctacaaaggacagatgtcttgttgcccaagtttagagcctttgtttgatcttcttgaggatcactccacagtcttcagcttttcattttgtaggtcttagaggaactcctagatatttgagaggaaactctccttcaagaagagccatttctgaaagcatagcctgttttccttcttttttcactcctccaaagtagagctgagacttacctatcttaatagtaagccctgaagttgcactgaactcatctagaacctctttagcccggatagaacaaatgtctcctttacagaataacatcaaatcatccgcaaaacaaagactcattggcctgagactcttgcataagggatggtaccagatttttgactgacttgctgctaagtgaaacctcctggtcagatactccattatcattacaaataggagaggggatagcgggtcaccttgtctcaatcccttcttgcctttaaagcttccttgagctcttccattcaataaaaccgagtaagaggtggctctcaaacaagtcatgatccaagagatgaacctggttggcagtttgaaagcattcagaagatcttcgaagaaatcccaattgactgtatcatacaccttgcttatatctatttgaattattttaccaggatctnnnnnnnnnnnnnnnnnnnnnnnnnnnnnnnnctaaatatgaacttctaaaaccattataagtaaacacatataaagt

SEQ ID NO: 18659 - DNA, 8214 bp, Cannabis sativa
tttttcataaaagagaatttgggtttctctgcttttaaaaatcttttcaatggagtcaattttgaagtcaagaaaagtgggaaagtttttacctttaattttctttcaattttgtattagatttttctttatgaaaattagccgatgttttaatttgttcccaatattacatttgatgtaatttgggtttgtgataaaatttacttctttttctttattttccatttttgttgggaacaatttcgatggtttatgactttatgctagactaaaatgcataacaaggtaaaacttccatagtaaacaacgaaaatggagtttagagggttacgtccaatttttcatttcatgattatagtatttattttgatacaatctgtaaattttcaaaatagtttaacgtggtaagtaattgaacttatttttggtactggaaactattcaattggtggttctaaaaatgttcaatttgaagtaaaaaactcttttgaatgctgaaataagtagaaagtagcaaaacaccctttcaaaggagtttactacagatttttccatgagttatataattatatagcatgtgaggagttatgaatgtgccatagtttattatcttaagcataattccaaggcaatagtaatgagtttacttcttctatcactactcttatttccttttctcttttatcattttctttcttcttgacaggtgataatgaaagcagaagtgttcttgatgcatttttcttgggaaaagctttagcagaagccttaaacgagcgcattgaatcaactgttggggaggttttgagtactatcggacgattgcaatctgagcaacaaaagcaagtacaggagttccaggtaaagcatccattggaatatgcaattttttgatagcttcattagttaatttttcttgtagaagaattgttttgatttcttttttgtagtttacattctttggcctaagttagccttgttaactatgataatcgaaaaaaaagactctcttggtagctcaaatggtgaggcatgtggtttgcttcgatcccacaaggtctgagatttgagtccctccccggtacctacataacaatttctctagtttcgtgattcccaaattttgtagggttaggtggggatcttttttaaaaaagtaaacgaaaaagaagaaaactttggcaattacaactactgcaccacacaaatatcaatcattaagatgatatgaagctttatctgcgaggcctattgctattcattcatagtatgccgctatcctaatcattaaaatgtcaagtatagtgtttgttgaacttcttcacttggtaaatattgtggacattgtcttacatgaaataaatggtagagtattgagtcatatataagaacatggactactccacttatcactaattaattttaagatggaaccccatgattttcaacatagtatccgcatctatacagatagtgactgtcatcttgagggagatttttttttattatacttttctttattgtcctaaaacagttaatgtggttgctcatgttttagctaagcacgctattgcgatattatcgtcgctacaaactcaccaaaatcaccatgagttggtctggtactgataatttttcaaacaatatttctggttcaagttctttcttttgtgattggtatgaaatgattgtattcagaaacaatgatggttaagattgctggttatggaagattgtttacagatgttgaagggttccctccacttagccatatagacaaaagtagtttagcagattttgcttgaactggttacatgaaatttctctgatgagtaatggaaacttcaactttgtttctccatgactaatttaagttcaaaacttttgtaaaactcgactcggtgagttcttttcagctgacaccaacaccaacatatatttttttttatctttatgtaggaagatgtgttggaaagagccagaagagccaaagagagagcagcaagggaagccatggaagctcaaggactgatttccaagtctgctacggtagagaccacaacaatcgataatgggattacttcagttacttcttcctcaactaacaatgatgtaagtccagtagatcaaccatattctactccctcagttgatgatacagaacgagatattaccaatcaaaatccagtttcaaggttatcaaatgaagactgattcaatctcttttatgtatctgatatgatactgtaccatgtcaaatctcatccatatagttatattgataactccataaaggcatagagtttttttcttttctgttaactcaatattcttcttctcaatactatttatttatttatttagtttgcatatcctctaaaatcagatagaaaaacaaaacaaaatttatggaaactagtagttatgtaataatgtatattagttgtcttagtagcattgattttagttttatctagtgtgtagtttcttaagaataatttttagtttggtattagagcatctccattgattgatgcttggaagagtgcttaatgaaatgaaggctatctgtggcaacgatgctataaaaaattaaaaaataaaatcaacatttatttcattgctattgttgatttttcaccataattatttatttgtcacactattttatatacattgttctacaattcatctattcttaaataatattttttctatcgaaattctcaaattctctacatataaactcccaaaatttgaatttttactattctctattcaaccaaaattttcttaattctctctaacaattccaaaaattaaaattttcaatattctctattctaccaaaatatttctaattcttaaaattattctgctcattcttttactaaaattttagttcttttgagacaccccgatatgaaaaaagtatgaaaaaacccaaaatgacttcaacaactcagtaatgggggaaaaaccagttaaacaacaattggttgagattagaagtgaagactgaaagttggaacagtcaaagattgcttggttaaacttaagagaatatgccagagaatgaataagtgggctaatttaattatatcagcatacaaaattttcttacatttgtaaatcgagcttcagatatcaatttgtttcccccagaaataaaaacaaaaaatttaaggtaaaaggaaaactgtggctaacaaaatagccgaaaaaaaggtaagaaaaaaatgatttattcctcatcatcactgacatccatagaagaccctttcttataatccaccgtgaagtcataatcgtcatccatagcatctccttgggttgatttggcggcctttttctttctcttcttttctgctttcttcaacttgggattaaaaataccatcggcattgtataacatctcgttttgcttgcttttagctgtctttaccttggtctccttttccttgccagtttcattatcttcttcagtttgcatcacctggttatcttgatcatcatcagccaaggcagaacttccttcaccttgagtcgactttcgttgttgtccatcatcctgaaacattaatcgagcaagatatgtaatcaagtcaaagtctactactggcattaagtacaatcaattaaaaagttactagggagatcacaaacctcaaccatgtcttcatcaaatttaagtggattgcttggggggacttcaacaggctccataaagtcatcaacagacttaaggcttccaatgaatgaagattctccattgtaaacttcttcaacactaaacactttaccaagttctgtaacaattttagcttcagtaggttcgtcttggctcctaaccgggggcatagtgtaatatggaatcttgcctgaaagaaaaaaagagaaaaggattcatacacctagctcagctgcgtgtttataattattagcatattaattatatcaaaagaatgcagaaagatgcataccctcattccagtcatgcagaacaattcttgcggcagattcaatatctacaataccacccttttttagtttacccctgacagtggccaccttctgtagaaagtcatctactgtctcgaagcttggaattttgtatagagttaccagcagtttggctggacaaagcttgagaatttccttcactgttttcatccacaaacaaggaaagtgagtatgttggttaaagtttggctacagaagttaaaataatgataagccgaacaaatttaaagactctttcctgttgaaaaaaaaaaaaagaaaacagaaatttgaagtcgaaaaaagaaaagttcagtacctggagtaaccgggtcctctaacttctcaattcttttgcagtttcgaagtgttatagaaggatcgttttctttagatttaagcattacaacaccaggacaatccaacaatttaacattcttgtctagctgaacctcttgcattgatcttgtcaatccaggagtggcaccaacattgacaacatggcatctcttcaaactattaatcaaactactcttaccaacatttggcaagccaattacacccactgtaatagattttttgatctgccaaggatatattgccaagcagattaatactggaaagtaaaaggatttgatttacttgtaatttgtaaatgtatgcaaatcatgataacttacatcgtgacttctcgaataattttttaacaatttaaggagagtatcagccccaagacaatcgcttgtctgaagaagactactagtagttttagctgccttggaagatttccatcccaaatttgatctctgctcttgagtactgcacttgaaagcaacagctggcaactcttctctgagataggtgagccatttctcaacagcttcgcgaggaacaagatctgaaaatgaagcacaatttcgatcaataaaagtctacaaactctacacctataattttacattaagcaattggcagagccaggaaccaacttattacaaacatagattacagaaacacaatcaacttaactcacacaaatagcagcatctaaaaacatgtctttcttttctgtgtttgtaatgttgcatagtcataagtacaatgtaaatttttgtatttgggaacgaaaaatgaatccaataattaccaattttattcagcagcaatacaagatgcttagtaggacccgatttcatcaccatcttttccatatcaacacaacgagtacccaatggatctctagcatcaagaacctccaaaatgacatctgaagcttctacaactttcaccaactccttgtaaaaagccctatctgaactatctgttaaacaaaaaaggcatcaactttaaatgagaagaagaagaagaagaaaaggcaattcataatcaaaaccaaactcttctaatacataagctcaagtattaaacacaccccggtttttcccaaatactgcttcatcgtcaccagtcttttcctcatcaatggaagacaacttgttatcatcgtcatcttcatcttccaacaatcccaactttctcttccgagcctaaaaataatcataaccagctaattagaaaaaacccagaaagaaaacaattcaattaagttcagttcagttcaaataaaaagcaataccctttctttacgggcgattttcttttgctccatttcctcaatagcccgagctcggcgagcttcgagagccttaagctcctgttccttaaaaggccagtcattgggaatacctgggtccttctcgaccttgctctttcgattcacaccaagcttcttcgcttcctttgccttcttcttatggtgctccttaaccttccttatgaccttgtgcttctgcttcagagaaattctcttactcttactctctaccaaccatggaaactttaatcaatacaaaaatattgaataataaacaaaaattgaggaatcataattaaacactggaactgaaatgtaagagagattgatatagtttttgcttacttttactccttttcaccatttttggaccttggtttgatgaatttgatacaaatgagagaagactaccgtttgcagcagcctctctatagttttagggttttggcaatcgtagaagaaacgactaacttttgcctttctcctgtttagggtttttcaattggatttgggctcgtacggagtttactttgttaaggcccaatttaaaaattaacacaatattcatagttttgtttttcagaattaccatatttttacttatgtttacagaattatgtaataaaaaaatcagtaatcaatttaaaatattctaatcttctgactattaaggttgtcttttttttttttttttttgaaaaggaaaattcattcattgatcaaagggcaaaagccctacaagtccaacaaaaaaatcccactgtgacaactgttggctaaccacactgacttgaaaggagtaaaaagctcatggcacatgcaggagcatttagagggataaattgccccaaaaaagcataaggccaacatcacaaaggataaaaagtaaagatctaacaaagctaaaataaataaaccaagcaaaaataaaaataaaaataaaaaacagcttcattggtcacctcctgaacacaaaggaagaaacacaaaagcccaaaacaagtcaaacaaaagcagaggagcacggccatctttcaataagaaaagtccaatcttaatctccagttgtggttctgaatggtgaaaaaagtgttgggacaatgaattataaaattagaaattatgtgtgtaatttttaaatgatgtttgacgcataactgagttacctaaggagtattattaaatcatggctcacccataaatatttagaaggataaattctcccaaaaaggcataaggccaacaccacaaatgacaaaaagtgctgaaaaatctaacaaagctaaaataaacaaactaagcaaaaacataaaaaacaacttcaatggtcacccccaaacgcaaaggaagtaacacaaaacaagctgaacaaaagtaaaggagcaccaccatctttcgacaagaaaagttcactcttagtcttcttttgtggttttgaatggtgaaggtattgggataatagattataaaagtaaaaattattattaatttttaaataatgtttgacaacataactgaattacctaaggggtaattattaatctaatttttctatatatttttttatatatatatatatatttattgttgaaaattagtataatcaactggtcttaaactcttaattattgttgatattatttattgtggggtctattttagtcgtaaatcaaagttaatgtcgtttatacatattttgctattatattttcgtgtcgtttacgagtgtttggatctattgtagtgtcgtttcatttactttttaaaaatcaaagttaatgtcgtttatgtgtatttgggtatattgtagtgtcgtttcttaaattagaagaatataaaagagattggggtgagagaggctcgaactctcgacctcaggatcactcagtagctatgagacctacgcgctagccaactgcgccaccacccctttgatgatatattccctatatttaataataagatttgtttataggttttctgtttctgaaaggaatttttattattcaataatgaaatcaaatattaattttattattgaaatattaaattgcttttattcaatgacttttacaattttttatttttgtgacataaatatctaagttaaatttttgattataaataatacttctgtttattttttgacggtaataatacttaaattatattttttaaacttctttaggtacctgactgttaagtgtcaagtcaatgaccacgtgacagtccttaattggtccaggctattaaatttttattttttatgtattataaaatttaaatataccaataagaaaatgacacgtgaaaaataaacacttaataatgagttacctacataaatttcagaaatataacttatgtatttatttgcaaccgagagttaaacttaattatttacgccgcaaattattcttttattttatttagtagcttgatgcattcaaacattttttttgaatcatgcaaatttacatctcttccgttaaaaacacaattagaattagaatcagaaaaatagactaatcgaagtaacttaaataaaagatacttaa

SEQ ID NO: 18660 - DNA, 5905 bp, Cannabis sativa
ttaaattttaaattattatctatgcgtcatttttttattggtatatttaaattaagtttacttaatgatctgataccgaaaggagttctagacttataacttatgtattattatcgtaaaaaattaaacttatgtatttatttacaactagaaattaaacttatatatttatgccgcaaattattcaaaattaaattctccatattcttaatatgtgttaatttagtacaaaatagagtataggctactttttttataactgtgagtcaaatttgcactataataaatgctatcgtttttatttgagcatgactattgggcaccgagtattgttatttggcattagtagtgtttaataccttttaaaagtgggattctacgattggttagtgatatttcataagagctgttatattaaagtacatgggacaatataacaacgatgagtgtgcaaggcagtaggcactattgccttttagtatttctcaagacaatatgagatctgatacttaattacaccaatatcgttatgacatcggggagagtgctagataccaaaagtacattttagcatttctctttatctttatccactaattaatgatttttattaattaaaagattttaaacattttatttgttcatttacataatttttttatatagtttcaataaaaatttaataacttaataacttgattttggggattaatatatactttgtgtaatagagcacatgtgcaaaatttggaacgaatataatataatatcgagtcattttttatattaaatttggtataaatttacactagagatgattccaaagtgttcaaaatatgaaatcttttttagttaccaaattattattattattattccccaaaaaaagttattatttattattttttgaaaataccaaattaatatttttagtaagcaataataacaaatttctatttaattattaatgctacacttactattgaagagtgtaaaggagaaccctcaattatctagagtaattatctagtcaagcttaattactttgaattatacttaatttaaattttaaagtggactccctgaagataatagatttttatataaagtaccaaatgtgtaacttcttttactttctgttctaatacacgaatttttagtttagacaccatcttgatctttcagcgacttgctaaggtatggtctaaagactcttttaatctttttttagttattaggtggcatctgtggaatgctcgaaatactgtggtttatgggggtatggcccacggacaggggatctcttgaattagtgtgcaaaatttctaagcgaacttcaacaagctaatgggatagtgcgggaaaaagacaaggggaatcgaggtaggtggacacggccacttgtgggcctggtcgccattaacgttgatgcatgtcatcaaatggaggataaatcagcgacaactagtatcgtgattcagggtaatgatggagttgttcagtatgttgttgccagttctgccaatgactacttctcctttaattgctgaattgtatgctataagagacgggatctctataggactacaacgtcgcctgtcgaggttccaaattgagtctgattgtcttcgtgcagtacaacttattttggacaaaaaggaggggtgtcgagatgttgatggattgttacatgaagttaggctcttaactcaacatccgactattgttgagattaagtttgtatatcgtaaatgtaataagttgctcatttattagccaattatgctttggtgaacaaagttagccctatgtgaattggggtctctcttccttgttctagtcgagctattcagctagacttaccatttcctttgtacttaattttattaatgaatttccttttcaaaaaagtaaataaataaataaatttccatatatcaaaatagtttgacaaaattctaaaggttgaacactatgattccttcttaggatcatgtttagtgtgaatccctccatcaaagcctaaatcatcattcatatcctccatatccgtacaaagattgaggccctcattgctaataaaggtagaacttcagttctcatgctacaaaaatcgcaacaacaaaaagaagaaacctttgcttcagcttcagcatttaatatctaactacagttccagaagaacaggttcagactaacttgatagatgtaaggtctgaagaagcttttccaccataattctttgctgtaccacactgagcgactccgatttcataattgcattagctacaacgataattgttgatggagattcagcattgacctgaaataaaaaaggcacaatatggaaactataaagtaatggaaacagaaatgcttaaaccggatcacaaacaaggtagttctagaatttacccaaacgcgtccatttaatccaaccgctacctcaaaggaaaccttctttccaaaggcctcaagaactggacatggtggggagctgagcagcctggttacaaaaagatagaatcattaaagggagaaaataacgtggcacgtgcaaaaggggaaccacatctcacattcttgaaaggcctgttgagcactcgaatgtgtacccatctttaaggggtccgaattctgctgctttcccaccagctatatcacaacaaacattgggcaagtcaaaaaataatccataacaacataccaatggacatcattgatgtagcatcacgagacctaccatcagtgcatgacaactcgggattcatgccaggatttgccttcacgacccgaacataaatcaaagtacctgcctgccatgtaatgttttagcctaactaaaccattaaaatcatattgaagtaacatttgaacaagccaacatgtgcacctcaaactttggtatgtttctcctggttcctccttcgaatgcaagcaccggcaaaaagcctaatgaaggtcctttaatatccacaagaaaattctgaaagcaaaaagaatgaaaggattggtttttttacaagaatggtaaatgtgataattatcagttcacatagactatgttccataagttttaaaaaaatatctccaaaaccaaaagtccaaagtctatagatctactgcactgttagttcatatgagaatagcatctacttataaagggttatcataataaacaaagatagacacgtgattaacattaatatagaggttcacacatgaagctccttgatttcagtttaaagaaactacataaaacaggagaacacaaactgctggaaataaaagaaaaacgggcaaccttaaaatgttgaatatttcaaacttacatctgctctagagtccaccacaactccaagaaccgaatcccctacactcggtacatactgtacaatgaaagagaagtgaataccaaattagtatctaaacaaacatatatcgacctctgcattatctccattatcaactaaaccaagacaaagaaacattttaataataacaccaagtgtaatcagctgatttctaacattgttacacaatgatgagtcattcttatgaaaaggacaacacaaaactaaaaaaaaatcagcataccaagaagaatcaaagacacttatgttcatgccataataagcacacacatatcaaaaaacacaaactaatgaacacaataaaaattgcagatttagagaattcaaaccagtgatacaaagataccccaatttcattgtttccaaaacaaaaccaaactctctaactaaatagaaagctcattacccttttctgggagctctcaacccagtatttattatgcttagacaacttcaatttcccagctttcgtcacagatatagcatcagactcctgaaatttccaacccaagaaaatatataaaataacaataaaaaaaatatatgtgcgtccgtattgttatgaggtagataaatggagacctgtcgaagaccgctgccaagcttaatggtctggttagccatggctgagagatcaagaaccacatcaccaggaacctaaaaacccataattattcatgtttaagtaatgataccaaaataaaaaatatatattaagaactgcatatacaggtaatgagttaaccggaggaagaataaagaagaggaaaaatacttacaactaatttatcaacgaatgtctccggcgaaccggacagagtatctgccattgttgtagaaatattgccttgacaaatatatcggtggctgaagctggaaactatgcgagaaaacagggcaaaattcatatatcaaaatccatgacaactgaaatgtaaagctttaccaaaataaatattatatctatatttgaaattttagaatcaaaacagaaatccgtcaaattcaaatagcaaaatcattcaaaacaaaacagacgaatatacagaacaactagaaaattaaaaatatacagctgagatggaatggcctagcgtgggcggagaaagagatgccggagtcgattcgagttgaggaggtggtcggcgttgacggcgggagcagcagatagagatgaggttgaagaaatatggcagggtttgggtttgggtttggttaaacaaaacataatttttaaaaatttaattcccctacgtaaaaaaataaataaaatttaatttaattcataaaattattatggtctactcaggccaaaaaaatttagatttttattttttttgttaataaatcaggtaaatctattaataataatcagctaaaatgataacttacaatccaatcgggatatttctattgttgaagacatgactaagattagaattagaaagacgagcgaaataattaaccgtctgattcccaaatcgtttgacaaaaaaattaaaaataaaaatcatattaattttaagaacgaaactaaattactaacaaccctttcagtcgaagagaacttaatattctcaacgactaacataaatttggtgacgagtcatcgaagaataaagaaaaatcaacaacgaaataaaacaaaataaaataatatcacacaaacaaaattaaaacactaaaaattatgtcacagagacaagactaaaatactcaaatcatgtcatgacatagacaaaactaatcatattagcaaaaattgaatcgtaatagcaaaatacaattcctaccaagctacacctacgctcaaaaatgctagcagacttggccggagaaaaaaacaacctccagctatatatttaagaacaaaaaatcttaattttttttaaattagttcacaactctaaatattttgttaggtatgatataacattattagaaactttttaggtagtggcatcaccataaaaaaattgggataattcataccataggtgtatttttgtttttaagattcaaataataaattgcatgcttaccttttttttaatacaatgtcaaacatgttatatgataggaagttgaggttgaaccatcaatcaacacctcttctttaattgcatcttggccaagaaggagatctctgaagtgactttgtggcttggccatcagattgtttagagttgcaggtttggtagcttggtagactccatcaccaatgctactacgatctcagcaatattctattttatttggtatagttagaatagatgtctgtttaagttcacttgtaattctaccaagtctgtgaatctgtcttaaactagagttaaaagtgtcattaacactagattaaattaaagagttttcgagttgttttagtggctttgtttgtatagtttgatttttacttgaataaaattttctttacttcaaaaacaaaaaaaaaaaaacatgttcattaaaatagagcacactttcctttaaaaaaaatgcttggtcccaaaaatcatgtcaaattaaaattt

SEQ ID NO: 18661 - DNA, 9675 bp, Cannabis sativa
  modified_base (669)..(669): a, c, t, g, unknown or other
  modified_base (4443)..(4448): a, c, t, g, unknown or other
  modified_base (4517)..(4518): a, c, t, g, unknown or other
  modified_base (9630)..(9639): a, c, t, g, unknown or other
ataaacatgttattgatatattatactgtcttgctgggcttggctcacatgtgctctactgtgcaggaaagggtaaagctgtttctaatcaaccatgagaaggagagctgaacggcgaatgtacatgttcgggccacactagaccaagtgggttggggtctaccagtgatgtatgttgtactctgttttgccgcttaggtcggctagaggaaacgaacttataataatattttgtaaagtacttttgggatcgtgacacatgtaacttttattttgtaaagtaaaaaagtattacaagtttattttcattccgtttgtaattaaagtttaatttctacgctaattttattagtaatccccactaggggattagggtttcattagtatattgggtagcgtgcctaattagttaagacattacaatttggtattagagcgctaaggtttttaaacttcttgtagaccggctgaacatgtacattcatcgttggagacaagctcgactcatggtgcagtaagtattgagagtaaatactttactgtttatgtgatcatctgtttacaactttccattttaggcagtatgccaacatctagaatatttatgtgttatgtgatgccatgctttaaattctatatgattaagtgtttatttatatggggtaaatngatgagttagggtttaaggcaacaagtgcataagtgtggtattggtgcttaactcgctggggttgttgattacaaaataactgactccgtaggtgtttgtattaaattttactaatttgctgaaaaaaaaaccgcctctaaaggcttgttttgtaatagtggttaaaagatccagtatttctatttttctgatttgcaactgttatacccgaaatttggctggaggacacgtgtcaagataaagggaatgtgaatcggtgccatatctttttatggaataactcattaattacgtaagtattagagtatatctgcaacccactgactgaaaagtcttaagcgaggagtcaatgtacgaactggtacttagagtattaacgagaaaccatatgtcgttaagggataatagcgaggcaccagagaagagtaacacatacctcagcttgcaataagcaggctaagtataaaaatcaaaccagctcagaatatcagaatgcgagatgaccatctctctacgagtaaacttcctatagtttcatccaactaacggaagagagactcacaaccctggtatgtcagcagatttccttatatatgtgatcgacgcaagacacaccttgtcgatctcggaaagaagagtggttccagctcgccattgggatcactataatcaagtttctgtcgagacatctccataataaataattaaagacgtgtttaatacacgatattcctaacccagtaaaagtgggaaaaccacagctgtatgactttcaaaatcatgcactgcgtttacattttgtaatatgaatcagatcccacgatttaagggataataactgtaattacattttggtcacccttgtagttaactgccactatacaattataaatagtggcaggcaatctcaaaaaaggggacgaaaagactcttatacaagaggccctaaaattaaaagactcaaaaatctaaataagattgactcgtggactatgcagaattttaactgtaaaatcacgtaaaaacctggtgttcatattttattttattgttttattatttatgtgttgaatctaaatcgtgagactcaaatttggttaacgaaaatctgcgttaatagcaaccaagttgattttcctccaaaaccaaatgagttcccacagacggtgccaaatgctgtcggaggaatttggacaacaccaaatagaaaataaacagttgatatttaacttgaaaacaacgagtactcaacctaaaaaagtgagtattcgaacgagactacccagacaatagaaaagtaataagaacaatgaacacaaagaagtatagtggtccagtccaatcacggtctacttagtccacgattgcaagggatttctgtcttgtcttattcatgttggatcactcctttatatacaaagcaagtttcattttagttacacagaacttaattggttatagaaccgttttacattaaattaaaataaatgtaatggaataaatgaagaacaatttcaatttgtttcactaaatacaacaacttatgcgactttcatagcgcgagttagttgttcatattctcgcacaagctcacaagcttagggtgcactttatcattgaaaaggaggttaacaaacctcatattaaggtatatgtggactggtcgagttgcatatgtggacaccttatcagcgttgataacataggacatgctagtccttatcgagtcatcgagtacgctaggtcacttggatcaatttgttatgtaaagaaatgatctttactgagtcacaggagaagactacttagccattgcatatatctctgtatatgcacgacttgtataatctctttttggtcctgcttatttcatgttatgcaaagtgttacaatgcaactagactctgtcacggtcacatcatctcgcgagtttgattcaggcgaggcttattctcgaggaatcccttcttgacagctcagcaatcctcaagggatgtgagtctacctgtctttcttatgggagcttggtctcgagtttctaggcaaaaattcgcactataatagtcagttttcaagttgtaatattaaacttgataggtgaggccttttgagtcccaatataatcttaattattttggttgcataaaaataaatatgtggcattgcaacatacgtgaagcatttttttatgtgttttctatatatttactaataaaaaatatattcacaatatatttttgcatatgtgaataattatatttttttaattaaatatatattcacgaactgatattttgttgatattagttagactgtttttttagaaaaaaaaatttattcaggttctcaaatatttgtaacaactttgaaatattttttttcatctttttatcttcaatttaggctattaattaagaagaatcagttcagccgagctctcatgtggaaatagtggtaattgattgtctctcgtatctcaaattttttactaaggtagttatctaccactgctcgtgtggagagatgaaaactccccatagagtggcaaaggaaagattacaggaggatcattcctaaattaaatttttggaacactaatctttcttttggtgttctgttacttatattttattttttgttgttatgcgtatgcgtcgttaaaattttcagagatcatttatttgatcttctattttattggcctgaagctttttccttttaatcttttaatgaaagttattatttttttcaaaaatatataagtaaatgctttattatctatctgtctctatatatcattctatcatgcattctttaactttttttactagaaaatatattttgtttgagttataatttttttccaattaataactaggcttggtgattttattatttatttatttatatttacattttgaaaaaaaaaaaaagagtttttacaaatgccaataataaataggaaaatataaagttgtatacgtttactgaagcagaatgtaattctgtttctgcagaaatcagttttgcagcaacaaaacagaacagacagaatataaaaataattgtagaaaattaaaacacttgacacaagagatttgtacgtggtatcagtgttctttcgaacactcctagtccacggggccacgcccagagaatgaaatcaattaataaaatatcaacaattacaaagacaattgagttaaacaagtttagactccctctaaattattgtcgcaatcctttgtaatgcactttatgaatctaacttctgaaacaccttcaaacaacaaactcccttcgtctttgaagtgtgtgtgcttacttcctcctgaagtaaggcttgaacaactcttctcccgaagacctcactcttgttcaatcaagtgttctaaccaaccctaagacagagtaagaacatatataaaaaacactagaacctagatgaacaactaggttctcacaaaaataactctctcttcacaaataagtaaaatgcaaaaaatgaaatctagaagagttgattcgaatggctgctctctatgttctatttatagaacaaagacaccctagagacagccacaaagtcgaatctacagttgtaccaaactttcctaagaaaaacttgatttgcagcatcagaactagattctgacacagcaaatcagaccagaaaaggaaatttgccaaaaacgattctgatcttgtagtgggtcttaatacctaccataaaacgagtatatgatctgatcttatcaagacacaatcaaacnnnnnnaggaaaataataatagtcaaagtttcctttaaaaaccaactttctataagagaatttcttctcttacannaagtttccatacaagaaaaagccaactaaaaaatcaatctttcctaagataaaaaagagtaataaaaccgaataataaaggtaataaaattggattgaaagcacaaataaatttcaccataaataaaaaatattttggtatctaaattgccaagaaaagactttacaatctccccctttgacactttagataatcaatatatttttttaacaaagaagtacctacaaagaaaagttagcaagaacaaacaaaaactccccctgagaaacacaatcgaaaaccgaaataaccaaaaaacaagctaacttttaatccaaagttaatcacaagtatcaaacgcaactccctctggaaaaagagttgagaagcaagaaattaaaaacatgagaatatgcccaaccaaaaaatatgaaaatgaaagagaaacttatgccccatagatcttgattaatgaggacaactgcttggacatctcttgctgaacctcctccatggcagcaagacgattgttcacctgttgaacctcatgcttgacctcctggacatctgcaggagcagaactcgaactggcaccagcagcaccagctttaggacgcttgggaaaagctccatcaaagtacttcgagggttggaagatggtgccagtgaggggaggctcaagtgtctcatgagagtaggccacatctttatgagaggacagaattttataaattaagttaggaaaaacaagcatatgagtacgctttttacctctccgaaatgaaacaatctggtctaagattaaagaagccagatcaatggatgctcccgaggtgatacgaaagagaaaagatgccaaatcttgagataccatagttttgttggaattgggaagccaatttctaagtgcaaacctcatgagcgatgcatgagcatatgtgtgataagtaatgcgaagcctctgcccaaatttcaattcaactcttgcaatagtgagttcagtgagaattagatggcgatccataaacattatagcattagtcacatcttctagcagttgcaaagccttagaaatatctttttgagaaaaagaaaaccaatgtccttgaacatacactttacgaaagaattcagaattctcatcaagaaaatcatcaaacaagttagcataaaattctttgacaattccatcaatatatccttcaaaacaagtaagagtattttcccaatgatgatatggcataaactgtacaataccatagacacgatgagcatgcaaataataattcctctaactttcaaactttcgggtagcataaagattccaatcacgctgattttcatggtaataaaatctagaattaacagcttgagagggagaaatattaccaggagatgaattcttcataggttacttgcctttggcagtagcagtggctttggctgtagacgaagcacgaggaggtgctggagcagatttggtcaatggaggctcaggttcgagatcaatttcctcactatcagaggagacaccaaaatcttttggaagctcttttttagaaggaatagacacggatttggtctcggaatcattagaggggacctccatgggttcttcttcttcagaacttgaaaaagccgaagggggattcaatttcagcttcttggcaggaagaattggtctgtcatggcttcgtttagtgcaaagttccttctcgacagacacttgctgggcacgggtgcgagaggatgggcctgttggagtggatgcagcaacacccttacctattgcagcatgaggcaatgcagtagcacgaggaggagaacccttcgacgatgaagacgatgaagtgcagaatttcatgggtctcatagatttcctagccacttgtttcagaatctgtttaggcttaggcttcacagtcagagattcacgctgaggaagcgatgaatctcttgggtttgataaagttgcaacagcaggaggcaatttcggaaccacatgagcagtacttgaggaggcaggttcggattccaccatcttgcttagatgccctaggttcttagtcttagccatgaattcttaaaaagaggaagaagaaagaaaatacaaaagaacaagacactactaaaaaattagcttttcccaacggtttataagtgtcatttatactatttcccatcggttcctaaaactgttggctacgtgggtgtcataaaaatacaaaactttaaaagacggtttataactgttgggaaaagttattttaaatgacggtttacaactgttggaaaaaatccttttaaaggactatttataactgttggcaaaagtattatataaattaaaaaaaaatacatttaaactaatttattatatataaattattatctaattacaataatataaataaatttcaaaaaaaataataatatcaataaaaattaatgaaataagaatcataaaacataaattcatatattatgtttacaatattttttaggatatacaaactttcatagttcaaacaacaaattctcaactcacaaatatatccaactcaaacaattacattgaatagtaaataaattatacccaaacaattttattcaaacttatattcactgaatacatgagtctggagtaccacggcaagacctatagtcgagtgaacccagagaaggcgcccatgccctgtacaaaaaaacaaaggggaattcaattcttaattcgtaaggaaacacatacaaaaaggatgagaaacccatactttgatggttagtaattgtctaacaattaatataagtttttaaatgaatgaatttgatgattagggttgaattattatcatgaattatatatagatctgatgatgaagtatagtaatagtaatagtagtgggaaagtggtactttgaatcttcataacaaccagcgaatgcctctattttctgtccaggtttgtttggaatgatttgtaatatagtattatatatatgcatatttttctacacacttgattatatgtatatgtatagatccggttcagactaaataaaaacgaaaaaaagagaagtgaaaaatagacttaccccaaacagtgaggcagtggccatggcgagcgggagaggttggagataatcggcgagagagaaaatccaacaaatggcttcggcgagagagaaaaatagaaaatctttgaagtttgggttttgcgatggttgcgagcaccatggtgtggtccgtttcgaccaccgtcgcccagaggatggccatcgtggcctagctgtccatgtgcgatagtgaatagagagagagagagagagagagaggtgagatcgagtgggaggaaaagggaaagggataagtttgtgggtttcttaagatggagatcttcgtggtgacgtccatcggaacctggggtggccggagcacttccgttcagcgagcagagctgctcacaaaaaaaaaaaaaaaaaccatagagagaggattaagaggcggaaggaagaagatgaagggaaatagggtttggataaaactaatcgggtagaagagaagatggtgagattaaatgataaaaaaaattggtttaaataaatgtgtgtaagaggagcaaaaaggaaactaaccttataaagaaaactaccagcccacaaacacaaagaaaaaccgccccactaatttttttgaaaaaaattattttttaaaaaagtaaaaggaaacaagaataaccaagatactttctaaaaataggcaatttaagaaaatccttcaagatccatgacataaaacaatgaatatgaaatcaaactttaaaaaggtaacttataaaaataaattagtttagaataaatgttggtacttaccaaacaaagcacaaaatttcttaacccagaagtcaagtcacaaacgtctccctccttgaatttttattttattttatttttatttttgaataaccgaaaaaaacaaaatatgtacaataaatataaggtattctagagcaagcaactaatcaagttttataacaactgataaatatacattgtatgctttcaaaagagaataaccaattagtatctcaaaaacgaaccatacttaatagatgttgagaaaaaatagacatgttacaaataatgtgaatcaggataatttttagttgagtagaggagacttacacacttgaattcacttgtcagacatgagtgtgtgcagtgaaaataagatcattgtccttggcaagatttttatttttcgcctatttcaaatggatcccacaacgggatgctataacaccatacttaaggtagcccttttctatggtattgcatcctcatcataacaattaattacaaccagcttactcaaaagatgactttcacacctcagtatgggtagctctatctcagcaaggggcctgacaagaaactaaaacaagaaacgctcaactctgtataagaacattatgtaatcccaatcacacataaaaagtaacatgaatcatttaactcaacctcaaaagtatgataagtacaagatactaaactaattattatctaaaaacataaacatgatttgtcaaataaacataaacataaacatgatttgtcaaataagaatgaaacacgattagatggaagcaaagaacaactcatcaatattgtaaaaatacaagaacaagaaaaattagacaatgcaaactcccaatgattttcagagggagtcaaagctacttgagtctagggccttggtgaaaatatcagctaattggttctcagaatcagcatattttaactgtaaagatttattttcaacaagttccctgataaagtgatgcgttatatcaatgtgttttgttctagaatgttgaacatgatttttgaaaatatttatagcactagtgttatcacaaaaaatagttaaaacacccaattcaaatccatagtcaatcaacatttgtttcaaccatagcaattgcgtacaacaacttgttgggattttatgccctaaataaaaccgatttcaatacaatctgatttgttatcaatagaaaataagaagtcatttatgtttacatgtagttttcaagttaatagtttaatgtgtataaaatctgttaagtccagaacnnnnnnnnnntcacaattacaatgatgtcaacacagtggaaggtaa

SEQ ID NO: 18662 - DNA, 3675 bp, Cannabis sativa
gtagttgtgacagaagagcctttagttgctgccccggtggcggcggaggctgctgctgaggagtctgaagcgaaagggaaattggaagagtttttcgctactgattctgagaaatcgaagcattcatcagatgatcgggagccgaagattcctaagtctttgatttcgtttaaagaagagagtaacaaagtagtcgatctctcagattccgagaggaaggctcttcaggagctgaaacagcttatccaagaggctttggattccaatgtattcactactgggcaattagctcctgctgataatgcttctaattctaaacccacttctgatcccaatactgaagagaacccagaagcggaaaccggaaaagtagcagaagaagctccaaaagtggaaacttctgtggaagaactttccatttggggtgttcctcttttgaaggacgataggactgatgtgattcttctcaagtttctgagggctagggactttaaagtgaaggacgcttttgtcatgtttcggaatacgattcgttggagaaaggaattcgggatagaagagcttttgagtgaggatcttggggatgatttagaaaaagtggtgttcatgcatggaactgatagagatggtcatcctgtatgttacaacgtttttggtgagtttcagaacaaggacttgtatcaaaatacattttcggatcaggaaaaacgaacaaagttccttcggtataggattcagttcttggaaaagagtatcaggaagcttgatttcacttctggtggtatttgtaccatctttcagattaatgatctcaagaactctccagggcccggaaagtctgaacttcgactcgctacaaagcaagctctccagttgcttcaggacaattatcctgagtttgttgctaaacaggtttccctcattgtgttctgtttttcagtcttcacttactggttctgatcattcgttttcaattgtctaaattaacattttgtcttggtttttaaggtattcatcaatgttccttggtggtatttagccttctacactatgatcagcccattcctgacccaaagaaccaaaagcaagtttgttttttcagggccagctaaatcccctgatacccttttcaagttagtaaatacttttttattgtcattacttattggtttatgaatttagtctacatttccctagtgtgtgcttcttagtttggtttttaatctgtctttcttttttattattataattgctaaatttaagtttaaaattccattcaatacagatacatttctcctgagcaagtaccgattcaatacggtggattaagtgtagatttctgtgattgcaacccagaatttagcatttctgatccagtcacagaagtatttgtcaaaccaggaactaagcaaactgttgagattattatttatgaggtctgccatttttctctttctgtctcataatcttttcctgttgtgaagtttatattcatttagttgttagtactttgtaattgtcaaatttctatcactgtgatggacgtttgagggggctcgttctccttgcaacgattttttgtgtcagtctgagacgcccaccacattggctggttgggtttataatcgttccccaactgtttctaatggtgaaatgggaatggagtcttatttcataaagcctgtctatcacttaattgtggaagcaaactgctagttgtagtttgaatctgttttgcttgatgtctggtaagcatataatcggaatttttggattgcagaaatgtgtcattgtgtgggagctgcgtgttgtgggatgggaagtgggatatggagctgagttcgtgcccaacactcaaaatggatacacaattatcatacacaagtcgaaaaaaatggccccaagtgatgaaccagtggtgcataacagcttcagagttgatgaactgggcaaaatattgctgacagttgataatccaacctcaaaaaagaaaaggcttctctacaggttcaatatcaaacccctctcggactgagggttcaaatttgaagtacttcgatcttcgcaggatccatacagaaaatgaagacaaggaatagcttctcccattcatttgccatcttcattttcataaagtttggctgctaggtgctttgtgtattggggtttcctagtagccatcgtatcgaaatcctaaagttgtaatatttggatttaagagtttagtaagttcccatgtaacttatggtgttggtgggtttccatggtgttactggttttatgctttttgcgtgatatatatagacaagaaaagtgagagttgcatctggaattgaatgagtctttttttgggggatcgtgcacagaatcagaacttctgtactttttggtatttgggatcattgagtgtgtttcaatatatctactttatatataatggatatataaatatttcttgttttattggttcgttaattaattagcacatacattttgtttactggctaatcattaaagcatgttcaggctattattatttgggtatataagatacgaatgcttccttttttattttgttctcttttattctttttttcctgctacacaaatgattctatttggaagaaagtggccaaggtctttaatcttgtttcatgccatttgaaatagtttctccaatgtcacacaattctatggtgctaatttctcttccttgtttttttttccggaagaatctatggtgtcatgttcatgctttcatattccctttctttgtaaatgttttcttgttaagaggatcacaactctcataaagataaaaaaaaaaagtacaagttgcatctgtacaattatagttagtatatacaaattattatgttagttgttgacttgccttgttattatgacttggtgtgcacttttattgcatgagttcttatatcttaattgtcatctttaccatcttttagtagctttgttttcatatctattatcaacatttggaaagtgtggtaggtttggtttttcatttttatgttttacatgtaataattttgttccttttcggaatgatgacgagaagaaaataatagaagtatcgtcattatttgtcagcattcttagatggtgcgttagttttgagtataatatatatgcatttgatgttgtaccaaaccacactagagtctaagactagttgttgtaccaaaagtttcacacaaggagggttgcttaaatgttctttattttaggtttttttttacacaatgatttgacatgtagaagttagaaaaaatcacaaaaaaaaaatacaaaaatcaacttttattataaatataccttcacaaggtagataaacttttctattttttttttttactaaaatacctttatatatgaggagtgctgtagagactctcaatcttaggctttagtcctccctcaacactcttaggtcctgcctatacttatgtggtaatgatacattagtcacatcacactttgttagacacatataataaaatataataaaagtcatatttttagcattgtgactagtctagaataatttttaactgacaaaataatttatgggatacgatttagtagtggtaataatttggaaggtaaatatttcaaatggcctagaatgataaagaaaaagatacacacaag

SEQ ID NO: 18663 - DNA, 4791 bp, Cannabis sativa
acaaaagtaagtggaggcctatcaatacccccggcttgaagtttcaccttgtcctcaaggtggaaatctggaaactgagctcgaatgacagcaaagtcttcccatgtagcctcatactcaggaaggtttttccacttgatgagagcttgcgggttaaccttgtgggtacctgggcgaatggccagcagtgattcgggtgccaacatccattccaggtcagcagtaaggcctgcaggaaggggtgatggttgctgattggggcctaaggcagctcgcagaagagagacatgaaagacaggatgaatggtggcgtcgggaggaagttgaagacgatatgcagcagggccaacccgtgccacgatgggaaaagggccaaagaagcgtggagatagcttctcgttgggtcgtctggcaacagtgcgttgtcggtaaggacggagcttcacatacactcgatccccaacttgaaattggacatctcgacgcttacgatcagcttgagacttcatcttttgttgggcgcggagcaaattctgtttgagcagatccaaaacggcgtcacgatcatggagaacattttcaacagcggaggctcttgtggtagtagctgcaaaacgcagcagtggtggaggatctcggttgtacagggcacgaaaaggagtcatcccggaagaagtgtgatgcgatgtattgtaccaatactcagcccatggaagccatttcacccactgattgggtttaaagctgacaaaacatcgaagatacgtctcaaggcagcggttaacaacttccgtttggccatcagattgagggtgatatgcagtgctatgtttaagcaccgttccttgaaggcggaagagctctttccaaaagaggctgaggaaaattttatctcgatctgaaacaattgatcggggaatgccatgaagcttgactatctctttgataaaaatggcagcaactgttggggcagaaaaagggtggcgaagagcgacaaaatgtccatacttggtgaggcgatcaaccaccactagaatggagtcaaaaccattggaatttgggagaccctcgataaaatccattgaaatatcttcccaaacttgctcgggaattggtaaaggttgtaagaggccagcaggggactgtgccaaatacttgttctgttggcatatcgaacactccgccacaaattgttgaaccgcttttcgcatcccttgccaatagaactcggcagctagtcgttggaaagttttgaatacccccgagtgacctccgatattgctgctgtgatactcatgtaaaagcaagggaatgaatgaagatgatgcaggtaacaccaagcgtcctctaaacttgagacaaccatgagttaaagaaaaacccccacaatcttgaccttgaccgagatctttaataactttggacagcagcgggtcgttggctatttgagcttgcaaatcaggaattgataacacattcggcactgtaatggcagccagagaagcgtctccattgatgcgagatagggcatcagctgctccattttcagacccgggcttgtattggatatcaaagtcataacccaagagcttagtgagccatttttggtgttccatggacactaggcgttgttccagcaagtatttcaaacttctttggtcagtgcggaccaagaattttcgacccaaaagataggggcgccatttttgaaccgcaaagacaatggccattaactcgcgttcatacaccgacttcaaacgagccctcgtagataacactttgctaaagaaagcgaggggtcgaccatgttgcattaagacagccccgagccccatgccggaagcatctgtttccaacacaaagggagcactaaaatctggcagcgctaacaccggaacggtgctcatggcctttttgagttgatcaaaggcgtcttgggcttcttgagaccaacagaaggcgtccttttttaactgatcggtgagtggtctagcgatgtttccatacccttgcacaaactttcggtaatacccagtgagccccaaaaaacctcgaagttccttgatgtttgtcggtcgcggccaggtgttcatggcctcaattttactaggatcagccgcaacaccctcagcagagattatgtggcccaagtactccacttgaggctgtgcaaaagtacacttcttcgggttcgcgtataattggtggtcttttaaacgagctaatacgagcttgaggtggatcaaatgggcttcaaaggtgggactgtacacaagaatatcgtcaaagaaaactaacacacaatctccacgaaaatcacggaatacctcgttcatcaaggcttggaaagtagccggtgcatttgtcaagccgaaaggcatgaccaagaactcataatgtccctcatgagtgcgaaatgccgtcttctccacatcttgagaagccattcgtatttggtggtatcccgatttaaggtcgatctttgaaaatattgtcgcaccatggagctcatcaagtaattcatcaatcaccggaatgggaaatctatcagccacagtttctctatttagagctcgataatccacgcaaaaacgccagctgccatcttttttttttactaagagaacaggactcgagaagggactcgtgcttgattgaatgattccggtttgagacatttcacgaaccatcttttctatctcttttttctgtatctgagcatatcggtagggtcgaactgatatcggttccgtgcctggtttcagcgtgatgaaatgctcacgggagcgattgggtggaagccctggaggcatctcgaagaccgagtcataccggtcgagtaaccggccaatggactttggtagtggcagttggttttgtgtcaccacaggagatatttcattgagttgaacccaatacccttcagcccctttttccactgctaaaatcatagccttcaaggagattggtgacttacataagctagggtctccttgcaaggttatccaatttcccgccaattcaaacttcatcaccattgttttccaattcacttgcatattaccaagagtttgaagccacttgatacccaagatgacatccgccccacccaattcgagaggaaggaaatcagtgatcacccttaaagctcctaagtccaactcgacttgagcacaaatgccttcagttcgaacctttcctcccgttcccaaaagaataccataacatgtagtggctgtgatgggcaaaccaacagcagtcacaacctccattgacacaaaattatgtgtagcgccactgtcgattagcacagtcacgggttgttggccaatataaccagcaagcttcatagtgtgggctgtggatattccaattaaggaattgagggacaaagttgcaagtgtctcttcggtcacttcagtattgccagagtctggcgaaaggggagtattgtcttcactaggttcgacttcctcatcatcagtggtcaaaacgatttggagaagcttgtgctcacactcatggcctgggtgaaacttcttgtcacacttgaaacacagccccctatttcgtttttcttgatattctgcctctgtaagtctcttgtacgtattggggttggatgaacggctactgcttgcctttgatgccatggaagtgaagttttggggtctagtttggcccgctgattgaagaagacgagatgggaagggctgaaagttgggtcgggtgggtgtaattgggctgggaagtggtttagtggtagtggcttttgaaacagggcccattaaatgatggccttcctcaattctctgggccgtttccattatttgggccagccctttaggttgtagcatgtgtaaagtggccctgatttcttccttaaggcccttagtgaagcttccctctaaaatgtgttctggtacgtccggtacacgcgaagcaagaacttcccaacgaacccggtactccttaacggtgccggactgaaccaaggacaatagttcttctgaaagagagcccaccggcactgaacgaaaacgatgaagcaccatttgcttaagcatcacccaagatgtgatgggtcgtctttggttttcccattgaaaccaagaaagagcgtctccgtcgaggccaacgatggctatatccaacttcatggattcggtcattttcgtgagtaagaagtatcgctcggcgcgataaatccagccgtccgggttatctccgttgaacaacggtatctccatccgagggggtcgaaaatcggggctctgcgtttgacccggattgaacgatccgatctgaatcggagttagtgggggtgcagcattaggatgacttgtcggtgatggttgaagcgtttgtggcaggtgagtcgaatgaattccagcggagttgagctcccccgtcgttgagccgtccccctctgtcgcacgccgaagacgatcggcactcgctgctgcaggttccggcgtcatccttccaggcggtgcgagtagctgagttagttgggatatttgatttagcaccggttccagttgtttggcgacaatttgtgcgacggagccctgaaatccctcctgcatcctagccaatccctgcgtaactttttggacatctgaacggaggtccgagacctcttcacccaccttctcctcgatgagttctgccattgaatccttcttgggtcccatggaaagttgctctgataccaacttgataggatttcctatcaatttaattaaactagcagcacaaaagtaagagtagaagagaagaaggaaaaga

SEQ ID NO: 18664 - DNA, 6983 bp, Cannabis sativa
aaaaaaaaaaaaaaacattttgcaacattatctagtatcatgaaatttttttagaatttttttttttttttatttttatactttaaaagagttttttttatatatatttttataaaattctacacaaaaaaaactctataacaactgataaagtaatttaaattgtaattaaaattcttatagcaatttacatagaaattaacagaaaattactgcagcaaatttaaaaaaaaaataaaaaagaaaatagtatatgcattaatatttttttggggacatcataaattgatcacggtatattagacttggcctgcggccaaatgagagtacaagtggaagcacagaaactaggctacgtggaggaaacgccttataattaccaaggatcctattaatcatctttttctttccaaaacctcactactgcacacttcacatctcattccacttctctaaccgacgtcgttttaatgtatcgtacggcagccaagcgattacttctcgcttcttctgcttccggcaatggcacctcccgttatcgattccctccctttcgttgtttctcctccgtagattctctatcgttccccaatcaaacccctaatcaacaccaacaccaccatcaccataagtttcaaaacaccaactcttcagattcagcttcctccacctcctcttcttcggattggtctgctcaggatgcttcccaccatcgcagccagaacccgataccggattaccaagaggagcaagctagggtgcttcgtgcttcccttttccatgtggtccgtaattcttttattcatttattattattattatgcattttcgaatttggaaatgggatcttgtatatgtaaagtcaaaattgggggtgaatttttaattgtagcgtttgggatgagttggtgcagcttaagttggggtggaccgaagctgcaatggttgcaggtgccagagacgccggtgtgtctcccgctataattgggtcacttcccaggaaagaggctgctctagtggaggtattactatttacaaatatttatttgtgtatgtatgtatgtatattgtatagcatccacgcatcccatttgccaaatttcattttgtgttactttactggttgaattcactttttcccttagttgtaagaatttttcttggtagttatgtttaggcactaactattcgttatatttgtatataatttgattaattatgacccatccgtgttatactagtattatgattatttctcttctgttttctctgtacataaattacatactattattacagttatctagtaaaatgttatagctatacgtactcttatgttagctatttactataatgttagattttacgagagttttgttcgtcttctaatgctgaaatacgcttttaattatctgtgattataaactacaacttcaaagtacctgtgtatattatctattattaactttaaggtcttctcagaaccttgctgaggcgaaatagaaagaaaaatgactagagagtctttttgctaattagaatgaaagataaagactgaattatgggtgtttttattgggaagtcagtgatacatactattttccatctatttagtcatgcaattttgaactaatgtattgaaagcttaattttaacagaacatttttcggtattgtgtagtcttgcttgctgtaagttttatcttgtgttattttccccacattactaatttgaatatcatttcatctatttcttacagtttttcatggatgattgtttacaaagacttattgatagaattgactccggagaggacttgaaaagtttgatacctagtgagcgtatctccaagcttgttagaattcgcttggaaatgcaagctccatacataacaaaatggcctcaggctcttagtatccaggtatcaccttgcttatgatcttcttttagtgttgtggtgttcattcaataaattaatgatactctacacacacaccagaaaaagaaaaagaaaaaagagactaatatgataggcacaaaatttattttttaagatttcttgtataggcacaaccaatgaatgttccaacgagttttaagcagcgagctatgcttgtcgatgaaatctggcatgccgctggtgatgaggcctctgatattgattggtatgtaaagcgcactgttcttggaggaatatactcgacaactgagatctacatgcttactgatagttccactggtatgtgtgattttcacaaggtcctcttggatcccttgttctgttggcctatacattagtttcggattggttagttccactcctctgcaatatactaatttgacagtttgctgattttgacagattttcgtgatacttgggctttcttgaatggtcgtgtcaaagatgcctttgatttcaagaaaaccatgcaagaggtctatacacaaaaactataatgtttactcactaactatgctgccttttagaagttgtaatccataaaagccctatgttgaaattttgcaggcaaaatacttggctgaaaccgttggagctgggatggggagttctttgcaaggatttatgaagggagtttttcgggcatgagttgtggacaaaagtgagcattttcatgatcagaaagttcttctcttattgagtgtgaattgtgttggacaaattatgcatgaagaggaataatgttgggaatcttaacaccattctttataaattttcagttttctttaaccgtattggcttacatgttttttatttctttttgtcagagtacgggcttacatgttgtgttagtggcttttctctttcaataatctttgggttgtaaagtcacattgatgagaaaaagtgagttttattacaccaacaaatattacttgagaaaaaaagttggatgaggaaaaatttcaaccacataaggtcatcgtgttgcttgctccattgtcctaatcaagcatatatatggaagcattcattaggacttccagtcaatgtttgctcttaattttttttatgcaaaaattaatgtttgcttaatgagataaattagagaatactagctcggaaaagcttagcaacgaatgaccatcaaatagaaaactaacatcgatctaaggattagtttttcttttttttttcttcaagaaatctaaaatagaagttgaaaagaatgcatgaaattatcaatttcagtgacatgataaaataatcgtgtacccaattaccaaagaaatccagtgttttatgtacaaggcaatcacatgatttagatactttcttttgttcttatggaatgtatagtcctttaatcaatgtgatattatttggtttatttgtcactactttaataaatgtatagggttgggacaatttgtgttgatgtcgcttaaaatttaagtaaaccgacttatttattcatcatgtcaaaaatttaaattcagttcaaatccggtccgtttataaatggatttgaccctccatgaccctttggcatatctcttcatttttgttctaccacagttaattacctattttcgtttttcaccacaaaacaaactaccaaagtcatatatatagttcccattgctatccactctaaataaaaattgttgttacctttatctcaaattgggttttgaaagtgtgctattttatctcaaaaaaaaaaaaaaaaaattggggtttgacagcctaatgtgttgattgaccaaagaaaaagtctaccacgactgtactctgttatactccatgagttatgttctagttgagcagccagcctatgccatttattatactatactttccaaataatataatatataataaatttttaacagtagaagagaaagtcgtgttaggtagacgaggcgagggtgaagatttgagcgagtgatagagattaatagagaatatccatggctactgcttcacaaattgtggcgaaattgaatctcaatccacatccagagggtggattctacttcgaaactttaagagacaactctgttatgctctcaaagtctcaactcccaccccaatgttagtcactctttcttatattcatctttaccatctaactagatcgttttgattttattcccacaatatcttatctgggtttttatttattttttaaaaaaatttactcatatgatctgccttagattgggttttttttttttttttttctattcaaatgtttaatgttattgacttacattggagaatcatatactcctttttgccataatctgattcttatcttattaagtttaatgttttgttttctaagaccggaatgttaaattgatatctcatttgttagtcttctgttttcttagtagtatgaacttgtgaattgatactaatcttaataatgtattaatagataaggtagagcgggctgtgaattcatgcatttacttcttattgccatctgggaatgtgtcaaaccttcatcgaatcccatgtgcagaaacttggcatttctacttgggagagcctattacggtaagtaaagtggcatacttgcttctccataatttatacatctaagcatttgatttgaaagagaactccttcatgagaaaactctgatcttctttaacacccatgatgatttggtttcagatagtggagatgaatgaggaagatggagaggtcaaattaacttgccttggaccagatttgattggagataatcagcaacctcagtatacagtgcctcctaatgtgtggtttgtgcatttccaactaaagactttaatattggtacagatggaactctgctcaaagctgctacaagagatggggagagccactactctctcgtgggctgcacctgcgcacctgccttccagtttgatgattttgagctcgccaaacgttccgagcttgtggcgcgctttcccaagagtgagcctctcatttctttgcttacctttcctgaatgagctgaagtttttcttcattgaagaatgcaccagcacctctctttgttgggttgcattgggtgatgctacgctatgcttccttggtggtatgtcccaagaggaataaaacctatctgaactattgtaccaatataaaatatacaatatacatattgctcaattgttgtgacaagtgaattattgattgaaatgttaagaaagttgtattagagtttgatgcgttgcattccttggtgacaatcattacttgaagttaatatatttgtttactgtaattaggagacgagggcagttcataacttgcaaacgaaaacaattctaaacccaaagagggaaccatccatttcagaagcttgtcatctccgtggaaataaaacccagatcacaaaacataaatgggttggtatctgagtctggcctaaaagatctggccacatagtagtaaaatttaagttcccataacaactctgggttgagtgccagaaataaaaccatcccacaaccccatcaaggtaagctggacaattcaaacaatacaaacagaaagaaaaagaaataaaacagagcatttagacccaattacatgaatggcatgtatcaagtaaaaaataacatgcaatagaggaaatagacaccacaaattgcctccaagaggtacaaactttgcatacttttccccatcatctgtaaatcgagtccccaatgctgttgcagctttgttctgaaacccctcctcttgaagtgaaattgatctgcttagtctcagactctcactgaccatttcacccatatatgaaaaatacaatagttacccataatagaattaatcaaaatcaagaaactccattctctttctcatggtacccttaagatcactagcatccttttctactttctgagcctgattgaggagaaacaaaatattgcacttaagagtttgaaaacaaaagtagcaagaaagactgctcatattctaaaagagcacattccatgaatatcaatgggacattcaagcttaaatgtacagtgaatcttaccctttttatctcttcttctgagacctgagtcatatgtggaggaagctcctccctatccaagtcctgtgaataggatattaacttaactattgacaaggtttaaaagtttctaaaactgattaaaaaaaagtaagaaagaaagataaattgcccataccagctctccaatcaacaccacattttcacctcgaattacatatagacctaatgggatatcacagtaaatatcacccacaatagctcgttcacaagcaccttcaagaattacattagctgtccatgaagaagaaaactccaaaatcagcaaataagtaaagaataacaaaagaaagcatgacaatgtgggatgaatacattaccaaactgatcaaaagatctcagtaaacccaaaagctttctcccatctctcaacaatacaagaagtttctctgcaagaagtagaacagtattgtcatagagaaaaactaaaagactaagatctactagttcactgttcacatacaactctaggtactcttctaatgttgtcattttgattgttttggtgtttgtatttgaggccccaaaaacaaaatgcaaacaccaaaaaagccctgccactaactccattcccattctcctaaatccatttccacaactgggcaacattaaaaaaaaaaaaaaaaaaaagagatttttacactcaatcagtgcagaaacaccaaatcaaagattttgtaataatcaaccaacaagtggcatagcttcatcctatccattgattggtttaactagttcattttaaatctaacatctaaataaaccatccttacagcaattgtaccaaaaaaaaaaaaataattaattaaaacgtattacttttagtttctgtttttgaaaaaaaaatacccttttgcattgtttgtagttctaaacctctcatctaacacacagatcaataacatgggcaaataactggagagagagagagagaga

SEQ ID NO: 18665 - DNA, 2194 bp, Cannabis sativa
ttaccaaacgctacctaaatttatgaagtattgatattgataatttttttttatatattttttaataaaaagcctaattttaattttgggataattttaaaaaaaatacaaaaacattaaaaaaattacaaaatacgatcggtacgaaattttaaatattttacaattttttagattttatttgcataaaatacgatctttttatgttgtactcttgttattttgttactaattttttgttattatttgtatattattttttttatgttgttttgatgtttctttcatgcggttttttttttttttgttgttttctagtatttttatagaatatcgtaaaagtgtaaaacgaaaaacttcaaacataaaaatataaatttttttataaaaaaaaaaatagtattttatataattatttttttaatttttcgtcaaagaccccaaattgcttgggccaaacccaacttacaaatagcattagttaattcctttgattgaggcaaaagactaacatatgagaaaaaaaaaactatttttgtaatataatgagtttattgttgtacatataataattcttatattaaaaaataaatcaatttgtccattttgtataacttgtattagtattagatagggaattttcatattcccactaattattttttgtttttcatctcttaaagggacaatctagctagctagttggaacataataaataagtcatattctctagccgaccaatggttttattagggaaacttcctaataaaacttttatacttaaaatagagaatttgtttaaaacttttaattatgtgacaaatgactagattttaattaagtataatttcctttaaaaactatttgtatgcgtcaacaagtagtttttttcacatataaggaaaaatataacattcatagtgttacttataaatatgtacaatatattaatttccttacaaataaaactataaaactagctagtaataacgtactaagttaagttgttatgaacttattttgttttaatatcttagataagaaaataaaatatataatatgagcttgattagcactcaacttttgatctactctttagatatttacttcatttgaggcaagtttgtgaatatcctatctgagaaaaaacagaaaaagaagatcttttagctcacattattattttatatgggaataaggaatgtatttttttttttcttagctaatggatttgtcttcttctctagatccaaatatatgtatatatgtatatatcatagcatatattgttgagtaaataatcagtctttcttaagtttttagctttagaaactcttcatcaataatagatgatagtggtgtatatgatgaaaccatatgtgtaatcaaagagtgagatacaagaaagtcccaagtttatgtttgccaatcttaggagtgagagagaagattacaagctaaggagagaactgtaatttcacaattgtttagtaaatgggaattttgttaagggaaaaaaaagagtaatgatgtgcacaaaaaatatgatccaaaaacactgcatactcattgataataacacaatgagagttcactcaatctcatttaattaagataatactcccaatttaaaaaagtaggctacaatattttggtgagtattttgtgtgtatatattattacttagaagtaaggttaattagcatttattcctcctcaaactataacatatatcccataaaaaataaactttaacatatattaaattgtatcttttaaattttttagggtgttaaaaattttctttaacactattgtgtttattggattcaaggacttctattcaattttactaaaaatatctaatgtgactgttatactcatatttcgagcaaataatatagttatgacatgtatgaaaaagctagaaaataaaccaactcgaattatgaagaaataaaaagattcaaataactcgcatcagaaaatacaattggtagaaatattcgaactcattctttcaaagataagggcgagctctgaataactactattttgtaagaccaacgagatgaacaatcaacgtagaatatccatctcgggatacacagagtatactacataacaacagtcaattaaaaatggtagataatgagttctttaagagtttgcaacttatcaacacacatactc

SEQ ID NO: 18666 - DNA, 2014 bp, Cannabis sativa
tcagttgcacatgatacttttaaatttttcaaattttaactactctactccctagctagctattatctgtcctatataggtatatatatgaataatattttatatgtgatgtggaattatattaaagcattctagctagtgttattgtgcgttaaatttcctttctttcatttttcgtaatatatgatattgtaaagtgtagggtaagtgaagaaagacaatggcagatactactcagctcaattagaacaaagggcaggcatttcatttataggacagagaagcataacggctccaaatccaatgattgcagtagaaaacaaagcactacaccacgataacagaaaaatggaaaaaggaagataggaataactaaggataaactagcgtaacaacataaagaaggagccaaattacctgtcccagccaatgaaattttgccacctcaactaaaatttcacttatacatttaatgaggcattaaggcaagattacaattacaacaaatacgggtttcaggcacgacagcaacaagaacaacaaaaatttcgttcttgatagtaatagtatcaggtacgatttatcaaagtcgttccggacaaaatttattttatcttaaaaataattaaataattatttagaatgtctatactctaatctggcgcgaaatttaaccgtttgaagagagagatttttcaatatttgttccagatactgtcgtgcctaatactgtaaataaagaaaataaaacacaaaaccggccctctattttagactcacagccacaagtcactctctcttatctccaacccagcacctccaccctccgtccgagcacatgaccgaccgtctctccggcgatcgagctccggtaagttctatttctagatctagctagatctatctctatctctcatatctctgtattgtcataatcgttctgcactttttttttctaatccctttttcttcttcttcttcttcttctacacaggtatattgtcttcttcttgttgttgttgattaattcaaattctaatttcatcttattttgaattcttaaccttttcttatttcctcatttttctttataattaattgaaaaaatatttgtagtcaatttgttaatcaaatctattattgttctattcgttggttggtatgaatctgataacattattggcttaatttcattattgatttcattgtactatcgttccttcctgaacttttttcatctgactcagacttggaattactgtattgcccttttcttcccatgaaaccaacaggtcagttcttgtttttgtctctttatttggaaattaatggaagtggttgatttcgtttttgttttttaattttaaattctgttggttaattttaagatttcatgataattttgagattttcttttgaataaagactcagtttttttcttttttacttttgatatctgtttgcttagttagttagtgattcaatttgattagttaatacagtttttaatactaattcaaccaaccaaccaccaaatcatctcaatttattcacagtttctatatttggatataatttgtgtttgtgtgtgggtgtgggagagagagagagatatatagagagttgagtaataaatgttgatgaaacttaaacttaatttaaagtcaaatggaatttgaggtttgtagagttaattataattcaaaaaattacatattttgattgggtaacattgaattttatcaatggtctgatatagatttgttgggatcaggtacatcatcataagcatcatcatcattaatcaattggtaatcatgtaatttaggagactggaagaaaatttcaaggagggacttgagagcagattctaggtcatgcaatagaaatttctcagcctattctcatcgattggtacttccgttttgccttccttcactctgataattatgcacgccacctgtttgatgatttgtaataagaatttatgacatttttttttcttcttattatt

SEQ ID NO: 18667 - DNA, 2928 bp, Cannabis sativa
tagaaaactattcaagtaaataagtgataaaaatttagcaacttgtaaagttcatcatcatttaactgaataacaactttttactactgaattttaataatacgaattcaatgacaaaaataagttctttcttttactttttaaatgtgcaaaaacttcttctgcaaaattgtttcctaaatattttaataaatatataaataggaataaccaaagccgaagtggaaaacaatgaaggttcaaggtttttcaaaaaaaaaaaaaaggttcaaggtaagaatagaagaagcatggcatttggcagccatggctgccaattccaaaatggcaaagctcgtcttggtgcctccactccaaactccatattcttaactatatatccttcaaggcaacgttttgaacttagtgggaaaaacatataatctcaaaaagtaaaggcgaagaatgaagaaacagattttgtgtagtaaatacctcttgtatggtgggtttacttgtttgaagattctccatagttgcattcggcaaatttcagaatcaacttgtttcagctttggcacgtttgcaactccagaagctatcttcaaagattgtgatatttcagaatttgaggaatgggacgcttctggctttaatgattcttttcaagttgaccgttctcgctacaatgatttactcaagagatgcacccagatggggaagcttagagaaggaagaatcgtccatgcccttttactgaattcccagttcagagatgacctcgttattcagaacactctactcaacatgtatgcaaagtgtggtagcatagtggatgctcgtaaagtgtttgataaaatgccacttaaggatatggttacttggactgccttgatcactggatattctcagaattatcgagcacaagaggcgctggatttgtttcccccaatgctacaacatggattgaaaccgaaccagttcactctgtctagtttgttgaaggcttctggagatggtctggccagtgaaaagcagggtaggcagcttcacgcatattgtgtgaaatgtggttgtgattctaatgtttatgtgggtagttctcttttggacatgtatactaggtttggtcttatggttgaagctcagtcaatctttgagggtctggtgagcaagaatgaggtgtcttggaatgctttgattgctgcttattccaggaaaggtgatggagaacatgccattaagctcttccgtgaaatgcaaagagattcttttaaacctactcattttacgtattctagtttgtttacagtttgtgccagcacagggtctttggaacagggcaagtgggttcatgcacaggtcattaagtccggtggtagacttgttgcttttgttggaaatactcttgttgacatgtatgcaaaatcaggtagcattgaggatgcaaaaaaggtttttgataggttgattaagcgagatgtagtttcttggaactcaatgcttactggatacgcacaacatgggctcgggaaggaaacactgcagcagtttgaagaaatgctgagaattggaattcaaccgaatgatgtaaccttcctttgtgttctgaccgcttgcagccatgctggtcttttggatgaaggacaacactattttgaattgatgaagaagtacagggtagagccagatgtttcacattatgtgacaatggttgatcttcttggtcgtgcaggtctttttgatcgagctgagaggttcataagagaaatgcctatccagcctactgcagctgtgtggggagccttgcttggtgcttgtaggatgcacaagaatatggagttgggtgcttatgctggtgaacacatttttgagcttgatcctcatgattcgggtccccatatattgctatataatatgtatgcctctgctggtagatggaatgatgctgcaaaagtgagaaaggtgatgaaagagaatggagttaaaaaggaacctgcttgtagttgggtggaaattgagaatgcagtccacgtgtttattgcaaatgatgatgctcacccacaaagggaagagattggtaagatgtgggagcaaatgagcgtaaaaatcaaggagataggatatgtcccagatactagtcatgtgcttttgtttgtggaccagcaagaaagggaggcaaagttacagtatcatagtgagaaacttgctctcgcatttgcgctgcttaacacccctccgggatccaccattaggatcaagaagaatattagggtctgtggggattgtcattcagcaatcaaatatgtctccaaggttgtaggaagagaaattattgtcagagatactaatcgtttccatcattttcgcaatggatcatgctcgtgtggcgactattggtagtgcttatttttagtgtcttttcaatcagatttgtctcaatagacaaaaggcattgtaaaagagatgctaacccactacaagatgatctaatatctaacttggctggaactaaacatgattattctattctatctcctgatttgaacacaacggttttccacttgagcgttacaggaggaaactatggattgagtggataatgaattaagggtgcataaattgtgtgaaaaagacaactgaactgctataaattgagaaagttgtaaagaaagaacaaccctcagctctctcttcaagattacaccaagttgaaagctttttcttaaagttgatgcagaaccacgatttgaggattcaagtatcagcagcttggtagatggaaaagtctatgtgcacattgaaaaacatttgttgggggaacaaagaaggaaagatagaatttgttacaagatcagaacaggtcctgattttttggttgattttatctatcaatatacaaaaaggttgtttctttatgtctttaatttgcttaaaaacatacccttt

SEQ ID NO: 18668 - DNA, 3111 bp, Cannabis sativa
caaatagcgtctaaaccttctaaattttactttatacaacaaataacctccattttttttttggctaaactacctacactttacttttttttttaaaaaaaaaaaaaaactatttttcttttttttttaaaaaaaaaaaaaataaaaaatactatgttatcattggagaagccttgagccaaccgtattggcaatgtgcttgacatgaacaacagtaactataaggaaaaaggaaaaaggataaaagataaaatatcaacaattaaatcttaataaaagaaattgtaaacaaaggagcattcagatcagagcattcgaaattatcaaagcatctgtttcgagatgagccattgatagttgcatttgtataagccaatttaagctatggaagattgcttttgcttacaccttgtgagaagcaaaattgccaatgattggctttgaaagtgcaccaaccacacaaccatgagaatcatgcaacacagtcccaacaccaattatattcttgctttcatttacaaccacatccatgttaagtttatgggcacctggagatagcggtttccatggcacaagttcttggattggtggggagagtcttgaagtggcataaacaaccgaaatgtacttgatatttggagctttgaaattttgcatatatgtagcagcaaaaccagcaatttgttctgctaatttggggcacttccatgaacaacctgattataggctagatgatgcaaaaaatattttccattccagttttggtgaagacagatgagatatgaaccatatagtctctctggcgccttaaaaatacttgtttgtagtctaaaaccatatttgagtttttcttgatcgagcatacttacaaccaaaaagagcatgtccaatcgactcccaacacctgtttgtagatcggacatgtagcatcgttaatgatcttcccgcggaccaaagatgtggcgacgggaagagcatcataaatggcccgccaagcaaaaattttaattttcagcggcaactttaatggccagacatatttccacgatgatgttgaagagttggaagaggaagagatgcaagtatattgtcccatgtcattatgatgctagataagagtattaacgtttggaaaaaagctgagtggcaaggtcaatatccgctctacatccaaaggggaaaaactgattcaaaagttgcacattccattcccgttcatcagttgttaagttggccactactccgcttaaaaggatcaatataacaaagaggaaggaaagatttatggcctggaatccacgagcaaaaccacttcacactgatctgccttctctgattttccatcgcaaaccaagttccaacaattcttggccccatctaatcccttgccaagtcagagatggggaattgccagggtgtgcatctagaaaggagttgtgtggaaaataacgactcttgaggagcttgctaagcaaagagtctggattttaaaagatccgccaagcttgtttcgctagtaacgcttgattgaaatgtacaaaaaagtgaaaacccataccaccaatatccttagacttacagagtaaatttcaatttctccaatgtatcttcgttccattttcattcgagtcctaccaaaaactggccatcattgattcgagttgattatagaaagtaactggcagacgaaaacaactcatggcatatgtgggtatagtttgtacatatgcttttaaaaacacctttttccctccagttgagaagagcttttcattccatgtgtgcatgagacgccaattcttctctttgacaccactaaacaactgcattttatcttttcccaaatgtgcaggcaaaccaagatatttttcatgatactcacaaatgggcatagggaactgcctatggaaacttaacccaccaaagttgtatttggagagaaagacatgactgacttgtctagattgagtacttgacctaaagcacaatgataaaatatccaaaattctactaatggcaagacatgagctctcattttcagaatagaacaacagactatcatctgcaaaaaagagatgagagactgatatggctccgtgagttagtgaaaaaccattaagagaaccaagctactcctgatgttgaagcaggcgcgagaaaccttttaaaatatcaaatattggacatccttgacggagccctctcgtgggcactagtaagaaggtattcgctgttaagcattccataattagagagatctatttttcaacaaaccccattttctgcataacttcctcaataaattgtcactttacacgatcaaaagccttactcatatctagcttcagagccacaataccatttcgaccatttgtcctatgcttgatggcatgaactaattcaacagccaccaagatgttatcttcaatgagtctatttggcaggaaggtactttgtgtttcagaaataacaatcaggagaacatgtttaaaatgagctattaagaccttgaagacgagtttagagatggcattacaaaggcctgtaatttgccattcgcttaggatttttcatttttggaataactttgatgatggttcggttcattggtgatgggttagaaccatcatttaaaacacccaacattgctcttatgacctccgtgcccacaatatacaattgtgttggtaaaatatagcgacatatcataaattctcaggcttttatcagatcccattgaaaataaggctgccttaactttagaagcattaaaggttgtaagagcacatgattcatataatttgagacagtgtaaggaatggttgctaaagtgtcatgtagggtagattcatcaagtgtacaacttgaaaaatatcagcaaaataaccttggttaacactagctatctcatgcttggaagaaacttttgcatcagaatcagaaataaaaaatttaattttgttgtctaccttccttgcagaagatttagcgtggaagaattttgtatttcgatcacccagacccaattaatcaactcttgatcgctactgccaatatatttcttcttattccaaaaggtcatcaataatcacttcaaagtgttgaagagca

SEQ ID NO: 18669 - DNA, 3114 bp, Cannabis sativa
  modified_base (1347)..(1349): a, c, t, g, unknown or other
  modified_base (2930)..(2934): a, c, t, g, unknown or other
  modified_base (3077)..(3077): a, c, t, g, unknown or other
aggtaaaataatttccagcactaattttgtggtattgcgccgtggtctccagaatattcctaacttgttttggaaaggttgtaactgtagggtgagtcgccctactctggcactgatggctttggagcctggagctagggccacactaaagtaggagcccaccttgtgcttcggagttactttactcacttttacatagtgataggtgtgtctccattttaactaatcccgcaagtgtacagactacttccgggttggtatgttctctacaaggaccagctcatagaggtcccatctctcgatgtagtcttgtacatataaagctagaatcaaatccaacggggaaggataagactaaaattcacttctactcactgaagaaacgatctaaagtgacatgcccaaccaatgcttgcaaacatactcatgacttccaagaatactagttttccatgtctggattccctccgaagtggcatctaactttctcactagacttctacattgctggtaagtactgaaattttcttaattgcctttctttaagcattctttcaggttcggtgaagtctaacacaatcatccatcttttttttccttctaaatgatatccctcatcctgaactgattagtttcctaaatgagagggtggggctttatcacaacacgaatatggaggcactaaaggttgagggttttgttaggatgtacgctctgaaaagcttgtaaagacatttctgtttataaatataagttgaacgttttcatgtgtgcttgaatgttaaattataaatatttaatatttaataatttttatatctatataaatatcaaaaaatttcttattcatacatgaggctgtgtcttgtattgtatggagaagattacttagccatgaaaaaaacaatcagtaacatattaaagttttgggatctttaatcaacggttgatagtgcgattcactgatgcctattattcggtgtaacaaacctcgattctgattactaatgtagtaggatatctaagtgaaggtgttgtatataatagagtttatatatgacatggaccaatatgtagttgtttttatcaaacatgtcgtttactataaatacctaattcatatcatgaactcatgctcatgttattaggttctttgattcactcgttcaagtttctcagagaagatgattcttacaacttctgttttaggaatctaataatatggatggctgggaacatgatctataattatagaatcttgactttcctaacggatcgaatgttggtttcgtttaagtgttaattctaaaactgaaaagttgtgcacaaatttagattggatctaannnatactttcactagtgaattaacagtactaaaggataaacaaataattagacaggtaaaatagtaatttgaccaaaacttattacgaaccgatacaaggagggctaatcactgaagttaattatatcaatggacattgcagtaaaactcagtaaatataattctataattatttagagtttaattccatatttatagtggagtaatcatgaaattaataaacatgattatttggttgatgagattcaataaataatctagtttattggagtttacaattataggtccatggtccctgaatccccaccttgaaacactgtcaagggtagggataaaagctgtatggaagtttagaaaaatctattttgatttttcaaaatagtaattatttattttgtaataaataaataactttttttttcaaatttatcaattaaataaattggggaaaagattaaagttgtctggacaaaagacaccactaatgtcttaattaagacataggtggcaccactatcactgtgtcttgacacagtgataggcgcctatcatataagattgttttgggttaattaattaattcaaaagataaaatttatttaaatttgaacttgaaaagtagttatggatatttttggtggtttagatactgtcaaggtagttgagagattcccttaatcgattataggaaataaatatctataacaaagtttggttacattatttattcaaataattaaatatgatttaacaaatgatttaaatttaaataactaattaaataaaatctttcttgggtttatttaaatatagcatataaaccaaattctaatacatattttaacgtaactttttagataagcctaaaaaggattaatttgattcaatattttctctcaaacactatagaattgttcttgctcatgtgttaaggatccaaaaagaactttatatacattttatccgactagcccacactagtccttgtgtatggtggaagatttggaagatcaaggtgtaagttggacgtcaccattccaaggatacaacatatgaaaagactcgagaataccctaataggcttcaagaggtaaactttcttttcatctatttactttcaaatttaatatacacactgtttggttttgtgccctactaaaactctatttcaatgtaatcttgaacattcatttatcaataaagaaatagatttatttcattacttgtttaatgtgttatttggttcgcctgtttattacatgatcatttattggatttataatttcatctaaatccttatcacattgatattcttatttattgtgatgttaacacagtgaaaagtaatcaagattatgtgattaaatgtattcttatgaattatcagtacacagggtttaactgataagataatctacaatgtagtttacttgcaccttggctaagtgctatggcctttctagagcattagttaaagtaagcttggattggatgtatggagtatgcatcagaagggaccgatattaaacttggataagatataataaacttaccgtattatctatctaattcaatatcacctnnnnnatcttagatcaaatgatctcaattctgagatggttaggttctagttcagttgtattatttatgttcttcaattcatttgttaagtcgaccaatggatctccttgtgacatatagataaaggacacggtagttcaattgagtgngagcgctaatcatagatacgaaatatatagcttctat

SEQ ID NO: 18670 - DNA, 3914 bp, Cannabis sativa
aactacaatcacgagatatatgttaaaattacaagtatattataaaatgaataaaaaattaaacattaataaaaaattatctttgttctcgccccattctcttaggtagggaatatttaagttgctatgcttggttccaacaaaatgataaaagtggaaagagggtaagttgagcgcacttagcgcatgatagcaacggtaactagccgttgaacttcctagaaaaagtaaagtaggaattggaatcttccgccgctcggcattaaaacgttcgaaatttattttaaaccgatcccacaccctcttcctgcgacgtcgtttctatctcactcttccttataaatcaaaaccccgcaaacgctccaaatcgtcaatactctctctctctctctctgaggaagtcggagaaacgaaccttctctttcttcttactcacaaatctttctcttttaactttcatcactttgcaaaagcttacaaacgcccctggttttattttggtgtaattccagacctgaccgttgattcttgcaaatctgtctcatggctgccgtcaatggatacccggacaacactcctgtcggccccaacacctctccggctaaacaggctccgcctcccgcgaagaccgttgactctcaatctgttcttaagaggtatgttttctttctttttcgtttgcacaccaagtgtttgataaaaagattagaatgaacagcctaagattttggtttaatgattttttgtgtgacctaatttttatatatatatatatatatttatacactaaatttgagataactgaggatttttggtgtcttttagggggttcgggttacttttatttttactattcaactgggtttgggtttgtgtgttttatttacataattttttcattccattaaattctaactactatcggttttgattttcttttaaacaggttgcaatctgaactgatggccttaatggtaagatactaaatcttttatctgtttggaatgttgagagtacaccaataataattttcttaaatctgatttcatttgagtgtattttttttaggcatattagttttaaaaaaaattgtattgttttgtcttagaatttttttttctctgacttgaaagtgtttttgtcaaacatagatgggtggagatcctggggtatctgcctttcctgaagaagacaacatattttgctggaaaggaacaattactggaagcaaagaaactgtatttgaaggcacagagtacaggctatcactctctttttcaaatgattatcctttcaagcctcctaaggtcaagtttgagaccagttgcttccatcctaatgtggatgtatatggcaacatttgtctggacattcttcaggtattttttgtatgtaactgtttaacaacgcataattattaacccacaaaagatgttaattttattttgtttgtaggacaaatggtcatctgcctatgatgttagaacaattctactctccatccagagtcttcttggaggtaatttctgctttgcttttattatttgctaatattagaaaatatgcaagtattgattaaaaaatatatatctcctgactgcaatacagaacccaatataagttcgcctttgaatacacaagcagctcaactttggagcaatcaagaaggtaaataaatacactattcttttttttttttttttttatctaattatttaagttttattttacaaataagagtttttgggtcttgcagaatatagaaagacggtggagaagttgtacaagcctccttcagcgtgaaggatggataagttggagaggagtttcgttgtatacatatggaaatttcaatatttaaattatttattgcctgttataataagagaaatttcgtcatgtacttccaattcatggaggcaattcatttttattttaaatgtctagctttcaacatttggacaaatattgaaatgtctcttccgagaattttcatcatgtaattcagatgatccattgagaaaaaataattcaatttcaatttaaagtctaccatcatcatttggacacaaatgtgaaaatatgaggaatcctgttttcgagaaaaaataataaaaattcaaaccccaaatcttcctgcctcacgtcttcctagtgtcatgttgattcttaaggatgatcttgccccagtgtagtgtcatgttgtgatttttaaggatgattttgccctaatgttgttagagagtccgtcccaccatatgtgaaacctcattgtgaaacttcatgtatcttatcctatacacttccaacttttttaaccatacaacctaaattctaatatggtaaaaacccgatccaaaaataagtagcaaaagactaaaagagtatttgtgattcagagaagtgagccaaaaaagagtcatcaaaaattcaaaaatattgatccaaaaattagagcaaaataagatttatggactattttcattaccaattaattttgaaatggaacctcatgattcttatcatgtaaacttgatcgagtaaggagaacaaaccactattcaaattcactcgaacacacaccaccatttaacttcttgatgtttacaattttgaaaaataattagtattcttgcattatgtgaagaacttttggttggtgaatgttatggacaaggtggagagaataattgcaatctcttttctttaaagggaaaacactaaaatttatagtagttcgactccaattgttagtaacaatttactgcacgatcacttttattgatatttttatttatttaaatttgtatttaaccataattaatatatgacatggctcgtgggccacctgtaaaatctataaacaagatgctaacactccattaagaatacatacatatttgtgtacttaagaaactctctcataatgcattctctgaggcttaaaaagctcaactgagtctcggaccagttgttattagctatacttgtagcgtttgctgaagatgtactgatcaatacttgtaggttgttagttagttacaatagttaattattttctgttatagttagctgtccactctaactaactttctatatcatgtaactaaattttatctcttagttttatgtataaatgctaagttaaacatcagtgtacattttaaccataatcaacacaacacactgattctatttactctatcattctttctctctcttttcatcttcaacatggtatcaaatacctgaatcgatcttatcgttcctccatgcgcgattccaactcaatctccaaaggtccaacctccaatttgttaccaaaaattaacaatctttctttcaatcattcattatttgtaaaactcaatgaaaataacttcttttgtagtcccattaagtctatgcagctatcaaaagccagtgtcttgtaaagcttcttgatgcagctactgctcaacctaaatttttcacttctgaaaatgaactttgaattacatctatgaggaattcattaagtatgacatcatggacaaccttctggttttctagcttctttcttcaatggaagagaagatcctatgcaaatgttggatgcaatactgctgctcagatttggtccggtcttgaagaattctactctgctcaaaatcgtgccaaatttagctagttttgcactcaatttcgcaaaacaaaactcgctggtaatctgagtgactaccttcttaagattaagcatctcgtagattctttagcctcgatcaaccatgttctctctactcaagatcatatcgaagccatcttcaatggcctcactcgagattactctatgttcatcacatcgctataaacttaaaagatgcttactctattacttacgtttaatctctcttgaaggctcaagaagtgagaaa

SEQ ID NO: 18671 - DNA, 2886 bp, Cannabis sativa
aaaacaatgccaaacacgccaaattgttttcaaaaaacaattttctgtttttaaaaacaaaaaatagttttttagttataatgccaaacatgcaccaaactacttaaaataatgaaaaaaattaaatttattcacattaaacatactaataatagctctaaaaatgaacacccgtactcttataatttataatttatcattaaacttctaattgtgtatttattttttatttgaactcttaaatttaattaaattaatgttatattaatattatattaacaattttttaaataaactaccaaaatacaactactaaagaattgcaacaacttttataattcagataaaaaattaaaagggcaaaattctacaaaaaatattcttcgataaataataaaaatataagaaattagatataatataatatagtaataattaaacacactatttatttgtttttgtggccattaaatatgggcttgggcctgattcaagatggaaacagtcttcttcatcatagcttgggccttctcacttgtgggatcaaacaaatgaaagacatgattttcatcttcagtctcgataatctccacaaccccactccacccactcttctttaacgcctcataataactccaacctcttttcctcagaaaatccttctcagctacgaaaatcaacactctcaagcaacccaacctcaccagattcggatccgaactcgggttaactctcgggtcatccacaccttcacacgtgggaaatatcacctcaagcattttgtctggtttgtcgttcccgaaatacgggtgaaacaaaaccatacccataagtttcggcccactaagcccatcaacaccggcccgaatcgccacgttatgggccagagtcgcaccagcactatcgccgcccaagaaaactttgtttaaatccgcgaactggttaatccaagattcaggcccattaccaccggaatgggccgcggcccacttgacggcatcccaggcgtcatcgaaagcggtcgggagtagatcctccggtgccctgcggtagtgaacagacaaaacgacgacgtttgcttgttcggccaacgaagggacatactgactgtaaggaggggagaacggagatccgacgcagaaagcgccgccgtggtagtaaatgagaagtgggagttttcgggtcgggtcgggtatttggggaaggaagattctggcggttactccggattggggagagatgacgacgtctttggatttaactccggattcggagtcgggtgagggagggagaaatgggtctccgaagaatctgtctatggtgcgatctttgaagagacggaagaaagggaattcgatggctacttcttttgagtttgaaggtttggcctccattgttgtaattgtaatgtaagttaggtgagtgagactaatgtgatatctctttatttatagagtattcatatttggtataagtgatactttttataggttgctacgattagttttaaaggagtgacataatggcttttctgattttttaagtaaatttagttaagagggagtaaatgatggagaaagaaaggttgtgttaagtgtacaacctatttttcacctaaaaaaatctgatttgtaattaattatgtcatttagtgagttagcgttataactcatttcagttatgttagataatgatttttatttcatttaggactaaaaattacatatataaacaatttgaagtagatattgataggtatgtttgccgacattggattaattaaacggtaagagggtcttaatttaaagagcaaaagttattatattaaattatatgggactcaatatttaattaaaccaatagtgatatttacacatagtaaggtgctagataccctttagcatttctctaatttaaatcatgtttaatttgtcaaatcaagtattaattaattggataaaattaataagaatatggtatgcataagtttttgtacagttcactttgacatcttttagttggaaaaataaataccaaaaaattgaatgtgaattaggaaggttttattattaaaaaatcagtttgaggtttgtagggttaagtgtcacaaattgtatgttttagatagtattgtcgccaatatccttaatttaaatttaaattttaaatcaaccactataaaaacaaacatagtttgaataatattttaaaaatatatatattatattatataatatatatcataaaaacatataattaaaaactttaatcaggttagtcaagttaattcaatttaattgaacgggctagcttaatttttaacctacgcaatatatagattacgagggttatagtttcatcgtgttttctagtttatatttttcattgaatttttttggtttggtttagaaggattattcaaatttagtagttttacaaaatttatgtacaaccctaatttaatgtatttaaccaaaaatctaacttacaattatttatttatttatttatttttgtatattctccaaattcaatttgaaaataaatcaacacacaaaatacacaaacaaacaaaataaaaatataaacaataataagagtgatgctattcatctcgagtagcccgatccacatagtggatggtggatggttgggaagtctccatgaataattttttttatttaagcgtttatatattacattgcataatctgggactcgaatccaggatctccaacacatacgcatcctcctatgaccacttaaactagcctcaagtggttaggtctccatgaaaatttagttttcatttatgtcccttactataatttataaatacattcactatttgttattattcacgattcagaaaaaaaaaaaaggaaaa

SEQ ID NO: 18672 - DNA, 1406 bp, Cannabis sativa
tcaaagttcagggagcaaaaatcctaattagcctttatttattagtaagaatgtgtggtttttgtaacttacatttattaaaaataaaaaactattacacgatcaaacaaatcttagaaaaataaacttcaaagcttttaaatgggaaatctatccagaggacattacttaaaagtaatattttataaaaatatggtcattcagaccttagcactaaaaatttaaaaacttctgaatgaacagtccatctaaaaggcaccacttaagaatggtgttgtacaacactatgcaattaggtggtcttcagacctttacatttattggtagaattttcttaaatgttcttcgctctaatactgaggcactaagacgagttccatttttcatcatccgccccaatttgtatactccaaaacttgtaacttcggtgactttatacgtcccctcctaatttggttcgagcacaagagccacgctgtctttcatattaaagaaatcttctgagtatcgtatctcccaaaaagaactttctttcctttacttgtttgttgaagtatatagccactttctgtggatgggcttgaagctttaagcgtgctagatctcttctttcttcaagttcatctaatgacgctattaggaggttatggttgacatcttgatcatagcatagtcttctatgggacaaaggttccaactccaccggtagcattgtttcatagacataggctgatgcaaaaggagtctatccagtagttgtccattcagtggttcaataagaccagagtacttcaggtagttcttcaggccaattacccttagtttctacaagatatttttttacagtgtccttgagtttcactatttcgacctgcccatttgcttgagggtgtaccacttttgagaagctctttacaattccatgtttcgtatagaagtctgtaaacatctggatgttaaactatttctcattatctaagacaatattatgagggaaggtcgtaatgacatataattttttaccaaaaaatctaagactttcttagaagttattatcactagtggttttgcttccgtccacttagtaaaatagtgaacaacaactacaacatactgcacactaacttttccttttggaagttgtccaattaggtcaattccccatattgtaaatggccatggactttgcatctgaattaactcattcggcagagcaagaagaatctttgagaacctttggcacttgtcacacttttttacataggcctttgaatcttcaatcatagttggccaaaagttataaataagtatatgggcgcctaaatacaagttggtaatatgttatatattatatagtttttttgttgagtctttcaactcaaagatattgtgatgattgcacatat

SEQ ID NO: 18673 - DNA, 2172 bp, Cannabis sativa
tttgaacacaactgtaagggatatcttaatttttgagaggtgagtctccatgtgctcaccaaaatcttttgtttgtttgaatgaaagttgttgtattgcttgaattagaacaaaaaataaaacaaattgtgaaagtgaaaataatgtactattaatttagaagtatcttttgataacattttgaataatttcttcaaattctttcaattaactctgattatatattatcctaataatgaatattcatatcatatatattgatatttaatatatgataggtgagaagattgacctaacatgtttttctaatataaatcttcacgttctcactagtacttgtcaaccgtcggtgtaatttttttatttttttactggaaatagtatatgaggtagtaaacatatagtcgttcagattaatgttatacaatttaagtgtatgatcgaaacaatgcaaaaacaagaattaactattaaagttgaatttaatgtgtagtgaagaagaaacacagaacacattgcataatatttaacaaatacacacatagtccaataaagtcaaaaccttgatatttgtcgcatatatataatataactattttacataattgtactattaaaagtctaattccgttgttgttacggcggggacctatttctattctacacacacttggcatatagacccacaatctccaggacattctcttcccttttttctctctacgtgtaaaataaaaataatcttttaatgtaatttttattataactattattaaaatactaattgtgtttttcttttactgtcaacattattatctcttttgggtctttattgtttagaagcaaaaaaaagaaaaagaaaaaatcggcttgcccaatttgaaaaccccaaagtcaaaaagaggttggaagaagggaaaatattgaaaataaaaaaaaaaaaccttaattgtaatagataattagatataataaagcatgatcacagaagaacaagattttggctttttgtagtggagaggtttagggagtgagtatatgaatataaaaatgaagggatgtgttattacaagtaaaagcaaatactcgtcgcttaatatcgaattaagacaaatagtactgaaatggttggcggtgagggggttcttggggttgggactttggaggtatattatgcaaattaaggttagacaaaacgccaaagcggagtttaggctcataatttggggtttcccaagctttaattgtatgttgtaagctttatcgtgatgattattaaattataatatacattaatgttattaattaaaaccaaagctggtaatgtattctctttaacatttgttttgtttgtcttcattcaaataactaagagattcctcttctctttttacctctttataacttctctcccttcctttaataatttataataatattatatagattatgcaaagttcttgatacttgtatatcctatactaatatggtatgatcaaaagtatatactgtatataagtacattggtcagaatgtggcattgttaagctatgactttttttttttttggagaaatgttaggctatgactttgaagtttgaagataaataaagttatataatattatgaatatgatatctcattctctcatacatgttttcaaataaaacaaatagagaaattattgttatgtgtatatgatggtgttggtccaaggccttccacgtggcccaagtgtagctaaagttgaatcctttggatattccacctacccttatagaaaaaaaaaaataaaaactttttcttcctcctaagatttcaaattttgaaatacaagtcccttttaagtctccctcccctagcaatatagtactaacccttcttacttaatgtgtgtatatatacatatatagatattgataatagattgaaaaaagaatgatcattatctttcattttcattggttatgactttttccccttagccaatatgatagtcagtcacccacttcacaccccacatagaaaccaagctaccacccttaaccataacattttataatggcataatcattaccttttttcatttaaattcaaaacacactaaaattgcttttcctatctggcttcttattaatactactactactaccacttatctctttgtagatt

SEQ ID NO: 18674 - DNA, 6163 bp, Cannabis sativa
gttttgaatttttttttctagtataactctatttagttataatctctcaattagaatataatttaatcccaagtatattcttgaataaaggttatactgtaatatgaattgattacatatgtatattattttgatttgtgattggaatgattattgtaatcagaattattatgtttggttttggatagtaagtaatggaataaaatgtattgtgaaaattattcctaatttaatttgataaattagttatagaagagtattaaagtcatttcattttatataattatttttaattaaaatgtaaaagcaacaatataattctcattacatccatttaggtatgtaatagcaattacaccatagaaaagcgtgcgtaactctttttctctttttcatggcgaagaagaagagaattgttcgaaagccagtatcttaattgagtgatcatgattctgaagctggttcgaaaaaagggaaggatttatctagagatataggattggtctggacttgattgcagaagcagtgatagagaagggaatgattcaggttagggattcgaatcttagtcttgattctaaaatccatccacaggttaaggtgaattgggcaaatgaagtagaagaaggcaacaactctgatatagattaggtttagttttcatgaatctgttaaagtcattgggagtcttttgcaaaggagaacacgatatatcatgatccaatgctaacttatatagaaccgctcattaagaatggtatgagaatagctcaagtagatcctgagaaattcaaagaacaagctacaaattagagtaaggtagtcattagtatggttcttggggccaatcctccaatggctgtgtttgagggattcatcaaaagaatttaggctcatctaggaatagctcagattgctagaatagctatggggctgattatggttaagtttaatgatgaagctaccagggatcaagttttggaatcgagagtgttgcaatttgataggaaaccggtgattattatttgaccttggtcttctgatctgaatgcagtgaaattggttcgatatgtccctgtcttcatgaccttagacttcaatactgggggaacaaaagcttgagtgcccttgttagtacggttgggaaaccaataatagtggaccaacatactcaagatcagacccgagttcaatttgttagagtcttgtttgagatggacattatggactctcctccaagaacaattccatatctcaacgaatatggtcaattgatggaacaaagaattgactatgaatggttgccgataaaatgaaaaaattgctcaggtatggacacataatggcagactgtaggaagttgggtcaaaaaggaatgatcaggataaaccagctggtaatcttgagaatgttgcaagagaccagaaattagaggaggccgaagagaaacctctgaaatcctttgaaaataagaatgaagttgttccacagatgaaacaagattggcaaataccgaagaagatagtgaaccaggccaggaatttcgctcacttaaaagctagttctggttttgaagatgcagagcaatctacatggaatagtttcaaattacagatctctaatggttgttgggaaaaagatcaattgtcaaagaagcagggtgctcaagtatttttcttgataactatggattagtacaacatagttagttggaatgttaggggtatgaacaataaggataaataagatacaattttggatgtttgtagacttaataagattggagttggggctttattagaaacaaagctgaaagagaataagatcaaggagatgatggagactaaattttttaattgggcttacttttctactcctactattgaaggtcgattactgataatttggaggaaaagctttgtaagactgatagttattgctgaaacgaattaactagttcattgttacataaaaatatctaggcaggaggttgcataccgtattactttcacctatggtttcaacaccattgaagagaggaaaatattatggttggatcttctaagcttgaggcatcctgtgaagccttggcttttacttggggactccaatgtggtttttaatcttaatgatagaacaggagggaacccgattaccctaaatgacagctgagtcttcacaatggcttgcacaatctcatgttgaggctcttaagtacactagtttgaaattcacttggtctaatagtcaagatgattttagcagaaactactctaaaatagatcatgttttagttaatgaagattggagtgacatttttcccaacataattactcactttggttgggaaattatttctggtcactattcttgtatcatttttcctaaagctattgtgaagattggaatcaagccattttggttctttaatttttgggctaaccacccagattttaaggaactggttttaattagctggaggaaaccagttatagctgagggattgaaaagtgtttacctcaagctcatgagagtgaaacacagcctcaaaaaatttaactatgagatagtatgagatgtgggaaagtcttttcaaaaggccaaggacaattttttggcacctaagcaattggcttaagcttacccgagggacatgtttgtttaagaacaagagaaagctgcagcagaaaacgttggtagccttgagaaaatgtataacaagttcttaagacgacgtagtaaaattaagtggcttcaaaatggggatgataacacagctttttttcatgcttttcttaagaagaaaaggatggataacaggattacttcctttgtcacagatcaagaggttgttaatgacaacttctcatatgctgttgatcattttttaagtcacttcagaggtagtatgggcactaagaacacgggctctagcaacttatgctttgattatttcgactagggttccagtcttaacttagaccaacaactgttgcttttgaaactgttcattcataaggaaataaggaaagcaatgtttaccataccatacactaaatccctagggcctgatagttttggttatggttttttcaagtctatgtggtcagatattggttttgaaatatgcaaggcagtcactgacttttttagttcaggtaaaatgcctctcgaattccactctactatgatctctcttactcctaagatttataatcctgtcagtgcagttgacttcgggcctattacttgttgttctactatctacaagtgcattttgaaactcttatgttttaggcttgccaaggtgcttccttacttgatcaaccaaaattggggagcctttatacaaggtagattcatagctcacaatataatgattcttcaagatctcttgaagaattataacaagaaaattgtgtcccctcgttgtgcaatataagtaaggcatatgacacgatcaactgggaatttcacgaagctttgttaaatgctttcaacctgccccaaagatttgtcaacctagtgatgatttgtatccgctctacctcctactagattattttgaatggcagaatccaaaatagtttcaagggtgaaaaggggcttcgtgaaggagatcctttaccgcctttactttttgttctaataatggaatatttgacaaggagacttcatattgcagctaatagctctttatttaggtttcatcctctgtgtaagggtttaaggatcattaatctctgttttactgatgagttgatgttgtttagtacagggacaaggaaattggtttcggctctcaaaaacattattaatgaatttagtttctcttcaggtttacacataaatttgggaagtcgatctcaaatattttttggtggtgtagactctaaagagaagcataatattcttaatatcctcaacttgtgaaggttctttccctctcaaatacttggaagtccccttaagaccaactagatggaaggcagatgactgtgttgtgatccttaagaaaataagccagaggttgcattcttggtctagtagacatctcttgtttacgggcagagtgcaacttattcattcagttcttctagggctttacaattactggatgagcattttcatgcttcctcaaagtgttatcaaggaggtagagaaactttgtaaaggctttatttggggtttgaatggcagcatgagtaaaattcatgtagcttcatgggagaaagtgtgtctcccaaaggcttatggaggtcttggttttaaagatggagccaaatggaatcatgctaaccttgctaaatatatttgggccattttagcaaagagagatcttctttgggtgaaatggatcaatgttatatatttaagaaatgtttcattctggtcttatgagttgaaataagacactagctggcattggcgtaaactttgtcgcttgagagatagatttttggaagttgatgtcaattcagttgtggttgctggttgtttcaaggctaggcgtctctacaacaactccttatctcaaaatctagtacattatcatagagttgtatggagttcgttaacctttcctaagcaacaatttgtcctttggaaagcagtgaatcttcagctcttaactaaagataacctagtcaaatttgatcttgagatagaatctcttgactatccagtttgtgatgctgagtttgaaacacatgttcatctttatttcatttcttctctatctcggcaggtggtggatctaatttttggctggttggggaagagagtctggcttatggatcgtgttggctggcagagttggctagctcagccttctttgaaattattccaggtggatgatatagcagtgtttgctgccacttgctacaacatttgaattaatagaaacaaatgtatatttgagggattttctaaaacaactattcacatagtcaatgaaattaaaaatattgtgaattatagattataatttttaaagcataataatttgtctagagttgagaaagattatttgttcaagttacaaatgtaattagggagcattttttgtggtttgctttctggtttggagccttgaggcttttgttttgtatgttcttgattgtatctagctgttgattaatgaattctcattccttcttgataaaaaaaaaatagcaattacaacatctaatgtaagaggcactacattataatctcaatacaacaacaaaaatgaaaaggcaaacatggcaatggctctaataaggactttgattatattacaaagtcccttagattcaaccaaacactacattaatacacttttaaataattattctgaacatgttttatctgttttcgcatcttagagagtgttttagtcaaattttgcatggtgtaatcatttaaaaccattggtaattttttttttaaaaaaaaaaaataataatgtatagtgttaaaaataaaattcaaattataaaaatttgtaagtggtaggacggatggataaattaaaaagctcctaacttaaacaccaactctatatttagtagaaagaaaagaatgagggtaggatcgatggagagtttagaaatgataaggagtatgattgattaagatgataactactctcttttgtattatttggtagagtaatttgcggcaaaaatacttaagttttactccaagtagcagataaatacctaagtcatatttttagcggtaaaaataccttctgttagagttctggaacttccggaggtacctggccgttaagtgccaggtaagtgcccacttgtcatcttctcattggtctaaatcatttcatttttaatttcttaataaaaaattatttaaatattttaaaaaatattgaaaagccatttaaatatataaaaattaaagaaaattaaatattttttttgaaagaaatataatagttaaaaaacaaaaattattaaactaatatagtgaaattaattaaaacttttttaataaaacaaaaatatagctccatcttcaccaaactgaaaatccagaatctgcccaaactccattgtcggacctctacgaacatcgtagacgaagctcaccacatttgccgacctccacgaaccgtgcttctcattgtctctctgcgaacctagatctcgatctcatc

SEQ ID NO: 18675 - DNA, 2148 bp, Cannabis sativa
atgtatatttttaaaagaaaaatattttcttgggtccttgtctccttgagctcggtggtcttagctgtaggcctagcccaccttagcccaagcctggccttgaaactcgattatcttaacttgagttgatactagtcttattcattgaaaactaaattattgggcatttttgggggagcctcgggctaggtgagccttaggcgcaggcctagcctaccttagcctctgaactcagttatcttagctttagttgatactaatcctattctctaaatgtttcaggcagatttcttcttgacatacatcttaacagatggattatccgggttttcattcgagattcttcaaccgggtttactcttatggagcgcgataagattttgcttctgtcgacgatcaaaggaaaagaatccttacctcttttcattaccttactacagagtaattccattggtatctctatcaatacttattggaatggtgtatgcagttgttgcacctttgcttctcccttttctcatcggttacttctgtttaggctacgccgtgttcatcaaccaggtttcgatttttctcaaactcttcttaattttgttcgtttaggttatgtttggaagctggattttagttagaaaaaaaaataaaaaaaaatcatacaatttgttatgacacatacttatatgattgtcaaattcatttgtgttttcagattgaagatgtttatgacattgtgtatgaaacatgtggaaaatattggccttatattcaccactacatcttagtatcaataatccttatgcaaatcacaatgattggtcttttcggattgaaatcgaaaccagctgcagcaatttccacaatcccattactaatcctaactttaatgttcaacgagtattgcaagattcgatttctcccttcgttccgcaatttcccgattcaggtaaaaccgaaatccataaataaaacataccttattgtctcaagtctcaattttagctcatattgttcattttttgatgttttgttgtttttagagtgctatggaaaatgatgaacttgatatgaagagcaatgagttggaaattaactataagaatgcaagtaaagcttattcaccaccttgtttgcagtcatttaattcaatagaatcacttggatcaacctcaacctcaagctcttcacaaccattggtcactacatcatgacattaatattgtttgtaccaaaaacaaacaaaaaaaaatagtaaattttttcttgagggaattttatttgcatcccaaaaagttatataagtgctcttcatttcaatcatttttattttacattaaatatatatttttaattatattagtttttttaagttttttcttaaacttgtattaaataaaaataaatcatatgttaaatattataaaaaaaaattaagattataaaatattatataaaattttattagaaaaaaattgaaaatggctatacataactttttttaaataaaataaaatgaaattaatataaaataatgtgaaaaataaattaaaaattattttaaagtgatttttaaaaattattttaaatttattttttaaaatattaagtatatttatcattttgggtgtaaatagaattgtctttttgttaagttagttaattctttgatgagaattttatctaaaacaaattataacacttttacatgacattcatgtcatcattattaataatagttaatgatgattttgaagacatgagatcactttggagggaattagtaaaagagaagaatttattgatttgaaaggatatataattatatattcataattatgatatatgaactaaaatttcggtgcagactttaaatactacttctacttatttatttttagcttaatataatggcatataataggttaggagggttgtcaattgtcaaagttgaaaaacaaattagtggacttgtcttgctcactgattcaacctttcacatgaagagcataagaatctaaagttttaattttaattttgtaaatggaatatacttaatatttatttttaacagcataagtatttagtgtttataaaattataattttctttcagtttcatctatataagttcattttgaatttattaaaataa

SEQ ID NO: 18676 - DNA, 2169 bp, Cannabis sativa
tagcttctataatataaaacaaagctgaaataaagcaaaattataaataaaattatggactcacagtacacataatagtcgcaattttctattttctatcttttaattaatcttttaccaaactatattaacatttagtaggtgaaattttttacctttatttatcccacatttgtcttccaattccaaaatttctgccacaagcatagctgttaaacactttaaaatgtctaacacaatactgatatgatatgttgtaaatggttaggggtttctcttattatttatttaattaaaaatgtgtcatttcaggtggtagttagcatttcagttttgccattgaagaaacttgttgagaactctgcaatggttcttattatatttatgctatcctcattatcatcacatctcatttgaattgaagttattagtttggttccatacatacaggtttgggaatgttgagtttgtttgaggatggaagatttggagagaagatgttcgacaaaatgcctctcacacatgatttggctggtaatgttttccaattccaaggcttgtttgtagtaggattcaaattatgctgctggtaactctcattccattcttataaaaattgttatagacacaacacaacacaacaaagtgtatttagtcatttagtaccttcctttgaattttttaaatatttccatatcctttgtcccttgtggttgagtctttgattattattctattttattctattatcgcatattctcttacaagatcatctggtggtgtactgttgttttttacttgtctgtcgtatcaaattgtggactctttgatttggctcacaaataatgaataacgacgttcctaaaccaactaatactcaatagtggtgactggtgagtgtaagttatcattacagtgataaataatataacataaaaaggtcaaattaaaataattaagagtataataatgtaacaaattgaatcctacctaccatggccatgataggttgccttgtcatattgtctcagcctagtcaaagactttgtttccattttcctaaaaaaaaaaaataaatgaaaaaacaaaaagactttgtttcaaccaattttgtagattagcttgaagtttgtacaatttgattgattactttgcttgcttgatctctaaccgtgtttaaactttgatatatcaactgctttttctcaactgaccaggcttcatggctgaagctgttctcactgttgtgcttgagaatctaagcttgctgatccaaaagcaagttggatctattttgggtgtggagaaagagatggagaagatgtgtagcatgctctcaaccatttctgctgtcattgaagatgctgaggagagacaatcaactaatcgtgctatcaagaattggctacaaaagttggaagatgtatcttctgagttggaggatgttttggatgattgcgaagcagaggcctttcgaatggatcagaatcatctacaatatgatcaccataagtggattcgtaaggtacaatcttctttgtcttgtttgagtcctaagcatctttactttcgtcacaatattgctaaaaagatgaaagagattgaggatagattagatcagattgcaaatgagcgagttcattttcacttgcaagaggttgatgttggggagagacggaatcaaattagagaaagtcgtcaaactggttctgttattactcaaccacatgtgtatgggagagaagaggacaaggagagagttgttgggttcttagttaatgatgccatcaattgcagtgatacttctgtttactgtattgttggtttaggaggaatgggaaagacaactcttgctcaatgggtcttcaatgatgaatggctcaatgagcattttgagttgaagatatgggtttgtgtttctgaagactttgatgtgcgtaaattgatcaaagctatcatagaatctggaaatgggcgtccttgtgaagcaatggaaatggatcctttgcagagacgacttcagaacatgcttcaaagaaagagattcttgattgttttggatgatgtgtggaatgaagatcatgaggaatgggacaaattgaaatatgtattggaatgcggatcaaaaggtgcttcggtggttgtcactactcgttcgaaaaaggttgc

SEQ ID NO: 18677 - DNA, 6185 bp, Cannabis sativa
cattaggtccgatggcacccgatgttgggttcgatggggcccgatggtgttgagtgatttttcaaaaaaaaaaattgtgttggtctgatggttccgatggggtccgatggggtccgatgcctatgtgttgttatctttttttggtgtgttgggtcaaatttgaatgagaggggtaatgtgggaattaagtaaatgttgtcttattttaccaatatagagtattttaggtttaaggaaaaaatttcctcttaatgtaaggataaaaaatcaaatttcccattgtactaaaatttttttgttgtaataagtgcattaaacgtttgtatatattatataatatttttttccatataaatataaatatataactttaaattttcaagcctccaaaattgtggggcctggggcttaggcttgactgccctaccttctgaccggtcctgatagtaaagaataatacaactaatctaaactgaaaattcttgttttaccattaaatgtgttatgttttctttcttagatgtacaatgttcctacacaccacaaaaacatcaaggcttattttcaagttatctttcttctaagaaacaaaatttaagctctcacacacacttaggtagggcactatatactactactcctttcaaaatgtgaaaacaaagagaacattagaagtggcctcttcttaagcatcatcattcccctcatcatctggttcaaggggtatttcatgtcggggtctattgtacttctctcttagctgcttgattgggatgaaatcaccggctgcgtccatcccatagaataaaaaggaaatataaggatgatcaaactgtccctgcgcggaaacaacgtaatctaattggatcaaaatggataacccaacaaagtaaaatgatcgaaacatagaaggcaagactaagtctaattttaccttgtttggtggttcaggggttagcaaattgtcctccgcaactgcaaaacaccattcaacttgttacaaacaaagagattgaatcattaagggtttggtcaaatagttcaagatcgattaccatatgccaccaaaagatttgggtcctcatggacatcaaccaaaacctggaaaataaatgataaagaactctattaatttagttgagtcatccaaacattgtttccctctcatttggcaggaaattcagtctcccagactttttagcattcaaaaactccatgtacaatacggagcaacacattttttcagtaatttgattcaaaatgtcttgaaaagtgagagggtcacacctgatagaatggctgattagaaccccgaggcaacttttcaacctgtgcagtttccatccacgaacttgattcgcagcacactggatccattccacaaatgacacctttatagcctgaaagtaccaaataagttctcactttcaaacaaaagacaaacagtaaaaatcaacaagaaaaaacaagctatctaaataatctactagttacacactaattctttcgaattcatttctttgaaggagtttgaactgaatttctcgcaaaggctccctccataatcacaaagttcaacaagcaacttgaaatatctattataccaaatattggatgaaagggcatctatattataccaaatactttatgcctcactttctgccccaaacgaaatgaatattgagcattgtcatgtgctagagattttgctgcagcggcaagggactctgcctctagtttggagatttgatctcgtaacttagctgccaatgcataattctcgctctcaactgcattctgcagatctgcactgcaagaaaagaaaattaaaagcaatattattttacatttgaattgacctgatatgcttttaaagttcacaatacaatgggagaaggcattggaaaagtcaaatttgcgcacacacaagtaatatatatgacattgaaattaaaataaggattacaaaaatgaaacttgccgtagacgtatgatacttagtgccttatcttgaacttcgctttttgaagatgatccccgttttgcttcctgttgtctgataacctctgtttcaaccttcaaaaacaacacatatatagcacaaattaaggcaatttaccacccactgggcattgaacaatcatactaataagttcataatgaaataaagaggggcaagagaagggaaagataaactatgtcacttgtcctcacaaagattctattctaggccctcaaaaaaatggatcttttttagttcatcataatgtcacttctgcagagatagcataacatacattgacaaccaatctcagtggaagacatgttataaggacgaaggataggttgatagatgaaacttccaacttatcttctacccctgagttatgacatattttggacaatgaattcacaaaatgtgtaccaactaggcagctaccttctttcttatgattccactacaaaagctttgaagtatagcaacaaatcaatgaatcctaaggggtcgtttggtatgaggaggtttagacttgatgggaatgggaatgtcaaactaaattaaattctaataaccaaaaggtttgtgtttccaagtgaatcctacttttttaaattaaaattgtggtgatgtaaatctcctccaacacttaagtttcatattccctccaactctattccctccaattttagtctctctaactcaaactcacataataaacatcccattagatggcatttggttggaagactgaaaaacattgctagaataggaatgacattgttgagtgttgtatggtgtggattagtcagattatggtattgccgccttatcagcacaaaggatggccgatacctccttgaggggctgtatggtgtggcagtctctaaagatgtctttgacctgacaattgaagaacctttggattacttgcaacatgtgcgaacgtgtattgatgtacaacgccggcttactttgaaccaattcagcaagtagttaacgaagctgcttcccatctaaagcaaggaaaactatcaaagaaaacccagatccctcgtgccaccccgatctgccattgaggatgttcagaaaagtttaaaaattaataagaaatagtttttgcaatgttgggaggttttgatcaatatcttggccttagtcctgttgacaaatacatagatgattttgtggcgataatttcaaatcgtaagggagatatacttggaaaagattctggcacaactgggaaacaagtgatttcggtggagagtgattatgatgaagagatgtcatttaccatgattaggtgacaacctagtgaggcagctagcacagttcaacttacagatgaaagtcaagcaaatcaggaagagcagctccagaaattagtggatgagagaatgaaagagatcaagtaagtagcggagaaagtgtcttcccattgtgaatgagtactacttactgacaatgtgtcaaagctcgcaatggtaggccctgtgtttgaaatgcatctttgggaattggcattttccatagacgaactttgtatatcattgaatgtgctcgaataggaatcacattccaatattttaaaataaaatcaaacaaagaaatggaataaaagttccatttcattacctcatccatactaacagtaagttatggccaatcctaaacctttccctttacatatccataccaattaaaattacaatattatctaacctcagtaagcttgtttctcaactgctgagcaatgtcatattgttccacattcagagcatactgttaattaaactcataattagataaaaaaacttagagattgtaatctaaaaagaagaagaaagaaaaggacctgaactcgagttgcaaggtctaactgaaaaaagaataccaagatatcttcattagcattctcacttctctcagaggttgcatccaaaccatcaccaccaccaacccctttaaacagccaaccagcttcaacccgattattattattatatttccttgatgataaattaggattaggattggggtttaagaatgtggtctgtagtttccatagaagcaaagagtgtgttattatgtgggtttttgtggttagattgaaatgtttcttcctcctccatgacccaaaaacaccattaccattaccatgagaggttaccacagcacttaatgatagattttgtaacaccaccattcttctgttcagtttgattgaaatttgaattgaaaatatcaaacttcagaactcaaaactcaaaagactgttgaaagagagaatattcctcaaaataaaccctaaatcatgaattcataatttcatatactaagaaagatgggagattgaatttgaatgtacctgttcggagcttggaaatggaagctgaaccaacaaaaaataaaagataaaagagaagaagacaatggtccacattcacaatattaatattaatattaatatttctttcttaaatcaattttattttttatttgtttttattttgaacaaaaattaattttatatgttaaacacgtgaatgaatgaacaacaacaaaaaatgaacatttgtctgaatatttcgaccataaaccgattgaaaaagagataactaaaaagtattattggaacttaccattttttttttttttgagtattctactactgcagattaattatcggtttcatataatttaagaatataaatttttagttcatttaaaaaaataatttttacgaaatatcactaaccacctgtgtggcactacctataaaaagtgttaggcacaataacattgttcatattaaaattatacttttaatgcaaaatttaatgtttaattgatatttttattaaaatataaataaattgttatgaaaataattaaaaacatatataaactaaatatactaataaaataataaaaataataaaaatagtataaaagttaataaaaaaaatttaaagggcttttttatttaaatttacccaccataaatttggtacatataaattttgtgttataaccaataaatttagtacaatatttaatgctctattacacctaattattaaagcatcgctatttgatactgcacaatattaaaatgattatgatattttataaatgtttagagcactctctgtttttggttggtcaagttaaagcttttaaaatttatagaagaccattcattaatcttaacatgttctatcacttgctttaatttttctttttcgttactaacacttcttgtgttaggtaatgagtgaggttgtttgtattgaattaaaatcctcattacttaatttgtttgttagacttaagagtgtgaaaacttttcttactctcagagttctctttcctttcttatttttttctttgtcagatatgaaccttggtgctaaagtctcaaccacctatagaaactctcctttgagtaaattttttaatgtgagatgtcatactctataaaaactactgcttctctttcacctttgaaaatattttatttaactatgtttcttattgttgaccaaaattgatataggttgaggttgtacctctttcaagttataaagaaaaagaagagcaatttaggtaccaggtatagaattcacttttaattttatcatatatagtataaatttgtaaatattataagtaaattctcttttcaattaccataattagttgccttattacgtaaatcatttaatatattcaataatgttaaataatctgtaattctctgaatccaataatgaatcctataattgagaaaattaaagaaaaattaaaaatatataattgacaaaatctatatcatggattgaaactacacaggaaggtaatgaagatttgtaatgttctattgccttagaacgtatgataattcattatataattacggcaacaaatacaaatttttatttggttttgttttatgtggaagaggaagaagaaaaagaaattgagatgcttttgaaaactcatctccaaaagttagctatcctctactttttctcaagcaaaacagtcaaaaaaaaatatgcaaatgttgtttatatttctttttctataggatttgtttccatgcttcattcttttcttgctttaacaaatgatcccatataccatgtttctcgagtatccgaattaattactctattat

SEQ ID NO: 18678 - DNA, 1535 bp, Cannabis sativa
cattcttagatgcactaccgggtctgttcgatagtgtccatgagtattccaactcatggagacatatgagtccccttgtggtcctcatatgcctgccatactagtcccattgaccagtagtagctcacttagcaccaaggtgccaagcgtggtggagagctgacaccaggtactccccccttaaagagcattctaagcttttagccttccaccaggagcatatatgatttttactctttagacatatggtcatcaccatatactaaatcacataatttctcaaatctgattgcaccattgtattcatagatccaaataaatggtgaataccaagtccagtcccgatctagacaatattgaagatatttacaaaaatatcattgccaaacaaactgagcatcaacatgccactaacatgcaccaccacttgaccaccccttggccaccttgtgggcattacttagcttgtatcgtgccatcttagatcgtacgttacaccatgcatgccaaagttttagttgattggttctagcataatttgagatataattatgcattcttagaagggaatttaccatatgaataatataaacctcccgtgtaattaataccaacaaacaactaatggctctcttgtgagaacattggacatattcataaagagagtaaaaatgttagttaagagtggtagtttatttaattttggggaaaatattccttgtctttcacagtcttttatttatataagggattttcttcggtattgtccaacacttagtgttgttaagggccccttagttttcttgacatgccagatggtgattggttggaaggttagttagaggtgcgagattttacctcccatagtcgataattcttgtaacggtgttgaggtgcaatggtgaatgggtaggttcgtggtgggggctcaggtggagcgtaaaagtgggggttatttataatttccatgtgttgttgtgtcattacttaaggtggtagcaaacgtaaatctttctttttgtagtaaatattagctggttagacgtaaaataaatgtaatatgtatttgcctcttgcataaggatttttgtttacctcttgtttaggaatttttttataggaattttttgtcgtttcattaaatcttattcatgggttaaattaagccgtattttggttatatttgctattttgtaatttattttaggaatttttaaattaaaaattgagattagtaattggttaaataattgttaaaggcaccccagttgtaaggtagattgatttagcaatacattaatcttttcaataaatataattagattaatatgatgctatgaaatattatatataaattaaatgtgaaactctaatttttggtatcatttcatggttaataattaaatgtgttaaaaattctgaaacatggaaggttgtagtgattggttgattttattgtagtttccattagtcaggtttgatgttgtaacgccctaatgctaaggcacgcaacaatgatttttcaattacagtgc

SEQ ID NO: 18679 - DNA, 9896 bp, Cannabis sativa
  modified_base (51)..(54): a, c, t, g, unknown or other
atagttcgggaggaatttttaacggccaaaaaaattcagggggcacgattnnnnacatgtcaaagtttaggaggaaaaattactaattagcctttatttattcaataacagtcagtactgaacaaaagcaatcaattattgagaaatgagtagcttgatatgttaacatggacaattcagactttttttagctttgcttggtagccacatatgaattcataatttaattttacacataacaaacaatgatattattaagggatttttacaaaaatattaaaatttggacaaaagtttacaattttattgtcacgaatttttttacaaaaatattttttttataaaacaaccgtaaaataataaaactgaataattaaaataacaatgaaataattaaaaaaataatcatggaacaactctaaaaacttaacacaatagacagtataaaatttatacagtatttttgaagaaaaaaatacagtatttatgaaaaaaaaaatctacttcactataaaaaaaagtaaaaaagttggaaatttaatataaaaacccttattattaagggaaacttacaaaaatactggaatttggtttaatttttacaaaaatactgtcacgcgaattttttttcaaaaatactgtgtttttataatacaccagtagaacacaaaacagaacaactcaaaataccagtagaacaattaaaaaataccatcagaacaccagtgaaaacttaacacagtatacggcagtatgaaacttattaaaaaacacagtaaaaaataccacctagcagtatttttgtaaaaaaagagcaaaagttagtatataatgtaaattttccattattaatctaaatgcaaacaattgaaaagacacgtgcaaaattgtggttaggttggaaataggttgaaaaaccaagacaattaaaatggtagagcccagccgaaactacttgatgatacagcccaagctagcccagcccatatggcccatcttacttacatttacgcaccaacaggcacacctatgtaatgtgtcagtacttcgttcatggtgtggtattgtacaaatccaaattcattactataggttgagctgtaagttcctgcatattgtgcttggtctatatttatttatacttttcaaagaaacaaattatgtcatgccatattacaaaaaaatataactcatgttgtatcgtgctaatatttttaaagaatacataccaacacggcccaaaagttcagtattttcgtgctgtgctcggatgcgtgttatgctttactcgtgccggtctatttttcttaaatatgccaacctatttttatattcggacttaaattcgtactttattttttcatatatttcaaaactttaatcatatttagagtaatttgcagcttaaatacctaggtttaactcccaattgcaaataaatatctaagtttaatttttgacggtaataatcattaaattataattctaaatattaagcaaattgccatgtggcaatttctaattggtccaagtcattaaaattttatttttttaaaaaaaaaaattaatttaaatataccaataaaaaaatgacacgagaataatgacttaatatttaaaattagttacttacagaattccaaaaatataacttaggtattaccgccaaaaattaaacttaagtattttttactttattattattaaacaaacaaagagtcgtttacaaacacagtatataagtggaggaataatctccaaccaagtacaagtcttatctaccccaatgcaaattttacaaaacttaaatatttatttgtaactaaaaattaaacttaaatatttatggcgcaaattactctatttatatactttttaaacaatatttacatgatatcatataaaaaataatgtaacataatttgaatatttacttataaattttgatttattttttcgatttgaatcactataatataatgagcttttatttaataggaagttatttataaagtgtcgatatcatttaaaaaatgtgagtaaattagaaagtgggtaaattattctaattttataaaactacaaatcccatctcctcaaaaaggacttctaaataaaaaataaagaaataaaaccttttatctaaacatttttataattgtcaaaaatatatataataataaaaataagctaagccaaacggaatcataaatgccactgaaaatccaacattcaaacaacatgtatctgtgcacatagattgttttaaattttgggtatttgacaaaggttaaaagcaagtataattgcaaaattgaattttaagtctttgataaagtgatgctagtgcctaattgcaatgcccacttgcctattgtttaaaatataaacttgatacttcgcaaaaaaatttcaacacaaattagcagcatgacccatgacccaaaacccatcactctgtacttatcactttcttatattcctatatacaataacaattaacaagactagcaatctaccaccaaagaccaaaatatctatctatcaattcaattattatccaaaataaatacataaagaaaaaaaaacaatgcagaaaaaggaaaaggcaaattgacttgaatcccctgagaaagggaaatcagttctatgtattatgaaattcttctttgagccgcaaccaaacacaactttgaattttctttttcatgattgttataagcatacaatacggaaagaatgagcaactgtaaatggttcttatcatacaggatgtttacatcagaatgcggagtacagcaagaccaacagcagaaattgaaacaagtgtacctatgcagtattttatgacatcatatttggctgcttccaactgggcccttaaaccatgaatttcctgatagttatggacaaatcaacagttaagaacgtcaagagaaagagatatatgtatatatattataggtcatgaaacttaaaacactacaaactcccaatccctacccgatcgagtttgttagtaaggttagtggtctcggcattctgatctgcaagctcttcccttatccttctgcacttgtaaacaatgatatcacattatagccgaaatgttgagcaaaccagaagttacaacattcaaataatgcatttcctatatttcctcaccccctttcgagattcaaatcgagccgctgcccagcagtaactttgtcaatttcatacctgcgtcaaaaatcaatgtcactgaaacatgaaactcagaatagagaaaataaacattcacatggcatgagacgtagatttgcaactccacaaaccagacctcagttcactgcgcatcttctcaatatcattcctcaatttctccgtctcgtgttgcagtaatgagaagtggtgtccctgcaatttttttttcaatacttaaatattcattaagcatatgaaaaaaattataaaggaaagcataagatatccattattttgaacatatttaattgcagctagtattttttgagaaacactttcaacttcttaatcaatccaaaacccaataaaccccaaattgttgtcatttaaaaatggtttattttaaagaaccagacaattgaaatatcgtcgcatataaagaattctcagcaggagactttaacctggtttagaaagtcattggtgatgcattgtgtgaatataatttcaatccagaaaaataaataaaccaaaaagactttagtataataaatgaacagttagcttagactaacctgtgagctctgaacttcagatttgaatttggacaaattggaatcttgaatcatttcaatctaacaacacaaaatagataccaaaccaaggcagaaaaaatttaggcaacaaaacagataaaataaacaagatgaacttctcaaacatttgggcagatgaattgagacaagtgagttttagcatatgaattcaatttacaaaacgcttactttctgcatttcccccttggaaacaaatgagtgagacacattttctaagctatcgtttaacacttctgtaatggcagcggttatggcctcagcttgctgcgagggcacgccctgtccctctaatttcctaacctaagatagaatgcagaatctcattttgttagatacatacacacaagctctgaatcaaatcctttcctccataatttatcttataaaaatagttaatcaacttcccaaaattgaaaccaaatttaaaaaaaaaaaatgtagaaattaccaaagctaacgtatcaactagaaacagacgttttccattagatttcacgagctcagatgccaatctacaatccaaatacctagaccgcaaagctggacaagaaacttccgaagcgccaaaagctcgaaatccagataatccaaaccctgaattgattcctaacggcaccaatcgcttacacgccgcaacagcggccattcgattcttcagttaaaaagacctaacaattcttgaaccgtctccaaaatcctaatcgaaagcatttgcaaaaaccacagaaatcaaataaaaaatgtttactttcctgttttacattcaaaacacatttcctagggaaacaaacggaaagtaaatggaatttgaaggaataaagcaaagaaaatgcttgtctagggatcttacctcgctttcgctatcaatctatatacgtatcgcagaagaataataggaagttgagaatgggttgggttgggttggggtttaaaagagaaggttgattgaggtaaccgccattgatttggattttggagtggtgcttaaactggaaatgaatcgctatatttcgggagagaagaaaaaggtttagacccaaatgaaaatgagagagagaagaaagcaccgcttttatatatgctatgccttgccttgcgttccaagtcctatatctaaattttcactttttatttctgagtttttttaaaaaaaaatttaaattgctacttctgaaataaattgatatattaagattattagatttaaacaattttatgtaattttgtttaattttatcaacaaactccaaacgtgactattatacattatatattaagtttataagcttgttgtttgggttgtttagtctaacttcattggttttcttggtttgagggaggtagaactttttgtttctaccaatgtaaatgcttttgggattttttttgtctaataaaatggatgtgttgcataaaaaaaaaattatattctcagaacattcattatgtgatctatcagttagtgaaattgaactgaattaaaaataactacttaaattcaaaaaccttaatagtttagaagaatttttattaaatttgaaaaaatttaagagaacaaaaattgatacatgctaaaatttaagaagaaaaatcctaaacaaatttatgaaactttctctcttataaattgttaatatctacataagcactactaattctttattaagaaactcaatttataatatgattatagtgaatgaatgaataatttagctttataattatccagggagattagaggtgtttctaattgtaaatattagggtgtagtagatataatgggtatattatattgttcaactagtttattggttgttttataaacatgttgaattcattacaataaattatgtgtacaactcacatcacctgggataatcttgggtctctatcacataatgaaaataaacaatgaatttgtgttgtaataaattgacattgacgtcataataagaaaaaacgacattaaaagttaaaaacgacacaaaaatgaacaaggggctacaccattctgaataaacatcatcatctctttttctctcaattattcgatatggattctgttagtaagccagtaagaggtctgaatccatggtaatcaaaagctgtacaagatagatacatcagtagtgagtagtagtaactgggtaagaattgagcttcggtttacccactctgtgttgactgtttggcggcccggaaaacaggatagtaagtgtccaattcaagaagctctaggatttgctgtgtagcccaaagataggatgaatggccttcaatgagatcagttacatcaacctacaatattgaataggcgatagatcattaaagttcctcatagggagagagaaagagagagagagagagaaggagaagaaatatcttacattctcaattcctgggacatttattggttgaattccagctaatccttgagtaagtaaactgtttcacaatagagagtcagaaaaaatgaaactcaaaagtggaacaataataaaaactacaaaatgccaatctcattagtagtttgagattgagatttgcccaatgaaaccaccaatatttgctaggtaggaacgaagttgactaatacattgtacaaatgagtgttatccttcccccaaaaaaatcattcatttcattcatacctagcacgaaaagcaactccgagtgtccaatcagttgtagcgtaagcattgatgaatcttcccgcaaccatctgcataaaggagcttattataggcaattaaaaagatatacgaaaattaggtctagatagtgtttgagattgaaaaacaccccaccaaaatcagtgcggaaggaaaataaagtacctttctagcagctccccagttctcatctttaatcgaaatcggtgctccaagaagaacaactctttctacgagttcagctatcaacaatcattacattagcatcattctatcagccaggatattttaaagagggatagatgagagttaccatttttttcagtttcagctaaaaactgaagacacttgaaaataacacgtgcaccaagcgagtaacctacaagtgtcacaggcctgaaagattcatggaaggcaaaacaaaaacacagaaattaaatagataaaaacttgatataggagctagcaaactcatttaagttaagactagccaacctgttcccgtgaaccccttttaacaacacttcagcaagcaatcttcctgctttgtccgatctagaaattgtcaaagttttagtaatctagtcaaaaaataaagcacaaacactaacattaacttttaaaagcctaaaatgggaagtttaaatcatatcagcaacagattatcttagcattaatgtccagaaactaggctggtgcaataatctgatggcttctagatcggacaagatgttgaatagaagagaaatgacagttaacatttaatttcatcatgaaatacaactaccaaattccatgatgagctaaaactaagccacaactgaaacccaactcctaaaacaagtctatacgcagctctcacttctagattttggtattttgtacagtaaattcatatttgcatcactggctaaaatcaaaattaatatgaagacttgaattggatgtctctaataggacaaataaaagttttctgtctaacataatcacaaaaatattatgcaatatataaaaataatcgctgaggtggttgacctgtcaaccgcaattgaccacgtgctgtctatgaaatcagtaactgcaagtaaagttgctggccaagccagtgcagccacaagtgtgcttaacacagtcatcattgcaccttgcttcatcaattccaaagcaattcctaccaaaatgtagcacctacgttatcattgtccccatactactaaaaaacagaaaatagcaatgagatttaaatcatttacttgatgtaagccaatcctggattgcagtgctgacggcaattagattcttagactcccactgcagcacatacctgaaaaaattgccacagtgataagaaggaattaagtttcaagtcctattctagatctatctaccatgttcaatgataagttctttattcataataaaaaacatacgagatggataaatttattgatagagcttccctacaaaagatttatatatagcataataataataggcgattgagttgataccctgtttcaacttccaactatgttcacaattctcgcaaacaaaaaaggtccaaacgaaaaaactatgtttctctttgtttctccaatctcccactattttatttttccacccctctagttttcttagttttcaggcaacgtgatcagagaattcttgacattcaggaaaagtgattaaaagcatatatatacctttctgagttatcatcttgtacttcccaaggccttacaaaatcctcctcattaaaaaccaatcctgagatcatgatcccaactgctaacctctggcaaacatagaaattaaagttccaatcaatcaaatttgcatgcacatgaacttttcccgcttttctgttttcgtgttgggaaagaagagagacaaaatataagattgacaaatgaaattatgaggggagattggagaagaaaaaaaatagacatggaagatttccaaataacaaccaattgttctcatcaggtgaaaaacaaaaagggctcggaaaactcactccttgattatgattttcttctcctacgactttgaattcaaactcatcaacactcccagttctcctagccattttgctccctgtaagtccagctccagcagctaggtttagcaagagcatgcaaggaaagccagttagtgttaataattcgatttagactcaggaaagaaaatcctgtcattttgggatgaattatttttcaaaacatatttctccatttttatgttgatattacagcaaaggagcatcttcaccttaccatattataattctaacacatgattttattccactgaacataaatatataactatgttgatattacaaaatataatgagcaaggacaatacagcagtcatatataatgatatgtaaggggaaacaaaaaaaatatctatataaacatgaaatgttgaatttagtaaaagtctcacactaacaattcttctacatgctccaatttctaacaaaaggggagggggaatgatgatgcagtttattatatgggtgttccaaatatgttggaatgacttagttatactttccaatactttctgttacatataataaataagctaaacaaaaatatcatttggaaatccaactatggaaaggttgaggaagtaattaaacaggaaaagaaaaatgattttgagccgtaagtataacaaagtacgaaaattgaaactgaagctgaaaagccccttagaaatgagatcaacttttgagccgtaagtataacaaagtagggaaattgaaactgaagctgaaaaaccccttagaaatgagatcaactattcacctccgaatgatgcagcaacagcaacagatccagccacagttcctgcagcactagctacagcggcaaatcctcctgccccaattactggtaccagagtacccaatgtcggagctaaggcaccaagtcctgcagctattgctggggcagctaaacctgttgaatgaaaaacaccgagcaaaatcaaaaaaccatcaagccatacgaaaatcatttcaaatggaaataccaacatacaaagatataaccagctccataccaccagtaattgccagcaaagttcctccagtcaatgcagccgcaccaattataccacctcgcttccacttggcccattttccttttgatgaatcgggtacttcatttgattcttccttttctttagccaatgccattgcagagcaagcaacaatcgtctcgatagcctcctgatcggagaaagcataaattctgaagttaaaaagaaaacgtaaagaataacaataaccttagtatactgagaaatcatgctcgtacacaaacccacttggaccatacagaaattgaacataagaaacacatgagatgggtgatatatgctgagtgtcaaaatactattccga

SEQ ID NO: 18680 - DNA, 6601 bp, Cannabis sativa
  modified_base (6122)..(6128): a, c, t, g, unknown or other
  modified_base (6264)..(6271): a, c, t, g, unknown or other
tggcatcatttgtctactggggataagtgtcgcatgtcctcttattctggtttgttggttgatgattgtaagatgttgttacaaaccctaacttattttttttgttaaacggtctatgtgatggggttgctaatagccgattagcaagagcattttatcttgtttttgattgtgtgtttcaagggaataatgtatctcttgatgttaaaaatattttgtcatttgatttgataaaattctaccatttattaaaaaaaaatatactatattggtacacaccaaattgcaacattattaatggtgttagattttgaatttataccaaattgatgcataactttatttcttcttcattctaagccgtcttctattttcttaaaaaaataaatcataaattatttattgattcaatatacataattatattataaattagttattatgataaaattaattattattagttattaatattaataaaataaaatgtgaaattttttaaataatatttttatttggtgtgaattattgaagctattgcacccaaagtaataaattttgtatcaaattaatgaaaatataccaaaactattggaaaaagtgttagggtttctccaataaaactgtaaaatctcaaaattaatgaagttttgacataattttagaccgtggcaattttttttaataaccactttataagaaaaataaataaataatttatttataatcaaaacttatattatattaataaaataatataataatgaaatatagattttttagtgttatttttggaattaaaaaaaatagtgttaaaataatgggataacttaaggaatacctcttttttatatccattaatcaaaaataccattatattttatttcattaaaatctacctacttttatgagtgagttgtgtaatatatccttacattccacttaagtatagcacatgatttacattaatctaatgggtataataggaaaatcatttataaaagtatgtatatcttaaaaaatataaaaataaaaataaaaattaaaacaaataaaataaaatggttatacaatataattttttctaaaaataatacactataaatgttatttaacaccaaaggagttgcccttagaaactataaacataaaagccatataaattaaaaatccattaaattcgaagagactaggctagctgtattttttttagatatatttacggtttttctttttaaataaaaataaaaacataccacccccaccccgaataattggtcataagtcattataactactattggtgatctccaacaaatctcttacagctagtacaaataatgattctttttgcaaagaagtacaaataaagatttacatgacaaaatcttgagcaaaattctgagttcagataacaaatgtgatttggaaagaagcttaaaccatgttaaaaaaaataataataaattgcctttaattcgtttcgtaaggggttttagcaattgatcttcattgcttttgcatgaaaattgtccttgtggaatgcatgaacagaaagagccttaacttgtttaccatacaccttaaacccaaaaataaaaccacttattagagacgtcaattcaccatacaactcaaatacaaacacacaaaacatttgccttgaattagttaatagaattcttgatcaacaaaacgtgtggctaacactttatagtctaaccatattaaacgcttcaaatgtgtagccaaattatacgtggaatgaaacgtgaacaaactcaatctttgttgtacatgcaagcatagctgatttaggcatataaatcttcattctcagtccatatattcttacatggaaagtcactcatggaggtgtctatgatgttaaggagtgcttgtttagccatattagttctgtggacattgtggtctcctttgagggccaattcagagccatacaagccccaagtaagtcgacgcagtgaagaagctgtgaaagagagtttcgataggtggataatacaaaatgcacgaaagtacaaaaatgatgcagagagggaacttcgttatttgatttacaatgtgaatcttatgctcattgaccaagtgaattctctagaccttccttacaaacttgcagacaacaaatacgcagacatgacaaacgccgagtttcaagagctcttcttgggttttaaaccattaccggatatccaaacaagctttagatatggggatggtttgaatttgcctgagcaagtggattggagaaagaatggctctgttactccagtcaaggatcaaggccaatgtggtaatgcttttagtctatgcacaattcttgtacttattttacttccttataattggtttcatgatatgttgaccttaaatccaataattatgacatctctttcaatacaggaagttgttgggcattttcttcagtagcagctgttgaaggcatcaaccacatcaaaactgggaaattggtgtctttatcggaacagcagctaatggattgcgatgttacctcagggaaccttggctgcagaggtggattcatggacaaagcatttgaatatatcgaaaggaatggactcaccacagagaaaaattatccttacaaaggacatgatggcctgtgcaaacgcgaaaaggtaaaaaatagaaaagtgacaataagtggttacgaaagagtacctgccaatgatgaaggaaaactacaaactgcagccgctcaccaacctatctctgttgcaattgatgctgctagttctgaatttcaactctattcccatggtgtcttcaccggacaatgtggaaccgaccttaatcatggtgtaacactagtaggatatggtgaagagaatggcaccaagtattggcttgtgaagaattcatggggaactaactggggtgaatctggttacataaagatgaaacgtggttccacaaataagagaggtcaatgtggtattgccatggaagccagctaccctttgaaggattaaaacttgatgaattattagtggatgttggcaaaaataataattataataaacgtaattctatcagatgttactaatgacaacagcaaatggttctgttgtgctaccaaaatcaatagtgtgaaatttacataaagcaaaccaggtaataatagggactaatagaaaaaaacctggatactgttattagtatatatactgaaagcgatgaacagactgacatacgctcatgcttcatgcacgttacatcttgatctaatcaattcctagcactgtatttcaggaggagccctgtttgaataatcaaccttcctagttgttgtgattatggaaaatagatcaacttcttcaaacaactcaatagaataaaagcaaacgaaagtaactgttttacacaataattaagaaaaagaggtcgtttgttttagaccgacctcccccgttatcgaaattaaaaccctcacttgtggcgaaggaaaaccgtaataaacaaaatggcaatataaagcactctttacaatataggacataaaaagaaactctcatctagttctacaacatcagtgtctagtttcttacacaagatatattcactctatttaaatccaaaaacgagatatcctcaaaatatttggacttatacacccacatagctgaccaaaactttattttctcccacagattttttgctgaactttcacatccctcaaaaattttgtaattcctttccacaattaaaaatagagaaatgctaaagaacactcatagtgcctagcacccttgtgaagtgtaatatagctattgatgtaattgaaaattggatcccactaattttactttaataaagattataaaaaatcgctaaccaattataagacgccatctcatagtaatactaagcactcattatcatagtgaagatggcgtacaaaaagagctggtgtggctttcacccgtgctttagtaaataacatgattttaacttagggacacaagtttctttagctataacagcattaacaatgtcatattcaactgaagctttgtttacatgtcattatcctaatttccatgtccccactatattcagtgaccattgcagagaccaagctggaaaacacatacaaaaagctatgactgcaattctgcaaacctttgccgcacatcacatgcaagcttccactcaccaatacttgctaacctttgaacaagcttctgtctcaccccaatatatgggagaaatcctttatttgtcatccctacgaccacctttcctgccaaaatatactcaccacgctctaaacatccttcaaccaccaactcatagctctcaaagccgataacatgacccgccttctccaaaaactcgatcatatcaactgctctccacatttctctgtttgcccgcaatgctgctactacttttactagagttccctgtcttgcagttaatccaactttctggaccattttcttaatcatgtctagtgcctcagctgtcctcctgactttgcacattgcttttattactgtatcataactctctgaatcaggtatacatcctgcttgagccataccctttaagactttaactccctcagtcaactgatcaacagcacatagagatgatatgagatagttgcaagtaccacagtcaggattgtatccaattgatttcatctcctttaagatgtcctggatggagtgaggttcgtggtggtagtgtttcagccacacagaagaaagagcaagatgggtttgggggacagggacacaacctgaacgaagagttcgttggagaacaacaagggaaagagggagaggattggggctttccaaagtgtaggaaagaaggcaagcataagcaatttggggcctggagcgaggtctaataggaatcaatgactgcaaaatttcatcaattatctgtgtcctagacatctgtggaagggcagaaaggaaagaaaaaggatttgggttttggcgagcttgatcaaaggatgtgaggagatcaggaattttctcataggttttcaccatcactgcttgtttgattttctcttggaggaccatttgcattgaagagacggagtatgctgaacgaaattgcaggagagcataagaaatatgtacaagagatgtccaaagttttgtctttcgaatagccatgttttatggctacaagacatattacacttggaaaccaaacttggatggaaatcgacctgtacaataatgttaataaaaactaatgagttcatatatgagagtgaggaatattgtcaaacatgttatgcgcaatcaaaaatatatatacgtctacatagatagaggagacatacagccatacaccattcctgaaatcaatataaatatatataaggtattcccatgatggagcatatataagtaaagctttcagccaatgtgttaagccaaggaaattaaatcagtaggttagaaagaaatgctaataatattcgtaaatctaaaatgaagaagaaacattttcagagtgtatagaccaaagagaaaaacatttttacactatgcgcctgagtggagaacgacgccgagaggaagacagagatgccagcagtcagcagtgtgggggagagccagagaacagagaaagatggaaagactgactacatttttttttctggtaaggggttgtatttttaggctaaatgagaataaactgtcctgaataatttacatttaatatgatttttaagggtgttttacttaagagaaatgctaaaaggcactagtagtgtcaagtaccctcctacgtttatagtttaatataatagtttttggagagtatcgatatccaaccgtaaggcaacacgttttaagggtgctagacaccactggtgcctaatagcaatgttatttacttaagggatattggcggctaaaccacctgaactttacgatttgtaagacttaaccacaaaaatcgaaattttggcggctaaactacctaaaccctagttccgttttgctctgcacacctccgtccaaaaatcaagtgccacggtggattgtccacgtgtacacacttgtacatgtggcaagtttttagtggtccacgtaatattnnnnnnnaaaaataattataaatattaaaaataaatcaaaaaattagaattttttttctttttttacttttttttaatttaaaaaaattaaaaaatatataatttttttttctttttcttcttctttcttcttctttcttctnnnnnnnncttctttcttcttctttttctgcagaaaccctcccagccctcttacttccattatcttttctcctcttggctaggaataggatcgtctacgcccgtttcctcctcaaccagctacaaccatctccacctttcttctccatattcctccacatatgcccttcaatcctctatctcatagtctccaccataagcatagctacactcgtccacaccctaacagtaggcaagctcacactactcagcgagtcactatcgttgaccaccgctctcctcagccgtagactccgcctcagcgccgcctggattttcctaatcacattacaagtgtgc

SEQ ID NO: 18681 - DNA, 10653 bp, Cannabis sativa
tttatgtatatgtgctaaaaaaattgatgaaagcattaaactcgttctgtaaattaaagccttttgttttgaccattccaactttccacttaatttagctgcttagagaaaagtgaatagtggtgttctttattggattcgttatgatatgataataatattcatgttgacattatctcaaaagaaacatcaaatctggtacagtagagtagtactaataactatatagatatggcttttttggtacgtatatttaatatacattgcatcataagtcatgatcaaacattaagtttcaagttatttaattgtaaactctgcaccttaataataatcacttcacaatctataaatagcagagaattacacaagaagaagacaacaaacatgtatgaatatatattcaaaatatttgcttgattgcaatgcctctgatttgatttgaacttcttattatcatctttcttactatatataatccttattaaaacagagtcaaatggtccaagaagaagattacatatgagtattattagtactagtattaatatgattcattgaattgagtcaaatataagggtggttttgaagatgactaatgaagtgagcaaaagagagagagaagtgggtgttcactgttgtgttgtgtctgcagttggttcaatgatttcaactgctggtagtgacccacttgttgttgacaaataaggggacaaaacccaactcttattttttgactttattcaaaaaaattatatatcagaccagcaccagcaccagcaccagcacaagcaccacgcttagttttactattattgctacttctctgttatcttattactaccacacaccattcatcaaaaaagttatttgggcctcctcatcacacatcacactagtattagtattagtattaagtagtaatagcactttcaagctttggattcttttggccttgttgattttatagcataattaaagatgtgaaatgaaactccttaatgggctaatcttagtatatgtattcaattagataagaaataagatgtggtcaactaatgcagctaaggtgaaaaatgagaatttttgggggttgcaactacaacatacacatacacatatagatatatatatatatatgggttattaattaataatgtgattgagacccaccaagaccctgttttcctctttcactgttgatggaccccataatgggagcagacatccttttattctgtcaaatgactccatttgttgtgttgtgttatatatctataagtcgttatcaaagtagtcatattccatttccaccactataaagacttgtgcagcttgtctaattgtgacattgattccaagcttaattactgctcactcactcactcactggtttctatattaattgcaattgtggtcataacctcagtggggtcggtcatatgctcataatagttgtaaagaagatgagaaaattaaatatttaaaataaaaaaaggtgattaatgatttgcatgtgcaatctactaatctagtttacacatttcctttatctgaggatcctagataagtatatatatatataaatttatcaccacaaaatgaggtccaacttttcaaaaattcattaatttacagtgaaatctgtgatcaacccaccttagaaaaatgttgccaaaacaattattaaatttcatatttttccaaaaaaacaaaatgaaattagactatatagtatatatattatcataaggcttaggattgtggaaggactattctaataaagtataaaaccttttttgtcctttacaaaagtgtaccattttcagttcatttttcttcttattctaatattttgccattttgaaccatattattcactgttgtatttgctttcatgggtaatatataatttattcaataacattatttattcagaatggaaactaatcactttcataactgggtccaatgaaatcaatctcaaagacaatttgaaagtgattttttattttttgtcatttattctccaaaaaattgggtccacttgagttaacaatccacttattaaggtttgatgcatgttaattatgatttaaattacttccattgacaataaataataagtctccatcttatcttttagaagaaaattcaacaatgtaaaccttttttatgagaaaatatcctaagagagcaccaccaaagtgcaacctttttcatttatttattcatagataaaactatttatgaaaattattgactaaaatataaccaatccggaactcatataattaaacgagtcataacttaggctaaaacataaaattcaaaaatcaaaataacatttacaatttatttattgactttagtaagtacaaccaaattaagttcaaatcacacaactttaatttcattaatgaacgcaaaaatataacctttaaggaaattggctgagaaccgacaagtgtcatgtttttattaattactaattataattaatattattaatcattttacgtaaaatagagaaacaaaacaatacagtctcatccccatttcacactcatggtgaggtccattaccaaagagctgtaatgtaagacttgtttgtcaagtgaaatagagtaaagctctctctctctctcttctttctctctcttttgttcaatcacagtttaaagtagctatagtaggctatagcttaatatacctaccagagcaacaaactctagattctcttttcttcttttccttgaaaaaaataaaaaagaaaggaaaagttgcaatcttttgaaaaataagaaatgtcagattatccgagtagttaatttcttcagaattggtttagtataattgaatttattaagagagagagagagaggagtgagtggagttgagtaagagttgggagtgatgggtggggtgacttcatccatggcggccaagtttgccttttttccaccaaacccaccttcctacaagttggtcaccgatgaccgtactggtctcttgcttctgagtccttatcctcaccgtgaaaacgttgaggttctcaaattgcccactcgccgtggcactgagatagtcgccatctacattcgtcaccccatggccacatcaactcttctctactctcatggcaacgccgccgatctgggtcagatgtatgagctcttcatcgaattaagcatccatttgagagttaatctcatggggtaagtaatctaccatattggtttcttcaaatttcaaaattttggtatctgggtgttgctaattttgaattcttttgatcttttttgttgtcttgttcactaaagttttaattttggcatctgggttttgcaattttgaattctatatcgttttctttacttaaaagttctagttttggcatctgggtctgattggaatgaagctgggtttttaatttttcttttctctttccatcttcttagaattttggatttcggttatcagtgttagttttaattaccatgtttagtatcaacccttttgtgactgatgattcaaacaagggtggaaaataaattgtaactgcgtaaaggttgtacttttatgagaatttacaagtgaaattgtgtcatgagagcttgctttagatagtacatgtcaaaattttgaaaagaaagtactatggtgctgaggtttgggtccatcaatctaagtccaatcggtgaagagtaatattctactttccatttgcttgtatttagactaatgtaaattatgagtcccttccatgcataaggaacatctgggcttgtgtggtgtaaataaaattcaatgaaaaggacatagcaccctcatatatgtatagttttgtgcaggtatgactattctggatatgggcaatcatctggcaaggtttgttggagatttatttttataactgtttcttttttgaaattaatggaaactttgagctcagagactcatgcatggcccaaaactatgtctgtaattgcagccaagtgaacagaatacatatgctgatattgaagctgcatacaagtgtcttgaagagagttatggtactaggcaagaagatgtgatcctttatggccaatctgttggaagtggcccaactttggaccttgcagctaagctgcctcagttaagagctgttgttcttcatagtccaatattatctggtttaagagtcatgtatcctgtaaagcgtacatactggtttgacatatataaggtaaacataataataccagttggattgtttttttgttcttgattagtatgtgtattatgtattatatgattatttattgtttacttctatgcagaatattgacaaaatcccactagttaactgccctgttcttatcattcatgtaagtataaaaaaacattattttcatgaaaagagttggcaatgatattctaatgttatcattgtttgagctagtttctatgtctttatacagggaacctcagatgaagttgttgattgttcccatggcaaacagctctgggagttgtgtaaagaaaaatatgaacctttatggctcaaggggggaaaccattgtaatttagaacaataccctgagtatatcaggcatctcaaaaagtttatatcaactgttgagaaatctccttcgcagagatacagttctaggagaagcacagaccagtacgagcagcctcgaaagagtacagatatattatttgaagtttcaaggaagagtactgatcgaagagaaaagccgaggcatagtacagacagggctgagaaactgaaaaaccaattcagtaatgttgataaactagaaaaattaaggatttcttttgaccatatggaaaggtctcggagaagtgtggattgccacgagaagtcccggaaaagtattgaccaccaattggagagaggaagaaagagtgttgatcgattggatagaataagaacagggtaataattcttcttataataagtatatgtataattcaaatcaaatctcagctttggtattgtggggaaaaattatttggtctatctttcatctgatgatgatgtaatggtctttcctgctgtgtaatttggcttgtggcagttatataataacaatatggtattatatgagaaaagtttgatggtcataatgatattgatttctacaatagatggaaaagaagaaaataaatgcagcaaaattacaatgaaaatactgatgtgatatggttgttgtgttaagtgaagttagtactagtagtgctttcactcggtaagtttcttgtatatttgtatacacaacaaaagtaacataattgtgttcatgacccttttatttgatttatgtttaactgttctgaactatggaaattgggtgaatagttcatctttagatatcttaatctagtttttctaattgtattcaacttagttttagcatattacattaaacataaaattactcttgaagccataaataagggcatgatgataatgactaaactattagtgttattgaacataatccttatctgtgaactgatattaaatattcaacgtggttattttaataacatttgttgcaagactgaaaattttactcgtatagattgtaccctgtattatcatatccatgaaaagtcagatagggagcgtgaactttggtttgcgcccaaagtgttcaacaatggctgaaggtgggagacgaccaatgcagatctcgtgcacggttgcaaacagtggaaataattcaagccatccccggtggctcaaaacctcgtaaagctctttagcagttgagacaccctgcagagggaaaagtaactataagaaagatggctgcttcaaactcgatagctttttaagcttttcaaaacttgttctaagtttttgagttgcatgattgcattgtcagttcaaattgaaaaccgaaattctgacattattttctcattctgatttgttcaaagtgtagtttctagatatatataaacctgtagtttttggcctcgaagcatctctgcttcaagttcatcaaatgacctgcaaattcgaaaggtagataactaaatagtaagtatttacacttcaaattatcacaagatcatgaatcaagtacttgatattaaccttttccctccattctttgcaaaagcctctgctaccttcctgtttcttcctcccactgtcatagtgtgccacactcaatttggttactaacaaaacacatggaggaagaaaatgaaaaaggaagaattctcttacagcatgttgttatgagatcagctacaccgcagctttcgaaaaatgtactgtctttaacagatgaaaacagcaatttggaaaatgccttcatctctctcagaccaattctcattattgcagcctactcaatttatagaaatgatttagaaatgtaacagagaaaggatatcaaatatgagtttacctttcagttcacaatattgtataccactaaccttggtgttatttcccatctccaatccatcaacaaaacctgctcaaatgcttatttaattcctcatctacataataagcttgagacatgaagataggcacaatattctactacaaacctgctgctatagccacaacatttttcagtgtcccacataattctactccttccacatcttgtacctataattttcacatgcattcaacaaatcaacaactgtaaaacagcaactgtttttcttttcagtgtgttttttcttcagagatatatttattaaaactcacagctgtgaccatgaaatagggagtattgaacagctgaacccatttctctgcaatctctctgttccctttgtatccaactgtagcttcactgaacttttccacagcaatctacaaaagaaatacaaaagacccattagtgaaagatcaggccttataaagctgtatataaataacaagatcaaaacttacctcattagcaatgttagcccccatcaggacacaacaattcagacccaattgctgagaaatgagtgtggagatcatgcatggaccttccatctttacctccattcctttaatcaaagaaatagcttccacatcttctctcaccttcccaacaagacttctgcaaatcccctccataaattgatgtggggtcacaaataccaacatgtttgcatcctttactgcttccccaaaagaaagcccatatagtttaattatatataggttcagaatacagggaaaaaaaaacaaacttgagtagagtaccagcattttcaaggtcagggtcagcaaccacatttctgccaagctttataccaggcaaatatttaacattttcctgatacaaaatcaaaaattcaaaatgttacaacatagaattaactacaaataagaaatgttatcatgacattacattggttcgattgatgacttctgtgagcttttcaccacttggcaatgtttcctcaaatacccacatcctcacttcatctgaaattaattgggttatcattaaaagcaacagaattgtcagaagccaaatcaattcaacaccaattgtagtttctgttcttgtaaaatttgcatgcaaaatagaatagaaaaaaacagattattaattaaataccatggaaagaggggagagtgagggtgttggatgcaatgagcttggaagccacactaccccagttgccgcttccgataactgtgactctggatttggagaaaggcggttgttcatcgttaatgggggttgaagatggttgaacttcttgagctggaggagccatgaatgaagatgaagatggaaggagagaaagaaagaaagaagtaaccggagtagaatggcggtgtggagtatatatatatatatagtaacaatatatatatatataggcggtaagagtgaggggagagagagaaggcggagatggagatggggatggcatacacgtttcgtaagtctctatgcctttcgtgttaaatctggcgatcccctctatgttgctcttactcttacacacacacacatttctaatttaatctctttttttttattatttttttattttttttattttataatttcatttccaaagatttataatttttagttttttttgttctatagaattaaaacttgttgtaccattaattaagcaaataagttaatagaatagcttcaggattagtatggacaaacctcctactagattgatgacttgaaaaataataagtacaacgagctaaataattaatcaacttagttacatatcgtttgataaaaaaaatagaaactttatttaaagaagcaaattgtatgaacaagtacttgataattagttttaacaactacttgagaaagatcttaatgtttgatgcaggtaagaattttgttgagatagactgtttctgttatatttggttgtacataatcagattacatctttgattttgcctcaatgacattatactactaccattctcactaacactgaagcatttacattgatcttaatcatatgtatcgtctaatgcttgttactaacaacaacagagaaagaagtagcttctctatatgttagaaccatatttttgatcatttgtctattgattaagataagcaatagtagtagaaacaactctattagcacttttagtaatttttaacatttctcaaaagtattagtagtttaatactatcacaaggtaatattttgcaaatgattacatttttttcataataattattaaatatgtaagattcgatacttaattatattaatataagtatgatatctcattagagtgttagacacgtaccattaatatcctttggcatttatctaaatttaattcctttcatttctaggatattgttaactatatggtgtctatataacaatattgtaaaatcttcctcaaaaataatactttgtgtaaattttttaaaaattaaaatgctaaatctccattattccataacagtgagtagtgacccatgatatgacaaacaataatatataggctatttataatttttgaccctcaaacatatatgcattattttgcttttaaaattttttagtcaattaaaaatgattattcaactattttcagtgttacaattagatgatcatcatgtcacattaatactacatgtgtaatttaaaataaaaatatatatttttaaagaattattaaactagctaaaaatcaattaaaagataaaaaagaatttgacagtaagataattttaaaaacttttaaattaactttttaaaattaattaatatatacagacgagacaatagtctaaataattatattatatcgttatgtttggccacatatgacaaacgtaataaaaggatcactttacaatattgtgattagttgactgactacatttaagaggctgaaaaatcaaggagtacaataatatataatcataatttataaggcataaaacttttttatttatttatgatcaatggtaaaaatcttaaataacctatgatcataattgggtgggtgtattaattggtacaacaagaaaaatttaggctaaatcaaaattatcttttaataatatctacaatgtatatatatattattaaaagataattttaatttttgaataatttataatgtttaaattgagctttacataatttattgtacttgtacttgcactcatattttttttacaagcgttgaagactataggtgttcatctaattcactccatattatcattacaaaaaatgtaacttttgccagcacatttttgtgctggtaaaatagaatttacttctaatgtgttggcaaatcaacgttggtattagaatttttgccagcataaaatgagaagtagcgtgcgctagcaaaactaacttttcctagtgcgtaaatgcactggtaaaagttagaatttagccacagcaaatgtacactggtaaaactttgacctatttttcaacgcagtttgtgaaatgcactcgtaaaagctacttaattttatcagtgcaatagcgaactatgctggtaaaagtaatatttcttgtctcataggggactagctttggttttggaataattgctcgtgatgataaaggtcttcttattgaaggacgtcatacatattttttccatagccaggtctcacctgaactagcagaaagaattaggatttaagaagtgttgagttggatcaagaaaaaataatggcatactgtgattctttatacaaattgcttgacggtgatacaagtattacagagctcaattaagatgatctctatctttggtcaagtaattaatgattataataaacttttatttgatggttttgagaaatatttctatctttttattaaacgatcaactaatatattggctcataactttactagagcctcgatattatatcctagttgtgttttcaatttagaagatattctaactgacttattaccttgtttggtaactgagattaatgattaataaaatatcaaatttccattcaaaaaaaattgggcacacttatggtgtaattaatttcaaccacccaattaaaaataatatagcttgccttggctaacattactctaatattatgcctttctaaaaaaacattagtatattatctataatatgtatattttgattgaaat

SEQ ID NO: 18682 - DNA, 8580 bp, Cannabis sativa
  modified_base (784)..(784): a, c, t, g, unknown or other
ttaaattactctgtgttagtctatgtagatattaaaaccaaaaaaaaaaaaaactactactttaaaatgtaaatgaaaagaaaaactttttttttataagagtttatttattttatttaattgaaagatataaaaatattaatgggaaacgtaatctcctttgaataaaataggttacctttttagtgaaaaagacttctaagaactaggatatattagttagtcaaatttccaatatttttaattctttatttcacattagttgaatgcattttttttttttgtacattttttaatttatgtgtaatgttaaagatacatttttttattttaattttttttgttataatatttgaaatataatttctttttgtttgatataagtatattttttaagaatataattaaagaattttttatttaaacttttataattgattttttattcatttataaaaatggaaacaattgaaataaaaataatttttataaaatagaaataatataatctcaaaatgaaaacaacataacttcgaaataaaaataatttttataaaaacaaaaaatatataaaaataacttaaaagtaaaaaataaatttaaaataccatatacatagcaatttcccttaaaattagagatttgtacaaaaatattaaattttcggtcaaagtttacaattttactgtcacatgaaattttttacaaaaatactgttttttttataaaacaacctaaacaatcgtaaaataaaaaaaaacaattaaaaacaacagtagaacanctaaaaaacaaccgtaaaacaacattaaaaacttaacacagtacacagtatgaaatttacacaatatttttgaaaaaaattctgtcccataatataaaagtaaaaaaattaaaaatttcagtggtgtaattattcctaaaattaagacaataattggccaaaaaaaaaaatgatctgtctaaaagttagacaatgatgaagttggagtagttaaagaataagtcatcatgcatgtaatgtaataatataagcatgtaaatatttgttgctattttatgtatatattgttacctcttcaacttagttcttacttcatggtaggtaagaacttgacatttggcatatccatgttcatcaacttacttagaccaattatatatagttactctaacaaattgtaatgcatgaaataaatagagataattcatatattgaacttaatatatgatattattattgttatgttcatcattatttgtctatacatattagtttaggtaagataggggagtttttgacttaggaaacataatgacaccaaatatatcttccaacattatgatacatcattcactattgatgacatcaacttattataaaaattgattgatttttaattaattaatattcataggtataattttagtaatttcgacacatatataagttgtagtttcttttttgttacataatgatagtgtataattgatgtagttataggagattttctacaaatttttttaaaaaaattgtaaataatatcaaattaaaatttaagtagtttgttgtaggcgtgttatacacaaatcatcaatctaattatttcaataaactgacatgcaaaaaaaaatatatatgaaattacaatttgtaacaaaaatactaaaaaaatacttatccatagtgattaaaaaaattaattcgtatgctcatatgtataatatgaagctgcattattttattttttaaattttagtatatagtattattatatgtatagttctcttcattgatcttaatgctatcttgtatatatgtgactatatactaattaattatagtgttagtttctaatcttaattagtgcatatgacttcattccaacaacaacatgtttaccataacaaaagtgattaataagccatggcataagtctaccactaaaaaggtactaaattgtttgtttggaattgtgttttattatattatgttgtataggattatttgatacaacaatatatttagcattgacttgtattaatagattgtgtaaacttttcttcaaaaaaaaaaaaataggttgtgtaaacttatagtatctttaccataaacttgaaattagaccccaacctagactcgtacccggatcctggccttagacttgaactcgaatgttggacccaactaaggacctcagaccctggccctagacctcagacttagacgtcgaatcttggccccggaccccaaactccggcctagcacccaagacctggattcaagcccctgaccctgacccagacccagacccagacccagacccagaccctagacccagacccccttcctaactcaaaaactttgtctttgaccatttctaaatattataatagaaattacaagctgatacaaactatttctatgtattaaataatacgattcatattgcttggtcgtaataattaatacaatacaaaactttattcaaacataatgttccttcttatttaatacaatacaacatgtatacaatgtaacaaacaagctctaagtcagcttttcattcgactttttaaaagtcaaccttcttggtttgacctataccttaattggttgatagcctttgtaaaagaactttgcaatgttgtaaatttgtgtcgtgccataaaaaatatgggtcatgtcgtgtcatgctttacttaggttgggccgttttgttatacgaatttaaattcgtattctactttttcacattttattttaacaattaatgagataattactaaaattttgtattttttatagtttcaattatataaaatttattagaactattaaaatttaaatatttactattaaatacttaaattgttattatcactattatcaaatataagatttttaacaaatcgtactttcaaaatagattattcgcatttacgtgctatgtcttttaagtttgtcgtgtcatgttgtatttaagtctatatttttgtattgtgtcatgtcaatttgtatcatcatgtcgtgtcgtgcccagacctatatttttttcgtgcctgatcatactcccactttctaaatttgtactagtttcgtatcatatcaaaaagtccagctcgtatttatagcaacttcaccaaccaatttcttgttacaacttgaggagttgaaagttatgggccacctcacactttccattgtttagtattgggcctagacctttgtccccatagcttgggcttccaagcccacttcaaaacccatgacaaaagcattattaagtgatttggccatgttttcaataagctcagctgagactgattgtgtctaggtataattaattgacataataacatcatcatcaacaacaatatagaaaaaacagaaaaagtgaaacaaaggctaatactaaaagattccctctttattccttcatcatctttagacaattcttatataattgactatatatatagggaaaaggaccccttttgcaattggagtccccatgcatgtctctctctctgaaaagaccagttcattcatcaaagtttgaaacttttttcaaatccaataatggctgccatgcaatgcaagcaagcatcatcttcattaatcatctttttcaacacaaaaaaataataataactaaaccaaaacatcattatctatttaatgatgaggaaagtgaaatcccaagcaaactttttttggtagaaaagacatggtctttatcaatttatcacagccatatactcatttgttatcctatgttttctcaaagctttagtactaagcttttaataatgcttagagcactttcatcagcttctttattctatcatttaaaatatattttcaaaatctcatcatttctattttatttcaaacttttacatcatatcatatatcaatttttttaaaaaaaatacatcactgtaatctattttttttttaattttaaatattttattcattttaaacatataatattaatatttacacatatcctcgtatataaaaagtaaaactaaaatccaaataattaatataatatatttagaacaataaatactattctattaatgtagagtataaatagtaaattttaaagaaactttaaaataataaaaaaaaagttttaaaacttctaatgtaacgtgttttaaatttagttttttaaatattttaaaacatttgatgtgagtatttaaaatcaaatttgatcaatttaactaaactattcttcgttatatatgattaaataattaaatttaaatttagtagacaaattttatggatcaaatttgaattcaaaatactaaatatgcacaacatcaaaataaataccaaataagaacacaccctcaatcatttttattcatgtttatttattatattacattacatgaaatgcattcattgaagtcaaaacataaagactaatgaactcaaaaacaaactaaaacatgtttttcattacacattaaacataattccaaataaaaacatcaaatgcaacaacaacaacaacaacaactaataattaaacaagtccttctccttgatcctttcacaacatgctatctgatcttgaaggcaatcttctaaaaaagttgagaggaacagaaggaagcttatggcgaaatctcgggtgcctcaacatgtaaatccctgtaagaagtaacacaatttggaatggagtaacatacaaaacaatggctgcaatcaaacaaaatgtcacaaacaatgtgcttgctcttggatctctccaactaagaagagactgaaatctttctccttgtgttgccaaatcaccaacaactgtctgaactctgcctgctatgctcctaagtctgtcatatctcatcctaacaatgtctgaaggccttgaagttgggaaagtatcgaattcctcgtctagctcgtcggggtgaacagcatcagcatgtgaaagccttgtgtccatgtgaggagggtgtcttgatctccatctgaagttccaaataccaatcaagaaaaggtaaagaaaaacagttgggagaatcaattcagggtaaagaactagtatgatgaatagtatgtgaattagtatagttgtaatggggtttctccaattgcaaatttgatcaaaccattttccaactgcaattaaaccacttagaactcccatgattctgaagaaattagctttgcttcttctcatactccacatgtgtgaatcaacatcaagcatgtattccacaacctcttttcttagagctggttcagctcttgttagtctcatcgaaacgatttgcatagcttggtgtctcaaactatctagttggattacagacaaggggtgaatgtaatgcattttggggagtaaagggtgtgagtacatatgcaacatgttgattaaagatgagcatgtgaacctcactgctaattgaacttctcccatttttttcacaccagatgaatgcagcactagaagagggtatgaatgagtgtaaactctatcagtttcgagtgttgagaggcgaattctcactttaccaatccttgcatctttcccacttcctcctttctctccatgaatgtgtccattgtcgaaaactccaattgtaatgacagtacaagggtcgaaaacctcccatgtgtactgctcattccatttaggagttgagctatcgacgattgttctagttcgaacccatttctgtccatacttagctacacaatacgcgtctgttgttcctctaccatctttggttttcattggcataagtcccatggcacttatgactcccagctcgaaaatcccaatgctcggtctccacaattgcttagccgtcggccttaaatcgctactataatgtgttgattcatccaaaacatgataccctccatccaaacaaatcctcaaatgaatcctactagcaaatttagtatctttcttctgttccccatctaccattatatacctttcgagattaaaccacctagtgttgacaggcttatgatcaagtctcttctgaacattctgcaatgggatcaaacacttccccaacacttcacctttatcttccacactaagaatcaaaggctcctcaaaaggctcagcaacaacaaacatcaaatcctcattccacatcggattaatactcttactcggtgatgttctagtcctcaaagcctgatttccaagcacagctttgacaaaaacttcagggtacctagtcttatcaccaggctgcaaatcttgagcttcaatcacattcactctaacataccaaagctttggagaaaggtaaacttttgatctaatattagcaacgccatcagtactaaccgacgcagcatcagaatgccaagcttcagggaaagcctcatcagcttgagttcccatccacacagctaacataagctctcctttagccttactacctttcctatcttccaatctataccattgtggcgccaaaggactatctggaggaacccttttggggatatcattaagttcaaacataactctaccaattatgtcatcaatcacaacatccttatctttaacaacaacttctaatgttgaagcttgaattctttctttagagaaagcaaaacattggttccattcggggttcgatttcttctcgaaatacttagtaacacctttgtaattcccaagtttcacttcaacaaaaggatcacaactacctgttacatcttttccaggcaaatctttggctttaacaactctaacataaaggtactgcatttgctcaacaagatcataagtacatgagagcttatctcctgtgattgcgcctgcaccgatcttcggtgaggtctcctttagagcaaaatctacagcctgtggtggcttctgcatattttctcactgtggaaaacagagaaaattaaatttcaaacaaagaaaaagttctcacttttcacactaatctaacaatttagttgcatttactcaaaacaaacatgaaaaatggcagaaatttgaaacaaagattaaagaatcaaaatcaataatagtacattttactaagctttaaaccagattgtgttaacctgcataatccaaaaaagaaaataatgttgtcaaggcatatgatataataaactcattaaagattgtatctttgataagttttcttactgatcataacacactttctcagcaaccaaacataaaagagaaaaataatgcaatataggtagaaaatagttgagagtttaaagtaacttatttcacataatgcatagaatagatctaagtgagaaaaagaaactttcaatgtagcctaaaacaacaagaaacctaaactacttatactaaaagtaacattagttgtttcaagtttcaacaactaaaataagaaacaagaaaaaaaaaaaaaaagtttggcaaaaaataaaaaagaccattttttgaacatataatgaaacacccttttgattaaacttcaccatgagagaaaaaaggaagtacctttggtcactcctaagctattttttcttgaaggtgtaacaatggaaaatcttttttttttttttgaatttgaaattaaaaaaaaatggtaaggagtgggagctgtagagtgtaaagaagagtggagatgagatctgcaaaggactctctcttttaaaaaaaatgaaaaaaaaaaaaaaagacaggaattttattttattttatttttggtttttctagatttttaaccttaaaatattttgtttttattttgtcttttttgtttttcacttctttttgttgtgttgttaaatgttattattatttttattaattaacccgagatgcacacgtgtgaggattgtgttgggttttggcacgtgccctagttggagtcttggaccgttcttgttccaaagagacattcaaagttgtgttctttctattagaaatttaaaataaaaatattatttttataagcattttgtcttaaaaaaaaataatcaatcaatttgtaacactcttaaaggaaaatagatgtatgaaataaaatatatttagatattaaaaaaattaaaataagaaagtaattataatcttattaaaataaaaatatatatgaagaaaataataaaaataattgaaattaactcaaattaatgtaaaaataatagataaatagtcaattttaaaaattactttttaattacttttttatagatattagagtgtttatataaaattttaatataaatataatgcaaaaaaatggagctttcaaatttattgatcataaattattatttttattttaatttttttaataaaaaataacttcattaagaaataaatcgtaagcataaacttattagaaatatcacttttattgaaaatttgatatgaaaaagaataacaagctctaataaaattatgagtcacacgattagcataacgataaacaagtactaaagagactcaacttatacaaataattaactatctacaatcattaacaactaaacaaaaagaaattttatcattaaatggctatgaatagttttatcccctactaaataatccgtctcaagaaaaatcactg

SEQ ID NO: 18683 - DNA, 3578 bp, Cannabis sativa
atgagtgagtggtaaaggaaaaggtgtggagaaatgtctgggaattgaggttaggctcttgctatctttgccattttattcagctaatacacaatatcagatctgcctatttatatctagctattttctcttcactgtctagtctattttctagtagcaatctgttctaactttgctagacagtagtaaattcctatcactctactattctaaatttaaacctcaaagacaattgcacaaacaaaatctcagggaacagttttccaaacagcaaaaagtaaagaggaattaatgttaaacactctaattaatattatatgatgataaattatatttataattatagctagcattgtataaagttatggaaggacattcagacctctggaattgggtacttccatgtttttagagctgtcaatccaattgtactagaactccctccatgatatgcatttctcaatgaaagcatcccaagattaccagtgtagagacgagccatcagcattgctaattcattagcctctgacccagaattcacaaaatacaccacctgcatttaaaagggtctcaaacattcagaatgcagaaaataagaaatccgatacaaatgctaataggatatctatgtctcattagattattgaacaaaataagggtctctttttgggaaacatgtactatttcttatatctagaaggctagaaggagaacataaataaatgccttttttttttctttttgacatatatatatatatgtacatagctagaagagaaaataagtataaatttgacttacttttttacgcaaacccttataaaagtacttttcttattctaaaagccaaaacacaacttaaaagtttagccaactggaaccaaagacaataaaagcatgacataagtgtataaggaggccattctcttgatactctttaattctagaacgcagcaacttaactggagccacagcatgacatgttatatttatctctaaagttaatggaactcttaaaaaagcaaatgcaactaaacatttcaaagcaaggcttgatatatgaccctaatttaatgattttcttttgggaaatatcacattcttcattctaaagtggagtcctgcttgattttaaatactgtggtaagatgtagaattgggataaagaaaaagagaacctttaagtttccaggcatttttgatgctaatgcctcagcaaaatcagttattgcatggtgcaagtatatggttgtggcatgctgaagaagcttggtttgttcaataacagcatttacaatatcaggatgacagtgtccacatgacactgtaactattccagcaaatgcatcaagataccgctttccatcctcatcaaacaaatattgcattttcccctcaacaatattcagctgtaaatatcattttagaaaattagtagcaaaacgattgaaggctcaaaatatatcatagtctgtaatgatccaagtttagcaaccaaaatttaaagtcctacataataacttattaatccaagtcaatataatatacatattatatgaatattcgactaactcatttttccacatagactgaatgtaagctttatttttatttttatttttcttttttgttctttagagaaaaagtacatgagagaaacaaaaacacaatattcatataaacatgcatatataaatatgttttgcatgaaaaatgtacagaaacaaaagaaaaaaagtaaaattaaataaataaaaagttgaaaaaacatacaggcttctgataaaagtggaaaagagaaggacccagaaactttttcctcttctcccaaacttggtcagctcgagggccattgtacggcgttgggtggtagtcgaagggcgggaagaccagggaaggttgagcagaagcaggtgaagaagaagaaaacgcagagaaagtaagtttgtgaagatggtgggcgagcctggggtgagcttctgcaagggctttcttcaaaagctgggtctgtaacgccatggctgttgatggggtgttcagattcagtggaatctggagattgtgattgtgattcgcgaggacccagaaaatgattatttaagcaatttcagggacatctagtgggccccattttagtgttttgaaagctttctgacgtggctttcttctttatttaaaatattgctcgtcttttttaggtgctccatcagctatgactctcctctataatcaacttaaccaaaccatcatctacttatctatacatagattgaagtgggtgacacgatactcactccaaataactttatctcgtttttcttttattagatttataaatgttaaatacccttataattacccaaagttttaagtttgtaagattatctttaatgggatactaaaacattaaatatagtataattttatactatatttactttaatggaacactaaatctatcctcataaatgactttctctaccgtgttccaccaaatttaatgggacactgtagacttgaagaaaaagtaaataattatatatatttagtattaaaatattcttattatattaataaaataataaagaatataaaatttagtataatttttagtgttgtacttagaatttaaaaaaaaaaattagtgttgaaatagtagttttttggtgttgatttaacaccaaatttaagcggcataaactcaatgtttatttttagtggcataagtacacaatgtttatgtttgtaaaactataattttcatctagttttgttggtacaaacttcgttttaaatttattaaaagaacatttcgaagtaactgatactacatgtttctgtctagcctcaatgatataaaatttagactttatatgtggcctgtttaaaaaaataacagagtctgtagtgatgaaattagagaaaaattacagttttacaaacattgagtacttatgctgctaaaagtaaatattaggtttatgccacttacaaacttaaaactttggtacttatgccactatttacccatttataaatattaaacatccatataaaaaaaaaagtttgattatatttcctctatatatttgccgattttttatgaaagtcttttctctctagagccttctagtaggtatgtgatccctctactccatgtgtgagttcttggtcccgtctatggagaatctcgtccaccctgaattgttaagtggtggtttgtccttttcttcttcattctactgtcaattcctttcctctctcttctttaatgagagcatttattgctctgaggcttactattgcctcctttcccatcgaatttatgttggccagattacttaaatcttgcctcctttcccatcgaatttatgttggccagattacttaaatcttgccttttccatttcctttgtttctcatgttactccatcaacccttttcgtcttcttgccgtttaattcagatttctcaaatcgctcttcatcattctacccttggcgattgtaaaatgggggcggacatctaggttcccgaagccatacagaccttcttcatcattgctgctactatggtgg

SEQ ID NO: 18684 - DNA, 5213 bp, Cannabis sativa
ttttacatttttactccaggttaccttctccccaagaactcaggtcagaaggtctgtgtccattaacgcctgaagaatcaatacttatgcttgctgctcttggttttaatcgaaagacacgtatatttgtggcgggctcacaaatatatggtgggaggtcaaggttgattgctttgacaaatttataccccaagttggtcactaaagagaatttgctttcaccgactgaacttgaaccgttcgctaacttctcatctcaggtaacacaatatgctgcaaactcttttcagtgttacagaatgctcagaaactttattttctttcttgctagcaaaaacagtactcaactatggtccttacatgtgttaatttgtttttcttgtaaagttagcagcactggactacataggctgtgctgcagcagatgcatttgctatgacagattcaggtagtcagttatcttctttggtatccggttttcggatatactatggtggagggaaaatggcaacaataaggccaaacaaacgcagactcgcaagcatctttacaaagaactctactattgagtggcgtatatttgagcagagagttaggaaggctgtaagacaaactaaacatgtccaaactaggcctaaaggaaggagtgtttacaggtatccaaggtgtaaagagtgtatgtgcaggacagaataatatgtttttgctttaatactaattgtaaactgttagattaagtatatccattcttaattcgtttttttaatcatttattgtcgattcattataatttctatgattcattaacttggtttggataccatggaactccataccagaaggttactgtttgataaacgctatatttctttgtatcaattttcctcactgttactttcattaatgaaatatatattttcttttatgttaccggatacatggtcttcattatttctatactttaataggataaactgatactggtatccttataatatgatttaaactcccagtcagaacaatttcaccaaagctgaagtcatccattgctttggtcacattaaattcaacaactaactcttggcttccttcggaagctatagaaaaccaaggtggatgcacgcttactgcagtcccattaggaggcaacacagcacagaggtaagtctctggctttctttgtacattcttgacagttcgatgaactgatcgagatccattcaatgctgaaattgttattgaaggcaggttcagattgtctgggtgagtgagcgagccattgcagctttctccagtggcattttttattgtggctggatccattccgggcaatgagcacaagaaagcaatgtaatcttcataccctgcttcatcaaagaaagttactatgatatcctgctatgcttttgcagtgatcataatgtagatttccattgttataaagaaatttgaattaaagtgttacctgaagaaaataccaggccaggatctaaggctcgcttaggcgagactaggccagagccaaactcgaaagcagttgagggatacaaactgccaataccgtatccttcagccattataatccttccattgttttcatcgtacttagtggccgttgtggcaatggcggatgcaatcatggatggtgtccatgaaggattaagctgctttataagtgctgctactccagcaacatgcggggtcgccatgcttgtaccagataatagtgcaaagctgaatcctatattaaagcaagaaatcttgtttgtgagaaagcatgaggcaatagcgccaaaataaaaatgaactagtttctgtttactgctcacccgctagtgttggttccaagacactcatggggctccacgctgcccaaatttggtggccaggggctacaatatcaggctttaaaacatcggctaagtttctatttgcatcaataatatcaggtcctcttgaagagaatctgctaacagtgggttcctggtctttgaagtaagcaactcttccttcccctattaaggcttttgccccaaatctccttacaatatttttctcgtccctatgtgtcctttcttcatagtagtgcaatataacctacattattgccatcattaatatcttgtttaaatatgtaagattcctcaaataatgtacatgcaccttcttacatacctgaacatcagctacatatgggatcaaaatgccagaaacgtcaaagggtataggctcagcaatgaaatcaccgtatgtgggattcgctgcaagaagaaaacctgaaaatcctaaagcttttgccgtgttggtgacggcggtaacagtagaggtcccattgaagaacccctctgagaatgtacatatcacaatactacctttcactacatttggatcaaaagcttcaggatattgacactcatcaatataaggcacagttttgggaaatgacccatctgtcttcacagcatcctttgccaataccagcttgtgtaagaaaaacccatcaccaaaagatggtcctaaatgaaaccaaaaggcaagcggattacaaaaacaatacccataatcacgaactaacaaaaattggcatttaatctacctgacaacccaacccctccaattttttggccattgccaagaagaagagaaccagggtaggttctatatgtgctggctgcggctactcctacggcccaggggctgaaggagactacagtggaagggcctgggcctttgttacctgctgcttggaccacaaaaaccccagctcttcgggcataaagtatggcaatatcaaatatgtttagaaacgtgattgtatcttctggcgcttcatctggtccgaccgatagtgttaggatgtccactccatctactactgccttcatttaaaaaaatataaaacatcacatctcaattctcaattctgatgagaacaatcatataataaagtggtgatgactaatgataacaagtgttgatagctcacttgatcaatggctgaaaccacgtccgttaaagttgctacggttggatacacagctttgtatacagatattctgttaaaaatatgtatatatattatccaattaattattatgacataagaatatatgggatcccaacccaatagcgatttgcccagcatttttgtttttaatctcctttacgtgattacgagttaccatgtgtgtaagtaagagtacaactaaaccccacagcccaaccacatggcaaccaaccagctgcagccatgtggctttattgaatatgaaaatatttattatcacgtcaaatcacagaaggaccattttgtattatgattgttacactacaaaagaaagttaaaaaggattatataatgaaatattgtaccgagcacgaggtgccatcccactggctcgtccataaaagaagccatttacaacaactggaactccagcatttccacccgccgtcgatgccacatgactacaaaacaatagttaataataaccattatatttatataaatagttaatacttcaaaaacatttttcattaactctaattataatacctgccatgtccaagtgcatcaaaaggtgaaagaaaatcaacagaagtgttaagagtagcagccgcttgagccccagctgagaagaatctagcagagactattttaccattgcatgaagtgggagggaaccgaggaccagactcacaagcaccagaaaaatgagaagaaatatttgagataaaagggttaagagggtcataagcaaagcttgggtgtgttgggtcaatgcccgtgtctacaaaaccaatcacaattccatcaccagcgtttctttctcctccttcctctgtccaaactctttgaggtagtcctagaaattcaggggtgtatgttgtcatcattttcgctcctctatctttctctactattcttactcctttagcatatttcagttttgaagcctgcaaatgcaatatataattatatatattatatataaactagctaaccaaaaataggtaaattgaccaatattaatattggggacctgagaaggggtggtatgaatagcaaagccattaagtacgtgcttgaagctgtaaagcttgctgtagcttccactctctaaagtttccattaaaagttggtcgtgggattcaaccaatctctttgcatgggccttcgaaacctcactgaacatatatgcattgaaagctgttataagattatgttggccaaaatagctagacactgtttataatatgaaagcttgaactggattattgttatgctattgagttatccatgtattatattcttgggactaggatctagttattaaggaagaaaagaaaccaaaaagagtgtaagtgaacatatgatcaccattttgtattcacctgtttgggttaacacggttatgtttatgaatatgagaacgttgatcatggaatgcaacggggtctccttccatcataaccatgaacaaagctcgctcttctgctatacatgcagtaattatcaccaaaatgaaaaggacttttagaattgaagaacatgaactgatcatttcaatcatctttaggtgaagtaatagtgtctctatcttggtttctttcatgtttaaatacacgtaagatatatctagtgaacagtggaaaacggcaggtgattaaccacactaatatcgtttagttttcaaaataatcagctttttttggccttaacgttacgatcgagtatgcgtaaacattgtattcctagttcatacaggtccaaagagtggtattttgtgcatttgcacacgctgtacttgccatttgtgaataatcgtgattgatagctttattagtatcttattaaagggccaaaaataaaaacgataattctccccagtcaaggattattaacattcgactataaccttttcagttgtaaatggtaactggcagagaaatttgctgtagtccatggtcaaacatatttagttgaccattgatttcttccgtttgctgaacaagtttacgtattaagagtgaatagtgaattggagacgaaaattattagattaagtcattaagacataaacgatttacacgcaaacacccatatgaaatgcagaaatgctgagtgtttccatggctatatctcgtgccttactcagaagaaaataataaaaattgggcagtagaaagaaaggttaaatttaaattagtat

SEQ ID NO: 18685 - DNA, 7422 bp, Cannabis sativa
aactttctggtgttagattcagatcagaaaaaacatttgattgctctttgttggtcaatatggaatgttaggaatgacaaggtttggaacaacaaattgttaagtgcagaaagtatagttttttcagcaaaaacttaccttaatcaatggcttgctgctcatagttctactgtgatttacccaagtcctggcttcgtgctaggtgatggggctgagcagtggcagccaccaagtgaaaatagcattaaggttaatgttgatggcgctatatttgctgacacgaatcgatttgggattggttttgtggttcgcaatgcacagggctgttaatcgaaggagttaccaagctttatcaagggtcggctacactaaaatttgtggaagctttgggtgttaaggaagctttaagttggatcaaacaaaatcgatcttgccaagttgttcttgaaaccgattgcttaatgtttattcaagccttgcgcagttcaattgatatgatttccatgtttggtcaaatggttaacaattgtaaggctttattgaaagaaagtcaacatgtttctatcctttttgttaggcgatcagctaataaggtggctcataactttgctagagcttccttattctatcttgattgtagttttaatttggggtctgtcccagttgatttgctaccttcgttggtagctgaggttaatggttaatacagttatgattttccattcaaaaaaaaaaaaaaaaaacttacctagacaaactggtttctaacctattaaaatattaataattatttataatattatatatgggtcccaccattataagaaatagtaaggagcatcttatgatgccaagcactacaagaggtgatatattgttattggtgtaaataaatatttgagtcccgcatactttaatttaataaataatataagaaatcgctaatcaatcacattatgatattagacaccataccatatggtaccaaatcaattgtcaatatttgtgtaccatactttacttcttgctctagttcattcatattagtggttatcaaattcagttgagtttcgattgattctatttttttagaactctatacataaaataataatggtatgaatacaaaatatagcgtagagatgcatatgcaaggaaaaattattaaaaagaaaaaggtgctaagacaaagttaaaaaaataagcaagtataagaaatatttcactatatcaaatcaaaacttttgcagtgtctgtacacataatggattctttttacaaaaatgatgtgccaaaactatatataaacataactcaacaaagaatatcgtatgttgttttttttttttgttgttgaaataaaactctacatactaaaaagctctgctgcaagctcatcaaacaacaatttctgaatttccataacaataacataaatctcatctcctaaatctatctttcctaattcacttcccatcactatttcttttgagttcttggccttgtcatactccttttcattgccaacacgtaacttcaagagatcttccatggcatcacgaatggggctcaaccttctcgacacagacatttcacatgttggctcaccaatgcagggcaggataatctccacaagccctgcgtttatgctgtcaaataaaagtagtctgtctgatctcttccaagacatttgatcaccatacttcttttctaaggtctcaaacactgaaacacttattggaaattctagagaatcccagctactaaattcttcaatgttctttccaagaagatttacctcttttagcaattcgataagataagagatgttcctactctcttcaactttaaaatctttcattaaagcatcattatcagtttcatcatcacttgagatcaccatgctagattcttctttgtaccatgtttttgattttggaagttgatgttgtctcttcaagtctaggacaaagaagaaatgagatgtttaagaactaaaatcaaaaccaatcttaatagtgatgttatctagttagcttaccacaaatgtcacccttgactcttcccaggctttcagagctaaatggcagttccagcacagaaattggactaggctgataaggttcctcaaaactcatcacagaatctggttcaatgctagagcaatgtgaaaaaacagaactttcctcttggaatccagttgatgaatcctgcaattgcataaccatttttgaaaatgtcataaatttatgaacattaatatgtatactatgaactatcaaaattttcaagaaataattatcgtgtatcaataactatatagtctacataatgcatctgaaaaagaacaaagcagaagcgtataataaaacttcaaaaaataatcaaataaagaaagggagacaaatacaacttcaaggcactcaaaatagatatgagaaatttgaattagaaaacaactaaaatacaaattaagcacggtaaccaattgtaaagaaaataaaataagacaacaaaggaattttcataaaatggtacttttttacatttttaccggttaaaatttattttctggtcaatttttatcgatttcgtatcacgtgcgttaactctaatctaatccaaataacaatatcgagtcatttgaggttgacttaatttcgatacatgtctattttttatgaccctaacctgcaataattcgtatcgagttaatatcgtgttgtcgtataatgacttaaattgacacgcctaataaaaataacattttcaaaacggcagagaaacaactggctgtaatttttatttttttaaaaaataattaccattcgtaaaaatattaaaaagaaatagtaaatttatatttttgtaaattatttttattatttttgagtatttataaaaatatttgaacaatgaaatactaactagaaaatttactttagtcattatacatttgaagcatcactttcctaagttgaggttaacaagactcatagaaagaggaatcctaacttcatagttaagtaagccaataatatcctttagaaaaaagtgttcttatgatgaaaaaagaaacaaacctgttgagttgaagtatctgtagttaggctagaagaatcatagtcttcttctaagctgatgcacatggtaggttctaattgctcactctcagattctccaaaggatttatttgtgttctcaatctctttgtcaactaccatatcttttataaaatcatgttttattatcatcttactccttgcctgattaaggggcttttctagccccaaataccatctgttgctataagcttcacacttgagttgttgtttggcaaacttactgaggtccagaccaggcttgcaatttctaggccatgaattaggatcttgcaaagcaatcagctcatctggggtactaattctagaagtcgtttcaactttatatttttcactcaacagacacctttcccaaatctgctttttggatctgttgcttaaagttgatttatctgagtactcaaaagaacaagtggaaggaggtgacaaaatctcagattttaatgtaggagtgtcgccaccacttaatcctaagcttgagttcattgttggaaagcctaaattcctccatcttcttattcttttaagctccttaaagatttcccttgaggcagaagatctttgtctaatagattccacactgcactgaacattctttactccaaatctcttagccttcccagatattggtttcaaaacaataattctcatatgcgaagaacttgattcatattgtcttaccaagtcaaatctctcagaacatgtgacactgtcattcttatgtttttgaaaaaaatccaactttgaagaatcatgaaactcttctccaatagcacatttttgaaatgacaaatccaagactccttttctttgacaaacctccttggcttccttcttattcttcttcttcccaacaccaatagaagcaactttcctcaaataattctcagagagtactctctgtggcttatggatagcttccagaggttggtgttcatcaaagcccattagtcttgcaatgacactttgcttaccttccatttctgtaacgctagtataataaaattgtcctcaccttaactcatttgcaccatctaacacattaaaattaacccttctgagttcctaagcttcttctcagtttctgaaaaatcaaacaaaaatttcaataactatcccatgaagatgaagctatatagaaatacaagcgaatcattaagaaataaaattctaaccaaaaattgaatatgcacgtttatataaaccaattaaatatgtatatatatatatatgaaaaaaaaaaggaaacataaaaagattaattacttacttatatgtacatatatagaactcaataatttcaatcaaaagctgtaaagcatcatttatggacttctcccataggaatagataaagtttcacaaaaacaaaataaaacaataaaaccagcaacacagaccaaatcatgaaacattttttttggcatatacaaattacaatcattgaaaagaacaaccagtaagtatcattataacataagaagatgatttcacactctaaaaacctcataacattacaatgatatatgtgttgaacctgaacttatcaacaagacaacaataacaaattccattaaatgtgctgaacttatcaaagcttgagtagtactactactgtaaaagaaaacccattttcgactaacgcttacacaataatatataataataaattttgatttccattaaattaccgccaagaagaaaatcccaggtacaaattcaaaatgggtgaagaaaaacgcttggcttgtgattaatggctccttggatcaatacatatatttgatgccttgatggatcaaattgaaaagtcaaatattatgtattggcataaaagaagggttactaattctgggtctttgattacgaatcaaatataacataatgacacaaagataagttatagatcttggtcaagtaagacttttttttttcttttttctttttttcctctaaaaacaaattgtcataatagtactaatatttaaaaataattaaaatattattggacaaaaattggtcggttaggtggctaacaaaatggtttctaagtttttattatgaaatgagtgttcttttttcttttagataaaaaaaagaaattaaattagaaacatctttgattatattgttcacaataattattatttagtggttctataagagcatcttccgcatgtgttgccaaaatatttagtgggtcaccctacatgatgtggcagaagaaaaatgatagaatgatttttaaatgggcacctgccctataatattttaatatttttgttgatctcattagagatgccctaataatccctacaaaagtacactgaatcattccttattgtttcaatatttataaaaagcttttaggacctgttagtatactttttgaaaaagttaaaagtcatgtatattgacatggatgctgtctctctttgattgagagtctttctttgattgagagtttgatttcatttgtaattctgacttttttctcattgtttttagtcctagtacgtttgtcgtttgtgattaccatggcctctagcagtggcgtattgaagggaattgagaagaactggtccaatatttgcttagatgaagaggaagattttatggcagaacgggaagacgaagaggcgattgagatagattttgacgatcactagtgccttgttgggaagcttctctctagaaaagtctctgactatcaagttttccaaaatatgattgctgacctatggaaacctgtcaaaggaatgtatgtaaaaatctttgaacaaaattgatttttgttccaattctatcacgagattgacattgaccgagtaatcacaggaagcccgtggacttacgatcgtaaacagcttcttattgagaggttgcaggtcggagacaactcacgaacaaaacagatcaatcaccttgacttatgggtccagatacatgatttgaatccgatcctaataatttcaaaggtgtttggcgggagtatttgcgggtgtatgttcgtatgaatatcaatatgccactgaagagaaggatgaagttccgtcgacggggaagagatactttctatgccaattttaaatatgaaagagttcccactttctgttttatatgcggcataatgggacattcagaacgattctgtggaaagctctatgataccctagcatatcagattgacaaaccttacagtatcgacatgcgagctccgtcaagacgacataacttcctggttgcttccccatggttacgaactgcgaaacctgcaacaaccttcggtaccgaagctggcgaagatggcgatcaagaaactaattctttccctcaatcaaaggcaacattcactccacgatcaaatcccaataaagccaagaatattgtcaatgatattccagaagtaaatgaccgtgatttaagggatattgaccttaatgtggtaagagagaagactaaccaaggaatcgtgattcatagtaatgactccacatttatgtatgatgcggatctcactatattggatctcaagagaaaacgtgctgaagttgtttccaaaaatatcccacgtgtgggggaagaagtgatggaccagccaattattccaaataatggtatttttgtaaatgttgatgtcttctcaaaaaatgggtatgtggtgggttctggtttcgaagcccaccaatcatcatgaatatcctaagctggaattgcggtgggcttgggaacccacgagctattcaattcctaagagacattgtgttcaaaagaagcccaatttccttttactttgtgagactatgtgcaagaaggatgtttcagatcgcataaagggtcgtctggaatttgatagctgctttattgtggaagcccaaggcaagaaagggggtttagctctcctttggaaaactgataatgaagcccatctttttggttattctgataaccacattgatattgaagttcatatttctgggtatgcacgatggaggctcactgggtttcatggagagccaaacagagcactacgtgatcgcacttggcaccttctttgtacaattgcttctcagtcgccccttccttggtgcattataggcgacttcaacaatattgctacgcaagaagagaaaagaagtgggtggccctatccttcacatctcattaacggcttctagggtattctttgtgactgctctcttctcgacttgaagcttcatggccatgccttcacctgggagcatggaagaggtacatgttggatattattttaccaagatcttaaatctactcacaagtat

SEQ ID NO: 18686 - DNA, 2161 bp, Cannabis sativa
acagtgtacacacatctgctgagtttttcttttgtttgttgtatgattaaaaagggtccaatcagatggctcatgttaattgtggaaactgccggacaacactcatgtatccatttggagctccatcagtaaaatgtgcagtttgtcagtatgttacaaatgttggtgtaagtccaattgaatcttattaatatttcttgagcattcaccatcatgactttgggtggctgccttcccaccttttactgaaaacacagggtgcttattaattgttccttctctttctcgtcttagaaagtagcccttgaattaatttctacgcatacttctctttcaaacccaaaacaagaacaactttgaagaaacatataaactgcacatattgtttatttttatcatgatttgatatctagacatattggtctcagaacaatatccgtttttagtgtaagcagccaaagagttgttaatactaattagaaaccaataccaaattgttcattttacttcagtttctactgaatatttatagctcatttcagtgtcatctttgaaccatggtggttgttcgcacatgtattttcagttttgacagtccttgttagcttctattctttctctctcaccagtactttttttctatttcagatgggcaatatgagggttccaattcctgtgcacagacccaattctggaacaatgccctccacttcagctgtaagttattaattttcttagattcttacaggacaaaaagtatactataaatgttttctttctcaactgttggtcaccatttatttgcattccacagccaatgcctcattcacaaagccaaactgttgtggttgagaacccaatgtccgtcgacgagagtggcaaactggtcagttttaactattcatttactgagtttccattgatagtgccaatcaagatttgctgacaattttttattttatccaatctcataggtgagcaatgtcgttgttggtgttacaacagaaaagaaataataaaatcaaaattccaggatgtgctgtaagcattatttggctgggagcaatccatatgttttcttatacatatctatatatagacatggaaattggttgtgtatatcttgtgagagattgacagtggctttcattttttcgagaaccttatatcaaaatatgaggtttctgtgattaaactgtgattgttgtccttatgaaaaaaattattagagtccaaaaaagtctttcttttggtcatgtgtgtgattttttatacttagttttcgtatttgattctatatgaatggatgaaaattagaataggttatttattccaagattgcatgtattttaataattttttttcatttgaattaattaataaagaaatttttatattaaaaatataaattgtaattatatttataaaaatactttcataagggttgtgtaacaattttacttttatttatcaaaatattactggcacatacaatattctttgatgacgatgttattattctcacatattactcaattaatttttcttttatattattttgtttttattttcatttacatattcaaacttctatacaatttgaataaaatatttctccaaaaatcatgaaactcacgatctttaaagaagatgtttctccgaaaaaacataaaattcactattttcaactgttgtctatgattcagccacgtgtttcttctagtttttttttctacgattttttatttaaatgacgataattcgctcttcctcttcttcatctccctttgtggaaaaagttacagttacatatcctcaaattttgaaaatggggttgaaatttatttccaaaaaagggaaaggaagaaggaagttagatgattttgttgagctcctttcaagaagaagaaatctaaaatcattaaaggagaaaaaattgagaggagtcctattgctgtttgtaaaaaggggagaatcaggctccttgtttgattgagctttgtattgtatttttttttttttttttgcaatattttaggttttatcgcttctaagtatgatttctgtgcttcaataaatattattttctagtttattttaggtctgttattaagtttcatcgtatttcatattagttggttttagattttttttttttttt

SEQ ID NO: 18687 - DNA, 6217 bp, Cannabis sativa
gagagagagagagagagagtggcttccttccttaaaaattttctattttccttctttgaataaaagagacacaacttgatttatctaaacacatcaactaattactaataaaatcagattataatctcaacacaaagtccactaaaggacaaactacaaagggtaaaaagactactttgccctttcctcaccaaccaacataaaatggcactaaggggtattttgggaaatctaaaatctcgacattcccaatgtctaattatattgcctcgctatactaaaatactaagatgtgattctaatagccaaacaccacgttccaatgttgtcgagcactgaatatgtaaaattatgaaattctatatatggcatataaaatgtatcctgaattcaaataaatcatcataaattaataatttagagttaataaataatttctgtaattaaactctaattatctgctaatttccaaatttaagctaagcggtccttacattagtttttactagacttataaggtttaggccttttaaaacttatgaataaatattctcattttgaaaaaaaaaaatattttgacattgagatagatatataaaattaggactttggaacctttttttgtagaggaaaatatatcaataagctatatataagacaagttaatggtttcttattattcggaatggtaatttagatctaaaaaaaaattgatgacaaaatatgaaaatattttataatgcatttattaatattcattgattattatttaggtttgacatgttattattttattaattatagaatttaaaattatttaatgatatattgacaaccaagcatacttttggatgtttgattatttaattatttaatgtttttatgttaaattttattatttgatttaatttaattaattttatttatccaattaatctaacatttattggatgttagattggatctgttctatctgttaaatgtatttcatatatatttattggtttaatttaagtttatttaacattttagacctagtattttttggatcgaatcgtatccatccaatattttagttccattatgtatgggattggattggatacattcaatcaaaaagagtaaaattttaatgttaatttatatatatatacatatattttacgtataataatataatctaattactcattcaaattaaatgaattagttcaattgtatgtttaatgtattggattttcggacactccatccaacatccgatcagattcagttggatatttaaaaacaacatccaatccgattcgatcataattgaatattcaatatttgggagtcagttatgattaaattagatgatttatgcatgcccctgcctcgtcatgcattcttagttgatttgagattaaatggaattattaatattttttcttgaatttaatataatttagtatgaggaaaccaaaaagtgagttgtccaataatgttataccaatcctatccttcaattggttggtttcacacctttctttctatagggctctacaactacaactataattcacgtgataattcaaagaccataaaataaaagtacacaaacactttttccaatttataaaaccttgttccacaagaaaactatgtccatttacaaaccttttccctattctatcttaagaaattcaaaatagcctctcttttttaatgtaaatttcttttatttagaccaaaataaaaaatgaattaaaaaaaatccaagtccaaagaaactactacacccaatttagatttgaattattaaaaaaaaaaaaacatcatttttatttaaataatttaattaaaaagaaccaactcaaaagttttgacttttattttcatataagaaaagaaaaagtaaaaatccccaattagctttattttattgaacaaaaacttaatttatttgagcattaagggactcacgatttaaagtgatagagtgtaaacttaaaaataagtactcttcatggtatttgaactcttgactaactaaaatgtacatatttttttcccattttttattttaaggaagccattgcccactaatagtatctaacactagaattaaggtaattgtgattaattagtcatatttaataataattattaaaaactcaacatttaattacaccaataatttttaacatatacttttctcaaaatattattttaaagtaatactaaacccaatttatattattttttgaaaatataaggaaaagaaaaaaagaaaaagaaaaaatccaacataatgagaaagaaagatattttttttgagtggaatatctttttattgaataaaatattaattaggtctattaaaaaaaattaaaataaatatataaggaaaaatagaagaagaagagaaagagaaagagtttggtctctttcaaattaacaatatattctctcttctctctgtaatactctctttactcttcttcttcattcgaatatatatctgagaataaagatcgaaactttgggaagaaaaactatggatcatcaagttattatgcagaggccgaagaccaagatcgtctgtactctaggacctgcatcgaggtcggttcccatggttgaaaagcttttaagggctggtatgaatgttgctcgattcaacttctctcatggatctcacgaataccatcaagaaactcttgataatcttcaacaagccatggaaaacactgggatcctctgcgccgtcatgctcgatacaaaggtacaaccttttctggtttttgacatctgggtattttcgatttttatttttgggtatctgggtattggtttttcgatccgtatttttgggaatctgatgggaaatttcagtttgtttgtttgttttgtttagtgtttttgtctttttgtttgttttgtcgtattaatttgcttttttgttttgtaaatggattgtctttgattggttggctatactgttttcaactgataacacttaaattttaaagccttttaagatcagttgatgatgaatttttttggttcctttgattgattttgagtgttggttaatttaaagtttaggggaaaaagaaatgtagtgatcaactgtggaagttgttgtggtccttagatgcaaaatttgtttggtagccctgatttttaagtgggaaaagatatgatttttcaatgattttgtacttatgattatacttacatcaatggttattatgcttgtactttaagaatctcagttgcatctgcaatgtttggttggctattgttttcaactgattaatagatgatgaaatttcaggttcctttgattgattttgtactaaaaaacttactgtttaattgattagtaatgagttgtggttaatctaaaaattaggggaaaaagaaatgtagtcattttgaagttataaagatttgatttttcaatgatttttgtacttgtgattatacttacatcaatggggttattatgtttggtttttttagggtcctgagattagaactgggtttttgaaagatgggaagcctattcaactaaagaagggtaatgagatcacaatatcaactgattatactctcaagggtgatgagagtactatttgtatgagttacaagaaattggctgtggatgtcaagccagggatggttatactatgtgcagatggtacaatttcgttcactgttttgtcatgtgatgtgaagaacggtttgttgaggtgtcggtgtgagaactctgctgttcttggtgagaggaagaatgttaatcttcctggtgttatagttgatcttccaaccttgactgagaaggacaaagaggatattttgcagtggggtgttcctaacaagatcgatatgatcgccctttcttttgttcgtaaaggttctgaccttgttgaggttcgcaagttgctcgggaagcattctaagaatatcatgctcatgtccaaggtactggtttttgctctgtgctcttggacgagttgaatgaaattaagcttttgttctatttattgtggtttaactcggttttttgtgtttggaatttgatattgtgtaggttgagaatcaagaaggtgtggctaactttgatgacatccttgccaattcggatgcatttatggttgcgagaggtgatctcggtatggagattccaattgagaagatttttctggctcagaaagtgatgatttacaagtgcaacattcaagggaaacctgttgttacggccactcagatgttggagtcgatgattaagtcacctcggccaactagggctgaagcaaccgatgttgccaatgctgttcttgatggaactgattgtgttatgcttagtggtgaaacagctgctggagcatatcccgagcttgcagttcgcaccatggctaagatctgtgttgaggcagagaacaccattgattacggtgatgtcttcaagagagttatggaacactctccggttccaatgagtccattggaaagtttggctgccactgctgttaaaacagctaactcatcaaaagcaactctcattctagtcctcaccagaggaggaagcacagccaaactggtggccaagtacagaccgggaatgccaatattgtctgttgttgtccccgagatcaagacagactcattcgattggtcatgcagcgatgaagccccagcaaggcacagcctcatttttcgcggtttggttcctgttttgagtgcagggtcttcaagggcatcttcagctgagacaaccgaagaagcactcgagtttgccattcaacatgccaagtctaagggactctgcaagatcggagactcggtggtagctctacatcgcgatggaactgcttcggtgatcaagatcttgactgtgaagtgagtgattcatcatcagatcacttgaatttttggatgttcacattctcaatttgtttcttttttgtttaaaagaaaaaaggtcttgttttattgctgttggtgaaaagggggttttttttggaggtggtaattaaggcctcggatattttgatttatttttttgttatgaatttctatttcaagatagaaaaaaacattattattagtcacaacccaccatttattatatatatatgctccggtgagactggtgagctgaattaatcttaaattattatttgtcatttttctacttgaaattatctcttctgtgagttacattacaggcaacagtttgtgtttgtgggttgtattcgtgtcgtattaagcttagttagttattaaaggtaaataccaaatttgatccatttcgtattaaaaactaaaactcaaacttaacccgttgaaacaaggacagatcatatttaattttagttaatttatcaactcattaacatgtttaccgtcttttataacacatttatgagcaatttaacatgttttttttttttgatgaaatttaacatgtttatatcatacttaattaaaaaaaaaatataatttacttttaataaatatattaatttaagagtatacatactgcaaaaaaaaaaaaatatataatactctattattgtgttatttttggattaagcatgttaatttaaaaatgacttgtttaataaagaatagttgtgttaacccaaaaataatccaaatctatttaaaacaaatctaaatttatttattttgtgtgaattttaagtagtgttttagacttagattgccacccctaagttacaccttgttatagttaaaacacaaactttgaccaataaaagaaatggacatctagaagacagaatgtcataaaccagtttataatcagagttgaacagatccaacaaaaactttgaccaatgtaaaggaaaaggggaagaaattaccatccacatgaatgtaaatgaccctatcaaaattgagtaaaactatctaaataatattttatattacattgtgagacaaaattgtattattagttaggcagacattgatgaaaaagatgtaatataaagatttttccaatacattgaaagactaagaaaatacttttctatttctttcatcaattcccattggattcattcatgttattactcagatcccccacatgggatttatctcaaagtcttcatctttatgatgataattcacaagctcatcacatttgattgggctccaccatcaaacacaaaatacagactaaaataccaaaaccattttt

SEQ ID NO: 18688 - DNA, 3928 bp, Cannabis sativa
gcgttccaaacgagcccttagtgaatggaattatgcaaacatcactttgtttatcaattaatagataggacgtctattcttatttcttaatcttactatacaagattgaagtgccatcacatgagaatgagattaaagaggcaatgaattttagattttgacaaggggtctctatatgactactaagaaaagctgacaattgaccatatgtatttatttcatatatatttttctttttatctttaaaaataaaataaaaattgaaatatatatgccgttttcaaatgtttgttatttactgttagttgattgggatttcataatttgaatatattttcataaatttataggtacttgttgattgttgtgatagggacatggtgaggtgctaaaactgctgagaattccgaacgtgatggtctctagagctgagttggaatatttggattagttgctcatttatttgggcgttgcatggctcctgagagaagagaattaatgttacacacataagaaaacaatttacaataggttataacaaaaaaaattacaagtgtgcccgacgaccaaaatcaactctcaactgttttcaattacaagaaaaacaaataacaaaaacaataacaagaaaaatacaactaagcaactacaacatcctaactaccctaacgactacattagcttataaaaacctagttcagactaaaaaattctacttgaagcgattacttcccttgcaagttgagtttaaagtgagagagtagcgagagaagctcttcgaagctccattgtaatcaatatacataaaataaaagaaagaaaaaaagttagagtgagatcgagatcgagagaaaaacatagagatattcaaaaaatgaaacactcaaattatcaacaaaaagttttgtggtttgaaatctaaagaatacttgtaattatttgttgattatagtgaagatcaagctactttgaagtaaacttgacagagacatagccttatgtcatcgatctatttttgtttgatattttcaacaataatatctttgatttgtgttttgtatgtgtgaatttgttcttgatttcgtctgtgttttgtgtgaattttggttctgcaaccctagggttatctctgcgagagagaaagagtttcgagattgaatctcgaacattcggagtagattactcaatttttatgattttgtttttcttgcttattgggttggaccgagtctttttcagaccctaactttttatttttaccaattagtcatggatgcatgattagtttgcgaaaatagcataatttatctttgtgtattgtaattgtgtatcttagtgctagatagctgcagatttctacagtggtatcagagctagttttttttcacaagaattaagatacaaattgatacaaataataagcaagactagaaattaataaccaagaacatgagaaagttgatcctcaacaacatgaggaattgaatttgcaagaagatgattttgacattagagatttagtggatgtgccattaaatgttcaacctgagattcttaaccctatctctgatttaaattctgaaagatttaatatgagtaatgttaaaactaatattgaaaaatttcatggttgtggtgattataagatttggaggaagatcaaatccttgctagaacaactgaagttgttaagggtactagaagaacgtattgaatggcctgagaacacatccatgatacaacaagaagaatattgggagacaacaactggaatcatcatcttcaatcttaatggtgcaatcatcagattggtggacaaagaggaaactccaattgggatatggagaaagctggaagagcagttccagcaaaaatttttgaccaacaagatctttcttaaaaaaagaatctttggcttcaagattaacagattaaagaatctagaacaaaatctaggtgagttcctaaagatgcatatagaattggctaactctgggcagaatattaatgaagccctaagtgatgagaactaggctataataatcttaaactcacagccagattcctacagagaagcaaagattgctattaaatatggaagaacattattaaccctagatgaagttagttctgctctaaaatctaagaatcttgaattaaagaatgacaaactaggtagttctaatggagaagtaaattgagcagaggaaggctttatcacaataaaccatgaataacataggaagaagtcatagtataggtcctaataaaggtggaaaacaaggcagatgcaaatcacaatcaagaggatcaaagaatctaaatggttgctaccgttgtggaaagtcatcacacttcaaaagggattgctactattggaagaaaaataacaaaaacaaaccaaatgaacaagatagtgatgcaaactagggagagaattgctttttaaaatagaaagaaaaacagcagcaagccaatctaagtgatggctatgaaagtgaagaagtttatattgttgctcctaattttaagaatgaatggattcttaattcaggttacttttcacatgattaattataaattcttgcttactgactttagttaatctaaaggtgggaagatgactcttggaaataatcaaacatgccatattgaaggttcgggtattgtaaattttagaatatttgattgtgtggtaaggtctttaactggggtaggacttgtacctaactaaaccagaaatttaatatctataagtgtattaaatggccttggtgttgtgagtaagattgaaacatgtactatgaaactaagcaagagttctatgataataatgaaatgctacaaaagaggaagtctttactacttacaaggggaaccagtttcaaattgccacaatataacaacaaactcacctgaggattctaaagctaccctatggcacaaaaagctaggacacatcaataaaagagatttgcaactaatttgtgaacactgtatagacttaaatttaaagttaggacacataagtctaaagatatactcgaatatgttcattcttctgatttatggggtccagaaaaaaaggtatctacacacggggttgtagttatttcttgtctatagttgatgattactctaggaaggtttgggtgtttcttttaaaacataaaaatgatgtttttgttgagttttgggattggaaagttttgattaaaaatataactaacaaaaaggtcaagactttaaggacaaataattgcctggagttttgcaatgatatgtttgacacatattgcggatgtattcaaaggcacatgactgttaggctgacaccacaatagaatgatgtggcagaaagaatgagcaggaaaattttgaacaaggcaaggtgcatgttgtttcaagctggactagctactggtttctagagagaggttgttcttacaatagcatacttgatcaacaaatgtccatcaagtgttgtgaagtttaaaactccagaagagaggtgaactggtaaaccaccaggcttgtcacatttgagagtttatggttgtgcaggttatgcacgtcaaagcattagaaagttagagcgtagagctctaaaatgtgtgtttctcgggtatcctaaaggtactaaaggctaccgattatgggtaagagagaaacctggacttaaaactataaatagtatatatatataatttttaatgaaactatttttgcatgtgtttctactaaccctactattttaagaaatagcactagtactaaccttgtaagaaatacagtaagcttttgtgatagtctataataccccatttatacatacatattggtaattgacatattaagtgtgtgatgcaattgtattattattgttgttgttattaagattacagcgaagtgtcaatgacaacgtgac

SEQ ID NO: 18689 - DNA, 5768 bp, Cannabis sativa
aattaatcaatattcttctacatattagtttcaaaaattcctacaacaaggtaagaaacttgtaacaaattgaagcttatcgtataaatcaacttttctttagtgaatcatgggaaaaggaaaacttgtttaacagcaaaggatttctaaaagcaacatttgtatacaggctcacgttactgagtgtataagatatactaactataacaaaaacataaaaccacaaacattatcaaataaaaggccaaaaggctttccacaattccatgacaactgacctgcaaaatatctttctccctatcatagggacgctgacaggtaacctttagcaaagcagtaatctgcttctcattcaacctcttagagtatcgctgaccctccacaattttacaaacctgtatccaaactgtttattaaaataatgtctacatactacatcccaagtaggacgactaccagtaatcaagttgtttacctccatgggtagataattaggcctctgctggttccctacttgtagacaaggccattgagtatgctgaataacgaaaccataagtttcgtagaaatactcaacaacagatttcatagtgcctctatcatccactgggaaactgaaaaatcaaaagaaaatagaggattggtcaagataattttgtgtgcatcatagcataaacaaactacagagcattgaaatgtctaacaacagcccaaaataattaaagtcatactcacgttaactctcctgttgcttgtgatgtcaaaccagaaatacgatactttctacgcatatttccacgatgggtaacttcaaccttgactccacgcaaagcttttttaatctgtttacacattaagtaaaacaaatattattacatgtcaaatacaaaggagggaagttcttccaaaagatgtaaaatatacattatataaattaataaaaaaaaacaaatctaggattagtaaaaatagagatattcaaaagacctggcacgtgtacaaacttagcattaaaagagactagaaatacagattacagagatactaataatacaaaaaccaatacagaatgagtatctaaccttcacacgatcagaatcagatagcggtcgggcagaaacatcccgattaagaagctgagttacaaactcaattacaggcaatggctcgatgaatgcagtggaggacatgtctggatattggcaaaataacaaataaacatgtaaggaagtatagcagaacctagaagcacatgtatgaagagataactaagaaattatatagattaaatcagtaccaatattaagagaaagccccatctgagtagggcgaatactctgatagaatccacgccaactttccaaaccctcaccaagtggctgtcttctaccaagatcaggagaataaaatgatcgacccacaggacaatacctacaatacagcagaataatggttcacaaaagagctaagaaaaatttatgctggtgaaaacaaatatttaccaataaatatttgttggcatacctagttgtaggcaactcacgcagaacaatatcaaggacttgaagtgcttcctgtggtgcatcagcttgtcttccctgcaaaaaaagtcctaaatggtgcaggtcagcccgtgcagccaatttgataacaactttgaactccctctctctcctgcatgaaaagaataacaattacgtacacaaccaaaaaagaggaacaaaacaaaaacaaatgataagaaaggaatggcgcatttgaaacaaggaatttcaggacaaagaaaataatggtgtctaacctttgtgcaccagttccatcatcctcatcaataagagttattttaaaatccttagaaacaaaaggaagcggcccagcagtatatagactctttcgtccatcataggcagggagccgccttccaagatgagattccttgtacaatctcaccaactgtgccataacagcgcgattgacacctcgtgaagtaacctcaggtgtaattgtgacctaacatatgtcaaaacaagtatgaccaacatgaacataaattaaacaaatagacaaattaaagagcaggagaactcacgtcatactggtgcaaatccttatctgggagttccgcaaagaagtgatttgccttgacaatgcatcttatgccagagctacccttgcctgggcgaagaggaaacctcattgacttacttgagggtggcgcagcttgtatttcttggccagtaggagcatctttctgtaggtcaatctgctcaatctgctgtgccaattgtgaaggctcgggtggcacagaggaagaactcacctctgacgaaagaggctgatgatagaccccagctcgatattgtggtggggttgcttggtgcagctcgggatcttgtgacctggacggtccacctgtaggtcctcccccacggtgaccgcccataccaccagggccacgtccataccctccacgaccaccctgatggggtggcccgccccttccccttccttgatactcttgaggcccaccatactgttgctgttgaggctgtccacgtccacgtccgccaccaccaccgccatagcctccacggcctccctgtggggcccaacccctaccaccttggtaccctccaccactaccaccaccatgctgcatttgagcaccactcctttcagcagggcgttgagagccacgaccaccagcactaccaccaccagattcctgaggttcagagctctcacccccaccaggatgatcagttctcctctttcttaccataatgatgactgcacgcaaacaaataagtaaactaaaaaccctaatggcacagcataaatggaaaaagccacacgcacacgcgcacacacacgcacacaaaagtttctgcacaccagcaaagaggaaaagggaaaaaaaaaaaaaaaaaaaccgaaaagtataatcaaactccattgccatcctccgtacaaagaaacaataacttaggaaaaagtaacaaaaaatatatagagaaaacaataccaaaacacttgtaaacctagaaacaaatgcaacagctttctcagaaaccaaacagcacacacagaataagcctcttaaaaaaatgcacaagatctagcgatctaacactacaaaaaccaacacacgagacgcacaacaaagaacacacataaccaaagaaaaacaacaaactcgaaagcgcaactaagatcagacagaataacagcaatcacggccagaaacagcagatccagtcagaacaatcacagtcaacacttccataatcatgcgataatcgcaataagaaacaaagaaaacgaaaaaaaaaaacaagaacgaacaagaaaccctaaaactactaaatgaaaaagagtatgcaccaacctcagaaaatatctaccggaggaacgccggaaaccgtacaaccaccgctggtccactccctgcttttcttgggggagggcttgagaagagagagaaagagagagagtccagttgagacgaagaggttgagagaattgcaaaacgaaatataaattaataaatatgtaattttcaatctttgggaaaaccccatcaatgtcatccacactctgcttatatatacaaggaaaaaggtaggtcttcgaaaatgacaactctgtccctattctctctcttctttctctctctaactcgtactaccacttacctgtgctgctctctcccttctaaaaaaattaaattaaattaaaatagtaaaatgaagataccttaattatgtcacaaaaatattcgttaatccaacgcaagattattttttttttaattatggtgtcattaatatacaaataaatttttaaagaaattagtttttttttttagaaaattcttgattaagaaggaaggcaaataaataatagtacgatgttgaagttttcttttatttatttttttttcttctaaataatttgttttaatttttaatttataattttctttgcttggactcatccctctcacccacggagtgttgttgactgggtcccacaagtcattatcctattagggttccagcgtggacaatgacgtggcatttgtacgggagtttatattgaggagtgggctgaatataatttttgtgttagtgctgctttggtaaggcattatgtaatttttagcttttacttttttttaatgggagaatacattaataacactattcaactatttattgatgcaaaacaccacactcccaaacgtgatgtcataatcttattatgaaaacaaaagtcaaaaactattttttgcaccagtttgtgtttttatgtcacacctatatattatagtttttttaacaaatcttacaaagttttaataaatagaataatttacaatacacaaattaggttaaaataatctatttcaaacccataaaaaataaaataaacacttatataattaattgttttaattttattttggtattttaaaatttatagaatgtcataaatatatggatacacaataaaaataagaaggaaaaaatgtacggtacaccataaaactttcaaaaactatttattagtattttacaaaacaaaaaaaaaaaattactattgcatttacatgtcaatatcaatatcaatatgtgtgtttgtttgtaggatataattattaggctttcagaattgaattattttatttgatttcattaatttaatttggtgaaaatatgggaccctctggaattttttttctgatagtagctagaatgcgcatgtggaactcttaaatataggaaattcattatgacatgtaaatactgaaaaagttttttattttcaccaaatcaagccgttacaattattattaatttccttttttaaaataaatgcaaattttttaagtaaaataaatgctagttatagactttttttttttttgacatatatagacgtgatttttaaatctttgggattgggaaaaaaatgattcctaccaaatatatctaaaatttatagaaaccataatttctctataaattctcaaaagttaataaatatctcaaccaccatttgcatttagattaatttgttaccactacacatgcaatatttttgttgttggttactttaaatattgaggccatcgactaaccaaaaaagttcatttaaccttaccaatatacattgcccttaaaaaacaagacttttatacattcattaattaacatacatttgaataccattcaaaaaaatatacatttgaataatattttttattaaaataattagaataatttaatataattttccacatattttagtttaataattacaatattaaatcttcaatcactcataaatattataatttaattaaaactgtagaatcattttttaatatgtgtgtttcattttatgtctaaatttaatgttattttttatttattttttatatataattatttgtcaaaaatattattatttttctgatcatttctctttttttagaagttcttaaaagtttctgacccaaaactataattaaactaagaataagatgtacaaaagttttttttacagacttcaccattagagaacttctgagtctcaatctatatttttcttttaacgggaaatattttagtctttagtttttattacacttttgggtcctttgagaagcaacttttaagaatttttaaaatgagaggagagaagaatgatagtattttttataaataattataaaaaaaataaacattaaatatgaacataaa

SEQ ID NO: 18690 - DNA, 5759 bp, Cannabis sativa
tttttaattttctttttatcttacacacattgtgtttccttaagtatttgaacatcataaactaaataaatagtgagcatgtatgcccttaaaaagctctgtggcagttagtgttatttttttctttttacctgttttaactacctctgtttgatcattatcctcaacatttcatccaattgtatactacaactgtttcatttaaatcttaaccgttccctcctcctcttattttgaatttctgcatttctttttccagaaattatgcaacttccctgaaccatctctcatggataacctcttacatgatatgaatcatacactagtccttactgagtctgaacgtgaagtgcttacacttcctgctgatttacattctgatggccattctaattcgagtcatgtcctctatgctcgagttgtttcttctcgggagatcaataggaagacatttcgtattaagatgagtggcttttggaaaggccaacaccctgctactattactgatcatcattcgggccttttccttgtcacctttggatgccttggcgatctcaagaaagttttattgctcgagccatggcacttccagaatcatctcattgtgctctcctcacctgccgcccttcaatcacccacacctgaagcaatgtccctcactcccttttggatacaattacatagactgccatttcttagtaagactaaatccatggctgagtgggctgggaatctcttaggtacctatgtggatgtccatgaagattcattgaatgaaggctggggtccttttttgcgctttcgggctattcttgatatatccaagcccttacttagagggaaaatggtgaaacttaaggattcacttgatgaattttggttagagtttcgatacgaacgattgcctgagttttgttttgaatgtggcatcattgggcatccatttgaatcatgccataaatttctcgagcaaatttacaatggacatgaaccctctcttgcctatggtcctgctatggttggttcccctcttcctgagtctagttatgaccgctatcgaactgattttttcaaaggaggagcgtggcctttaatgacaaggctagcgaagaaatcatttgccactgttattcctgctatatctcaaagatctctccctttgccaccaaatatgactagtagagaatcagcctcgtcctctaatcactcacagtcttgtgttccgccatcatatatttccccatccattccattcactgcaacatccactacctgcaactctactactgatgtagccactgttattccattcccctcatacctgccacatactccaatgattgctacatatcctccaaactctccctctgttcaggtctcaaatcgattgccctttgcccctattacatcgcctatgatgcccccaagctatagtaccattgtctctcccaattccactgctgcattacagccttcttcgcaacattccaaagggaaagccattattatttctgaggatgaaccagaaaatgttaatcccaacaaacagtttaaaagacaaattgactctgaatcacttcgaaatgttctcaaacgttgtcgatcaaattctattcacatccagtcggcttcttcagcaccaactgggttagtttcaactcttaatgtttccagcaccagtactctggattcagatgagtttcagcctgaaagttcagcggatgttgctttgcaacaccgccctcagccatgaatttcgtaagttggaatgcccggggtttggggaacccgagtgcattcaggcatttgcgcttgcttgttcaagagcaagctccctgtgttcttttcattatggaaactaaattacaaagtggtagtatagataagtatcgtaataaattgcacttcccttatggcattgaagttccaaggcaggggcttggaggaggacttatgcttctttggaaatctcatgttactctttccctaaacaattattcacttaatcatattgattgttttttggaaagccaagatgggccatctatgcacttcactggtttttatggccatccgtgtgcttctcaaaggcatctcacttggactttgttgcgtcgatgctatgatatagcacctttatctccttggttagttttaggagattttaatgagatcatttctcatgatgataaggttgggggaccccgtcgaagtgatgctcaaattactgcctttcgagctgtgatagacacatgtacattgactcaaatcccttttgaagggaatagaacaacttggactaataagagtcaaggtcatggcaatgtgaaggaacgtttggactatggttttgttaatcaacattgggtttctactttctcctcaccatctttgcatcacttagacttttatcactcggatcatagagcaatcaaagcaactgtcactgcgctaatggatcaagctgagtttcctgagtttaagtcgcgatttcgttttgaaaaaatttggttgcaagaggaacaatgtgctgagattattcttgccaattggaacagaaacaccagcagccctttaatgcagatcaccactaacatctcaaactgtgcatctaaccttcagaagtggcattattccaactttggtaatctgaggagagacattaaagattcacatactcatgttgcagcactacagaattcttccagtactgaaccgcaccactttgctgctcttaaaaattctgaaatgatacttgatgagttgttagctaaagaggaggactattggcatcaacgggctcgaatttcatggttgaaatcaggtgactcaaacaccaaatttttccatcagcgtgctaatgctagatcagccaataatcgcattaaaaagctcaaagatgctgcgggtaatacacagaccagtgaatctgctttgcttgatgttatatccacatattttcagtccattttcagcactcagggtgatgatgataatgccattgattcaatcttggatgttatccccactacaattgatgcatctgctagaaaaatcatatcagcaccctatacagcagctgatgttcgacaagctttaaattctatgagtgaggataaaagtccgggtttcgacggtatgtcagttatgttcttcagtaattactggcatattgtaggacccttggtaacggaagcagttctagatgtactaaacaatggtgcagatccttctattatcaacaaaacactcatcactctcattcccaaggttaaaaagcctcagctcattactcagtatcgtccaataagtttatgcactgttctctacaaactggtttctaagtcaattgtgctacgacttcagccttttttgccattggtaatctcagagtaccaaagcgcattcatgtctcaacgtttgatcacagataatatcctcattgcttttgagttgctgcactcacttaagaatcgaaaacgaggatcacaggggtatgctgctattaagctagatatgtcaaaagcctttgaccgagtagaatggtcttatcttgcacaaataatgctgaaaatgggttttggatctgtcatggttgatcttattctccgctgtcttcggtcagtctcctattcttttttactgaatggtaaagttcttggagacttaacaccaacccgaggaattcgtcaaggtgatcctctctcgccatacctctttctcatttgtgctgaaggtctctcaagattgctgcagtttaaagaaaatgagggatctatgcacgggttgaaagtgtcacgaactgccccatctgtgtcacatctattttttgctgatgatagtgttctcttttgtcgagctaatcaacaatcagcacgttctataaagcaggtgttggatatctatcatcgagcaagtggtcaggcaattaatccagataaatgtgtgctctctttttctcccaatacacgacttcaaaatcagaattacttccaacagcttctcaacatgcctattcagccttgccatgaagagtaccttggtctaccatctttttctgggcgtgataagacaaagctctttagtggaataactgataaaatttggaagttgttgaatagctggaaggaacaattattttcggctggtggcaaagaagttctcttgaaagctgtggtgcaagctattcctacatatgctatgagctgctttcgtttgccagtcactctgtgtcatcaaattgaaagtatgatggctaatttctggtggggatcgacatcatctggtaattcaattcattggaaaaattggaactcactttgtaaggctaaggttcatggtgggctaggcttccggaatttcattgatttcaaccaagctctcttagctaaacaagcatggcgtctattggaatcacctaattcccttcttagtcggatattgtatcacagatattttctaaatgggaaatttctcactgctggtttgggtgcatgtccttctttaacttggcgaagtatagtttggggtaaagagctacttgtcaaaggacttcgatggagggtgggttctggttcaaccatcaattgtaaaatggatccttggctccctggacatactgatttcactccatttagttttattggatcggataactcacttcttgttgctgatttgatcgatcggcatcgtcagtgggatcttactgctgttaatgctaattttggccaagctgatgtagacagaattctctccattcctcttagcttatttcccacagatgatgctctaatttggaatggtaccaactcgggtaactacactgttaagtcaggctattattttgctacttcctttgcggattctcaagatactggaagtacaaacacatatgacaattggtggactaatttttggaagcttaagttaccctctaagcttcgtatttttgtgtggaaagtgtttcataatgccttgcctgtagcttccgaactacatcgaaaacacattgctgctaccccttactgtcctttgtgtcatatgcaaagagaaactatcacacatgccctctttctctgtaccagggccaaggaggtttggcgcctctctcatctaacactggattttaaactgcctgctatgtctacaactgaggaattcttgctatatgcctcagctcacacttcaacttttgaatttgagcagtttttaacactttgttggagcatctggtttgaacgcaatgctgaatatcatggtaaattgcctaaatctcctgctgcaattttagcatttgctacagcctatcttgataaatatcaatctatccatgctactccttcgattgtttcctctgctactgctccaactgctactcctgtaactcatgcaccagcaacatcaattactgatccgtggatagcacccccagcagggcaatataagcttaatactgatgcagcctatgacaaagcccactgtaaaattggactcggtgctgtattgagggattctgcaggggctattatagctgctttctctaaatctctcacaggcagctacaaacctgaggagatggaagccactgctttgacttatgctctacgttggctactcagtattggtttatccgttaatcaagttgaaacagattcattattggttgttcaaggattaaaagctgtttctacttgtaattctgcctttcatgctctcttaaatgatgtaaactatttagtatcctttttcccacgagcaca

SEQ ID NO: 18691 - DNA, 3989 bp, Cannabis sativa
  modified_base (65)..(85): a, c, t, g, unknown or other
atcatgtgaaccatgcaacaataaatgttatttctgatctatattaataagtaaatctaattatnnnnnnnnnnnnnnnnnnnnnggcataaaacccaacactatatagtatattgtgtatggttcatgagcactttataggatatctaattactgtacaacggtttatagatatttagaaacttaaagaaattaaataatgattaagtaaatgagatggagaaattttacgtggtttagacgctaaatatctctagtccacgagttaatatattggccttttaagctttagaaatgtgttacaaaataagatttatagtgcaaatcctaactctgccagtaaagtaaactttgtaagttcctcttgaggaagaagaaagtttagaaagtattttatgccaagctttttctaggtttttttctgtccctttgtatgagggagtaaaggtatttatataggctagagttcgagtccggacatacatgtgacatgttcaggttttatgtaaaagtaggtccactattagagcaaaatacaaaatatacttgactgtagggcccattaggagatcttcccatgtaggatgacagttcagtacagctcggaccacttttggcacagggcacatgtcgggcagaaatcacacttggcagacaaagtcgttagacgagccgtcgggcaaaatgagtgtacacaaaggaggtgcgcatactaccatgatctgacataggggacaagatctgatcctgtatcatctgaattctaattcttcaataggcttccacgtaccctctggtacgtctggagggttttgtcctttatgtgtttcgggaggctgggaagactttctggtcttaggagatcgttgtgtatcaaagcaaggccctgatcctccactgggcttgggtccattccatatctagcttggccttgcgtgactagggaagcttgagcccaaatttgtatggtgattaccttctaatttgtgtcacgtgtcttccttctaaaaacgtggataacagttatccccaagttttcgggacttatgagtggcggaagcttgtagttttccttctgaatcattttgtgtactttagacacgtggatatttttgaaaaaaaataatctgttcatattttttgtatcgttggatacagaagggtaaaaactttttgcgtattggttaatgatccaacctccatgtcatagtctctagttgctataaattattatcgaaaattgatcgaggagtcaacctcttccatgaacttagtcagtgtcagtgagaagcacatgcacttattggcattctcacttaccctttcctcttgcatcacctgattgtattttgataggtgagtcctagggtctgtctaaccatcatacaactctatttgtggcatcttaaaatttaaggtaataaagcttcgatgatctgcctgacacatggctccggatccttgtcctccaagtctatgagggtttgcttccagactaacttggtcaaggtagcaatttgctcttccaagcccgaactacgtaaaaatttgccatctcattcacttaatcaaattttataatctttcaaatatttaaattagaataaaatatatgtgtttaatccacattaaattgtaccaattgatccacactaattattttcacaattttataaagatattgatattatattattttgaaaaatctccccatttgaagaaaaaattatatctaagagccctcatattataattaaaaaacttatactacacttttagctaccaatggtctcataataaaactcatctttaatttattatcatgtcactaccaattagttggtttgtagtcgatgatgttgaatggatttacttattagagaaaaaaaaaattaggtgatagttgagtcgattagcatttaattaatatatacaattgaaaatgacttaactatatagtgattagtatatatatacatatatttatatacatgctttatattattgtagagaaaatgtgataaagcaaagtagaaatagtgaaagtggattaattcaggaataagaaaaaaacccgtgataggatcttagggctgtacatggggacacaatcatcaaatctgcatggttttatggaccactttcttgagtttatttgtttgttctttgattttattattttttgtttttaagatatatgtaagaaggaaaaagtaaaagaaaattaaaaaaagttagcatttgtcacatataaaggaaagttcatcaatatatacatataggaaagttatttaagaagacatcacaccaatttatattgtgtgacttaaataatttgtggtgtcaaaaattagtttcaaaacaagtatataaaataaacaacttgtgtacactgtcatatttacatgcaagtgacacttaccaaataattttaggataatttacatcacagaaatttttaattttttttaattttttttactgtggggcggaatttatttcaacaatactatgtaaattttatactatgtactgtgttaaattttcagtattatttcacggttggtttttagttgttccactattatttttagttttatgtgattattttgttaaatttttagcccaatttttttcaaccaacaaaggaaaattcacatgaaaatggtctaataaccatagttaaggagtaaaatcctcttaacaaatgtcaagttattctatatatttttaaaattcgttatttaagattaatcaatttcgaaaaacgattataaatagaaaattgtgatagattttcgattggtagtagaattttgtcaattttaaaaatattcccataaagtaaccaattaaatacaacattttaattgttcattactcgtgtttgtaaaattacccacctaatgagttaaacatataatttggacacactcaaattgtacataactatctacacaatgacatgtaattaatataaaccacataattaaaagagatgtaattcaattcctacttaaagttatttatggggtttcagaaataaaaatatttatggcaaaaattaaatatacatcattatctataatttttgggtatgtccatcattcttcaaccaaaatatgaatacaagaaatatctgtttgcagattactattcacatggataattttttattatatttattcaaataataattaagaggaaaatctctctcttattattatttattattttttttaataaaatgttcattgttaaaaattaaagaacaaaaaaaaggggtccaatctccattttcatacattacaactttgatcacaaaagggtttttgggccacttgggcctctttttcgggctatataagataaatgtccagtttttgtttgggattttgggggaaattaattcaagtgattttatggagaaaattacattatatagtatatacccattttactttacatgttttaatttttacttttattacttttatagataatgtccatattatatcctttaggttaatgtaaataatatgctagacttaaataaaaggtgatggtatattggataaccctctcacaaaagtgggtatgtttcaattaaatataatataaaagtattttttatgaaaaaatacaaaaagaggtttcctcaacttattccgattttatggttgttcatggattggctaaatttgcattaggggtggaggaagcttactcttggtagtgtatccctcttatttactctatttattgtaaatgactctcacttttaatttataataaggagttctattctaaataaaaaaaaaataaaaaataaaaaataaaaaaaaattaaacattctttagtcttatggggtgtttggaatgggttaaagttaacaagggaatggtaatgtgaaacattaccttgtttgttttgagactttagccttggaatgttattcccttagtattataactacccttgaggaggg

SEQ ID NO: 18692 - DNA, 3255 bp, Cannabis sativa
cgggaatagaacccctcgcccctctctcacacacacccaaccatttcaaacaactgacaagtaggggcgttgattcactgtatggaaacactaatttattgtattttatgtgactctagactcttgtggagggagccatgctcgggtatactcccaagggaatgcagattgcacaagacacattggtatgttgactaattgcatcttgctaatccagcacaaaaagaaaattgcttccttaattattacttttctttgtcaacggacttggtttgaacttatttgtatggcttcgttcttcaatgtaggtaaatatgaattccaggggatttttcttgagcccaaagatgggaagtgatcttcttcttcaagctgctggcgaaaaggtgtgtcaatagtaacagtctttatttcctgtgtatatactatattctagtgtccccaaaaaaagctacactgatgtaacaacctctcctttctattttcgcagaccggtggctatactattgccaaccttatatgggacatgatgcagacccgcagaatgactcctacatttccagcagtgcaagcatattacaatggcttaaaagtaagtcttttctgttgatcagatcagtttggttttcgtttcatcttctagcaaaatgttgtatgtaaatcttataccactagctggactgagaattcttccactgtcaattaggaaattattaccactaataccaaacaggttgtggtaaatcttgatgattgagtagccgaattgatgttgttttgagttgtgtcatctaaatccatgtgtttcacttgaactaccagactaatttgtaactgtgaattgcagacacgtgagattcctgcagatgatcctcgccttcttcaggttactcgaatttatcagaatcttcgcgaaagatttggacccggacgatcttagctaagtgatttatgaaaaggtgttttttttttctcttcttttttactatgcatctagtttgttgcagagaaacattatcttttcatcctttagcagcaaagagagaaatttcttcccaattgtaacctttaaaaagggaaggcaaaaagttggaagttatgggataaatatatttattgaatttcagttttgttgcattccatgttccaatttttggtcttttaattggaaaaagttgaataaaataattctcaagtatatcactcaactacttgtttgaatttgtttgacattgtttttacttttattttaatcttttaacacttttctttttaagacttattttatttttataaagtggtaaaatcaccattggaagttatttgtgaaaatataagagatcgaaatagggatttctttctttcaccacagaagctcctatcttaagggtatgttaagtcacaccataaaccataggcacccaatttaaatatataatcttattttttttattgttattgtaaaattaatttagtaaaaattatattagtaattattagctatataaagttctcgactagatttttttttttcttttttgggatccatattttctttctccccacccactttactttttctcttaccaaacatacattttctttttttttttatctccatacttttctctcaaaaaatttcactaaatgcaagtatttacataattttataattattatttaaaaaaaaacaaaaaataagtttagtaatctatattgtcgacatcagacaaacaaattccctctaagttaatttattaatttgaaattttgcttcctaaacattaacatgtactaaatcatgacttaattgttgaatttaagaatttttgttcaatttcatttcaatgattgtttatgtacttagttatgctttctagattttagaaggaaaaattttaatgattaaaattaaccaaaaattaatacaaaacaatatctataatagtgaaatgaagtttagtatgaattttgaaattacaatataggaattactaataagtaacacgtacaccttggtatctaagaatctcaccaataagctctcctttaccagacccaacatatctcccacaaatctcaccatctcttataaacaaaaaagtaggaacttcaaccacatccatatccttcaaaaaatccatacagctttcgttttcatccccattcattcttgcaaaaaccacactatcagccatttgcttagacagcttaacaaccgtcggatacaccttaacgcacggtccacaatgcttcaaacccacatcaagcacgattaacttgtgatcgattttatgaccgtcgattaacttctccacgtcatcacggcagtgcagttgcaccacagctgagtggttatcaccgtagtataacacgtctcccatcaacatgtctggaccgattgcttcttcttcgtgaatcttctccatgcttttgtagaatgtaaagtgaggaactttatcgatcttttctctctcgcaaagctctttcgttttatctgattcgtctcccattaccagtatgaaaacgacgtcgctacagctcctgcttagatccaccatgaatgggtagatttggctgctttgtgagctgtcttttttcgcgaattccaccaccactaatttgttcttggctgcctttagggcatcgtcgaattcctctgcgctgtggactttctgtaccttttcgtcgtttaagggctttttcttagctccggaagcggttgtggcttttgaaacgacgaaattggaacggtgggtttgttttagggtttggggtttgggttttggggaggaagagggtagaatgggaaataacaaggagtttgatgaagttgttgttttgggtttgtggagtgtggaaagtgatgaaggtgttactctaggtaacaagtttgttatggttgccattgatgatggagtgaagaaggttacttagtaatggatatttggattttggattgaaagaagaagtgagatttattacaaactgtttcaaaaagaaatctaagtgatgaaacaccacaaccactcgttcggattgtggctcatattttccaacaagattggatttttatagttaaggtaagatttttcatttttcaaggaaaaagacaataaaatatccaaatccattcccctttcccttctttatttattttaattttgtaaggaaaaacattaatttttataaaaatgtatctttggtaagagaaaaaattatgtattaaaaaataaaatatccaaatccattccc

SEQ ID NO: 18693 - DNA, 4501 bp, Cannabis sativa
ttagaattagaagaggtaaagggagcccctaaaattaatgctcgcgagagagtcaataaaatagctactcgttctttatatagggcttggactgtcaacatgaatatggactttagtttcctgggtgcaaatgccaaaaaaatgttagcgcacttcaaacaaactgaaaaggaagagcagggtggtgatgaggagggggaggaagctgaagctgctgaggaagaagatgaagtcatttttaagtctcccactatgtagactttgcataatttatgccaacttttgaacaacgaccctcggttgggacaatatcttgcccttagtggaatttttatttatgtaattaatttatatttttttgttggatggctaacttagcttctttaatcacagttctaactttatgcctttttaatatatatagtccctctatctgttgagaagattttatctaagtatgaattctcatcacttaattatgatccatcgtctataagtagactgaatttaatcgttatataattcttcctttaaattctatatcaagattctttactcattatttcatcaagtaaacggtgaacttgaatattttttaaacaacaaatttccttatggttgttaaacatttttgataaattttataggagtatttaatcgtctattcacaccttagattatgtattattaatcaagattcactgcaggatattgatcataatatctcctatatacacgagtcgtttattaattcagctcgcatttagcttgatgtttgcaagatttttaataatcttttttctttaacaagtgcaattttcattcttattttaaataagatctcaacttttgattttttgtttttctgaactaactttaattaaatattatatcttttgcaatttctttattattatttatataatttcaattatcttatattttgtggatacaataatatgcctccaagtaattctaaagtatactttatgactacttatcataaataaagagacagaaattcattaattaatttggaaatttacataaaatgagcagttataaacatacaatcattggtgatatggtcttaaatgttcgttgttccaagtgttttttaccagcgaggacttggccatgctaatttattaacccctggtgctattacaacttcaacaacgtatggatcttcatattttgggtcaaatactcctactatgggatctcttatgtttgcgaatacctccaatgctgaagagtcttgaccttacaattttattgaagtgtctcgtaatcctttgttgatatgcagtatttctcaatcgtgcttcatcactcatttcatcaagtaaatcaaaggattacttaagtaattcctagttttggttggtcatagaattctgctctatgtgattagacgtttacctcaaccagaagcattgcttcagagtcgaaatcaagtgagaaaggagtatgtcctgtcgctacttttttagtggtttaatgagcctatagtacttgtggtaacttatccacccaccttcctttttatgtgtcaagtttcttccttatagtagggtcttgttaactactttgacttgtccattaggttgaggtcacgagactgatgaaaaacttttaataattttgttcctctcgcagaactcagtgaacaagtcactatcaaatggtgtcctactgtctgatactattgtaatgaaaataccaaagtgacacattaatttttgaccataaagtctaagacttttttcggggtgatcgcgactagtggttcaacctcgatccatttggtaaagtaattgactgccaggactttatactttcctcctcctcactctatgggtaatgaccatactaggtcgatatccaaaattgcgaatgagtagggtgaggtgatcatgggaagctctgttggtagacttctcagaatgtgttaaagtctttggcacttgttgcatctttttacaaactcaggtgtatctttactgattgtggaacaaaatatccttagcagattatcttctttgacaaactttgctaacctgcatggtccctgcaaaagccttcgtgtatttctataatgatactcttggcttttattggtaatacccatcgaattagaggcatagagtatcctctctgatataacttccctttaaaatatctgtatctagatattttatacatgagttttcttgactcattcttttctaaaggaagttcatcgttcaataaatatttaatgactggtgtcatccaagtttgattagtatcaatcatttctacatcttattctttcatcttgtaaatacttggctcctataatttttcaatggaaccatgttgaggttgtcgactttagactttgatgccatcttggccaatgaatcatcattggaaattttttctctgggaattttgtcaattttgaaaccattaaatttttcaaagttttgttgaaatgtttccatatagttggccattttgattccctttgattggtattatccaagtacattattcacttttaattgggaatcacttaagtagtgtattgacttagcatttactacttcgacccttctcaaacttactaaaagtgctttatattgaacctcattatttgaagctgggaactgaaaccttatgtcatagagaaacttgagaccttccggtgagaataggattatgcctgcccacgagccattttcatttgatgagccatcaaaaaataacttcgtgattcttcggtttgggatttccttcgtatctttgttagcatttattcatttaacgaaaaaatctaacagtgcttgccctttgatggctgctcgtgggtgataagttatgtcaagctgtccttattctgttgaccattttgttaattgacatgaggcatctggattagagaaaacatgccttaatggatgattagtcaatacatggattgcgtgtgcttgaaattaacctctcaactttcttgaggaaagaattagaattagtgtgagtttttcaagtaaaggatatcttgattctacacgtagtaaacacttactaacgtagtaaactgattgttgggcttttatatcctctcacactaatgttgcgcttattgcattttctaaaactgacaaatacaaatacaagatctcgccgactaatggttttgaaagcactggtggggttgacaagtattctttaattccatgaaatgccttctcgcatttctctctccattcaaactgcttatttcctcgcaacacattaaaaaattgaagacaattgtctgttgattttgaaatgaagctctttaatgccaccacttttcaggtcaatgattttacctattttggtttctttttttttttttttgaatgaaactattttggtttctttgatgaaggtaaatcgagcaaagcttttatttcttcagggttggcttctattccccttgcattcactatgaaactgagaaactttttagaggaaaccccaaaagaggatttctttgggttgagtttcatgttatatttccttgagatttagaaacactctgcgaggttgacaagatgatcgtggcttctaactaactcaactagcatgtcgtccacatacatctcctcgttgcgaccaatctggtgctcaaacatttcatttacgaggcggtggtagatggcaccttcatttttaaaccaaatggcacgactttatagcaatagagctccatatttgtgatgaatctcgtatactcttgatcagcgacatgcattttaatctagttatatccagagtaggcgtccataaaagacatgagttcatacatagctgttgcatcaacaagttgaccaattcttggtagtggaaagcaatctttcagacaagccttgttaaggtcaaaaaagtcaatgcatgctctctaagttccattagtcttgcgtaccaagactgtgcctgaaacccattatcgataaaatgatcctcgcacaaagtcactagttaataactgttatcccaatttcggcccacctagcgtggcatgtccacatggtcaaaagtagaagacacgtggagaagaactcatcactaacctgtcaagttagtgtcgtgcaccttccaacctaccaggttagtgccatgctccttccaacctaccaagttagtgcttgaaagctttccaaccttctaggttagtgttttccagccttctaacttgccaagttagtgccatgcacatttccatctaccaagttagtgcctaacagccttccaagttaccaagttagtgtcgtgcaccttccaaccttccaggttagttcctgacagccttctaactttccaggttaatgtcgtgcaaccttctaacatgccaggttagtgttgtgccttccaacctaccaggttagtgcctgacagctttccaaccagctaggttagtgtcatgcaactttcaaacctgccaggttaaaaccgtgcagccatc

SEQ ID NO: 18694 - DNA, 8026 bp, Cannabis sativa
  modified_base (590)..(594): a, c, t, g, unknown or other
ccaaaataatttttttttctatggtccactaaaagtcagggccggccctgaagccagatctaccatatcagtgacattaccgacaaaagtccattttgtcacattatgggctgcaaagttacagagtctgaaaatatataaaaaattacaattagtcaaaaagtttgagagcattttacattgaattacatagttaccaattgtagttcccttaagcgtgttgatcattgtctcaaagtcgctctctatcatcacaaacaaatacttcctatagcattttacatcaaaagagagaataagtttattgagaagagttatttgcagttaaaccctttcaactatcattctattttcatttaaccctctaatctcaaattttggtggtaaaaccttccaaactactaagctgttagcaaatttaagataacatctattttccacagttaattgtcaacataaattgtttatttatacactcttgtacatgtaacacatttatattggtacatctaatattattattgaaaaattataaaaaatatttcaaaatttatattatttttttaaaaaaatattttatttttattttnnnnnttttatttaattttaaaataataatattatcttcaaaaaaaataataataatattaagtgtactaatataaacatatcatatgtacaaaaatgtacacataaatagtccataatgacaactaaattgatgaaactttaaatttattaacaattcagtattttagaaaattttacagttaaaaatttaaacttgaaagattaagtactgaaacaatagttaaaaaaatttagcagccaaaatctctattaagaatagggtgaaaaacacaaaagagagaataaattatccacactagagcaagtcaattagacatttggtcgttaaccgagtatttgaccattgaaatgattagatgtaagaaaggatcaagggagataaagaagatttgaggaagagcatgtgaacactagaatattggggttgtttataattcattcatagggtcaaaaaagctgcactatgtaagttcacagcagccttgtcagatttgtcagaagactctgaacttacagctttagatgaaggcttactcatagatgttgaataaacaaaaggaaaatgaaaagagttttagtactgtagctgctgtatacatacataacagatcaagtggagcccaacaaatttctcgaatccaacgggtgtaaagtattaagcaagttgaacttattggaatgattttaatttttaaggacacattcaacagaatataatatatgattattacttattaacccaccctatcatcgcacccaaagaaaagaaaggttatattaattaaacattacaagggttccatcttccatgagagtcaaagctctgacacacatacaacagggattagtttcatgtttaagacacacatgatcaaaagctttatttatttacatcaccatatttgtatgaaatcacatatattcgtggactaaaagctcaccatagcttcattaccttaatgcgcttcatcacctatcatgggaacagattttgcctgaaatatataagaaattcaaaattactaatgagacccccacatgattttattttacagtatgatgatgaactagtttcattgcatacaacttaccagatcacggaacttgagaatgtagaacatttcaagataacgacgggtctcacgcctgtccagcttcgaaacatacttccagaaaccataaacaccagctagagtcataagcctttcagaataaatcttccaagtgtacctaaatatttccaaaatccaggtcagtgaaatatagcaacaacaaggtttttataacattaatatcattaaaatgcattgaacattaacctgtcataaattctttgcaatcccccgtctgaaattttgttccagttgctaatatcctccttgactcgtagaaagaaatccaccagaagtgaagcagcctgatcagggtggtaagggtcaatgtggaaaccagatataccatgctcaataatctccgcaggacctccatggcaagtagcaaaagttggaagaccacatgtcatagcctcaactactgtgagcccaaaagcttcatagaatgcaggctgaaaaaaaatggtagtaaattgggtagtactaaatgacataatttataaaatatctattgaaaagagtctacaagcgctgtgtacctggacaaaaacaccttttgtgtcagctatgtaacgatatagctctccattacgagcacgattggtctgagctgctatccatcgaacttgaccatgcaagttgtagtttttaaatagttcgtgcatcttctcaatttcagagatttcttctctatcgcttgacttcttcacatcaatatagccagctactacaacaaggttcaccagttccctcagtttctcattcttagcatatagctcaaccaatcctgaaatgttcttcaccctgtcaagtcttgccatggagaacactatgggctttgatcggtcatccaacatgccactacatcaaaattaataaaaaaagtaatctcttaactaggtttgtaggaacaaacaatgataactcttaatcatagttatgttcacagaactgaagtataacataatttaaactgcattggtgctgcaatcttttaaacttcatgtcaaatgattagttcacaggttacacatcacagatcaaatactcctatatagaaagttttaaaacagtctaagcaactttgaaaacaattgaatacttacacatgctcatcattctgctctggatcatacaacagcttttctatggtatcgtggaacgctgtaagtctttttcccttttcagagtagggaaaataaattgacatatctgctccaggtgaaacaatattgaactttggatcaaaaacatcaatgccatgaacaactcgatagagcccaggaagagtgaaggaggcgtggctctcatactgaccaacagtatttttcctgaaagatgcacacaaattttaagcaatgctatattaaagatatgcacaaaaatatgaatctatggaaattcttcatgctcccatctctaggcatgtagtgaagcttcagaaacccattatattagtaccagataccataaggcaagtaaatgagagaatccaagtagttagcagagatgattggtaaagataatagtataagactttacacataaaaattatgaaatgtgactggaagacacatacgttcctgcaatctcctggtatgtgctcgtgattataaaatctgcattattcatggctattagatcagcagtgaactgacatgagaaatggtatttctcctcgaacttcttccaatatatatcagaatctgggtatttagtcttctccaatgcatgagcaatggtgcactgcaaaaagtaaacaaaagatgattacataaatttagcctatgattatcaaagaacttgcatattcaaaagaaattatcactaacctgtgtaactcccattttataagccaataaagatgcaacaagattcccatcactgtagtttcctattataaaatctgggattgcttgcaactcagcaccgatttcacttgccacatcctgatcacatgccgaaaaatgattttaatataccgggaaaaaaaaatctaaatttgaagaatagtacctagccaacacaacacacacacccaaagaaaaagaaaaaggacagaaatcagaagacaattctatatgccagttctattgtaaaagaggtaatgattgccaaataatgtggcactgcagacagtggtaacagatatgagggttagcaggaaggtaatggtagcagacgaagatcgttggatatagttagataacaaggaggcataataatgttagcagccaatagcacggagcatggaggaaataaaaaatgtagcttgactgaggtgcagtaattaatagattggatacaaaaacttcaaaaggtggtgtaactggaaaatggaaattcaacataagtagccattttactgtgttaaattatttccatgatgtaaagtttaattgtatttgaacatagaaaaccactaaaataaacacgtgcaggttttgaatcatcaagcagtatcattgctgattaataagtagaatagctttaaaacttcaaatgtcacattacacaaaatttacctcagcaaaggtctctagataaggccagacatcaaatcttgagatccatttacgaagaatacccttttctgatctaaatggaactctcaaaatatgtgtatgttctgttccagtaactctttccagacgctggttacatgtggttcctttcgcatcaggtattaaccttgtcaccttgaatatacaaatggaaataccattgtattaacatagaagaagtttgttgacataaaatcaggtaaaattaactgatacgacactaacgataagaattttaggatcgatatctaatccttgcttctgaattcggagaagcatctctttctctagtgcacgcacttgatccagtatatacaccacctgtgcagcagattcagttaccaaatgtttgtttatggcattatgatcaacaccatcaaaatataaatagtgtaaagcaaaaaaccagatgatgaatcaagaataccaaatagactagagcacaaaaaccgagcaattgcagaaaaggcatcaaccctgttttgtatcacaatgtacataagtaaaaagaaaaagaaaaagaatacctgcccgccagtgtcaggcaaacctaaaacatttgcttgcccaaagtatccatgtggagacaaaatgacaacattaaacaccataggcagtctcccaaggaatgtctccaatgtagaaggatcaggagcctgaagaatatccaaaagaagatgcatcatctccagcactcgttctgcagtgtctccccaacctctctcaaaaccatatccttgtaaactacattgaagtgacaagagccaaaacaatatcaagaaacatcatcaaaaatgataacgaatggttttatgtgacagagaagacgtaattctataaatagtattaaaagcttacacatattcaaactcagtatataacgtttcaggtggaagtttagaaagatagtcctcagccttagctaaagcattttgaaggcgcaaaacgcttgttacacgatcattcaacattaatgcctaaaacaaaatgatcacattatttagtgctatgcaaagtcctcacaacattagattctctaatcagtaacaatttaataaggttagaacttagagatatcacataaacaaaaaacacttacacgtcctttgtatttgtgagcacgaaggaaatcaagtagtggggccaagcagtctttgttccggaacatatttgaagagaggtggcggttgagaaattggacaccattaccaatggatgaagaccggttaggacgaggaaaagatgcattgaatggctcaaagtcgagctcgagaacaaattttccatgatttctatgcatgtgaaaaaccaaaaataaattagtttgaagcaagatacttgtattgtatgggtaaagagccagggaccaaaacccaagcatcaaattttggaggtaaaggatggtacttactgctcgcttactagatcttctttgaagtgaagatactcagcaacagtcaactgttccacactaagctcattgacattaacacgaacgaattcccaaacaccaggtcttgggcgaacagcaatggccacaaatggaggcagaacaatggcttcctgtcaccacaaatttaattcattgaaaaagttaattaagaaataacaacaaaaaatcccattttcattgcttgtaccaaagcaaaagagttcagtaacaactatctgaagacagcccacccctctatttgggaaaatagtgatcttactgagaaacaatcactaaaagagggatctacataaatatataatttaattattaacttcccctataattatgttccaactgattgctgcccacaaaaggttaaacaatcaaaatatgatgcaaaaagggtgacttggattggaagtcacaatcttcaaaaatcgaaacaagtgaggaaaaagaaagaaaaaacagaggggtccatctcaggccgttctgttttcataattaaaataaatagaagagaaagaaaagctcatcgttcaaattaaagaaagatatccagaatccagacctaaaaaaagtgcctctaacatttacaaggttgaaaaagatcagttattaaaggaaaccccttaattgatcaaaaacaattttgttattgaaagtgaacttcattaactctatcttaactaagtaggaccaacttaagtaaccaaaaaaatatatatatcaacatcaaaatctagtcaagttgcgaggagtgaaagattactaacctgggtagatttgatgacttcaccaaaggggccatcgctaagcttctccttcgcttcatcatcagggaagatattgtcaatctcatcaagcaaagtatgcggttgcaaaattccttttccctgtgccacatacctacaaaattcaacacaaacaaacacacagtattacttaaatgcttcacttttgactttcccgaactttctcagtaaccaaacaaaaacaaatgtcaaaatggatagtgattacacctagagaggagagaaacgagttcgttacggtgagcggaaagagtgtcctcaacgcggtctctgatgctaggcaaacgcgtgagcttgggagtcgccatgatcgaagtgtagagagctcttgatttgttaaaacggtgcgtttttatgaaaggataacgtccgatgatcactaaaaactactgaaattagtcacggaaaagctgagaatctgttacttactatataattataacgtggttgtaatgataaaatgttgagaacccaaaatacaaatacaagtgtaataaattataattggtcgaagcagccagcttaaagaataaatttctggaatatccactcaaaaaaaaaaaaaaaagtgcatatatattgtagtttttctcttctttttaattttattaatatttttatatataacagaggttgataatgaggttttatctcaaaattaattggcgatgaatggaataactaattgatctatgggataatattttccaatatcccctcaagatagtggctcacttatattttttttgttttacggctgggagttccatttgttcgcttgcaggtggctaactctttgataggtgtggatcgaaagtccgctagagatatggctctgataccatgttgaaaattatggggttccatctcaaaactaatcgacgatgacacatatgggacaatattctctgataacacatattactttttacacatattttaatttgggttagcatatttttatttaatgttggaacttgatataaagtaatactgtgtgttttgtcagcagatttttagactagcgagcggtgggtgctccatgatttgtaatataacatggaattgtaggtaggtccccttaagttatgatgatgttaattattttacactgtcttttttacaggtgtttggatatgatggactctattagattggagatggtaaataaatatagaaattattaatatatgcacaataattacagtaactcttaatgtgaagtgcaatggtacctattttgctaccgataagactaaatccaatcttatatctctgaataaatatataaataaatagtgaagctgaactgacttggagttggttgtttgttttttttcttttcttttgtgataggagatgaatcgtgtttgaattcgttttgaaaatgacacttggaaggctgacatcaaaactggggattactaataggataccgtggcccaccaccaccaagtttttctattaaaaataggggtgcaaaacggtttcgacacgaacaccaacaat

SEQ ID NO: 18695 - DNA, 1979 bp, Cannabis sativa
atatttgtagccattgaaagaggttgtgtgagagggccccataaatcagaaaccactagctgcaatggttttgaaataacagtatttgaagcttttagaaagggaaatttgtaaatttttccaagacaacaagtagaacatattgaaaactggaaaattttattgcttaaaggaatattagaagattgcaagactttttgttcaattttcttagatgaatgtcctaacatattatgccatagagtgaaatcatattcaacatcagaattacacttgatacaactagatatagtggctctagagttattgagagtgacaacaaaggtgttttttgatgcagaggtgtagctattactaggcttgagttgcttgtgtgacacagattgcttagtttttaaggatccaatgctgaattgagatggttcaaaataatacagtccattcttgtgcctccctatcagcaaagtagagtgagtcaacttgtccttaacataacacgtgtcattatagaattcaaaaaatacattattgtcatgagcaaattttaagacactaattaattttttggttatttcaggatcatgcaataagttgttaaaggcaagaggctgagaagataatttggaaaagagaaaggattgacaaatatattttagagacaaaactgagctatcaccaacatacatatgatcttagccatcatagtcataatagcttgccagattctgagtttgtggagtacaatggtttgtggctcttgaatctgggtaccaactagcatcaacagtgttgttggatgtaacaagattagcttatgtctgtgcttgagtagaaggttgagtgctgcaactagttgagcctagagagggtcctaagaaagcctcgtcaaaatgatagagaaacaatattgaacaatatgtccaaatcgtaagaaaagttgacattgaggcctattattaggatttataccaaatctaccacctctattcatattgaaattacctctgcctccaaagttctgattactgttcaaagctgagtcattagcacgcatgtaatttctattgctgtaatgacctttgtctagtatttgtgaattgcagatttcctcttcttgcatattggtgctgcttgaatcttctgaaggccggccagattagcttctacaactggatcaagatctgaagtggtaaaattagcattgagattgatttctttgttcgacttcttgattcttgattcaaaggccaagagcagagcttctattttcccaattgtataattctcgatcctggtgtttgaggagatgacaaatttatcgtacttactaggaaatcctttaaaaattatagcaacatgatctcaattgctcagtacttcgccaaactgaagctagaagatcgactatttgtttgaattttagtaaataatcatttaagctcaatgaacatttcttcagattttgcaacttggtgcaaaattcaaagatcttggaggaaacttttaaagtgaagtatttttccaaggcattccagctttggtgtgaagtgttgcatccaaccattctggttagcaagctttgtgtcatggatgacagcaaccacaaacccatgagctaattttgcacttcccattcaacataggcaggattgactctattagttgcagcatctccttcattctagaactcacctggaggggattctttgatgcatctcattaattgatttcccttaattattgccaagatttgttattttcacaacaagaagttgtgaatatcgtttaaacggatcgagatattgtgattgaagaacactagatctcgattcacacgttctttattgagagcttgtgatccattggcctctatgctagaagcattgtttctcacggtcgccatgttagctacaagggagcgaaaaatactctgataccatgttaaaccttctagccattgatgaacatcaagaacaaaa

SEQ ID NO: 18696 - DNA, 2619 bp, Cannabis sativa
  modified_base (1494)..(1494): a, c, t, g, unknown or other
ataacgataaatacatgaatatatgtataatgagaatatagagtaaaaggaagagagatcgagagaaagtagcaaagatggtacctttgttggtgtgaaaaaggtttgagaggaaaggaatttcagaaaagttgtcaaattttgtttggtcagcgaaagccctaataacagaaccaatttgggaatttttggcgaatatgggttttggggaagaagaaaactatgagagagaagagattcattcaatctgaaattaccaaaatacccttcacttctttgtgatttttacacctttatttactaactttgtgagtgataaggacaagggtatttagggaagaattggaattggtaattttatgcactttaattaggaaagttatcaagggtcgttctcaatgatatttttggggtaaagacaataaaattaaaggaaatatgtgcaagaaaataacatatcccaaaagattttttttttcatttttttaaataaatctttcatttgttaaacacttcattacaaaataaatttataagtatgaaagaaacatctaaacaaccatatcgatcgtaagtaaacattcactttaccacattataagctaaaaaattatgtattttaaccagaattaatcctatataatttcagatcatgtgtaaaaaataaaaatgttggggtttgaactcaagttccaaattgttacttcaagtacataccaataagctgcaacatacttttagttatatgtgtattatttttcattttataactaactctattttattttattttttgagttgggatcctgagttgtggaagcctaagacagccgcttcactcgtcttatctcaagaccgtttctagctttgacagtaaccaacaaaatatgaataagttcttttacaatgactagaccaattctcaaagtttattttagagtaatttacggtataaatacctaagtttaactcctagttgcaaataaatacccaagtttaattttttgcggcttaagttatatttcaaaaactctataggtacctgaacattaaatgtcaaattattatccacgtgtaattttcttattggtacatataaattatttttttaaaaaaataaaaattcatgacttggaccaattaggaattgccacgtggcaatttacttaatatgtaacaattatgtacctacaaaaatctataaatataatttaattattattgccgtcaaaaattaaacttaggtatttatttgcaactaggagttaaacttaagtatttatgccgcaaatcttttttattttatttcgatattcagcccaatttttttatgtacaactatttataatttttttttaaaattctaaataatttattatattgaaaataagatttaaataattgttatttgtataacagttttatttatattctgtttaaaaccttaattttaatattattttgattttttaaaaaattaataataataataanaataataataataaaataaaacaccatttcaaaatattaaaataagtaagatgtctactataacaactctttttgggtgcacatgagacttacccaatcaaactttgttttatgaattaaaacactacaaacagtattgaccattttttaattcttgtcatctgtgaatatttgtaaaaatgaatcatttattacgtaaatacataaatttaattttcagttgcagataaataactaaatttaatttttgacggtacttaagttatattttttaaattttttttaagtttcaagttattatcctcttgttattttcttatggctaattaggatttttgctccctcgtattttgatgtataccaaattatgtcccctgaacttttaaagccgttaaaaattatacatgagttattgagattgttaaatttaaaaatttttatctaattttagtaaggaaagtctaacacgaatcaaagttcattgggcaaaatttggtacatgtcaaaatttgagaggcatgatttggtatatatcaaagtctgaggagcataatttattacatggacaatcactaaattagtaaaaatgaataaaattagacaaaagtcctttaatccaacaatcataatagtgcagggggaattttcacggcaaaaaaaattcatagagcatgattaagtacatgccaaaaaagtaaaaacttgatgtcaggaaccaatcagtgactgccagatgactattgacttcacacttaatagtcaagtacttacggaagttttaaaaatataacttagttattattattctacaattagaagttcaatttacatatttatcgcaaattacttatattatgaattgaaaacattacaaacagtaatatgataattttttaattcttgccatttgtgggtatttatgaaaaatatccattgctattattgggcctagcttattgggcttagcttattgggctttaatccaaacaaaacccactcaagcatataaaaaccctaatctccctgaaccgaaaccctagcaacctcttcttcttcttcacacaatcatcatcgttatctctctctctctctagccaaattaagatgcagaacgacgaaggagtg

SEQ ID NO: 18697 - DNA, 2359 bp, Cannabis sativa
aatgattgattgatttttagagagtcggataaccactccccttactaactcgtcaagacatttaattattcaagtcaaaccctcccagtgacacgacaatacccacttgtcgttttataccacatttggaaaagagcatgcaccaatgcctaacatctttttataaatgacactttgttagtaatatttcttaattttttttgtaaggctaatacttattttcttaatttatataacatctactacttaactaaatcaattatggtatgaaacaaagaaaaatattatacactaataatactttttaataatttttgaaaaattaacggtgtccaaacaggcccactctgatgttccttcacaagactcgcttcattcaaagtaaacagagttatttaacatatttttcactgtcataaagttcatgactcatcacaaacaagtacctcttatatttttaatttttttttttgaaagcagttatttaaaatataacaagacaaattaaatcacagtagtcaatcaagatctggcccgtccttggtcattttatcacgattcatcctcttaaatcaaagtgacatctcagaaactattactaatatcaaaattaaatttattaaaaattatcattttcaaaatagtacgtagtacgcctaggtgtgttttgtcctttttttttttcttttgattttatttcgtaacgctttgctaaatttatgtttggtcaaattaagggtttggaaattagatgctaattgccacgtcttttcattgggtatgagaaaaacaacaaaaattttgtagtttttcggtacttataaatttaattactggttgaaatacataattaacatgcttatgattagaacaatcgatttgatatttacattcacaaatttattagctgtgtacatatattgactacataatttttctattgttaaatttagtatacaaaaagcactaccctccgaatttggaagatgaagtgtggaggctagagaaaatcggcaaagatggagcttttcacagaaagcttgctgcagaaaatattcatacagtacaagacttcttgaagttatctgtagtcgacacacagaagcttaaaaatgtgagtattatttaacttaattttctcaatttatatatgtatatgcatgtgcagaatatatttacttatattaagtgcctttatcaatattaatcatttcatttcattaaagtttcgatatcaattacttatattattttataatgaaaatggaaccagattttaggcattgggatgtcagaaagaatgtgggagatgactctaaagcatgccaagacttgtgtaatgggcaacaaaatgtacatttaccgtgtagatcatcactccaccatattccttactcctatttgccaactcctcaaggctgagatcaatggagaagtatacggctctaaggagttggacaataatctggtaattattaataattattactctttcaaatctctaattaattgtggtcaatgttatatctataaaaaaaaatgttactgactatatttgtgatccaaaactaccttttagtaattccttttgtagaagataaatatatctaccttttagtaatgactatatttcttttaacgttttttaggcctactttaaaagcttggtaagggatgcatatgccaattggaattctcttgaagtagcgatggaaggagctattgtgaatgagatcactcctactgtcctattaacacaaggtgtgtgtatatgaaaataattatataatcgatctattttggttacatttatattattgttattattatatataatataatgtgatccgtacgtattaaaaaatacgattggctaataaattgacacgtccgcacaacatactttatcgcagcaattcccttactcatttagatttagatttagtagacaaaaatgtttttattaaaaaaatttgaaaactgaatatttgaaattgttattatttttttaatgaattataataattgtaattatatatttacaggtgatattagcgtgggtgaggcgcaataccacaactcgggtcaagctttggcgattaaacagtttgagcaaaacgaacatcaaattgaagataataaagctatgataagtacgggttatgtgattcccagcaatgtacaaatggattggatgcaggccaatacagtagtgctaccatataataacaacaacaatgatatttatggtaatattaataatactactggtattgggtctaccagtatcatctcagatccttcctcagatgctgatatattagcatctcgacgtttttgttgatatatatatatatat

SEQ ID NO: 18698 - DNA, 3259 bp, Cannabis sativa
  modified_base (3198)..(3206): a, c, t, g, unknown or other
ttttcttcatactgtttggtttgggtatttggttttgttttgagtatttttgagtaattttgtgtgtagatatattacgagcttcttctgattgtcctcatgtaatgaatttaagttattccacatggagaatcaagttagtcttggcttatttctatgggaatttgtagtggtgagagagtatatggcttgttcaagtaaattaagaaaagagggtacgaaaagatccgtgatttaaagttactcgggctacatcctacaattggttggaaggaaagtgaagagaaaaggaatgacttactttactcttcttttgtctatgctagtgatgaattctatttcattgtgcaagaattacaaagctgcgcaattgataatttgaaatccatagccaagtttgtgctctcctaaattcttctatggtgtttgatgaattctgttgtgttgactgagctaacttaataactccaactaataaccattttctttggctcggaattgatctggttgatatcaactgctcatacttattaagactatactttaaaaacgtgtagctgcttgataatatctaactgtgtttgttgagcttaatgagtattgccggttgctttggtatgtgcttattcatgtttcctgatctctcctttagttttgatcaaatgaacttcatcttaaagtcgtgccgtggatatattaactaaggctttgttatcctaggttcttggtgtagagaaatctgctactcagcaggaaataaagaaagcatatcacaaattggcattgcggctccatcctgataaaaatcccgacgatgaggttggaaactcagtttagttaatgcagggtcgtatgattctatagtttctgtatcttatagctgtaatttgctaattttctttttgtaggaggccaaagaaaaatttcagcatttgcagaaagtaatggccattcttggggatgaggaaaagcgagcaatctatgatcagactggttgtgtcgatgatgctgtaagtttcattgaagtttttccttaaaattattaaagaataatcaaggtcaatgctttcatatttgccacagtaaaggttaattaattaaaacatacataatatttatgggccattgttgctacaagtcctttataaactcatttatccttgttacaattgcttctttcagtaaaataagtttcttattttctgtatttttaaatggccaggacctcgcgggtgatgctgtccagaatctgcatgagtttttcagaaccatgtatagaaaggtcatatcatcttgtttgtagtaatcgtttctctttactttctaatattaaatctgttttctgtttgctgatgatagagttgcatgtcaactgcaggtcactgaagctgatattgaggaatttgaagcaaactatagaggaactgattcagagaagaaagatttgattgatctttacaatcagtttaagggaaatatgcctaggtatgactgtactagtataattcaatccttagtgaataatgttctaccaatttataatcttccctggccctttttgtaggctcttttcttcaatgctatgttcagatccaaagctcgactctcacagattcaaggatattattgatgagacaattgctgcaggtaggccttctaatatttttatttttttattttttttagagtggtgttgggtttggagggggaagttatgagattatttgcctttaaccttgtctactaaaattgtagctttgcccaaaccaaagatcatgtttgtcgtattaacaattcttctaagaatgaattattacccactccttagatctaacttctaactagaacttggaatcaacattggctgattaattgcagcttaaaaatcccattaaataattgcaactattgcattttggtttcagtttgagatggacacctagccttaattcttttctcatatctgataccagtgttgcattttttaagtgcatattccttatttttcattctactaacatctcttcctcataggcgaactgaaatcaactaaagcatatcgcaaatgggcaaaaaaagtgtctgaaacaaaacctccaaccagtcctttaagaaggaaccgcaagtgagtattctacttaagctttgtgctttatctattctgtggtcaaaacaatataaaaaaattaatacaacttgaaattttcacagatcaaataaagagtcagaatcagatctgtatgcacttatatctcagcgccgagtcgaaaggaagggcaaattcgattccatgttctcatccctagtgtccaaatatggtgggggtggttcttcttctgaacctagcgagcaagaatttgaggctgcacaaaagaaggtcgaaagccgcagggtctctcagaaatcgaagcgcaagtcttaactgtcatcttgtggaggttttggtccatttatgtataaatattgattctgtatacgctactgtctgccaatgcctaagtgtgtgaagtatttggctgtgtcttgattcaagattttagagcagaagaagaaacataatctgacatgtcttgaaatgcttatgtgcttatatcaattagacaatataaattatggtatgtcatggtacaatttgattgctaatgattcaagtttttagcagcggtgtaattagatagacaatctttatttgttgagatatcattgttttgagttgttaaatgggccttgaatgattcacaagtagttgcacttgcagctttttaattttttgttgaccaagtaatcctaaataataacatgaaaactatataaaaagggaaataaatgaggaaagtggaaaggtataactctccataattggctattagccagccatttgcataatgaattttgctaaatttggttgtagtattttattaagtgtgaagattttgtagcacgtgtaaagaaatcccaaaaatggggtgagtaagttatttattattttaagtctaacttgtagtaggactacataaaaattaaaatctctcaatacgccaactcacaaaagttcgtattgtagtcacttggtcacccattaaaaaaagaaaaatttacattttagaacattaaatggaataaatttcaaaaatattgtaattttattgaaggaataattatataagacatcatttttttttgtaaaaaaaaattatnnnnnnnnntttaaagaattttttttttatttttacgattttacataaaaacaacaagaaaa

SEQ ID NO: 18699 - DNA, 4464 bp, Cannabis sativa
ttttttttttgggtttttcttcatcgatcaaaaatgggttttgcatttcttttttagtgtcatttgggtaaataatattgggaataattggactgaaaaaagctcaatttgaagggtgtgctagctatacatttttacaataatataatatatcattttgttttaaagattctagctttatttctatattaattattagtattaatgggttttgcacacatgcattatgcatattgtagtttaatgatcctaaatagtttgtatttaggtatttgtttcaacttgttcttggcatttgggtaaataatataatatcattttgttttaaagatgctagcttttaatctttattgttagtatttttatttgaatttgaaagtgttttaaagtgtataattatagtataaagatcccaactttatgtggttaaaaattcattctggtattttgatatgagtacttgcaggaaatacaatactcaaaatttaaaccaggaacatcagtagaactaaaagatgatatgcttggatttgcatggatcccagctactgttattggtgaaaagggtacaaattctgttgtggtgaggtataataataagaataatcaagctgtgaaaattactgtacaactagatatgattaggcctaagcctcctcaattgagcaatgatgaagattttaagttgaaggaaaaggttgatgctttctgtgaatctagttattggttagttggaacaatcacttcagttggaaaaatcacttcaactctggtacaaagaaagtatgctgttaattttggtacttatcctaagagaaatgagattgtatttgatcactctcaattgagaagtcacttggattgggtaaatgaacagtggattaccaactcaggggtatttatttctatactttattatgttgttttgttctgaattatttatccaagtcttgtaaggattttatggtgtttttctttccttttaggaggttatatccacacccactcaacaaattcaaactcaacaagtatgtgatacagccgcaaaagacattgaatcatcctgttcgggttcggaattcaacaatgatgaaaatgaaacaccttgttcaacgaaccaagatgacactcaaaataaagagctgctattttcagctacttctatgaatggtctcaagcttctttttttcttcatgttatttcattatattaataatgataattatgatgatgatgatggtgaagttgtatggatatggttttgcagatgaagaagccaattcgccgaaagtaaatggtagctctaacatgttagtgaagcttcattatgatgagtttgacaattctggtttgctgtcttttaaggtagaatcttaacatgtttctcaatagtagagttgtttgacattttggtctgttttcgaaaatcagatagttttaaaaaaaccaaaaagtatttggttgatgtttctaagcatgattaagaatgaaaactccataaaacatgtttggttttttttttttgttctcaaaatttgctataaaatttttcttttaggaggatgatcgaaaacaaaatagtaaaagagagaagagtaaagaacaatatgaattgcaagctccacattctcaaggtacaatcacatggttcttctttttatacttgaattacatcattttattacaattttataattgggtttgacaggtaacactaatgaggaaagaaagaatactccttttgtgaaaagatcaaatctttgggcattacttgaatcattggaagtgtgtcaaaaactaccacagaaccctcattttcatccattgttgaatgaggaagatgatgaaatcgaattcgaagcattagctttgagtcatatggtcaagtttgctttattgattgagaaggttttcaatttaagagaagatggtagtatggctgagattgattatttaatagcggaattgactgaaatgggaaaattgggatttgatgtgaaggtggtaaagaataatctgaatgagtggagaatgaagaaagtcgagttggaagaattgaaaattcagatcacattgcataatgagaaaaaggagaaaattgatgaggagttgaagatacttgaaaagaagcaatctttgcttatgtctcaaagtgcttatgaagcttcacaagtgagtaagttaattgcagaagcaactaggattaatgaagctttttctgttataatgggaagctccaaatgccaacataatcaatgaagccattttcgatatcatcttcaatcaagaccggtaaatatcttgtgtgttttatttcaactatgtagacagactggttgagttttgtttatagatatgatgatgatgaacaagttctaacttatgttaccttttttcttcttggttaataaatatccttttaagtttgtttttttacccaatggttatgatgattgagtttcatggacactgatagtttaattaaacaaatcacttgtctatgacaaaatcaatgaattaattaattccattaaaatacactaatcattcattcaattgatgtatgatattgattcttgtagtggaacttgatattggattcatggattttcttccccttcacatttataatagtacaagttgttagtgagttacaaaagtgaagaagctgagaaaattactcttaccattattataatccaagaatgggatattattagcaaattgtgctactaagaaacagtgcttcacattctggtttcttgcctgttggcatctcagtgttgggaaaaggctggaatcaatacaagtatctcggccggtatgacccttttagactggtgtgtaaatactttttcgggtactcaataatgacagacgcagccttgtttcgaccctttactgggccatttcgggagcaaggaatgacaaagtttggaaaaacaaatctaccaatgcctcgtttatttttgcatttgctgtaagctacctcgagcaatggaaaactgttcaaacttcagatttggagtcatctcggattggtctacttgtcggggatggtgctgagcggtggtgcgtgcctaggactaacaaaatcaagggcatcaacaggctagatatctagaaatgagcattggttttttattggaaggagtcactaggctctgtggtgaggctgttcgtccagaagttgtggatttgaaatttgttttcatttcttttgttgtttaatcgtcagcagatttagtagttcattcgtttattagagcttctaatttatatcctaatcgtatttgagaaaataaaatattagactccaattctgcaattataaattcagcaaatatttctaaacttgaagctccaaaaagcttatttattattataaaccagttaaaaatctaaaaccagaaaattataaacatctgaaactaaaatcagaaatctaaaaaaaaactaaaactaaatattgtaataaaagagtggtaagttcagttcataaccgtaggtgatttcatactccaagcttgaagattctgtacagtcacagtttcacttccattattaaacacatacaaatgtgcattatttccaattgccaaacttggataaactcttgatgtaatgcatgttttgccttcttctccaaaattttcaataatagaatgatcaatctgtacaaagtttcaaaatatataagctaattaattaaaacacacattatcaataatttgtatagttaaaacttaccaaacttctaagagaaagcttattatcagttatgtctgcatctacgaatccagcaaatgatggtttatacaagtcaggtgacaaagaagatctgcaccaaaatttatgaaccagcaaaatatattaataaaaatttatgtatgtataaatataattatagggtaaatactattttagagtcttgtgttttacaaaagttacattttctaaaatagtacaaataagatcgggaactgattttctgtcaaaataaaacttaacaataattcgattagaggtattctgacaaaactgattacatcttctgtatctattcgtatactaaaaaaattgttaaaaattgagcttaatatcctatttttacgagtctaatcagtaacctttgcaacacataaagtttaaaacagtatttacccataattaatatagatatgaattcgaaaaaacaaaccttgaagcatcagaacacataagaactacattcttttttggtgccttaaatattctgaagaatactggtgtatattcctctagattttcagaagctaatgtgagtaatccaaatggtccaataccaccttcaatatgggaaggtttttgtgcacaaagattttctgcattatcccaacttgaatcgaattcttcagctttttccaaacttggaaatgaaaagacaacatctacatcagcctgtaacaaaaaaaaaaaaaaaaa

SEQ ID NO: 18700 - DNA, 6460 bp, Cannabis sativa
  modified_base (3922)..(3930): a, c, t, g, unknown or other
ttaccacttaaaaaaataaaattataaatttccacacaattatattctccattttaatattttaattaattaattttttttttaacttctcctaccaaacgactcctaaaacaattttaattaaagacctcatcactataaataagattaattaaattattattattattatttttgttttgatataatcattactcaaaatattattaccaccaaactaaaacaaggggcttatgttatcatacatatccttgaagacacaacccaattcccccatgaactaaaattacatctctacccctcaccaactccaataggccccacttccattaattctcagctttcaccaactaccaaagcaacatcaaatcatctactcaccaacctcacaccaactccaaatgggccccatttccacacactataatcatctatctataccatacatttgacttgcctagctaagggtagtggtgactatttttctctcttacaaattcatccatagaaaaatatatccaacctcatccttaccaactccaaaatcaagcatatatataactacatctacatattaaacaagattggtcattgagaaagagaaaagaataaaaaaacaagcacataacaatatggctattcttctaatagctatacccatctcaattatagtgatcctcatcacatacaatctctactacagcctcagatacaagctcccaccaggcccaagacccaagcccatagtcggaaatctctacgatataaaaccggtaaggttccgatgtttcgcggagtgggcccaatcatatgggcccattatatcagtttggtttgggaccactctaaacgtcgtcgtttccaactcggaactggctaaagaggttctgaaagaacatgaccacaaactcgccgaccggcaccggaccagatcgtcggcgaggttcagtagagacgggaaggatcttattgggccgattatgggcctcactatgtaaaggtgagaaaggtttgtacacttgagcttttcacacctaagatgcttgaagctctaaggccaattagggaagatgaggttatggccatggttgaatctattttcaaagactctgtcaatcctggtaagccatttcttcataaattatatctctttttttattttattattatttgtaaaatattattatattatccattactatgccattacaagttaatttgagtttattataatttataatattggatttataatttaattttttttaaaaaaaatataggatagtatgagttatggtatattcacatcttaaaaatataatataaaatttttacaatttatttgtctcaaagtaataatgcaacacacacattcaagttatgtgcatttaggctagtatttttactccttaaaatttaatttgttaaatcatcttgctaaatttttttgactattaatatttttttaaactattcagattattaaattaaagatttttatctaattttattcaattttactaaatcggtaattatttatatattaaattatgttttccaaatattaatatttaccaaatcatatctctcaaatttatcatgcgccatcaacttttatcacttttttttttattattattaaaattgaataaaaactttcaaatataacattcttaataattcataatagatttttaacagtcttaaaaatttaaataacattataaagttcataacaaaaattttaagtaatctttattttagttataggttaattttaaataaggtctacatatctattattgcaaatgtaatcaattacacacatttttcttgtaatttaagacttgtgacaatgttgatgtatgccgaaaatctacaaaaattatgatgaatataatatataatgccaataatgaaattaaataaattattttgataaattatgatcaattaaataaatgtcattgcattacttactcagtatagatcagaaagtattttaatgaggttggtgatgattagatgagacattgtgtgaatggagttaaatataaataagagttagttcaatttttccaatttaagaatcattatttttagtccaagtcaacaatttcgacaaccaccttgtgacaaagaatcaatctactaaaaacaaacatagaacaaattattgactaggaaaattataacatctatgaattgtttgataatttggaattcaaataattttttatttaaaattttcattgttatatttgattacacataaaaattaaaatagtaaaattacacaaatatagtcacatggttaaggactcagtatttttgcacgatcccatgtgggtgtttgttaacaataatatatagtcctcttgctggtgggcaacattgacttgtaattattaattatatttatatatttagcttgagttttaaaatgaataatttaattagtttatttttcttttcaataatttgttagcttggtttctaatttacttgaattgacaaggaaaaatcataattgatttggttgatgtctaccaaatttagttggaaaatgtatttttctctttttattttttcattttttttttgggggtaagctataatttgatataggtaatgcatatccccaatataaattcatttaggtatttctattggtaaatgattattttgggttgttgtacgtaaatttaagcaatttaataactagaggcactaatgtaattggaataatattatatgtcaataattaaggtcagccttaaaattaaaattaagtgggtcataagaaacaaaaatatatttaagcttttatttagaaaaaaaaattatatttttcaaaattaataaaaaaaataaatatattttaaaaaagggaagaaaattttttagatttctgggttaggtgagaccctagcataggcctaactcgccgatgcatagggttaagcatgtcaataatatagaaacatatttttgagagcttattataaaaataaatcgtatttttaaaaatttcaaaaaatatgtatatttattaaaagattttttttttattattattttcacttgatcaaacgagcatacaaaatcttgtaattagtctaaattacacccaaatctaataatttagagattttattgataattttcctactaaaaatagtattattttgtttgagagtgtaattatatgatcgaacaaacacgttgaattgtacacattattaataatcttgcttattcattgacagaaaaccatgaaaaaagtttaccagtgagggattttctaggggcagtggctttcaacaacataacaaggctagtgtttgggaaacggtttatgaattcggaaggcgagatagacgagcaaggaaaagagttcaaagcaatagtgggaaatgggattaagttaggggcatccctaaacatggctgaacacattgattgggtacgttggatgttcccaatagaagaagaggcatttgccaaacacggtgctagaagagatagactcactaagatgattatggatgaacacactctagctggccaaacaagtgatgattcttccaaacagcattttgtggcttccttactcaccttgaaggataagtatgatcttagtgaggatactgttattggtcttctttgggtaagtattaactacattacactctttcttactatatttgcatttagtgaaacaaataacaaaaatgtttgatttctattttctaaatgattataaaataaatcttcaataaaaaacaatgataaatatttttcgaaaagtttatagtgcacatcatatgggtatatgggtgtttcagtagattctcttatctattagagtttttttttataatcatatactttataattatttaagactatttgtaaattnnnnnnnnnttttaaatagtttacaatgctaaaaataagatttacatattttattgcacatatgactgtttttttatacacgtggtaagtacataaatatttaaattttattttcgatattataaactatttagaattttctgaaaatttacatgtaattttaaatagttacaacatatgtcatacaaaaattatattaaaatgttttcttaaatgttagaataaatagagatttaccagaacactcctttaaaagtctactacagaagtttagtaaaacttttggttctcaattttttctttcgtagctttgtttctaaatgtgtgtgttttctcttttgagtaatgccaaatacatctatttgtgttcaaaaattaataaaaaaaatattgtttttagttatggtgtcaagttcaaccttcttaattgttgaattttttaagaaattttatttatgtttcctaaagaaatgattttcaatatgtaaatgtatatagaatagaaaaaattgaagagatatatttttattactacaaagtaattatatttattttcaaaaaaagtaattatatttatttgcaaatgtaggatatgattacagcaggaatggacactacagcaatatcagccgaatgggccatggctgaagtaatcaagaacccaagagtccaacaaaaggcccaagaggagttggatcgggttatcggtgtggatcgagttatgaccgaaaatgatttctcaaaattacattacttacaatgtgtagttaaagaagcactacggttacaccctccaacaccactcatgcttccacacaaggctaatgccaatgtcaaaattggtggctacgacattccaaagggctctatagtccatgtcaacgtctgggccgtggcccgtgaccccgcggtgtggaaagacccactcgaatttcgacccgaaaggtaccttgaagaagatgttgacatgaagggtcatgattataggctactaccattcggggcgggtcgtcgggtttgcccgggagctcaacttggtatcaatttggttacttctatgatgggtcacttgttacaccatttcagttggagcccatgtaagggaattaagccagaagatattgacttgactgaaaatccaggaatggttacttacatgaaaagcccattacaagcaattcctactccaaggttaccttcccacttatataaacgtgaggctattaatgtgtagtgtctcaattttcaatttatgttatgaaatagtatttacccaattatcaaaattttatcacggggttaaggcttttgtagatactatcactcacatacgagcaacgtgagacagaacacacataaatttcgtttttttgataatgttatgttgttgttacttttcatttttcacatgttcacttgtgtttaaattctagttaaattttccagtttgtttattttaaccaaaattgtacaataataaattgagtaaaattaaataacaagcagcagagccctttggttgatatggatcgatcttcatattaatggtagtgttagataacagtcctcttcgagacaggacaaatcaccgaaatgcacttttcgagtcagtatcaaactcccaattaaaccaaagttctatttactcaattcatatctcataataactatacaattacatatttatagtgattcgcacctcactttttgtgaattattaataaatccctacactatttcatagtgtaacatgtagcttttcttttctttcccttaaatcttcactgaaggacttttagttttaaccaataaaaaagataataataataataaatcataaaaataaaaatattatttatctcgctttactcaagtcaacttttgatatttcaaagattgaaaaataaaagatttatattttgtaattcttttgttattaccattgaaaataaaccataaaaatgaaatattatttttttacacacaattcattctaatttccttcctaccaaacaaattatatgtatatatattttatattaaataattattatcatgagttgggataagttttttggtaggtagtccaagtgcaagtgggaatggagtcaagaatgaaagctctatgatattggtatccttagctaaaatccagaatttagttccaaaattattgaaaattgaattgaatactccaaacacacatatcattattcattactattacatacacaaattaaaattaccctttaaatctcttacgtcttattatactaattatgggatgagcaatagtactagtactgtttggtgccaagtcaattgaatgggcccacttttcatgcaaataggcccaattattaatatcgacaaacaaacccttccttcacccatccttatcggccaggtggtaaaacaaaaccttttttttaagaaaattataattattatttaagaaaatttacatagtatacttgtcatttttttacaaaaatactgtcaggcagtattttttacttttttactgtgttttttataa

SEQ ID NO: 18701 - DNA, 4337 bp, Cannabis sativa
  modified_base (188)..(193): a, c, t, g, unknown or other
tctctctctctctcttttcctttttcttgttaggtcttgtggtgcaagttttggcaacagaagtagggttagagatttcggaattgagattgattcacctttttgttgttatctccgtccaatttgcatattattgttacccaccatcaccacacacacacacatgccatctctctctctctctctcnnnnnntctctctctctctctcttcataaaaatcaagtggatggtaggagttaaaggatcatgggcagaagttgttgtcaaaggggggctacaaggaggtccacttgtgtaattatgtgcgtgtatttcacctaccttttcaccctctttctcactgtctttgcaccacttcttgcatattctttcttctctcacattgctctttttataaccatgccaatattcactaattatttatatctatattatacttgagaaagtattaaagctgtgttttctttttccaacccccctaaaaaatacacccatttattcaaatattgatggatctaacatgtggcaattaagttcattgattggtgctctcccatttcaaatctctcacatggttaggttggttggcttgcacttgagattatcctaataagtgttatgtatgtagtgataacattaccaagctttgtataaggaaaaataatgtgatatggaatttcaaaaattattaagttttgaaaaaaagaaaagaaaatgaataaaattcgttacgtaaataggtttaagggacacgagagcatggctctaattggcaattatataaaagaaatagctaagtccagcccagcaacacgtgtggatcatgtgcttaggtatcgaggaagagtcgtggggacagtgtttggtactacaaaagactactcctacctacctctttgcctgtcttccatgtgtggtcctcccaaaacttttggctttacccaaaactactctgatttttggctgaacccctttgccctttgctttttggcagataacacttctcacccttcatctcagtcttcattgtttggtgtcatcaattggcatttacaccatcttactactactatcttcttcaagctgccttatttagaaatttttactttgttatgacttcaattagaacatgacttggttaaaaacttgattaattgtaaataacattcttagcacacacttggagaatcaatttttttttagtgggttagggaagaaagaaagaatcaaattactttttaggtagggaaacttttttagtagatgtaccctacctaccatgactatgagtcataagatatttttctgtacacccaaggaaaaccattaacataaatacataattgtcttcttttttatatgaaagtgattaagtactcaaggaacaaatgattatttttgctccattatgagactcaagcaaattgtgaaaaagtatataatagctcttggattttcacaacatgattaattacaggaatgacaagtctatttcattcttttgtgaacttcgtagaagtagcttaggaccaccacagccgcagcaacagcaacccctactgcactctgtgccagtattatgctatcagttgcattaactttggagctagaggaacttgtagaaaatccaagctcagaaagcttcttgtgtgattcagcataatctctgaaaaatgcatcctcatcctaataataaaagtcaaattttgaggatgtagtttattcaaaaagtaataatcataatcgtgtaggtgtaggtgtaggctgtagctgctttattataaatgatcacatggttcacctcaggagtgagtgaacatcacacttgatttaaatcttactgtacataaattaaaaaagagagctgctaagactttttaggtgggcttcgtatcaactatgaagttgacccaataaaagcggcttaccttagcatacagctcaacaaaaggacggaacttgggatcatccagaagagctttatccgttggaagtttcaacaaccactctgaatctcctttcaacagctcactggtaccaacaaaataagttttttttttttgaaaaaaaaaaatcattaacactatttagggctttgtaccccaacttgggttttcattaaaacagtaacttgtaggtttaacttgaatcttacgcaaaatatgagttatcaaacttcagaggctcatttgtccatggaccatcaaaaccagatctctccggatgtgctcttccctgttgaaaaaataaagattgaaggaattattaactatgccaaatgagacctacataggtgaagtgaaaaacaataccagtgtatggccgcctgacagggcaacaatatccttatccgacaggcccattcggtaaaagatatccttaagatgggatgcccctgtcacataaaattcccgccaaaagggaaaataatctcaggtggtagtagtcgagcataaatatgaaaaacatactatgctaaagacttcccagtgctatagtacattagcaatggctgtccaaagcattaacaaaaaaaaaaagatgggataatggttttatagtatatttgtggtgtgaccaaacaaattttctgtctagttctcattttgacataccatcctataaattgtcgttaaacagaaaactttccacagatgaatccatggcttcagaggttgtgagaattccttctgcttttcaagcagaagacactattaaaaagaaactagatacgacctaccacaccagttagaatatatacaaaatgggcgtctttataggcaagtgttcaagctctatttcaagatttttggttgtaaatgatactttaaatgtgtgacaccttttttagcatctggaagccgcccttccttgggagaaattcttgaatcctaatgaaaaatcatgaaagacagtgatacttaaattagctttctttgataattattttgtaaggactatataatatgacttatattaatgttatgaccttaaatagtagtagtatacctttctgccgggcacaaaatcaatggtggggcctccggtgacctcgactgcaacaacaccagcaagctgaaaaacaaaattgtttaaaggaagttgccaaatgaatttctagatgtccatagattaaagaattccagatagttttagaatatgattttgaagaaccattttttcttagtgcaatttatgttccttctcattttggactacttaaccaagaattataaagaatataactttcttcctcttaatgtaatcaactataagggcttgagagaagaacaaaatagtcaaagcttatcatctttacacactaaaatccagaagctggaaaggaattcaccagttgggtcaattcagttgttactaagaactttcagagtttctaagatgcaaaatttctgatttactaatgctgatcttttcctttatagtttctttgggaggagaaaagaaccttattttgtctgtccaaatgaagggtgtcaaaaccttatctagcaagttggacatgtaataaacttgaacggtaagagtgtcaaaaccctatttggttagtctcccatgtaagaaactccaatgttgttccactgagaaataactataaagttggctgagatctaataccaaaaacacaataccaagtattcctatcattctaagatttaagtacaaaaaatcacctgatataggtcagcgtatgttacttttggatgtttagacttcacttcttctgatatcagaaagaaaaaaaaatacttatcagataactaagtgaagaaaagctccattcaataacactaacataaaaaccattttaatcgtcccccataacgtgaatctgaaacatgacccacaattgattctcttacttgccacagtgaagtgactcttgacagttatatgaatgtttattatcaagcagctcatgcctcaaacccataatatgccaaataggtcgataagctttttaatagttagaattatcttatccgactacatacacaaattgctcaaattactcaaagacttttattgattaagaagcagaagattacatccacgagcattcgagaggcttgtactctactatttcacatttgagaggattggactctccaataatcgagataattctatagagttctttcacagcccctaaaaatctcctcctcccacatatatggtttacaataatcccttccacatcagcaacttactaaaactaacccaatacagcttacagacttaaaaaattattaaagctatgtttggaagttggatttttgtgaggagaacaaaaaggtaagaaaaatgtaggaaaaaa

SEQ ID NO: 18702 - DNA, 3574 bp, Cannabis sativa
tcagttcatacctgaaatgcattgtgcacttacccttttctactctgcttccgattcccaattccttcaatctgatcaagacgacaacaaaaactattgtcgtattctcaagaaatcgttatcagacaccttaacggatttttatccaatcgcagggcgattcaaagactcgtcaactatcgattgcaacgacagtggagcttgtgtcgttgaagctagaatcaactccaatctctctgattttctcactactgttaatcagagtaaagatattcaaacaattttggggaaattgattcccattttggattcagaaaccatggaattagcttctaaatgtatgttgatcgctcaaatcactgtattcaattgcggtggagtttcaatcagcttctgcctcgagcatcgattctgcgatttcgcttccgtcatggtttttctcaagagctggagcgccagagccagaagcggcggcggctccggagaaattgtgctccccgatttcgtcggatctaagtttcttccaccccaaaacatgccttccctaccaccaccacatcaaaacgcgattcaaaatcggaaaatcacgaggctcatcttcgaatcatcaaaaatctctgctctcaaatcgaaatatctcgcagaaagctcctcagatcatcagaacaagaaaatctccggcgtcgaagttgttgtaggtctaatcgtgaaatcggcgatctccgctactcaatcaacaaaatctctgctactccaagtggtgaagttacggatgagtgggacaacagagccgccattgtcggagaatgcgatggggaatttcgcatggttggttccggtgatgataaacaagcaagaagaaaacgacactgagtttgatcatgagttaataacaagcaatatcaagagagaaacgacgtcgtttatggacgaaaaggtaaagaggagaataaaaggagacgaagaagggattggagaggtttttaaattggcaaaagagagaggtgagattatgaggagtgttgctgacgtggacacttactggtgttctacttggtgcggttctggggtttatgggttgaatttcgggtggggcaacccggtttgggtgagcggtggattcgtttcgcctgttaacttgattataattgaggataccaagtgtggtgaggggattcaagcttgggtttctttggaccaaaatgttatggcaatatttgaacaagaccatgagttattgtcgtttgcttcgttaaatcctactattaattaattaaaacgacaggagatttgggtgtcgttttttgtcttatgagatggatttcagtgtcgtttgtgtgagcacagccacaaatggagaattgaggactattctattgtcgtttactttctagttctccagttggtgtccttttcttatttgaagtttaaagtttaaagttaaaccaagtgtgggagtggtttataaagttaaaccaaaaccaaaagttatgttatggccatttttttttaatttttaagtaccattttatttgatcagaaaaaaaagcaccataatagaaaaagatgagacatctcttttatttaataaaacccattatttttcttaaatgcatgtttaatcaattaatgagccacaacatagaacaaaataccaaaaaaaaaaaattacataataaaattttaatgtctaaaaatgaaaacactaagcaaaaaaacaccaaataaataaacttagtaactttacaacaaaatattaaaaaatatatatatttatatattgtagagggttattaaaacaaaaatgatacatcatcatagtttttttttactttctacacattaaattattctaattattgaagaactatcttataatggacggcagcttttaattaaatatcattatattttttatacatagtcattggaaaataaggaaacttgattcttagaaaacaaaagagagagagagagattgaagatggagtcaccattcagaggtgacatagcaaaaggtaaggtggctctgataacaggaggaggttcaggaattgggttggaaatatcaactcaactgggcaaacatggagcttcaatcgctatcatgggacgaagaaaacaagtcattcactctgctgtctctgctctccgatcacttgggatttcggttactaattactcctctccttctttagcttttcatctttttgttaatcaaatttggttttgtttactgtttggtttgtgggaaaaattaagtagagaaaaagaaaaaaaaaacagtttggtttgattgattatatacttgcccatcttaagataagctatttaaattgggatatttatgaaaagattaaaaaaaattaatatatatgacatacaaatttagttatactatatatattttaaaaaaaattaaaaatattagataaacttaaataatttaaaacctcatataaattttacttttatataatcatattaatgaaaaaattaatttttggatagatttgatttatgtgatttatattcaaataaagagaaaaaaactttaaaacattaaatatggaatttaaaatacatttacaataatgtaccaaaacaaagcttataaaaaagctaaaaaaataaaaaatgtcatatttaaatataaagtttttaaaatcttatattaagtgtatattttttctttattagggttctggcttaggtgagccctaagcgcgacatagtctgccttaatctaaggccgactgcaaaaacacctctaaaggattcattttgataagcaaactatttgaattgggtctattgagtattgagtgatcattattttcaatttgattatcttgtttgattattcatgtatttgtatatatacacaagcatacatataggctgagacggatccatattgaaatgagtgagggaagtcgctcttacaaaatcagaaagaaaaaaaatatatgtattttacttagttttaagggaatatactcatttagtaccttgtgattttatgaaaaacatatttagtaccttatgttttcaataatacttaattggtacctcatatttttaaattgtacatatttggtaccctaaaataaaatttaatctatatagttttattaatttaactaaatagttctcaattatatgtaatcaaataaataaatttgaattcagaatttataaatttttagactattgattgtattgatttaattttatataaaaaaaatgaatttagggtaccaaatataggtgtgattgtaaaatacaaggtaccaaataagcattattaaaaatacagggtaccaaacttatatttagataaaacacaaggtaccaaatgtgtagacaccctagttttaacatatatttgtaataaaagatgaaatttataggcaatattaattttggtgtaatggttaagctcaattataaatatattagaggtcaaaagctctttctttttaaatttacttttgcccctactttataaaaacaaaattaggttcccttcactttaaatcttggattcattactgtatatatatgtatatat

SEQ ID NO: 18703 - DNA, 4056 bp, Cannabis sativa
gtaattgggacggaaggaaaagaatcacttgtaaatagagtcttgaactaagggagaccccaagtttctcgaattgcctggcaccattgttatttgctgaaattcaataaaacttcaattctttctaccccattcttgtgcctgttctagtgtgtatcaagatagttgagtcctattcagtgtcaatttgaattgaagaagttgataatgagaagtgatggttttctggtgtatatggctctaatagtagcaggggctgggatcagctttgggatgagttggttgatttatgcagggataaatggtgtgggaggggacttcaatgaagtgaggaacacatcataaatgtttaatagtagtaccactacaagaagtgtgagggtttttgaattaattaattagggaattatctctaaaagatttgagattgaataatgaccaatacacttggtgaaatcttagaaaatttctaatctgtatcaagttggacaaatttttatctctcattgatgggcagaaagagtcatgttcgtaagacaaacattggagataagaaattactgtctagtgatcattgatagatccgtcctaactggggttctcagtcctgtcccatatatttttgataatatttgggtgcagcaaaaagcatttaacagggaagttttaaagtgacagtgatgatattaaactacgaaacttattattttatatgaatctacttttgtaaacagaattttacatgtaagcacacataaaacgaagtccagagcatactaaatatatataaatgtttaagcacataaaatcatgcgcacagtacacaatagacttggtccctgaatggagaaaatgtatatatatatttatatgtttatgtatgcatgtatatagatgtaaagaattgaccatgacatatctcattatcctctgctgagaggaatagaagttttaaaaaaatcattagaagttctaccatacagtgacagtaaatgctctaaacaatcctgctcagtatctttctgaaatactttctcaaattcaatgtttcagaaaaaagtattttccaggtactacgagtactcacaaagtaccatgtcgcgagtacatgccttcagtctggcaggtgatgttccatgacaacctgtttgctgctttatttcgtgagatacaatctgatgttctggggagctaatattctgctatattgtacattttatgacgctcttctgtagttctgtgtgggtttcatctgaatgtatttagttgtaagagtactgttgtattgcaaatataccttttaattgctacttggcctggggatttttccccacatttttctaccgaaaagcacctgattttaggaacttctactcataaaatagtttggttaagtaagcttttacccttgcaagataaatgaaaaaagagagtcaaggaggatagaaaattattcaatgctcatttatatgtatgatttacttgttgaacctttcactttttttttgtgcatgcagtcttttgtcacacatcgaatactcatacgagcttcaggtttcaaatctcttccatgctttaattatagcaatgttcatctatcctagttgtcattgtaatgacattggaagtagtttattagtaatggactatatgaatgtggactgcaattgtgcatgcagatgatgattccactgttagacatcaacaaattggccctgtttatttatctgaatggctactgcctccattgagtttgttagacaaatttacagtgaaagatgtgagactcacatgtcctcattttggttgtgtacaagaaatttagctcttcaggttcataatcattgctgtttaatttttcccatgcagggattttttcttctagtttcatgaaggttggattgacatatcgtgcattgtttgatacgttatattggttgctcatgtgatttaaggtattgtctcttaataatacaaataagtgtgatttttctgctgtatttcagtttattattatcaattttttccgataatgctctgacaaagaaaagataaaaaaatctcccataatgtctcaaggttggctcaattggctgggcatctgagtgtgtgggttctactaattgcattaaaaaaaaattaacaaaaagattatttgaaaaaaaagcaaatattatatagaaaagtgtgaaaacaccaaatgtgaaaggaaggatttgcgatgttttttctaagttagtggttttagtgcattatatttgtgttggatgtggttttaccaatttctgtaaagttctgcataccatataaaccaatactttccccaattattataggctctcgtgtcaatacgcaagaagccataaaatttagagtttattatcattattcttgaattgtgcagatggtgacaaggagtgaaacagtttttttttttgttgttggaaacagttggttgaacttactgaaactctaagaggggatgatgtataccttagttgcattggacgaatatgaaggaaatgcttcatgtaatggagtgttacaacatcactagtacagaagatgcttgaatattgatagtatagtgaaaagtttccagtcttctataattatggtaagtgccacaagtaatatcagctgagatgggcatcactgcttagttacaatcatttttattttttatttttcttaaatagcatgcttaaattataagcttgactaggcaaggagtgggctgaaatgcgagtgagaaagtttggggagtctggttgagtatcttgctcgaatttctggtgcttgtattcctttgtcattgatttgaaataccagtgtaaatttcctcttctactgttctggagttgtcaatttggtacttaaagggtatgataaatttataaatgtagatgtttgattaagtaacatgtcaaatatgtcatgattaccactgctttatattttgagactaagtaggaatgtttggatttaaaaaaagaaagtaggaatgtttgtgctaggaaacactgctgaaaaataagcagattcctccatatccttttgacagattaggtttactttcattttgaaaattttacataaaaatctgtaaaacccaatttattttcacaaaaagccctatatggtatttaaatatttatacaattaaatattagggtgactattcatggttacatttttattgtgaccatcatgttacattttttttttacctgtaatagaagtttactaatagataaacattctttttttaaaattaattaattataattaactattttcttaaaataattaattaaatatttaacaagacatcttttaacaattaatatttataaataattttttatttatatttaaatctgtactctaattattttaacaattaagctatttaattataatatttacaataattttttttttttacaaaaattaatcttctttgtacacaaattaaacttctcttcttataataaatttttaaataattaattattttgttacaattagatgaactaaagatgaaacctcaagctagtcaatcgataacaaaatttgtatatctattagggctgcacatttagacccgcaaacccgaccacctgcctcgactcgtcgctaaaaatttgaaaacatgaaaactggtgtggtcaggttgggtttaacctaaaaatacctccaaacatgtttcgggtttgggtatggttaattgatttttttttacgggttgtaacccgtaacccgaaaaaatataatttttttttattttatttaaaagttaatacttaataatataaattttattttatcacattcaaaaaaggctattcgaattcactatattcactgctcacgcacgaagccacgaaccaaaccagacaaactaagaagagtcaccctcaaaaaatcctaaaagtcaaaaaagcttcttcttgttttataacgaaatagtacgttttacatttatcaactcgcaagcgcacgaatctttattgtagtatggagattgtgaagaacgaggtcgaacccatggga

SEQ ID NO: 18704 - DNA, 2811 bp, Cannabis sativa
caaccagaaagtttaacttgaggctcaaggcagttgcccggagccaacgtgtcagcgcattcagcttgaagtctgcccctctcgccaccggtcaaatataaaagcccaagcaatcactcttttgctccagacacctctcaagactactccgcatccaactaccgacatgtttgttcccacttagtaaattttttcatgagagttttcccttaacttgtccttttcctcctcggctgcgtttgatattctttcctcatatgttattcattgtcatgcctagttctatataactttcctatataaaaaaaaagcctttggattgcacttcaacttccaagatcatggcatattacagaagagccaagcttgcgcttgatggctttcaccgttgtggttccaagattctttccaatgctccccttactcaactgcccacttcgaagatttctcaaactgggtcttcgattctagcacggaatagtgctaaattgtttgggttttgctcatattcaacgatttctcagaaatcggtttcgcacatgggattaggtagaagtaagtgtaataatccctttctcagcggcgctaagagatgttactatgttgatcggtaccaagttcagcattttaggccacggggtcctcggcggtggtttcagaatccaagaaccgttttgattgtggctgtggtgggttcgggggctctaattacagtttattttgggaatttagagtctatcccttataccaagagaacccatttcgtgcttttgtcgagatcaatggagagaaggctcggagaggcccaatttgatcagatgaagggtgcttttaaggggaagatattgccggcaatacacccagagagtgttcgagttcggttgatagcaaacgacataataaaggcgttgcagaaaggattacgtcatgaacaagtgtggagtgacttgggttatgcgtccgagagccttgggacaccccaggaggaaagtgggcacgatacgttgatggctctcaaggaaagtggtggagaggggaaagtggaagagaagtggttccgtgatgatgagattcttgatgataaatggtttgaggagactaggaagaagggtcaagaaagagggtctcaatctgctacttcccatttagagggattgaattgggaagttcttgtggtggacgagcctgttgttaatgctttctgtttgccaggtgggaaaattgtagtctttacaggattgcttgagcattttagaagtgacgccgagatagcaactataattggccatgaggtatgagtaatttatacttcatactcttcagttctttagtagcttattcagctgatgtaatttgttgattgaatgtctaggttgggcatgctgtggctagacatgctgcagagggtattacgaagaacttatggtttgccattctgcaattggtgctttatcagtttgttatgcctgatattgtcaacaccatgtcagcattattcttgaggcttcctttttctcgaaggtaagtacattgttatagttttcttttggatgtgatagctattttatggaagattcttgttgcagctgcgactcttatatgtggaagcgtctctcattttgatgaatttttgttggaaaagttaaattgttgttaatgtacaattagcacttcaagaatagttttggttgtttcttatgcattacttctgtttgttgtctaacaatttttctttttgcctttcaattgcacaaattgtgttactagtgagttttaatgtacttgtttctcgtgcaatttgtgtgcttactgtacataataatggagttgtcttttaaaagcatctgcattgctggttttgtttacccttcattccatatattttttatctggtcattgcatttcattcatgtcactcagtcactgggcctgctacttggacaagaattgatgagaagcttcttaagaatgataaacttctgtactgttagacaaagggtgaggggaaaatgtggcattgttagtactaaaagtttttttctttttttggtaagatgttagtacttaaagttgtgtattgtacagatttaaagcagtgtagccacattaacattaatccaagttgtttcaggtagtaaataacatgttgggaattttggtcatcttatcatgtgaattttcagcactaagagttctaacaatattggtgaaacatggactgccttggcaagattttagttaaagtgttttatacataataaattgattcacacacacaaaggttgttatttgaaagtatagtgaaattcagagttacttgccacacaactgcagtgttatagtttagcttctatatcaacatcaaagtactttcttttgtcacaaacgagagaatgaacattatttctcacgagcagagaaaaaattattttaaataatgttgcttctgttctggtaaatcaaagaccgattaagaaggtttttgctttttacgagtcaataatacaatacaggcaacactggaaataatacagcatgctctgattctgctgttaaaaacgttcgaaactatgaatgtttgttttgaagatggtgttttgattctcttcttttaaggttgcaattaaattttaatacatcgcttttaggctatgttaggcctcaaatatatgattacacgcttaacatattcaggtgtaagaataagtcactagttagttagagagttagttcaagcttaagttcctatagggctgactgtattgctagttagttagctttcttttattgttttcagttagtggctgtctt

SEQ ID NO: 18705 - DNA, 5089 bp, Cannabis sativa
cttaaatttcgttcaaaataacttagttatcctaaatagcaaactatatttatttatataataattaatgatgattatgacccacaaataggagaggcatatattaatgatacatagaaatatgatcaccacccaaaattcacgaaaatatcagctagagtaaactaataaggtaaattaagaggaaaaaaaattgtatgaagatttcatattaataaataaataaataaggtaaagtggaaaccacacagaactaaaacctaaacaagattttcttggtttttttaatttttcatttcgaaaccaattcttttcttttctcttcctaattatcttagtgaaaagtttcacaacaatgaactatagtcatatatactctatatttaaatataacaaacaaaatctgagacacacataattaaagattaaggttaagtcaatatatgatcgagagatataaacatgtatcatcatataataattaggactggccaatatcatcaaatacaaaaatcaaatttctatagtggatgcaactatatatatatatatctatcttattccaaaccaatgaaacaattaatatatatatatacatataaaatcaataagataataacttagcctagtatattaactagggataattgtgatatatatacaattctctattcatatacttaaacaaacatttactttgatcatctatagtataattaattattaattaattaagcaatattttaatattcataagcgcaaataaccagtccaaaaattagtatatatattactttaattactattatgtaatgtttctcaacatcactatagtaatgtttatagctacaaaaagaacaaacagtgtaaaattctaaatatcacatgagtaaaattacgtacgaggatatataaaattacagatttattataaaaattaataatttttgtttatctatatatggttaataaaacaaaactgaaaagtagtgtagaattaaagaaggaagaaagtatatttgtcgaggtgtagtgactatgatgatcaataaatgaaaattaattagacaatatatgagaggatcgatacatacaatatatatatatacatgatatatctctgaatgaattaaatgcctttgatttctgtggtttgtatgtatttgggtattggccataaatgagcaggcaaaaagaaacactaatttcgatgagagagagagagaagagtggcattttggtaattttatgaaacagagaggttacgtaataattgtaataatccccacggaaatatatgcccacacaaacacaaacacaaaaccctataaaataaaaattcaatctttatttcttttcatttcttcactgatctgaaatctgtaatagataatgacactgcactgcacacctttatcacaccactccaaaaatataaaataaattaaaataaataaaagattgaaaaaccatgttcaaattattagctagaaaaaagaaaaacaaaagaaaataatatattgtatcttattaattatataatgttaatgaacaaaaacaatatatatgatgaaattgtaaaataaaaataattaattacccaaaaataacttttttgttgttgtctttgttagttagatgaggttgggccatgccctagcctaagctccagatcgagttcttcttcttcttcttcattgttattatgatcatcatgatctttagcagcaacagcccatgactgattattaggataagcattattcatcatataattactactactactactacctccgatcatcggccgtgacccggcggcgccgccttgattaggagagatagaaagatgagttcggtgctgataatgattatcatcactactgcatgcatttgtacttgaaatgtaagtgccggagccggcgccggcaccgttgtaattcgagtttggtaattggtagagaagacataatccgctaccgttgcctcctccattggcggcggtggaggagacaaattctcctgtagggattaagaaagaagaagcagccacgacagtaccagtggctgctgctccagatacaccaccaccaccaggatgatgttggtggtggtggttagttatagaatttgatgggggtaggacttggtgaagtctagcgcggtctcggcggtggacattcatgtggccgccgagtgcctgtgctgaccggaattctctcctgcaaaaagcgcaggtgtaggatctcggcggccacgtggtccccatgacgttgccggtgtcctcggcaaacgccctgacttcccatgagtcatcctcatgaggttcttgatggtgtttagggttccacatccaagaagtagtagtagtagtagtagtagttggggttagggtattagggtttaattgatgatagtgatcttgatcttgattttggttgtcttgtgattgagccaagttgtggaggtgggtcaaggagagaagaccgagctcagtagccatgggtacaagtgtttttttctctaataacacattttaagatatttaaacagatagatgtgatgatgatgatattttttgatgatagggagagttgggtatgtgggaatgatgaaactgaaaaggaaaaatgagacatgggctatttatatatatttatataaagataattgtataagggatgatatgggctatatagtgtggagacaaaaaaaaatcaaaaaccctaataatctatcgatgaaatcgaatctatcacccaaatttgacaacaaagtgattggattttagtatatataccataattgagagattataaatataatatctcactttggcatcaacgcccctttgtagaactacttgctcagctagtttagaatgtcttaatttcttattatagttaattataattagctaataatgatcatcttcaatctatctttttcacaccatcatcatcatcatattcaaatacatatattttataacgagtatataaatatatatatgaacttagctacagagcggagagtcctaaaacgcggtgagatatacggacatatataacaatgagatgtattttttgacactaaattaagtacattaatttattctaaaatagtctgtaatatatcttaattaagtatgttttgtcatcaaatgttttgtcatcaaactcattttaaaatgattatatcatgacccacaaatcttaattactgacatatattttataatagaatatataatgctgttttttttttgtccaaaaaagaaaatcttttattatatttcacaatgtgtaatatacaaagtatgtatatatatataatatatttgatataaaaaatcacactaaatatggtatttattcaattaccaaaattctaaatctatacaaagtatattttgttttgagttttaaaaaaaaatctctgaaaatctagcagtactttattattttatttttttcaaaaaaaaaaaaaaacgaaatttatttagtacaaaagttcaatgtgaattttaattttcaaaatctatttttttttttttttttttttttgagaactagaatcccaaaaatctatttatttaaaaaatagaaaatagacatattactagttattattattttttttccctatcaccttttagaagttgaccatttgatttattgtggggtagttatgaataattattatatatggtgtactagctagttatatctttttatgttacgtggttttcttattttaattttttttaggttttgtttttcttatggcttcaatttttgtatttcacaaatacaattaatttgttggcctcatatgttataattatagtttttataaggactattgggtcgtaattcaaatatgttttttcaataaattagtaacatgttgattttttaatcttgatcttcaatttaaataaaaaagaccaaaattatttattaattttgtagcttctaaaaatatttaagatattttacatatgttctatttttgtaaaatagaaatacttaagattttttttttttttgcttatataagaatactaaagatgtttgttaagaggaaaataatcaatacataaaatatttaattaatttcataaaatagataaataagatttttattaagtttaaatttttttattagtaagatatacattctattttattgggtgtaaatagatagatattgtcttaatttaattatatatactaataaatttatttgttatatatatatagtatgattattagtatatatattggttatataattatcaaatataaaatattcacttaaaaagaataaagaaatcttattaatttaaaattatgtttgttaattaaaaactttgataaaatactcacctccataaatattttacataagataaaatgtcaattgaagggcaagtttgtttagcataacttttttgtggctaattatgtaatacaattagtaaaagcccaaaaacattctcactttttatataggctatagatatatgatagtaagaccatgttggttttttgccctatatattttttttttgatgattttcatgatgttttttatggttatttttgtcatttttatgatttacttcattggattacatctaatggatttagacccaatcgatctaatttaattatttattgaatattgaattttgtcatccgatccaatccaatccaattgagtcatccgatccgatctgatccgatccaatgaatatattggattaaatcggttccaaccattggatgcattgatttggttttctattggattggataatccaatccattttagctaccatgatttcattaaaaagaaaaatatttataaaaaaatataatttaaaatttaataatccaacatacataataaatattagtttatccaacctaattctcatgatctcataataaaacaactaaaaaataaaaattattcaatacgcgcattttattaaagtttaggaatatgagaattaatattttagatttaaagtttttgtttttttttttttagacaaaatgattaaaatcactcatgaatt

SEQ ID NO: 18706 - DNA, 4090 bp, Cannabis sativa
aaaaatcattaatggcggcggagatgatgatcagaggaggtggcgcgtcgagttcaccgccagctttgattctaacatctggagcaagtggaagaataagagcgattttctctccacgcgctttacggagtcttctgacgttgatctacgccttcgttttgattttgattttgccttttcgtggtcggagaagagcatcgtcgtcggagaagaaggatcgtgatgagatgatgaagcaggagattattatttgtggcggtggatcttcatcttcatcatcatcatcatcatcgtcgtcgtcatcgcagcagaagcttagaaaaggatcatcgacggttgtgatgagagtaccttcggctatggtttcgtggagaagagcggcggcgatggatcatgaggttgcggcgaggagagctttgtcgattaagcgtgttttagaagaagaggagaagtgttgtttggttagggatttttcgttgtttgtaacggcgagaggtgatactgtgtttactcagtcgtgggctccgccgtcatcggtgaagatcaggttagtctccgaccaccgccatttttaattaaatttactttttcagaaattgatttattattatttttttaaaatttttaaaataaaaaaaaaataacattttcagaacatttacgctaatttaaaatattccttttgtgaagaaaataagataagttgctttttcatttctgattctgaaaatgacccttgagaatttattaatatataaggaaattctatagtacccaaaaaaagtatggtagtaataatttaaaagagtcatgaattgtttgttgaaaatatacacaatcatgttattatttttcagaaaagaatatttgatgtaatttattggaattgttgcgttaaaatgagtaatgttatatatatacaacactcaaatttgttgtgatattaatttttaaagaatatcactaattaatcaagtgttatcaaatggtgtgtaatagtagtaatagtaatgttctgtgtctaaattttagtcactttgaattgtgttgttgggattaattaggcttagttaaaatggtgtgtaatttgagaatgtctcaatcattattgttaagtaattggttttactctaaattggtaaaaaagtaaaccaaaatggtgcaaacgttggagatataatttatgaatttgttgcaggttgattggttttttatactctgtgaatgtaactgtttcaattttgtttttgtacaatattattctatattttggataataattttaaaatgggataaaattgtacttgtaatttatcaaaataaattcatttgacttatattataatatatttggtcaaacacagattggatatattttgttgataatgattagaagatttaataagtaaataaaatcaaaccatgacctgatgatgaattttcctttttgggtataatatatatttatgtttgctcgtatatatatattcttgtttgtatcaaattcaatgacgtgatattcactcttaagatttcaaaggaattattataagataatatatattctttggatgatgtatgtcctatatgcaatttcctatctttgtttgttacagagaggaccatgccccaagaaattcaaatccctagtaataaattcagctattttttcatggttgggggtcccctctactgttctttgttaatgcaaattaatggttgattaggcttgtgccttgaattgttagttgtgatattgaatatagtttagtgggcacagtttatagttagttgatatcaaattaaaattgtttaaataatgaatgctaatcatatcaatctcaaatgatattaatagtccttgatgaggtaactaaaatttaatgtgcattttcaatttgattggaccatttttcttatcatcatatatagtaacaaaatcctaaatgtattttccaggggcttggttattattttgcacggtttgaatgaacacaggtttgttagttgttcatatgtattttcggttgattttattatttgatgattttgtttgttgataatcttttacttcatgttcaacagtggtagatacagtgattttgcaaagcagcttaattcgtatggttacaaggtgtacggaatggattggattggtaagttttcgagaccacattttcgcattctagttgttatttggtactaaactcgacagacttacactacttagcatatatcgattattgtgttctatataattttcatctagcttcggcctgatcgttctagtcgttatgactagctcggtcattgtggtctactaattccatttccatctagttccatggagtgttgatgatacaagaatcatctaatattgaaacttttcattatgaattttgtatttcgacttgaaaaagaaatcgggggtttcgggaaatgatttcttgtttttttaaaatttgaattcaatatgtacaccacttgccatgtcctatgtatatgtttggcccttttttttttaacttggccttcttgaagcacggtcctagttctatcttcgggataagtgtaagtatggggcactggcggtcatgggtggtagtgagtctcacatattctattttcgattaaaatatgttcgatattaaattgtactaatagtaataacaatagtactgctgtccctatagaagagtaaataattcaattttccttaaaggaatctgcatttaattcctattaatattttcacttagtttatgtacaatgtttgtttctatcttcaattaactctctacacactaatactttagtcacagagagttattttctcttttctgttttgtttagagtaaatgtcattagttaatgaatcaacattctccaacatctaatttggatgttgcagggattcattatttgggcttcattgctaacttgccaagctcctcttaataagtaagccggattttcaattttagcggttttttggctcgggaaaatggagaaaacataagcatagttttgtttgaatttgggcgtggacactttgcgccacttcggtttaaggaaaaaggaagaaaaagagtgtagtagagcgaacaatctaacaataagagagtgtaaatatttcatctaatctattattcatctttaaattctctcatattttataggtcatggtgggagtgatggacttcatgcatatgttccttctcttgattatgctgtttcggatacggtatgtaactattattcaaagtttcattactcagatatgaaataggactaatcatatctcattattctatgcagaaatctttcattgagaaggttgtagccgaaaatcacgggctaccgtgtttctgctttggacattcgaccggtggagccattctacttaaggtagacattgtaggcattacccaaaattttccttaaaacattactagtgtgttcaaaaacttacattgctttgaatttttttttatgatcttataggcaatgcttgaccctaaagtggaagcgaatgtagcgggcctcgtgttgacatcgcctgcggttggagtacagccatcccatccaattttcgcggtgagaatccaatactttagattttacttctcaaaccattatgcattacaaaaccgaatacctcaaagaagtatgtctaaatcaaattcgcaatgtttctatgtctcatctgatctttttttaattttcgaaaacattatgtggcagattcttgctcccattgtctcatttttgctacctagatatcaagttagtgcagcaaacaaaaagggcacgccggtttctcgtgatcccgaggctttagaagccaagtattcggatccactggtgtacaccgggtccataagggtacgaaccggttacgagattctcaaaataacttcttacttgcaacaaaatttgaacaaactgagagtaccctttctagttctacatggcaaagctgatactattaccgatcccgaagcttctaagaaactatatgaagaagcttcatcggtagacaaggaaatcaagttgttcgacgggctattacatgatcttcttttcgaac

SEQ ID NO: 18707 - DNA, 5064 bp, Cannabis sativa
  modified_base (3925)..(3926): a, c, t, g, unknown or other
  modified_base (4486)..(4491): a, c, t, g, unknown or other
tggagagaagggaccaaggttgtgggtggtgggttgtgggtcaagtccttgggtgagttcagagagcgagagagataagggaggaagagagggttagatgtttgaagtcggaggggtagaattgggttttataaaatgttagcctaaactaccaatatgggctaacttaggtgtagaaaaataattttaatataataaatgcataaaaatcaaatttcccttcctttaggccattcaatgggttcttcaaggactcttaacagcttttgttgtgcaagtagagaccttatcttcctcctccatattctatagtcacctgatccatcaaatttatcaatgtgagttttaagactactcatattgtatttgataggaattaaatcagatttagtgttagaaatttctataggatcatttaatggaatgttctccgaatctccaacatttgattcctcctcttgattgccatcttcatgttcttgaagatcaaattcctcttgttcttgattttcgatatcttgcagacttgcttcttaaatgtattaatttgtatctttatttgcaaaatgattttctttcaggcccaacaagcaaagtcaagagtcaaagattgtcttcactcaccactaaggttcgacccaacaacaataaaaagcaacccaaataatgaaacgctaaagatacaagaaaccttaatatataagggtgaataaacacacggtaagacccttaaagcatcaccttcttcttttattcttctctttctattagttgcaagggtttcaaaagttcaagggttaggttgtatggctctctattctttctcttctacactctcgctacaccagaaaaaagaacccaaaaaaaaaatactcaacttgaaccaagaacactcaaatcgagcccaaaaatttctatctcaaaatccaaaaatttctatcttaaaaactcactctctcacggattcaaacactcaacccgaaaccaagaataatccaaaaaatcacaaagagactctcaaccaaaactctcaaaattgaaactaagaacagcacaacaaaataatctataaaaaaaaaaaaacaaaagttagggtttagagaaaaacaaacagggcaaagaaaaacacctaaaattgttcttggagtttgtttactgagatttttggaaactaaaatattcaagagctaaagaaataataaatggtgaaaaataagagagaaagattttttacgtggttcgggtgttaacaaactctagtccacaagtctttctattagcatcgttgggcaatattgatgagtttacaatgttatgcaggaaatcctaactcttttcccttacgttctttcttaagaagaagaagaagaccaaggatgattttaccaaaaattttgctatgtgtttagttggcttgccccttttgcatgaaaatagtaggggtatttataggctaagtcatgagcgtgggtcgccccacgacccacctagagtctttgctttttttccactattgaggtaaattacatgcaatataagactgattagttgatccttaaatttgattgctggcatcacacgcatgtgggagcgtgtcccttagggaagtcatagcgacagatgaataattgaaatgactcttcttttaatgaacacattactcaaagcatgcaatgatgaacatcaagtgtttggacagaacgttaaatgataacgttttaacttctcaaccattgaatgggaggatactctttaattgagataatcaaggtcggtcagtttaaagggcaaggacttcaattggtgcataagtaaatttaaaaggtttattcgtcttcaaccttagtaagtttcttctattttttttagaattcaaagctcaaaaatctctgctcaccttaccccctatttgatgaagacttaggttgctaacattgttgcaactggacatttaggtaagctttacacactcgggcttaaagtacaacacccttcctttacctgccttattattcggcaagtaaccccacgttctgttgactttgcataatctgcgttaacattacggttgtattctaattacttaatcctttgaaaataggtggaactcaaatattcccttcaattatactaactttaattaacatttcaattaaataataaatttaaataaaataaaatgttatgattataaaaaaaaaaaaccataaataataaatttaagtaacatatataactgataaagataataatacataaatacatattcattttatatattattgtaaacaaattgtaaaaaaaaaataacctatatataactagatcgtgtctaatgttgatataataaataattattattttattttatttttgtaaaataatatataaaatttttgtgctcaaccaaataatgtaatttaattaaacattatcatacataattaaacacaattataagtttatagacatattttccttcatcatactcatcataattatattattttgaatcccttttatcaaacagcttggttatttttttatatatatttttcaacttcttttttgagaattttttccataaaatagtttttcttaaaagaaaactatatctttacacaaataatatacaaattcataaaatttgcaatttctccacaaatatacacattttatataaaattaaaactattaaaatgttataaaatacaaattttatgggaaatatgaatcataaattattagtatataataattaatgctgatattttgttggataccaataatatctagcacctctaaatatattattcttaaagattattatatcaaaatatataaaagttgatattaattagactaatagtcctattaacacataaaaaataaacattagacttttttaacatttcctcctttgtttatttattcattaaatttgaaaaatcacagtaatgttttccccgccacaaacttttggttaattggtttggttgttcggcgatggacccacattgactatgtttcattggctatctcttcgactcatccgccatactttaaactcacttatttgtattattttcagttcccaaaataccctttcctcattctaatattactcagctcatacattttcaacctttaattaaaaaatatgaatgcttgtatttttcaagcaaaattttatacaaactctattcaataaaaattaatctttaacattcaaaaaaaaaaaaaaaaaaaattctttaagctgccgcctcactgaatttatgtaaaactaaattatagatttttgttatgtgatttaagttcattgaatttttgtaatttgtataaaaaatacaataatttttactaaaataattttaaccctatgaattttggtaggaaaagaatatgagaaaaatgtaaaatatatatatatatatgtttggtatgaaaataaattgtataaataaaaatattaattccacaaaatttttattaaaaataatctcacattgttaatgtgtaaaaattaaataccatatatatattagagttggtctaacaatgtgtgaaaataatgaatgagttactccttttattactgtaattgggtttgagattgaacctcatgtactttagttacttttattctaaagtcgagcattatataagattcataaattactcattaattttgagatagaacctcatacatattcattttaaattctaaccatttttttttaattagtgaaaattctaacaattttgctttgctaaatatgaaaagttatttttttagtcttcataatttttttcctacattttcttacttttttttcttaataaaatcaaacttctaaatacagcctaaaaaattaaaggtgttttcgtatttttacattttaaaatatttttttatatatanntttacgaaattttacacaaaaactactatagcaattaacaagcaacttaaatagcaattgaaatccgcataacaacccacataaaacccatcagagtaatttaaatcataaattaaaaaaataataataaataaggtaattttccaaaattaaattagtaatttaagatgaatatttattatttaaataacccctaaaaattattttaatatattagtagtaataaatgtattgcacttttttgtattcttcttctgaaatacatgtttttttttttttttaaaaaaaaaaacagtttgaaatacatgtttaaacaatatttattcttaaaagaataaagtgtaaaattataaatgttaaattttttctcgaaaaaaaaacttagaaatgttaaactgaaaaattagttcattacaaatttatctttcaagttattttagacaaaatatataaaatttttgtatatcagtttataaattcagaaaaaaaaaataaagtttttttttcctttttgaaggtatcaaatcaaagcaaataaagagttattattattattattnnnnnnattattattattattattgttttcccaatcattttctaataaatctagaaagatacaacaattagataaatacacattaataatagacccactattttattaaagcttatcaagtagatgtagggtccagattctaaattctaatactaatagatagggactccaaactaatttttaaaaaacagaggagaggtggaaaggaccaaaattgaaaattaaaaaaatgactgagggcattttaggaataatacaaaaaaaaaggcgggcttgtttatgaatgggcggatggcccgagacccaaacttgggatactactgtcctgtcctccactctctctctctctctctctcactatcatttcaattatcaaacaaagctaatcaaaaccaaaaatttcaaccttttctctttgtcctcaaaccccaataacctacttcctttgaaatgcagtgaatttgaagaagaccccattccctcgtctcctttctcatactccagtttattcttctttcatctggactggatttcattcacacccgcttttcctatctcaaggtctttccactcgaaatt

SEQ ID NO: 18708 - DNA, 3227 bp, Cannabis sativa
  modified_base (97)..(108): a, c, t, g, unknown or other
acaatacttgttgtgactaaaactaaattagcgactaattgcaactaaatactatgttttagttacaagtagcattttgttgtgactaaaagtcacnnnnnnnnnnnnaaaaaattatgttatgattaaaaagttatcactaaaagtaacagttttttgtagtgtctacctgtactatatctttagcttacgtgaacaaaatttaggataacagacatagtcaactattttgttttgaatgaaaatgtgaatgggtttttgtcccacatcacttttagattaaaattgacaaaaaccaaaggttataaaaagtcttaagcatttgatatattttttacaccaaaacttgctcatgaacatttcatatcatttagtcaattaagtctttctttgaaaataaattattagtgttataaaatatcttcaaatactacttagagtaattagtttatattgtgacatatttagttccacaaaattaaaaagctgtgttctttgttacttttctttatttcattttgagagatagacactgttgaaattctctagcactaactaaaggaatcgaatctatttaaagaaattatgtcctacacgggttttagattcacgtcaattgaaattgcactcacaattaatttttcttatctcttcatattagttattaaaatgtgcagagtataattaagaatattaatagatgtatattaattaatgtattttataatcattattatgttaaatattagtcctgctatattatgtaacaatatatatatggtttgcactcaattattatcatgtatataagttttatgtgtaataattagaccgagctaagacatccctcttaatttttggtcactataaactaactctaggaactttgagatactggaaggccacatttcgagccctgatacaccaacactgccacaacagcccggccggaaattattcctacaaaaatgtgaatgcccatgtccacgacgtaacaatcaaaacaatctataaacattagcttcatggattttccaccccaagctttagtcttgtgaagacaaaatctactcgaggtgcaatgatgatcaacatcttccctatattaacatcacaaaccacacaattacatgtatacgtatccgcaacactgtaaatgactttaagtcttcaaattcaacctacagattatattttgttatcgagtttttttacaatattaattactatgtgtattattttataattttttttatctatctatttattaaatttctgaaaaaaagtttcaaacttaacatcaactgttaaagtttagaaaaataaaaaagaaacatgttaaaacaagaattgtccttaaataacccacttttctgtatcaatataatatatatatatatatatatttatttatgcattttaatttgttgattatgctcgcaatatgagtggtccagtgataccaacgtagtttgaacagcttttctgtgattctttcattatttgctgtctagctatacattgattgttcgaaaaaagcactttatagcccagtccatacataaaaataaagctttagatacatataagatgtgcacgaaagcttcaagtaacaattagtaagaagaaacattaagccacgcggttgtccggctatttttttttatacgacaattatatataatgtaatataattctacctatggaaatacttaattaaaaaatgatatttcaatcttcaaaagaagaaaaaaagaaactaactttaaacccagtaatctttaaattataatacttaagatcaaaccaaccattacctaatctgagaccagaggcagaggagttggcccatgttatcactaaaatgttcaacttgtatttctttttcttttgtttattcttatcatgcatatatatggtttattgtttaagaagttgagcaaccgtagtccaaatattactcatatcacaacttaagttagagattgcaagtaaagtctcttttaatttttgttgatattttcaaacccacttccatctaaattattattctttacaagtttcttttgctattgtttactaaactgcaactggaatcaaaataatcaataaaagaaatgaaatagttttaaaaaaaaataatcacaaataatattttattatgttatttaataaagtgttcgaaaaaaaattgaaactatattattttgtttacaagaaagataatcataatactttaatttgataaaattattattattattaaaacatttaattattttttatttataaatttttaaaggacatatttattttttttaattaataaaattaaaattaaaataaaataagttagaaaaaaaaagtgtaccaattttctataaaaaataggagaaactttccttttttttttttttttttttttcataatttgtgtagggttcactattttcttgctttcgaaaatttaataaatagttctacgaaattaatatcaatttattaatactcatatatgcatgcacaacaaatacctacatcattatcaaattaacagtttattatgtcgtctctcattaatgtaaaaccaattaattaagccgggttttcaaaaaataaaataataattgcgcgttaaagtggattgaacgctaaatgaaaatcttatagtgcattttgtttgaactacgtcttttcatggttgacccggctagtagaggcttataatattatattagtatattaagttaataaaaccacaaagacaacccgattatgcataagtaacattaaatggtaatgcagtcaccgccaattaatttttatcagtgtacacaagtaataatttagttataatgatatccacccatgttttaaattaatataatagaaaaagaatatatattgataaaatgattttcttctcaagaatagagaggaagactaattacctaccactattatggagtggtcttgccatatgttggtcaatatatttctattttttttttgaaagaatatacaaaattataaaatttaataaaaaatagtatgtaagattatgatggataatgtatcaaatttttaagtgaaagagaaaataaaataaaataattttacattttatgtgaacaaatagccaattcatcttatatacactactacaaaattgggctttagaggcggtttttaagggctttcagcgtcggtattggcgaaattcgcta

SEQ ID NO: 18709 - DNA, 1994 bp, Cannabis sativa
atttgtgtctctcctatctctctccctcctctccactccatccacccacttctccctcccaccaaacatagtgttaatatgagagttagtagataattagagtttaatttagaattaaacttttaattattatttacttgattatggagatatattcgaattctaggtctgctaattatgatatgtttttcatattttatgtcggtaacagtagaaatacgacgtaaggcctatggagtcactttattttggtttagtattttagaaatagtggggcgatttagatggatattaagaatgtcgggagtatttgaagttatagatttgaccaaaatgcccttaagtggcaaggttacttctttgtaacgcaaatggtaaataagtaattttaccttaactacttgtttttagtgaattaagggaattgtttttttaatccgttatttaatcaaggaatatgctgaataaggggttagttcttttaggttgaaattagaacaatatagaaaattcaagttcttcttctttctctcttggggtcggttcacctagggccataggagttagaattttttattttgctttttctcaacaatttagagagtctcttggaaatccttagggtttgaaagcagcaattcttggtaagcaagttctcctcttatttctataaaatttatgatttaaagtttaagtgttcatgcatattttgaggttaggttgttgtagattcgaattagatttggttttgttttccaaggttgaattgtagttgtttaagctgatttaggttagatttgttgttagttgttgtgtttggacaaattttgagcttaagagctcaaactttgccctttcattgtgaaatcaaatttaggggtttgttcttgcaaattttggttgttttgtgtttattgtggttggtttaggtactcttggaagtttgagacaaataagagttgaattaatttgtttgtggcttttttgggggttcctgcactcaatcggtcgaccggttcagtttgcactatagaactggtctaccggttccccccaggcaaaccccatagaatcagtatttttcgataggaaaccggtttaccggttgtgacaattttaggcaccctaaattttcatgttttaacgatatttagggtattgccatgttatccatcgatagggaattttttaattttgattttaagtccccaagaagtgatttagcgtatcactcattagttttacgtatattgtgacttaggggcctataaactgtagagcagcagttttactcaggttgacagacacacttgaattcggaaaggtaagattagtataattatttgcatatgtgattacatatttagtatgcgtgtttatgaatgcctattagattacgttgaaataacagtatcaatatacgtagagttatagtggatactgatgaatgtatgtctggcttaagtactgattgacgttatcacatcggtacgactagagtaccgagtatagactgatattatggtcaatagtgctgtcatacaaatgttctagactcaatacatgtgggacacgagatagagttataattgggtgtatggacgcctaattgtaatctggtgtatattaatatatgattatgcttttcttactaagtctgtcaattcacagtctattgtttacatgtgtaggtaaaggcaagactaaggttgaatagcagtgagtgcaagcagatgaagattatacatgtcaggacggttagacttggagcgtgcaatcttcaagacagtaggccgtattttgattagtcactaggcgacaacttttgtatctaatattttgtaatatggttgtaaatatgtatatacgggatcccgatttatgcaaaagatatttgttttcaattaaaggataattcagtaaagttttaattaatcacaatttttcaacaaacccgttaattagcaacggattacataattaatacaaaatca

SEQ ID NO: 18710 - DNA, 2283 bp, Cannabis sativa
cttgaaccatggatgctgacgaatctgaggaatagtcattcgtgtcgttggatcaactacaagaatccttctaatcaaatctcttgcaccaagaggtaaagacattggtagattgtatatgccatgctgaaatatgtagatataatataagctaatattttcttcaatgatgaatttaagctaagtagattaagcaatacctttatttttctataaaagtctgaaatatttccttcatcaaagggatgttttccacaaagaagagcatacaaaataacaccacaactccaaacatctacttcaggcccaacatacagcttaccaaataaaatctagctcgaaatgaaaaaaaatataaccacatgaaagtaacagaaaaataatatacaaataataaagttataatacaaaaataatatacaaatatcaattattcgtattttttgtaaataaaaacttataaatcataaaaatatttaaaattctgtacaaccgtatttttgtaagtcttttgaactattttggatatttatgaaaatattccttacttaatacaaatatatgtacctctggagaagcatagctagggctaccacaacgagcgttaagaaaatggccatcacgcattacattacagaaaccgaaatcagtaatcttgacattgtaattagaatccaaaaccaaattctcaagcttaaggtctctatgaacaaccatatttctatgaatatactccacaccaaaaatgatctgcctcaaccaaaaacatcaattttattaaatcaaatagtactaattaagtaacaaagataaaatttgacatgatttactccactcattacctgctgaaacacgctacgagcttcgtcctcattgaacctattttgtttataaagagtaacatattcaaagaggtcaccaaactcagcatactccataacaataaagatgtgtgtaaatgtttcaataacctcatattgtcttacaacatgaggatgcactaacaatcttcctattttcatttcccttctcactgaaaaatagataactcatatcatgaataatcaaccaaacatacatacatacatatctaaacatatatatatatatatatatacacaaacccttttgttccatgttcatgtttctcatttgagccttgttaatgatcttaatagcaactttaagaccagtcaacacatgctctgcaaggttgactgtagcagaggcaccaaaaccaagtcttcttccaagcttgtaattttgtaacaacatattatctccatttttacttgatccttccatttagtcactaatcttaattgctaagattatttaagaccacttaacaacatatttccattacttggtttttcttttttatacacataatgatcttcgagtgcaacgtcctcttgttgttaattttgtttttttcaataattttgggttgtctttgatgggaataaaaagatatcaaagatgggattatcttaatcctcaagtaggattaatgacatgatggaccacattataagttgtttggattctaaaattgacagccactatgttttttttatatatatattctttaggaaactcaattgagtatattatttctttttcaaatttattcactttttagtatcttatttttgtattgtaatataaaagaagaatatggctattaagtaacttaaaatgcttaatattatactaatgtggcgcattgtaactaattaacagttttttatactatttattaaatgaaaatatgtatgactaatattgaattacaccaataacgatataccacttcttgtggtgattgacactttaaggtaccctttaacattttccataacagaagttaaaatctcaccgtaaaggtctattttactttagtgctctaaattcatgcatgtcgtgctagttcggctcatatttttctatacttttaaaaaatagaacctgccataaaaaaatatgaatcataccgagccatgccaatatttttaaaagttaagcccataaacttggtatttttatgtggtgttgtacttatttctagcatcatgttgtattatgtttatacctatattttttcgtaccttctaagctcgggccaagttcatgtcatgtcaaaatacccaattggtagttgcagcactactctactcaacccaaatacatacaaattatatttagctcccttgttgctaccttagattgtgttttggtgaccatgaagtttctgtgtaataataaatacatgaaattata

SEQ ID NO: 18711 - DNA, 4435 bp, Cannabis sativa
aaagattatacctggtgcaatgaatccggtggtaccaactattgcactagatgacattgaagaagactcatctagaagtttggcaataccgaaatcagcgatatgaggttccatctcaaaatccaagagtatgttcttcggtttgatgtctctatgaactattgtaggatcacaatcaaaatgtagataggccaatccatgtgcaattccaagtgctatcttatatcgaatactccactctagaattggtggtggattcatttcatgtagaatatcatgaaggctaccattttccatgtaattgtacaagattaaaccatagtcttttctcaaccaaaaatctttcaacttaaccaaatttcgatgcttgatcttcccaagtgtttcgatttctctaatcataccgatttgtccttctttgttccccacattcacaagtttctttacagcaaaaacttcattaggacttaatatggctttgtaaacaattccatgagatccttcccctatgacataccggtcactaaaattctctgttgcttccaccactttttcgagcaaggaagatggcccttcctctaaagagaagctcatttcccgtttcgatcttctagaaaagaaaatcacacaaaccaacccgaaaataacaagaacaagtgttccaagtatgatcatagcaaatctcaatcttcttgagacatttcttttgcttggtgcataatcacaaggctttaacatgttgtctttactacatggtaagtagaggctaggattaccctgaaccaatgtggatgagtacaacaatttcaatagtgtttttggtacaacaccattgaaatcattgtatgagatattgatctccaacaatgttgttatgttgccaagagttgctaagcttcctatcaagttgttgtgagaaatatccaacttttctagcttgatttttcccatttctgatggaatcttcccaatcaatccattattgctgaggtttagcaaataaaatggattctcaaattctccaattgatgttggaatctctccaccaagaagattgccaccaagttccaacactgagagcttttcaaactcgaacaagaagcttggaacacccccggtgaagcggttttcactcaagattaaagtggttaaacatgtcaagcttgttaaactcgagggaattaaaccgttcaaggaattgaaaccaacatcaaacacacctatttgggtgcaatttgatagttgagatggcaaagaaccaactaagttgttgtgagaaagaatcaaactttgaagatgcgcgagtttaccaagctctgagggaatgaatcctgttaacttgttccatgacaagttaaccaatgttatgttggaacaatttcccaagcttggtggaatttccccaccaagcttgttcgcgctgatgtccatgtatgaaagcctcgagttttctacaaactcgggaagaaccctagtgagcttgttgtgtttgagaatcaatctctctaaagttgaacatcttcccaattgtgaaggtatgttaccttcaagttggttaaaacccaacaaaagcttcttcaatttctttccatagcaaagatttggagggatttcaccactgaagttgttactagtaaagtctaattgcaacaacttgctgttcactcccaaattttgaggcaaactaccaaagaattggttgttatacaatgaaacattttgtagtttccttaactcactcatctccaaaggtaactcaccactaagactattgttatacacaagtatttgctgaagactctgaatcttccatacactaaccggtatttccccgctcaaacgattttcaaacaattcgaggtcttgtaactcggttaagaaccccaactcattgggaatttccccaacaagttggttttgatacaattgaatcattttcaatgacttacaatttccaagctcagatggtattttcccacttaattgattctcagctaagtaaagctcttctaacttaactaatttcccaaatgaagatggaatattcccaactagattattatgaacaactgaaaattgtgtcaaactagtgcaatttcccaaacttggaggaatctcactacttaaactattcaatgacaagtcaacataactcaaattcttgcagttacttaatccccaaggaattctaccctcaagaaaattattggcaacattcaaatcagtaaggctactaagtttgctaaagctctcaggtaaaactcctgtcaattggttgttttgaagataaactatttgtaatttactcaagtttcctatactcgaaggaatcgccccgaatagcttattgttttctaagaacaacactacaagatttgtcatgatcccaacatttgaagggattgaaccacttaagttgttaaggcctaaatacacttcttctatggttggaatttggaacaaagatttaggtattttcccatatagagaattgttatacaagtcaaggactcttaggttttgcaagtgctttaggctaattggtatcactccattgagtttgttatgagctaaaagtaaattctctagaagagtacaatatcccaattcttgtgggattgagccatataagtagtttgaactcaattcaagagtcttcaaacttcttaattggcctatttcaggtccaatatggcctgaaattccatagctagagaggcttaaggttttgacatggtgagtattgtcacattcaattcctagccatgaacaaggagtggaatcagaatgattccagctcgaaatcaaggaagagggagcggaatcccatttttcgaggagtgaaaggagagccactccatcagagctcaaagcaaaaactttgtgcatagaaaaagaatagcataataacatatacaacaagaaactagacaaaccaaactccatacttagaacaagaattttagtgaaaaaagaaatgggatttatggaatcttacctattcaaagcttggatggaagaaaaaggaaaagaacatcaaaaacttcatggaagtttattaagccattgaaacaaagtatggagtgtatagtagtaaatggtgttaagtaatcattgaaacaaagtatggagtgtatagtagtaaatggtgttaagtagtgctttgtttggtgctagagaatgataatgcattaatccttatatacaacatttgcaagccataccaaacatagctttttctttaacttttggtagaatcaaaagtatgttttggggccaaaatgacctcttaaaaataataattgaggcaatgcttttgttttttttgaatgaactttaatgacttgacaaaccatactcataaattcttaaataataggacatttttttgttcaacgagaagttatattctttatttttttttttattttggggattattttacaaatacataaaaataacaaaaaaatatatatataaaaataagactgtacgaaattttaaatattttaaatatttttacaattttatttatagattatgaagtcttttgatgtatttttatattacacttttattaattttttattatttacttatttttttatttgtcgtttagatgttatttttctgttacttttatataattattttattatttttatagaacactgtaaaaaatataaaaaaaataaaaaatttacaaaaaataatactttatataattatctatatataaaatatgttagtgttcttttatagagtgctcccaataactatatagtaaatattgttgttttaaaattgtagggatataaatttttcaccataataaaattattttaaaaatacatatatttgttttagtaattttttaaaatactactttttttttttgaaaaggatccaatattttctttcttttgagttgaccaaacataggtttttgacttcatttgaaggaagtctttattgattcaagtttggtttaaagacttctttcattgaattgaatttggatgagtcatttaaacgtggaatcttttgtataataaagtaagattatacctaattaattggttgttaacaactcttatcatgtttatatgtaattataatacattatgttaaatattttccaatcatcaaaactaattaatattagatagagattaatgtatatgaaataaatattactacaccttaatataaataaatgtatatgaaattaaattttaaattagaaaaatttataccaataccaatactaatattatagtagagaaattaaaattgagaaattagaatgagacacaaaatgatgaattagagaatttggcgaagttttcttcaccctagagtagaaaattaagaattggattggatttggtccgatcgtaatcccattttgattagcttcaattttttttttttt

SEQ ID NO: 18712 - DNA, 10267 bp, Cannabis sativa
  modified_base (3943)..(3946): a, c, t, g, unknown or other
  modified_base (7071)..(7081): a, c, t, g, unknown or other
  modified_base (7594)..(7596): a, c, t, g, unknown or other
  modified_base (9094)..(9137): a, c, t, g, unknown or other
  modified_base (10241)..(10241): a, c, t, g, unknown or other
atgtaccgcttaaaagaagtttgacaatagaaataaaaagattaagcgacaggagcaatggaatcggttacgaccttgcttataccatctgcgactttagcaactgttgcagcttcagcatcattgggaaaaagatttccacctagcccttgagtctcgataggcgacatggtacggaaaccattgtccatcatgactacctctggcccgaaaatagaaaagtcaaatttcgatagtttggtcagggtggtgtatatattatcagaaatatcctggtcatatgccttcgtcacattctccttttcatgtcttcctccaatttcttgactcgcatttttagagtcttgacctatacttccacctgaccttttgactttgccgagatcctcgacttccttatctttgacagccgcgtctaattttgctttctttagaccctcttaaagagtcgagtttagtttctttagaagatcgagatccttaaaactcgcaacaaaagctcacgaaaacattgtcatgaattacgaggcaagttcagctaaatgagttagtagatcctcggtaggagtcccctcgacttttgaaacaaactcatcgctcacgaacttgtcctagagaaccatgatgtcgcaagccttgatagcaggatcgatcataactttctttcccttgtcctgagcaactttctgttgttttttcgacgagtcagctgcttgggtaggaacgaggtcacttttcctcttctgaggaatcgcagatgatggcgtcccagtactagccttagacttgtgattgaaaattggagcttgtttcaaaaaattcatgtctgcaagaagaatgacaagtaaggatttgatagggtaaaataatattgtttagtaatatactagattatattacctgatgttggtctcaaggtttgcttggatagacgcttgtctattctttccttttgcttctcggaaggctttttgcacactggttctcactgaagtttagcatcctctaggatgagcttgtgctctcacaattttgtagttgtacacaataaacgccattcgcaatcttacacgggaaggtctcttaagactttagtgatttctagacgaatagggtccagtatagatcgaactagtctatctacaaacaaggaaagtaaaaattagcgtctatcaaacaatgaaaataaatacaaagtgtaaaagtacacaacgtaggaggtcgacgattgaagtcaatcctgacccctggtatcgagctaatctatctgcaaacaaggaaagtaaaaattaacgtctataaaataatgaaaataaatacaaagtgtaaaagtatgcgacgtacgaggtcggtgattgaagtcaatcctaacccccggcatcttaaatgagtggaaccattttaatttccaatcctctaaattggaaattgtgccttctaccctatttatttcagaattggcccatttactaaagcagtataagccattatcataaccaacgctctctacgtcataaaaaaagccaaaatctttgactgttggttctcctcgtgcatactccatatacatcgcataaaaccctagaattatgcggtagctgtttggggtgagctagaaaggagagacgtcatagtaagaaagaatgtccttcatgaaaggatggaagggcagcgttaccccacatcgaagaataggaattgaaaccaccacattttgtgttaggatgatcgcaggattcgtcaaaggaagatgaggtcgttgtgtttgcaaaggcttaggagtagccgtgtgaaccaaatccaacctcacaaatgttgacttatcatatttcttgacccgtgagactagatccttgtaggagaaatgttcgtttagttgagcattgtcaacagaatctatctcactaccttcaccttcctcttcgtcctccttttcacggtctggtaactcgttgtcctcacccatttcttcgacttcagtatctaaggcatgtcatgaatgaacgaggtaaccttgggctgacaccgtggactcgctatagtgcacttctaaactcattggtttcgctaaaacctgaaccactgtctatctcgtttgtagacaatgagccctcatgacctttgactacaggagcctcaccctctgacatcaaggttaggataaagctgttgctcctttctgattcatatgcgaaggctccctctttagagtcgtacctctggctatctgacaggtcgctcatctgaaagatagaagatcttttcagtatggtgcgagtgcaattttaacgagttaagtgccctcacccgcgttataaaaaaatttagaactagccgtgtatctctaaaaatggctgggtgtttctcagtgtcataagggtcatatcgctacatgaacattaagtcacggagaaacacccaccatttcgagaatctagtcagttccaacaaatgaataaaatgcgagaaaaatgaaaactagctgtatgtctcaagaaatggttgggcgtgtcgtagtatcccaaggggcatgcgatgatcgtatgaacattaagttaatgtgacacacccaccattttgagagcttatatagttttcatagcaaaaaatacatataactaagaaaatgcctaagagttaaaaagtctaaaaacggggtcaaaaagtttaactattcaaatatttgaaggaaaacttgcgagaattcaagatattctttgtaaaactcacaaacatttgaagtgttcttcccgaaactcgccagtattcaagtttcaggcatgtattttccaaaaaaatacagtattttgcctaaactacgaaaggaaagtagtaaatcctattgtttcatgcgttttctacccctaaaaacacagaacgcgtacaaattctcaagaaaaagaaaatggttataaaaaagataaatcactaaccttgaaatacagttcttcctggatgattctgtaagtagtgaagccttcaaaatcgttctcagttaaaagaaattcaaaaatttcaaaagaattttgagaatttgaaaatccgagtaagggaaagggagagacggaaatgagtaaggattattttgtatcatggggtttaaatactggtatccctaatttattgggatggagacacatggcaaaggaatgcctaaggtctctcaatccaacagttactaatgaacacgcctgcacgtaccctgaagggttctaatgatgtggcacctcaaaggaaaaaaataataattatagctgtctttttgaaaccctcgacaagacaaccaagagtcaccatctcgtgacaaccagttgctgcctctctcttatagtttccctcatgacatggctgtcaatcgcgaaactaggggcatgtgttatagtgtgaattttacctagaaactcaagatcaggctcccataagaatgacacgtggactcacatcccttgagggttgctgagttatcaaaagagggcctctcgagaataaacctcgcctgaaccaagctcagcaagatgatgtgaccttgatagtatctaatcacattattatgccttgcatgacgtaggaccaagaaggaaattttcaattctcgcacatcctgagttgtcgacgctaacaaggtatccgtatacgggactcgattaggacacagataccttaacacgagactcattagtctagtgttaataggaacacaccctaagcctgcgaggttgtgcgagtatatgaacaggcaactcacactatatgaagatcgcgtacgttgctgtatttagttaaacagattgaaactattttttcatttattccatattcaatgtaaaacaattcaataattaagttttgtgcaatcgaaggaacacttgctatatagataaaggagtgatctagtataaataagaagaagacagaaatcgttgcaacagtggactaagcagannnngatctgactgaaccactatactttttcgtgttcattgcgtttatcagtttttcaagtttgtctgtgtagtctcatttgaatactcgccattctaggttgagtactcgcgcttttttattaaataattatattgttatttttatttggtgttgtcaaaattcctccaacaacaaggggatttttgaaaatctctggcatttttcatatttttccacataggcatttgagtcatcaatcattgttggccagaagtaaccttgccttagtattttcttagataaactttgccacctagcatgattgccacaaaagccttcatgaacttcaaacaagaatcgtgtagcttcctcatttgttacacatctcaataatggcatggcgaaacctcttttgtatatcacaccatccattattatgtaccaagaagcttttctcattattttttcaagcttcattcttattgttcagaagttcaccagtgataagataggttgctataagagtcatccaatttggtgtgttgtttatcatctcaatctcctttatgcatgtgatggtaggctcttttagaaattaggttgggactaaggttactttgtttgttactgtgttgctcaccagtcgtgctagtgcatcaactgttacactttcttcccttagaatcttcttgagggcgtatcccttaaattgtgcaagtaggtcgtggatcttactaagatatgccaccattgtttctcctcaagctgtgtattatgctaggacatgatttaccaccaattatgaatcactataaatttctaaatactcagcacgtacttcccaagaaagttttaaactggcaatgagtgcttcatattttgcctcattattggatgccttgaatctaaacttgattgctctatgcaagggttgccctcccaaatatgatgagagcaatcccagccctagacaattggtcagtgactgatccgtccatgtgtaacttccagattagcttatcttcacagtttccttctgagggggtgctttttcttgctccctttctcgctcgagattatcttttaaactgcttgcctccttgcttgtgcattcaaccacaaaatctgttaaagcttgtctttttactgctatgccccaactcaatttccacttgagcagccaaccagatgcatctagctttagcaaaacttggcgtaaaggttggttggtgtacacccaaattggaagagcttgcaagtagggccttaaatttcttgtggataggatcaaacagtaagtccatttttcaattagggggtattgaatctcaacctcagctagtcttttgctgatatagtagattggatgttgaacattgttgtcttctcttatcatcacgacactcacagcatgctcggtgactacaatgtagattcctaactcttctccgtccagaggttttgagagtatggagggttgtgcaagttattgttttgttcactcaaacttcttattacctcagaggacgttgaagaaaggaacacacttgtctgttaattttgacacaaatatactttgtgagactatccaaccagttaggctttgcacttcttgcacctttgttggtgatttcatatctaggagggcttgaattttctctggattagcttctaatcctcaagcattaataagaaattcaagaaacttacctgagctaacccctaaggaaccctttaagggattaagtttcatggtgtattttttaacgattttgaagcattcatctagatcctctatgtgccccccatccttcttagagataatgagtatttcatcaacatatacttccatgttacatctgatctaatccttgaacatcttgttgactaacctttggtaggtagctcaaacattcttgaggccaaatggcataactttgtagcaatatagaccaatatctgcttagaaactagtgtgctcttggtaaggtggatgcaatcttatttgattataccctcaatgggcatccataaagcttaggatttcatggtcagttattgcatccacaagttgatcgatctttagaagtagaaaatagtctttagggcatgcctagttgaggttagtgaaatcgatgcatactcgcaatttcttgattagcttgggtactagtacggggttagctacccaggctgggtagaaagcttcaattataaatctatttatgcagagcatttctacttcttcttttagttcttgtgcatattctttgtccaataatctccttttttggtagacgggacaaaagtttggatcatattgagggcatgagacatgattgttagattgatctcgaccatgtcttcatgggaccatgcaaaaacgttgaggttttctcttagaaattttattaaagctaattttatttcgagcaacgaacccttaccaattttgagtttcctagtcgacatggtaggatcaatttcaacttcctctagctcttccactagcccaacatttgtgttaggttccccaaggtaggggtccatatcttcatccccgccttgggcgaattcctattaagaattgcttttacccttttctgaactctagacaaaattgtcttcctttttatcctcagataaagcgaggttataacattctcgtgcagttctttggtttcctttcagaccgcccactccatttcttattggaaattttacacataggtggaatactaaagtgatacccttcaagtcatataaggttggtcgacctaacatgacattgaaggtagaagttacattaatcactaagaattaagccatcatcattgtgcttgttggagtttttcccactgtaagtggtaggaaaatatgtctgagtggagcaacactttagttggagaatccatatactagctgagtgcaagaaccgatctttgagttaaagccccatcttttcatatgttattttgaacaaatatttgaggaagcttatgacagtcagtagtctcgtgatccgtgaggggaaatactgtgtaagttgtgcaatgccacattgcttgggtaaggtcaagtgtgatgattctaagactatgtaggttgggactacaaatttgaagtgggcttaaatggattgattgnnnnnnnnnnnatcaataaggtgcatcttgttttttggtagccaatcacaaaagaactccacaattaagtgttcttgacttggagtaatttcaagatgggtgatctcctaggaagttttcctatgaagcgcgcaagtgaggataaagcatgctggaaacacttgtgttgatttgtaaggacagaattccatgaagcaactagagtggcgtgcccgtgtataagggccatgagtccgagagggaaggcccaatggaggcttggagctggaatgatacaaaatggtattagagccttgacccagccagaagtgtggtcgacgaggacatcggaccccgtaagggggtgaatgtgtcagtcagtaggtagtcctgtgatctgtaaggggacatactgggtaagctgtgcaatcccacaccgcttatgataggtcaagtgtgattattttgagactgtgtaggtatggaactacaaagtcgaagtgggcttagatggattgattagtactacctatatcaacaaggtnnntcttgttttctggtagcccatcacgaaagaactcaacagttaagcgtacttgacctggagtaattttaggatgagtgacctcttgggaagttttcccaagaagcatgcaaatgaggacaaaacatgctcgaaacacttgtgttggtttgtaaggacagtcatcattgcatgaagcaaccaaagtagcattataagagccatgagtccatggggaaaggcccaatggaggcttgaagtggggacgttataaatcttcattatcaaccatggtctgagccatcattttgtttgcaatctgaacatcaacaaccaaagggtcgttatgtggataaataacgtggtcggatctacttcgctgaaagatatgactggttctccaatacgcggcaacttaggatttctttcttctatagctagaacattatctgtttgttcatattgtaatgcctgaacatatttttctctagcttttctcgagtctccagaaaggtgggggcctccaataataacttgaagatgtctgtccactggtggaggcatcaaatgactttgtttgttatttgtttgggcaaccctttattcttggttggtcttgacatatttttgcaagtgcgggttatttttcctaatgagtaattctatctctcgctttaagttattgcattcattagtgtcgtgaccatagtctgtatgaaaatgacaaaacttggtagtatcctttttgctcatgcctttctccatgggaggaggttttttgtatggcaccacggattaggtagttgtgaaaattgtctctatatcctctgttaggatggaaaatgccgtgaactttaaggcattttatattaaaaaaaaagttagaaaataaaacgtaaatttcaaaaaaaaaatattaaaactgaaatcaaatataattattcttaaattttaaacttcttaataaataattctaaataataattaataaaattatgtatttaattttcaaaaaataaaattactaataataatatgaagtaaaataatatatttataattttattatatattaaattatatttttaagtaactatttattataatactaaaaaaaaattaattctgcatggctatattatctagtttgtatataatttatatgtgatgtatcactactcaattaatttataaagtggggttcacacataaagtgtaatctctttattattaaagcattgctgtcttttggcgatattggaccacaaatgagtgtttgcttcttcaaattgttacttgtccttcttctttttctccaacatttttcttgcaagaaaaggtttacagaaagaattgtcactcctttgtgatatatttaaattaagtgggtgaaaatgtttaacttcaaagccgtataaagaaaatagtaataataataataatgagacaaaaaggactaaagattttaatacctagagaaaaagtcatcaatttttgctttttacaaaataataataataannnnnnnnnnnnnnnnnnnnnnnnnnnnnnnnnnnnnnnnnnnnataataataataataatagagttgattgtactttcactttcattctgataacatatggtttcattcttttttttattatcatttgatttcattaactaattatagaataattatgcactatttggttgtactaaagtggttataataaataatgaaaacatgagaataagaccataaagaaatggatatgaatcaaaattaaatatatgataatagaatgagttttccacattatctcaaaatagtgtcaagttaaagaaaatttaatttcattacttttctctttttcattcaaaaaaaaaatctttataacatcttcaggtatactattttattaaattagtgcgaaattttcacataattttactttaatatcagagttaaattgtgcaccaaattttataataatgttggattttgaatctacagtgttattttttttttttattctaaaccttatattattttattttaaaaaataatcttacattttaatcctcaaattaaaatttatcacaaaaataataattaatttaaaacactaacatatttgaaaatacaatataacaatagtaatattaaataaaataaaaataacataatactaagttataaaactaaaatgaataattaaaaataaacattaagtaaaattataatttaatagtcaaatagatcacttgaagatcttagccttgaagaatatcaaaatattagtaaaaatagcacaattccaagttataaaactaaaaagaacaaccgaaaataaacattaagtaaaataataatttaataatcaaattgatcacttgagaattttagtcttgaagaatatcaagatattaactatatagtcttaaagtattttgagaattttgagatgcttctataacactctaatatctaaggcatgttacatattttctaatcattgtgctaatctttgttaatcaaagagttttacaataaaagcgtaattaagtaaaaataaaactttactaaaaataaactgtatataaatgtttacaaattgggatcccattcctaattaaatatatatatattatatttgtgacagtcagcagtcccgtgatccgtaagggnaaataccgggtaagctgtgcaatccc

SEQ ID NO: 18713 - DNA, 4041 bp, Cannabis sativa
gggggtttacccgcagaaatttgggttgtgggggtttaatgaaaccaaaacgaaagtattgggggttttgccaccatttaccctttatattattgtcaggaccggtcctgaagtatgatgagccaagcatgtgcctcaatatcccaatattgtaagaaaaaaaaatacaacaaaatagtattttgtgtagtaatagagactagagagtgttattttaaacaaagaggctttttttaaacatatttaaacaaagaacctttaaacgagttttaaaattgtttaccattacactaaaatattaaaattttaattttaataataattaaaatatttattaaagaccccaaaatttaattttatgttaaccctatataccttaagaccagtattgtcctatggccgccaccaataaaatttaattgtaatgaaagttgaattattatgatgataatttatatgaaaagattatttggccttttcaaaacaatttaaatcaaaagtttgtttgtttttactctgtacttaaaattattagaatctctctagactattttgaataaaactagatattgtgatataaaacaaggccaataattccagtaaccacctgaaaatgacattattttgaagaagcaaaaaatgtggtgtcagaagaagttaacatggctggaaaatgtttagctatgtgttattagaccaaatttagtaagaaactaagaaagttaagagttatataggtagagattttcattctccatctgttaaatcttgcccagatattgaatctaaatccaagggtacctgaccattgtactgttgtacaaccaacactgatgctgctgtagagaaatctggtgaagtcaagagactaccaacaggtcctaattcagggcactcactcctcttgttcaaagctaaggctatttcaccaactggactccgacccaccaaaaatagattacagttaccgatttcgcggatggtagaaataacttgttcactgttttcaactggtttctcttcatatttgatggtgttgttgttagccttagtcttcttaaagttggtcaagacatcgtcgtcgagtgaactcgaattggtggtgcttgagccactttccacgttaacaatagcattgtccccagcaatgttgggttccactagaaatcggatgaccattagactaatgccggggtggtcagccatccgcgaaccataagcaagggcctctctgtcatcttgaccgccgaagaagagaactgtaacgaaacaggacacgttacttgcagcaacatggctattcccaccaagtccccggtcaacaaagattccaacagagcaagttgcatgctcaagtacccttttgttaacccaacggaagtcacttcttgtaacttctaatgagccatctaatctttggtgcttgtggaatggaaggataatgattgcagccctttttgactcggctgtggaacagacatcctcatgcatatcggacattgaagagattgatgtcattggcttaatggatactcggcctagttgcccgtaagtctcaaatgccacaacaatattgctagagtctgaacgatggcccttgtgccaaaaaggcaagccgtttcttcgtgccttgtgtaccataagaatagctgatgacctctcggaaagctccatgagatgcagtgcgtaaacagatagtttttctcgtttttcggttcctcttgaggcctcaagcaggtttagcaatgatgcaatgtttcttgtactgtggaaacaagccaagatcctaagttgggtgtctggattttccctttcaactgttctatacttgtaattagctaatattgccctttttgctggcttatacactgcaatgacaacaggtgtggtgatgaatgtagtaaacacagccataagtaccatgatcgaaaatgtttgatcattcaaaacctgtgaaaataagaaacatagtatcaatatttagttagaaatagtatcgatatttgaaagacaaagaattcacaacttacatttctatctttaccaatgttaagaacaatgagttccaccaaccctttagtgttcatcaggaacccgagcgttacagcttcacggaaaggaactttgcagaaaagggataccaaaacagtgcctactatcttcccaaaacaagctgttaccgtcactagaacaaaaagaccccatgattggagcccccgaatggtggctatattggtctttaatccacttgaaacaaaatatagtggtagaaagagaccagatacaagatcctctactttttccacgagagcacctgcgagtggaccatcctttgggacaagtattccaatgacaaaggcaccgaacatggcatgaattcctatcgtatcggtaacaaatccagcagccaggacagcagctagtgttgcacatatgtacacctcatctaccggctcaccttcatgacatctcagagccatccatttgaagattggagggacaatgagaatacagcaaattacaaaaatgcacccagatagaaagacccataatgagataagaggagattgaccagttccagatagagcaacggcaagagcaagtagaatccatgcagctacatcattgactgctgcagctgacatagccattctaccaatatcagtggttaagagtttcagctcagctagaatacgagctaagacagggaaggcagttattgaaagggctactcccatgaatactagaaatgcagcactatttacatctttagatatggtttgtcggagtacaaaagatgaaccaattcctaatgcaaatgggaagctaattcctgccatggcaatcatcagggctttcttcccagtccgacgaatggatttaggatctaactctaggcctgccaggaagaggaaaaacagaagaccaagatttgctagagtttctaacacagtaagacttttgggtggaaaaatcttgctaatgtacatttggttccttcctagagctgatggccccagtaatattcctccctgaaaatatgagaacatatcaggtaaagcagttacattaccctttctagcagacaataatatgtacgaaacttaagaataaaagactttaaaacaaaaatataggcataattgcttctttatcagctatcaacaactttaaaattcaactaactttgaaccacacaatccagaacaaaaaaccagaaacttacgataatctcagcaatcacacgcggttgtcttaatggcttcataaggaatgctagaagtcgagtgacaacaagcaccaaacatatctgtaaaatagcaagaggaagggcaaaatgaagaggatcatctccctggaatgcaccgtttgaagtagccttcataggacccggacaaatgtgtcctaccccatcagtaatgttggtcgccattttaggagaccaagttctttatgtctataccaacttcagatcattctccacaagggtggctatctgaacagacttcagtcctacaattgtttcatactttaattgttaggccattagcaaaacaatatgcaacacagatgattaattacaaaggtttaaacgaaacaaaatcaacaatcccaaatgcaaatcattctaaaatttaagggctttatctgggacaaattttgaaatcggtcacattttttattaaaaccaaagagacatttttctctttagtgtcaataggttttaaatgaccaaacaaaatcaacaatatttgtgtttcaaatcaaaaccacttttctaaagaacaacttcaccatgataagtccacttctttatatgtgaagaggaacccatatctgtatatgtgagcctgaaccttccaggttttggctcatgcaatccaccttttatcatttgcttacttttataaatggatttggttagttaattaattaaattctgaccattctacagttttaatgtgtgtgttccctaatccaacttttagtgaattcatacaaaacaatattatcactaagaacatctccaatggtgccaac

SEQ ID NO: 18714 - DNA, 6183 bp, Cannabis sativa
tagctttctcctaattatttcccattttcatttcaaaatgaatttaaatttatgtggctcattccctaatttgaatttaggaaagagtaaaacatactttgtctacaactacaactaaacaaaataaatgcacagaaaaagtggaaaaagaatcattaaaaatggagagagatgaaatagaaagttataaataattgaagtaaattatataaattgatatgtgaattttagttaaattttaaattactctcgtagttgttatgtgaattctaagtaaattttagtaaaaatacaaaatatataaaaaataaaaaaaccccaataattaattgtaaaaaataaaaaataaaacacacaattgctcattttagaagcaaatgtttggatttggataaatgaacaaaaacggcacttcaaataaaaacaattatttcatgtttccaagccaagactcctgtaatgtcaagttatcataattttataattaaatatatttatgtatatgaatataatatggtgaaaaaatccatgttgtccaaaaataattataagaagtttcaaaatgagataatggggttttaatgaaggaacatgaaaaacacctcttctccactaattatgcaaaacaaaacaaccctattttagtatttacttcacccacatgaaatacatgacctacattcttgtattcttttatgtacaataaatcaaattaatttgtggttttaaactaaagaaaaaaaagtcttcaatataatatatattaccattaaaaaaaaaaaattgctaggtgttaagtacttttttcggtgtcataccgatattagtgtaattaagtattagatctcatataattttaaaaaataattttcaatatcattaattaatcgtaagacactacctataaaaatgctaagttccactgatatataacaatactcttaacaaaattgtcaagctaaatattattcttaatgaagagttatcaagatgtctatttttactcataatcaattattagtcaaacaaatttatatacacaataaaaaatacaacttgatgatcaatgcaattaatatgtatactatcaagagataactacaactagtgtaaatagtaatatatattattgtgattcaaattcacatgggtaagaaagaattagggagataataataatggtagtaactaactaataatactccaaatttattttttattttctcaaaataattaaaaaaaaaaatacactaagtccaatgagattgtggggtcaaagtagtacactactatcacatggtatgttaacaattacacaagactccatttttttctttctaaaaggtaaaatctttctatggacaaagccttaaaagtaacaattcaaggatcctatgtcattttctaattactattcttggtctatttacttcactccttcaacatcaatttgttttgacttgaaaataattccctctctttttttctttcttctttttaattttttgattgtggtggaaatttgaagaagaatgacataatgtaacaagagaattatatagtcaactttgatataaaaatgaaatttgaaaaagcattctatatcatcattgtatttgttatgctagcaaagaaaaatgtgaggaaatgaaaaagaaaataataataagaaaaagttgtttgctttaggaaaaaaatataaaagttttttcagattattttatttatttttaaagtggagctgaaatataaaattaaaaaagaaaaaaatctctaaattggagaattgattttgtaaataatgtgactgagattactataataaaatacctataaagtaaaatattatcatttctattcttcatgattataatatctcatattaatttcttacctacacattttagtagacaaatggcacacacattttttacctacaaaatttgtgtgtaaaaaaatgtgacatcaaatgaaatatttgttaaagtagtgatattttttaatttctgtacccaaagaaattaagtataaattgaggaataactattttttgtatttattaattaaaaatattcttatattatattttattaaaaagtaattacttttgtaagtgagttgtctaattatatttgtattttgcacttaatctagtacataatttacattaatttaaataaaattaaaacagataaaacaatatgaacatacaatatatggattaataatttttttgatgtactaaaaaaatattccttcaataaaaacaaaatcgattttcctactaaaaattttccaatatatatgttcgattattgcatggcatgcagtgcagtgcatgggaaaaaaacaaacaaaaatcttgtgtatacagtaataacattcataataaacaccataaaaatggtccagtccacatcatgctctcttacagtgtgtgtatctatataataggttgtattatgcatttcattattgaattttgagaaaataactacataactatctaaaatttaagttttgagtttataagtactataaatttaatgttattttttaataaaattatatttttttttcctatttcgccagtataaattatgttattattttaaacaaattatatttaagattcaaattctagattattatgtttggacggaaacattacttctaaattttttttttaataaattcaaaacagtttgtaatgataaaattaaaaaaaaatatataattttataaatattaaataattatgacgttaaaaaaattcattaaatttatgttgcttataatcaaaattttacataattgtagccctattaacccttagattttaatgtcaaaaaagaaaaagtttattacttgggtggtattggtgacactgatgagagtgagagagagttcacctttatttttcttttttttctttcagtgttttatggacattgcccattataatattcatatatataacatataatatcatggttttttgtcttcattatggtgcatgacagcatatgagaggttttttctttttccttttcacaaggcaattgtgagtgagtgagtgagtgagaaagagagagagagagtgagagtgctgcagtgcatggttcaacacaaatggtctcttcttctgatttgtgagtggtgaattacttaccacattctccatttcttcttcttcttctctctcctttttctagagagagaaagaaagaaagaaaaaagaaatggaaactaataagtcagctaactattatacctggttcctcctctgtttattagccttttttctaagctttgagctaacacaaagcaatgttagctatgataacaaggctcttatcattaatggccaaagaaagattttattttctggctctatacactacccaagaagtactcctcaggtaaagttttaattttttcttttgggtttcaatctttaccattttttattagtacccttttgatgattagctttaaaaatgtgttttatgtataaatttttcaaaatgcagatgtggggtggtcttatacagaaagctaaagatggtggattagatgttatagacacttatgtgttttggaatcttcatgagccttctcctggcaatgtatgtaatcaattaatccacttttttccttaaatctttcttctatttttaattttttcttaattttatatatggtttttttttcattgtagtacaattttgagggaagaaatgacttggttgggttcatcaagacagttcaaaaagcaggactttatgttcatcttcgtattgggccttatatttgttcagaatggaactttgggtaacaacatttttctcattattatttttataaattgcaaagttttaattttgatttggttcataatctttgaaacccatttattaggggatttcctgtttggctgaagtatgttccaggcattagcttcaggacagataatgagcctttcaaggtttgtctaactctgttatttttgtttgttttggtcatatataagaagagacaagaaaataaaatgggaccatttgattttttcataaaatgttaaagaacataacacatatacatatatatatgtagtttttaactattctcattttttcaatttacagtcagccatgcagaaatttacccagaaaattgtccaaatgatgaaagatgagaagttgtttcaatctcaaggtggtcccataatcctttctcaggtaataataataataataataataacaatattgtgtaatgccttttttttgtttgtttttccttaaagtttgtgtttttataacaaacaaaaccattaattaataaccatataattaatgtgttttgctttatttgtacagattgagaatgaatatgaaccagaaaggaaggagtttggagctgctggctatgcatatatgacttgggctgcaaagatggctgttgaaatgggtactggtgttccatgggtgatgtgcaaggaaactgatgctcctgacccagtggtatataacttaatcgaataatgatgtttaattaatctcaaccacgcaattaaaagtgatgtgattctcgttattcaaacatttcaacttaatgatagagcgttgctattgggcactagtggtgcttagcaccttctagatgtgtcactttgcgattggctagcgatactctctaaaatcaattacattaaactatatgggactcgatatttaattataccaatagcgatattgacacgtaggagggtaacttaatgatgttctctcattcttttttggcaatggaagcagttatgaagctttaaattgatcttgtgaatgtatttatagctgacaactaaagtattcatatgatatttaatgctaaagaaaacactgtttagttaaggaaatggaagttggtggttggtgaatttcaatatctcttaaaatttcctttaactaactaactaactaatttgactgcatttcctttttgtgaacagataaatacttgcaatggtttttactgtgactatttcactccaaacaagccttacaaaccgaatctttggactgaggcttggactggatggtaatttgttttaacatcttccaaaccattttgtactacaatacaagacacatttgtttttaactatgttattggtttttacttggtaaaggtttacagaatttggtggcccaatttaccgacgccctgttcaagatttggcgtttgcggttgctaggtacattcaaaggggaggctcctttgtgaattattacatggttagttgatgagttactacattcatggaagatgtcactttttttttaatgtaataccgaatttaacttactatgcttatgattacttcagtaccatggaggaaccaactttggaagaactgctggaggcccttttatcactaccagctatgattatgatgctccaattgatgaatatggtgagtaatgtttatgttggaaattcatatctaatgttcttctcttcctttgacttttctaactattggtttcttcatgattattgttttaataggcttgataaggcagccaaagtatggtcacttaaaggatcttcactttgctgttaaactatgcgaaaaagctctactcaatgctgatcctaccgtctcatcgttagggaattatggaaaggtttgcagcttcttctaggacatattgagagagaaaatcaagttaaaatgtattagcagcagcttaggccttaaccattaacagcattttatgaaattagtgattatgatcataccccatcaatcaaattgttcatggtattgtttgatgaggtttctcagacacaatctttaccgaaaacaattatttcggttctagctatctaaactccttgcttttctaaactaaaagcaactctatacttcaattttcaggcatatgttttctcttccaagtcaggaggttgtgcagcttttctctcaaattataatccgaagtcagcaacaagggtgactttcaacaacaagctatataagctcccaccttggtccatcagcattcttccagattgtaaaactgatgtgttcaacacagccaaagtaagttatgtggataatgtatagtagtttcatagcttatcaattaacttcacttctatacttgttttgcttct

SEQ ID NO: 18715 - DNA, 2391 bp, Cannabis sativa
aaatggatgagtgatggagttttgctttgtgtttgatgttggtctatgttcacagatgatcgatgatgatgatgttaacagattggcatgggggaagagagtggagaaaaattttggaggaagatgattgatgatgatgttaacggattggcatgggtacgacatttcctgggtttaggcaatagtttatgaagttcaatgaatattagtatgtttattaaattaggtttaattttattgtattatgtttaattttattttactatgttgcttaaatgacatgggccatctatttcaaaaaaaaaaaaaagacatgggccaattaaatattgtcatatgtatatctatttgacatatatagtaagttattaataatggtgagagtgatgtggaattgattttaatgacatggcacgccatctggcacattatatggcaaaaaacgaagaggtacctacggaagttccacaatagtgacagaaggtagttttaccgccaaaaatatgacttaagtatttatctgttactcggcataaaatttaagtatttatgccgcaaattactatttaagcatcacaatcacatggaataatatcttgtatatgatacgctacatggagaaagacacgtgtctgtctgaaaattgatgcggaagacctgttacattgtggctaaaatgacattatagtacccattatgaggccactcaagttttcacggcaaattaacttggcttaattgagagaaaaatatatatttggttttggtttatagatcatgttattttgacttgtccctcaatcataaggaattaatatgggaacatacatatataattattaatttcttttctcgcacacatatattaatgttaaaatggcttcacaatttataatcataatgaagccgttttgatgagaaacagtactgattgtatcgactaatccaaacaaggctgctaccacctctttattccggtatatatgtgtatctttatattagaaggaatcaccagaaaaagctgatcaccatctatatatataattattttgaaataatacttaaaagttataaaaacatattcttagcaagagagattgtccccaggagcgacaccaaactgtttgcagtagtcattataatagttgattcgagcttgaactttgtcaggctgcttgccatcgcattcaagagcaccattgatcttccttgtggtggcaccaaatccttggccgatcacagaatgaacattctccatccagaaccacaatgctgatttgaacgaaacgacggcgtcctgtgccaatttttcaggttcgttcaaggcatcaatgttgttggccttcccaaaagctccgtagttatagttccatgtcagctgaagtggtccacggccgaagtatttcttgtttgggttgcacggataatctgttcttgtctcgtcgcagtaatcctgatttgctcctccagtctcctctatatggcatagaactgtagtacaaaagaaattacttacttgacacacttaaattttatacagaagtaataattaatgaattaaaacaaaaaacggcattgcaataaaacatgatcttaggggtcgaagaccttataacataaagtattaatgtaatttaagatggcatctgggggttaaggcgggtttaggccatgcctggtccccattcaataatttttttctgaagacccgccgaccctaataacatttttaatataaattacacatagagatcagtcaatatttattttgaatggaagtcgaaatttatttaaatcaataacagtatgccaagtagtcgtaagttatgggcatatagaatctataaagaaaaagtgtgagagaagagataggtagtatcttacatccagtttcgtgagtgatgtgggcaaagaaagctgcgatctcacgtttagattgatcagcagaaccagacccaaattggggaaaggagtttgcagcattgataaaagcgtctcggttgtagaagctcttgccgggacagtccccagtggccttgttgattatcccattgaaaaaatcaggtgtgacaacagaagatacagaaccaccattgtttggagttggatttggattactgggagaaccattattacatggtccagattggcagccttccccgcagtaagcatccccagaaccacagaatccaaatttgctgcagcaaaggtcagggctacagccacagttttgagccagggctcctctggctacaatagttccaatcagaatgaggcttactagtgttttggctacattagaagaagccatgatttcggggtagagaattgggtgtcaaggggtgtgtgtggttaatgtattagtatatgaaaggaagtgtgtgtatggtg

SEQ ID NO: 18716 - DNA, 2312 bp, Cannabis sativa
aagctactctcaggttattactattcccctcttgcactacatatttctatatttcttactgaagactgaactgtttacttctgaattatctactgttctagtgttagtatatataaactcaagaggcagtttggcaataggcactctagagaagagggaataaaaattgtccttcattgtggaactttggttttttaattagaagtagtttagatcattcaaatgactgaaactcgaattttctgctttgtcaggaagttgatcaatttgtatgaacattttaattgtgagctagtaaatttacatggaaccagtttagccaaaagtttgcactgaagcactcttgttctatcttttcaatattgtttctacctgcaggttgatttgaacagagccggggttccattgcttgagattgtttccgaacctgatatgagaactggtattgaggccgcagaatatgctgcagagttacagcgtttggttcgatatcttggtgttagtaatggcaatatgcaagaaggttcacttcgttgtgacgtgaatgtttcaattagaccaattgggcaattagagtttgggaccaaggtaaaatttctttcttgagaattagagaacttggaacctactgaaaacatagaagacaataagttgataggtgaaatgtaagtgagtgatccatcactataagtttattcccccatcacatatttaacttgtgtatttccaaaaatgcaaataatgaaataggggccaaaacagttttacatggaatttttgtaacttgctgaaaaaaccactgctaatgatccccagtgatatttagataataagataatttttgctataaaataggtacaatactacattgttgaattgttgtatctgctatctgaccagtttttccatgtttgaaagaagcaacattttggttccttacttttctaggcagtaggaataaaaactagattacataatgccaaattatgccaactcaagaatcacttaagaagcaggaaatgacgcctattggacaaacattgtcccacatgaattaaatgtaaaaatattaagtcatatataagaacctgaactactccactcatcactatttggttttgagatggaaccgcacgattcctgtgaacgcctgttttttaattgcttgttatcttattatgagttgtggtaatcattttttttttcatgagaatatgttgtgcaaatttgaaaaagaaatgtatgacatagactgcttatgtgataaatttggattagtcttctgtagattgtcacatcgaagctctgaggtttatgtggaattttatgatgagttttcgttgtacattttttggatttgaatacctgattacattttgtattggcaggttgagataaaaaacttgaactccttctcttcaatgggcagggcaattgattttgaaattgcaaggcaggcacttcttctcagtcaagggcggggtgatgaaattgtacaggaaactcgtctctgggaagaaggtggtcaggtcattgctaattcttgctacttctaccagtacttttttttattaaattatgaagctttcatggtttatttcgttttgatgtatgcactcctgtaacctttcttttgtatttcagaaaaccgttacaatgaggaaaaaggaaggacttgctgattatcgatatttcccagaaccagatcttccaggagttagtctcacccaagaatttgttgatagtattcacacttctttgcctgaacttccagaaatgaaacgtcggaggtatgaacagatgggtctaagcatgcaagatgttcttttccttgcaaatgacataaatgtgagtcctccaaaagaatttgatggcattgtttctgttcaaagctctatatcaccaattcagttgtacattgtagtaatttattttgataaagggctataagtgttgattatgtgtttaggttgcagatttttttgatgctacaattgcaaagggttctgatgtgaaacttgctgccaactggattatgggtgatattgctgcttacatgaaaaatgagaaattgacaattaatgagattaaaattactccccaagagttgtctgagttgattggttcaataaaaagtgggactatcagtgggaaaatcggaaaagaggtaaagcgcgtaatttcaattctatttacaaatttcttctctccttaactcctctcatgtggatgataacgagtcttgtttgcagggtagtgccatattaatttgcctaaccaaaccaaaaggaagaagaccttagagttgcttt

SEQ ID NO: 18717 - DNA, 3086 bp, Cannabis sativa
tatttaatttttattattattttaacttatttataatttataaattcatatatcttattattattattaataataataaattttaaggttttttaatatatcgttccgtacttttcgggtttgtcgtgtgtcgtgctttttaggctaattaatttgtgcttatgtgtcgtgtcttttgtgcttcttgtcccgtatcgtacttaaagacatatttttcatgtcatgtcgtgccaatttgtagcatcgtgctgtgtcgtgcccaatcccgtatttcttcgtgtcgtgtcaagatgccctgcccgtatttacagcatttcagtatctctctatattagactacctttgctaagagcctctttctaattatattctataaaaacaagcacatcatcccttactttatgtttttgactccaaattaacatttcaagagataaaggatccagtggtcctaattaaaagatatcataagttgctaaccaaataccttgccaacttcacatgatcaaaggatcttcattagtggttgtggtccaaagcttaataataatcctaataataatacattgttacttattagagatagactactagattgcataaatatatatatatatatatatatttatttgtacacatagttaattaaattatagtataatgaaataatacaaaataaaattcttggagactttcaggagtggagcctgagctccaactggcagctaatttttagtacttagattcaaattataattcaaacaactacttctcctttctgattagcacaaatccttctacatgcataaaatatcatgatttatatacattaatatttctaattattattagggtggaaatgtttttttttacaaagtaggaatgtgggtaaggaaagaggtaataaaaacaaagagaaagatagtagtagctcactagtttgtcctagtgatttgtctgtatatgaagcaagatattttccaataatcaactgctgccagtaaaaaatgaaagggagatttagatcagcttttggggttttagagaaaattatatatatatatatttatataatgtacaatatgtatggcgtttattagttgtattacatgagttcttagtggaatgcctaggtaattttgtgaaagaaaacaacaacaaagccattatgtctttacatgagccaatctttggttcttacacccacatggctttggataaggaatatgcaactatgcaaaagggaaaaatcttgcttggtgagctaaaaggcaacacataataaacaaagttagcatatatttataagattattaattgtgccaacctcttccaaccaaaagactaggggaagagatgtggggtctcacatacaaattattttatacatcataataaaaaaaaataaataaataaacagttttcctttttttttggccttgaaatctattgactcttcttgagtattcccaaagcattgctggtgtacttgctcacttacacatgaaccattattactcttgtgaagaaacacatggacctttatgattaggccatatattataagagagaatagtggatttgttgttgcttcccttccttcattatatataaccatatgtacatgtatatatatatatatatatatacccagatgcaattccatttgctaaattatttacccttataaatctagtgtatgattacaatataactatttttcacccaatgggtaaacctagaacactcataccatatatatatagtctattataaatttatattaatgagtgtatacatgtacacctacagtgtattcaagaaaaagaaaaaaagaaaattaaatgtaaattggtaaaaagctttagtgggagaaagttttggtgtttcactcaattatctatctgtacttttctttaatttgttattattatcattatcaattggttcattatctctttttaaaagttagtatatattttaaacattgatggtatttaatcaatatgtggtggtggccactgggtcaatcaaatattaagtaacggttttattaagtgtgtcacatgaaaatgaattaagggagctttaaattgcttcatgcagactttatttttccctatacacttcctttcagctgaatggagtggacatatcctgataatggcagcatacccttttcattttgctttgttttatttttagtgggtgctatgaaaaggagtttaaagctatcctaacctctctctctctctctctctctctcttcacacacatatacaatatatatacatctgtttatgtacttcaacttaactttttggtgttcaagctgagtaagttggtagctcaaccacttgtgttgtgagtattaagaggcattgtaagggttttagaagagagaggcaagaagtatgaataaacaactaaaagaaatctaattgagatcaatacagagaaaagagtgccaaaaaaatgtcaatgtcaacatatacattttcatgtatagttacttgagcaggcttaagtggttgggtgatctaaggctcaaattatgtgctaaaaaaaagaatacaattacattttcacttatatatttatatataatatatattttaatgaagagtagggaaactaaagatgattgtactcagtgaccttagtgactctattgagtgcattggcttgtaaaatataagttttgcttaattctagtgggcagcctatctaaagcactactttattgcactattatttgcccttaattgagagcctactgaaagaagacagccaaatcccattttcatgtaattaattacaaataattgtattgaagattttgctatatacaaattgataatattaaaatctggtcatgttggataaataaaaggaaaataaatatcagctgcaaatgctgtctagattaatatgaacaaaagacagaatattagaatataaaaattgggtcacagattattagctagaagtggtggacatgccaatttcttaatctcatttattatttatttttaataaaaaaggtaaatagtgaatggatttattatatctttcccatattggtt

SEQ ID NO: 18718 - DNA, 3340 bp, Cannabis sativa
gagtatggagtgtcataacgtatttgcaaattttacaaagtgcaatgaagaaattaaaattataatttgctaaacatataactcctaattctgacaaacttgtttttgtttacccctaattaaataactgaatcaaggaaacttcctatgacccccattgatctattagaaaataactccactttagtatctttgcactttccgcagtctttataagaagaaatcacataacaatttaaataacattatgtcaaataagtgagctaccctaccaccattactttaacaaaaacttatcactaaattttacttggtcagcacgtatataatatataaatattattaccatcaaagaaaatttcaaattcaaacaacacgtattcaattaattaattaaatcatttaaatacatatgggccctctattgggttcttgctacccaaggcaaaggcccaacccaactaattataaagggacacactctctctctctgctattaacatccgaaaaagaatagagagtaaaaagccatggctacaggtggtttctatatagccgaagcacatgtgatgcgaaagctttacaaagagaaattgaagagaatggaagaagaaagtggggtgggggaggtcagaggtggaggtggtgactctgctggagtgaaggaatcgatgagtggctgtttcgggttcttaaagaagattcatccgaccagtggtcagtttgtggtggtgaattctggcaaagaagaagaaaaaggaaaattggaatcgaggagattatgataatgtgtttttttttgtatgaataaatcaaaggtcttgtaaataatactttttctttttctctaaagtcttgtttttagttccttcaaaaagaaaagtgttattactagtttgtagaaatgcattaaggttctgtttggaattcatgattgtagattggattgaataaaattgaattatactgtatttagtttaagtataaattggattatttttttttctttttttttttaaataaaaatataaaataataaataaataactcttagaaaaaaaataaaaaaaaattaaattataaaataaactaaaatattatatcatatataatcaaataaataacataaatatataataaaataattaataatgtttttatttaataaataattaaaataataaaataattttttttgaataatataaaattatttatgttaaataataatttaatcacaaatttaatataaatattaattttctaaaatattgatataaattttttagtaatttaaaaagaatatataatgttattattatattgttatttaagtaactattgcttatttaatattattttaaattttaaaaatttatgtatgataatttaaaattatatattttaaactaactattgttagtttacttgaaatagttgactgcttatctttagttttagttttgaagaatgtatagttattttaagcaagacaaaaaaatcactacacgatttgatttggttgatttttttttatttgactttttttttcagttatataactaaattaatggaagattgagttttactctatttttaatcatttgtattaattttactttattaatttattttttctatgatacatatttatttgattaaaaataaaccaatctatttgaattgaactgaaaaattcagagagcttcaagcctagctaggggaatttcttcaagctttgaagttaataaatcattaagcaaatagatgtgatcaagtagatgaaaaagtatataatagtggcaaatatattaagagaatgttgagagttaagattatgctagctagatcatattgattgacaatgtttgatcaacaatttagcaaagagcaaacaatcaacaaatagatgaataaaatcagtataaagaaatgtgtagtgttagtatgtgagttaacagttaatagagttagtgatgtttgttgttattggtcatttcatctcatgtcctgtgatgtcatgacaaaaaagtcctctatgttatattatgttgggttattgttaattattttttgatgtaataccatggaatggaaatctccttgaaattgaatagtagcaaccattctcccctctttgaatatttctcccttctttctctctcactacaagtcttatctcacttgttacatagctcaaagtctttcaattacaggcttaatcaattaacatagccaacattattacttaccattatcagggatcatgactgtgagtagaatattttttactccctcttcagctattaaccgaaattggccaacattttttagttccttccttttagtaaaaagtttcatgttgataataatcacaacaacaacaacaatcaattctttttcagttgtagtataattcaattgagcctcatttagagttttgctaacagttcagattacataaggtaaattgctgattttttgtcctaaaacagcaccagtagcataattaaaagcatcacacattatttcaaaaggaacattctaatttgaaggacgaataaagtcaaaagggattttaatttttcaaagagaacatgtcaattattttcaaagacaaaagtattttctttttcaaaaatatgacataaagggcataagattttgctaaagtgtcttgaaatatgaatcttcccaatcagttgggtttctacaaaatatctacattaccatctcccataatagggtttgttattgttacattcacatccctttttcttggactccatggaaggcttctaagttacacaactcaataacaaaagaaaatggttagactaacacttagtcaagttggtattccaacatctcactcagagaatcatttttcctctttggaaggcttctagttactttgggagtttagggaccattacaatgatcagactagttattggggttagttggatctgcataattgattgcagtaagtaaatttggtggcctaaattttactctacaacaccaaattttagtgcttattcatcttcgataaaggtgtccaataacttattcatatccaagaaaaagggatgtgaatgtaatagaggacaacaagctaaaggagatggaacaacaaactgagcctctgcagggcgaactgaatatgacaacaaaccctattatgggagatggtaatgtagaaggagatatggagaatcattcagaactagagttaagatattggttcatatttaaatgtataaactattaaatcatctggcttgatattggttcatattttcttctctttttgaagttaagatatatatatatatat

SEQ ID NO: 18719 - DNA, 1533 bp, Cannabis sativa
taattacacagttacttccaaaaattaaacttaaatatttatttacaatcgaaattaaacttaagtatttatgctgcaatttttttttaaaaaaaatacttataatttttatttataacatgtgtgtggctggtcatcataacataattcatgtgtgtggctggtcatcataacatgattcattcatataaaattattccttttgtccataacttatgtcagtcgttattaattttgtttatatatccataacttatgccacttgttattaattttgtttattcatataatgaatagaattgggcatactagtagagcaagcaaggaatcacaaccacataatctgcattaacatgtacagattggtgtttggtggttcatgtaaatgtaatgcatggtcaccaaatatggttctcaaagaaaatgaaccaaattcaaagacttttttttcttctcatttatgaaacaaaatattttttcgtaactgttgagaattgagacgtgcaaattacaatcattaatgtttttagcttctagatattgttatatttgtcaaattagttccttcaaagtccttacaaatttttccttgaaataataatcaaagaagaaagttcttcaaattaatcaaactcttcatgggaaaaattggatattttagtcctggaaaagagaaagaggggtgtctttgtcaaggctaggtaggtatttactatttactcatcctcatgtgtaaatgtatttattccctttcagatagatgccctacacttgtcaatttggaagctcaaaatggactcatgttcatttgtgatattggaaagagtcattagtgttgaatttgtggcatcattttagaatggtcttacattgttgattttatagcatttgagcatctttaatggaactttaaataagtggtgtaaaactatatttgattttatgtaaacaaatattttcccaataatgtgctaaaaattgtactaaatttgacacatgctaaaatttaggctaaatttagtataagatatacattatgccaaattgatatacatttaatgtaccttttttatttacaatattatcatttagcatgatgattactttttatgttaatttatatcttaatttattattttacattgacgtacaattgtaaaatataatattcacttattttgtgtgtcaaatttaacacactttttacagcattggagatgatcctaacaattacaacagatgcatttaaatggggttataaaatgtacaatataatgtaattaagttttaagtttaatgtattcaaaaaaaaaaaagtgtaatgttaaatactgtaagaaaatgtaaaggcccaagcaacataatcaacttagcccgaataaaggcccaataatattaaaaaactcaatagtctggtccattgaaagaagggctatttacaaaaatatgggaaaataaagataaattttgatatatatggcataaaaacttaattacactaaatatggcatttttttaaaaaacttacaaata

SEQ ID NO: 18720 - DNA, 2679 bp, Cannabis sativa
actctacagttaagcgtgcttgacctggggtaattttatatggatgacttcctgagaagttttcccaagaaacgtgaaccactaatagcgatataccaactcttatgatgcttgataccataaaatgcccctttaacattcttccaatactaataatggtattgaatattgttttttagtgtttgtggaagagaaggaagaagcttcctatcacttaattacaaaggataatgtaatgtggtttttgaggttagctatatatatttggatacatgactagtatttttcatactttttcctcaatattgtttcagtccttaattacgatttattattattatttcttcttggaaaaaaaaaataaaaaagccaaaattatgattccttagttggaaaacagatagaaaatcatgaaatatatggaatggttttttgtttctggttgtttcttagtcattgtcattgtttcaattattcattagtattgccaatatgtaacataaaaagtttctcctttttaatattaaaaagattttgactcaaaaaaaaaaaaaaaaagacttttgaaattgatgaaataatttaagaggttaggttttgacacttgtaagttgtgatataataaccattcacaaagaacttttaatttgaaatgtttcattttttttttcttcaattgtaattttgtttagattggtgttaacattatttaggctaataattttttttatctttataattattttttaataatacttgttaatggtatttttgtaatttaaaataattgaatagggagagttctaatccttctgttattagaaggattttaaattagagatttgaatagttttactatcttttcacttctttttatcaatccatcttggtaaacaacgagatttattatctctttccacttctccttcctctcctctatttttctctcctactaaatatagtgttaaagtgtcttgtgattgtataatacacccataatgagggtgcttagctctcattaaattagatagatttttggaaaatttgtactatatattatttttggtttttttttttagtattgatactattgataatatttataactaaaattaattataatgatgaaacaataaattagtttttcaatttacacgtgtgccatcatcatatcatagacaacaaagatatgagtttgagtactataaaatataaatgtaacactaatctcttttttaattatgattattattccttttggccgtttagcgaaaaggaaattatgagtggaagattcttggttttaaataacaatttcttattcttttttctcacttttgtgacttgttctatatcttcatgttcaaccttatcataacatatatctacttctttattgatttgccactacaaataattggacctaatatatataatactcatatttctttgcaattttatataccttgctttcatcatttaattagctattttatgtatggttcgtgcttcaaatttttactcaccttcccctatagatttataattcttatatataggtgcattactctcaaattaatcacatttaattttaaaatactttcgtgatgaactactagaaaataagattgttgatataagtagtactaatcaattcatttaaatcatctttaactgtgtagcctcatacctatacagtctcaaaattattacagtcaacatttcttaaacgatgtggaattgcataacttacttaatatttctccttacaaatactgactatcacattttagtccccaaattatttaatggttattcatttttccaacaaaacttactgaatttttaaaggtgaaactctccaaacttcaattccgtttgatctccacttaattttccattcactttggtcggttaaatatcaatgtgtgactgccactgtgtactaaaatatacacgtgacgaattttcattagtccacctaatattaataatataaattcaaacaaaagtagaagcaaaagtggagatcaaaacaaaattaaagtttggagagttttacctccaaaatttagtaatagggttaatcgtgccaaactcaaaaatttagagagtttgactgaaaatttcccattatttaattaggagtgcacctatatataaaattccaataatatctgagtaatttcacttattatcaattaactttgagttagttttcttatgtgattagtgaacttaaattataatttaaatgacgtctaattaactttgaaatgtattatcctctaattattttcaatacatcattaattactaaatataagaaaattttataatacaccctctctttcggtatctgagataattttttagttaatttttttctcttagtcatgtacgttatagttatttaagacatcatgtaaaattttaaaaaattcagaaaaatttaatataccaaaaatagggttcaaatattgtatatattaaaattttgtagaatatcttaaattaattataatgtacataaatataaaaaaaaaaatgaactaaattttttttctaaataatgaaacaggtaaaagatacatcattaatggggtgcattatataaacatccaaatatatatatagtatacatttaaatcgacaataaaattctcttaggagcttttt

SEQ ID NO: 18721 - DNA, 4816 bp, Cannabis sativa
agtaaatgtgccaaaaataatgtggaagaaaaataaaataaattattatattttagatgatgtggagatatagagcatcttcaaagaatgctactattggagatgctctttaggggcggttcttagtgggacattcataagtctaaaagaatactcctttcatactatattttttaaaattcatcctaaaaatcttactttatttattttattctaaatttttacattacaccataaaataatttttttaaaatacattccccaaaattcattttttttttctaaattactatattttatttattttaaacatataatattaatatttacacatatcctcctataaaaataaaattaaaactctaaataattaataaatatatttaaaacaataaataatattctatatatatatataaaatcatgaataataaactttaaaataaaaaagaaatttagaaaatttgatgtagcctatttttagttgagttctttaaatattttaaaagttctcaattttaaaacatctaattgttcctaaagtctaattgtttttttttttttgaattaagcgtttatatattacaatgcataacctgagactcgaacccagaacctccaacactaacgcacccctcctatggccacttgagctagcctcaactctcaagcggtttgagtctaattgttttctatctatatgaaacactttatttatttattttttaaataaagggtcctaatttagactagtattattcttcttctcataaagaaggcagagatggtctaaagttcatttttttttatttctatatagctaataagattataagagatttaccactgtccaacaacataatcatgttattagtgtattaagctcacataatcatgttacaataaaggaggtatgactataaatagctatacaactaaattacacgtccaaaactcttaaaaaataacttgtaatagatgaattatagttttttaatatctttattcatggatattaatattatatctttatatttagctaagttttactagcttgattaataaaatgagaaaatcgtaatcagagttaaaaatgagggtcactattttcaaagagccatgttatgtggtctcaattgagcaaaacatcatctttctttctgaattcagaaactgattaatttgaggataaaattcacaagaagacaaaggagaatagtgagcaaaaaaatatacaaaaatgttattaagcaataattttcacttaaaaaaaaaacaataattttcacaaaaaataaaatttaaatataaaaaattaatcataaaaaatcaaaatttaaattagaaaccaccaccctttcattgcctccaactgctcctgtttagccatgcatgcaaaaattaccagactatttggtggtttaaattctttattattttttaaatgagtattaataataataaaaaaaatacaaacatataaattaaaaaaaaatgtacaacatgcccaacatgcccccatatttggccttgccttcaaaaaaataaaaataaaattcctgcctacagaagaagaaaacaacacgcaaacaccagaacaaagagattaacaagacacatttcttgaggccttctacatattgtgttgtgggatgggaacaaatgctggtcaaagtcaaactcagttcatctttcactgcagaaactcactctgctgagctattcttggccttttcttcttggagaagaggacagaccatagccttgtaagtcctcttatcaggaattactcccttaatcaccatatagtcatgcaattcaataacctcttctgaactacaattcttactgaaattggttatcaaagtggtatatgtaataaaatcaggtaccacaccatgaagaatcatcaccttcataagctcctttgcatgttggaaacacccaaacttgcacaataaattgactaatgtattgaatgtcacttcattgattgagactcccacctttctcatttctgaaaccaaatcaaacgctgcattaaagtttcccataatacaaaatccatttatcaacgtgttaaaagtagttgcattaaaactcccaattctccttaactcatcaaataaaagttctgctatatcaactgatgatgcctccttgcataaaccattcataacagagttgtatatcaccaaattgggcttcttgtcaaccttaatcatcttttcataaacttgaactgcactttctaagcttccttctttgcagtgaccatcaatgaaggtcccataagtgatgagatccggcggtaaaccgctaacaaacatactgcccagtaactgctttgctgctccaaagttcttagttttgcacatatgattgataaggatattataagaaactatatcctctataattttcttatcaagtactagtttatgaagcttgagagcttcattcacattaccttttctgcaaaacccatttatgaggattgaataggtgaacttatcaggacatatatgtttttcaaccatgtcagagaaaagcaaggaagctccctccatatcaccttctgagtaaagccaatgaatgattgtattgtaaacaacagcattaggggtcaaacctctttcagtcatttcatcagataatctaagtgcatcttccaaactccctactctcccaaacccatctactaatgttgcataagtcctaacattacactcaatacctgctttaatcatttcatttctaagcttttcagcaaaaaaaacagcaccaattttgcagaacccattaatgatgcaattgtaagagattgaattgggcttaacatactcacctgacataactcccatcttcttgaaaagcttcaaagcaagttccaaatcaccaatcttacaagctccatccatgatcatgttaaaagtaacaatattaggccaaacaccaatcttcaacatcctataaaaaactgagattgcttcaagcaatttacattctttacaaagtgcataaacaaccaaattaaaactatatacattttcaacatacccaaatgaaaccatttctttgtacatattccaaaacctaaatgtttcattcaacttcagaagatggctaagaaagttattccaagcatgaattgttacccaaacaccatccaacctaagcttctccataacttcataagcaccttcagttgctccaaactgagtacaagccctaaccaatgcatcaaacacagcaggacatgaaccacatgcttcatagctcttaaccaaaccttctaaaatcttcaatggagaaaccacataggaactcattaaacttcccataagattcaaagcattgtcatacctccttgaattgacaaaaacgtgaaccaaagtacaagaagattctaaagagagctgtgaaattgttttgctctctccaatccgattgtaaaattctaaagccagcttgggcgagttctgaaactcgcgaagaacacgactcacaagggaatcggtaagactgggtgtgatttgctccaagaacttccatttcttctgtttgacattaacacaaattgctctgaaaacaatgtcctcagcagtaacagttgggttcgtaaactgcttgcccaagtgaaaaccacgccttaatagctgaaaactagttctgggtagacaaaaactcatcaactgtaccacttttattgtactgaaaaaagctaaaagaactcagcagagtatgaataaagataagagaagtaaatatcggaatatgggcaacccaaaaatggtttcttttgattaaaagataaagtctttgatagaaatttgaagtggttaggcccaagttaccattgaagctttgctaggagtaatttggtgccactgctagttattcttctgttctagtctcccaatttctgatatttaattttatttatatcaagtccctgatttttgaattattaattttttggtctctcaaaaaaataattttctaactctcccataattaagaaatctatagcgataaaatactttcaattcgatcctccgttattaaattgatagcaaaaactagtcttttttgttttatttttattttattttctcaatcagcacagactataattaacataccataataccaactatatcatctagacttatttccaatcagccatctgcaattctccctaaggaaatcgcggtagctccacaaagccttggccattttggatgcattagatggaataaaagttgactagtacgatttgtgattgcagaagttgatatcctgaaacttcttaatccccagccccccacaacttgttggcttgcaaatagtatggaagactgaagttgttcttatgaagttggctcatgatattctgcctactactgaaagaatggctagttggtttggaaatcatgtagttaggtgctctctttgtgacatggagggagctgattcctttgatctgaggtgtggggttaccagggccatctggttctcttgcaaatggggtatcacaagtgatcagctgggatggtcctctggaaaagaacttgtaaattgaattcttaatccaacatcaatccagggtgtgaaggatgaggataacaattggataccaatacaattataaaacaagtaaattggaggcgtaacaactgctccaaattcgatcagctaccattgttttagactgccacgagctcgtcaatggaatggaatttatagatcaagacctccagattggagagtgggtagtgccttctactccatgctcaatgtcttcaatcaaggg

SEQ ID NO: 18722 - DNA, 12087 bp, Cannabis sativa
tatatatatatacatatatcagaaatattaaaatgtaccactaccggtggtggtttaacattttcctacgtatgttatattattgttgtcatcataatttttttttatttttagtcacaacaaaatttataactaaaagtaaaaaaaattataattaattaattataattaatcatatatgttgtgactaaaaaatttatgagtaaaagtattaatactcacaaaaaatacaatttattgtaaataaatgtatttttagtcacaatactgtgactaaaactaaattagtgacaacttgtatccaaatactatattttagtcacgaataactttctattgtgactaaaaattacatttaatcacaaaaatttatgatataactaaacaattgctactaaaagtaattatttttttatattggagtataattaagtaattaatctaatataattttagtgttatatggtattaaacaccacagtattttatagcaatgctctttatatatacactatttcaagttgccttttttatattatagaactacataattaaacctaggcatgcaaatgcaaatatagtcaatgaaacagattaggtagaaatataataagatcccaaatttttgccttctttctcttttttttttaaaaaaaataaaaaataaaaaaataaaaataacttttgcaaaaaaggttttaactttcacaatttaagcctagcttagaaagtcatagaatatgttgagccgcccatgaataaaacagtaaatatacattaaaaaaaacctaattaattaaatttaacaacataattaattaattaattaattaattttggtagatgtgtggaaattaaggaaggggttagtaagtatataggctaattaactagaccagaatatatacggttgttacttggagataaagcatagaatctattggatgagttaattgagaataattaataagattattaattaaaattaatataataattaaagagaatgaaacatacattaaagtattagtgagggattgattattggaaaattcaagtcaatgaaatgaaatagtcaacgctcttgtaagacagcaatcctctatacttaaatgctagttgtacgttacccaaaagtctacgattcctatcacttcaatgtgtatatatattttttatttttaaaaaatcatgtcttaattattaatatattaattattattcataatccaatctcttctcatagattctctcattttctctttccttttttctcgagcataaataccccatcataaccacttctccaatactacaacaacttaattttccctctcattttctctctaaccaaacacactatattatatatatataacaataaatatatattactacttttattataacaataatggtattggccactccaaacccaattcttagaggagagaaaatagattcaaatattgagcttccaaccattgatctgatgggagagagaaaaaaagtttgtaaagagatagttaaggcttgtgaagagtttgggttttttaaggttataaaccatggtgtaccagttgatgtcatatcaaaaatggaagaagaaagccttagcttcttttcaaaatcagaggcacaaaagaaacaagctggcccagctaacccttatggctatggaagcaagaccattggatttaatggtgatatgggtgaagttgaatacattctccttaacaccaaccctaacaccattgctcactattctaataccatctccaataacaaccctactaaattcaggtatatataattattgtatatgttttggtttggaatatattgttatatatttacataggtctatatatagtagtagtatatatatatatatataatatttgcattgaaattattttgttatatgtacttgtgtgattgtgtaattaatatagttttatatactatatgttagatgtgtatataagctttattttgtacgtgcatgttaaaatagaatgtagtactttgttgatgttgattgatcatgcagtttagtttaacttattaaaatttgataattgttttcaaataatttcatgtgctttgtgtcatattcttctgtgttctatttttattatgcactcaaataattcaaacaataaatttaagcgtagaagtttttcagaatttatacgaaaaaatagtttattagtgttttatatattatttttatttttaatgaatttattctgagtgtttatatatattttatgaatttattattattgttgttgtttttgcatggaaatatatcatgataggaaaaacaaatataacaagtccaattcatgtttaagattatattattacatgcattgtatatatagtaaggatacgatctcattaactgcaacatatgtacaaaacacataataaaaatataaattatgtggatgttgttataattttttttccaacttttaagtgtatacatctaactgatgatgtttttgatatttttgatagttttaatttaaattatttttatgtataagattatataagatagttatttaaaatattttgtaaatttttgataaatttaatacgcgtgcttattttattttagggttatttgtatcatatttttttttttattttatacacttaatttttcttttgtttttgtgataaaactttattacgtttatttttttttataaatttgaggtatcagtttaatattaccgttaaatactataattaaattattattgtattggttttaagttttattttcaagtatatataaatgtatacaatagttattcaattaatatttaacaatggtatttaattgaggtttgaaatttataaaattaaaataaaaaagttttgcgactaaaaaaattaaatgtatagaaattaaaatattacaaaatttcactatttattttataaacaagaaataaatatttattttaatcctgctttatatattataaattattttaatattttaaaaattttgtaggatatatattctcaataatattctcgtccacgaatatcattttcaaattattgatattattttcttttcttatatccccacaattattttatatttatttttagatatgtagtattatggacatatgtttttgtttaaaatcccaaaatataaactattgaaagtataagttgtgacttggtagggctgaagccagtacaacttactgtcacataaacagattgaaaatctgaatgactagtcagtgttacatcaacaaggtccaatcaaatcacaactcaatttaatattttttaaaaaatatatatgtgatggtgatatatatatatatatatatactaccataccatgccattaccatccttagaaaatcttaaaacaaaatagagcccaccctttgtagccagctctacaattcactcaaaataaatatatatgttgagaagaatagtactatagcaaaatagatggtcatggtatcatatagtactaaaaatgaactatatagggatatgggatagctagtactactatactatactcagtactatatctatatatatacatatacaatttgtataataattgagaattgtcaagcagacctcgtgaaattaaggaatttaagtaaatactcactataaattttgtgcatataattaaataataaaaatctcaattgtttcatagtagttataatatatatgtatatggatgcaataaaatatttagaaaaaaaaaatatgtaaaagtttcgactctttatctgtttatgtatttagaagtattttttattaattttttattttaatgattgcatatattttttaaaaaaatttagtaattatagtcaaaaattaaaatataaattatcacacatataacaaaaacaaattattttactttcaacacggtaattcaatactatttgagaattttaaaataatttacaaataatcataaataattataatataaattatgaaaaataaataaataaaaatatttgtctgaataaatgtctatttaaacacccgagttatagacttttccaaatatttagagcattggtacgaaggtctagtatcacgataaagtgtcaaaataagtaagacctgatattaaattacactaataataatattacattttattaaaaaaaaatcctaaataccataattatcttttagcatttcactttaaacttttcaaaatttattaaaacaattgttattatatagagtcaaataaaagaatataattatagagtgttttgatgtagtaataattttggtgtgtgatgaattttgtaaaatggcaggtgtgcagtgaattggtacattgaagcagttaagagattggcatgtgagatattggatctgatggctaatgggcttagtgtgtcagacacaaatttgttcagtagactcatcaaggactctgacaatgactctctattcaggctcaatcactaccccaacactaaggacatggacacctcatcacccacacctccacctcctatggacgtggctcactacaaagttggttttggtgagcattctgaccctcagatcttgacccttttgagatccaacgatgtgggtggtcttcagatatctctagaggataaggtgtgggtcccggtcccacctgacccctttgccttttgggttaatgtgggtgacgtcttacaggtacttttcatatactaattactaatactaaattcaaaagaaagaaagaaagagataagggtctttgaagaagaactgactgaaatgaaatcaatctcaatagtgaatagtcacttcttataaccaatgccctttgggaactgggattttcccttttttaaatggataaaatgaatgtgaacccaaaaacattttatctattacttactatatttggttccttgcttttaaatgacttgtatatatttatgtgttgtgttttttttttttttttggttttaggccttgaccaatggaagatttttaagtgtgagacatagagctttggtaacaaataataataacaacaacaagactagaatgtcaatggcttactttgcggctcctccactaaatgcttgggttagtgccccaaaagaagtggtcacacatgagaagcctcgtttatataggccattcacttgggctgaatataaaaggactacttactctttacgccttggtgatagtagacttaatcttttcaaatctaatacataatataatagtaatatttttactaattaccttaatattattatgttataagactctttttatagtagttaaattcatgttttgtgttgtttttagttggagagttaaatcttatgtttgctgatgatattttttcttcttttcttttttctactaaaagactttttatgtgtgtgatgaaacaatcacgtacccttaattctcacttttatgcaactaacaatgtagataagatggcatgaactgaaatatgaaaaaagagtaataaaacaaagaactcgagttgttatggaaaaaatttgaatcaacacatttacaacctgaattaaacctctcaaactttacaattgttgtgattaacaacattacataaaatctcacattgagggaaccttgattaaatgcacaaggattctatatacaattctccaaacacttaagaacacttctaactttgaactagagagagatgaacctaaaaagtccctggtttcttctaagtgttgattactgacatatttatagacttcagaagtaagttggcctgagtaggaagaagcaccaaccaacttaactactttctttgtcatgtaggattagttgtgatgacttggaccaatgagtaagtgggttgaattttcaagttctagtgaaatccgtatgaagatatgggaaatctttgtttgtacaccactgaaatagtgatcgagcatttggtaataactgtataattactaagataataattattaggttagtaattatatattagagtaattacactttattttaaaatacaatttgtatttagatgttatgtagtaactgcatatggatttttcttttatgtttaacaaataaattagtaattacataatttagtaacattaattagttgaaaatagtaatattttataattatgctaaattctgagaattgattagtgtaatactcaattaccatactatataattacctagttgaaaaaataagtcaaatattataattcatctaaaagaaagacgctaatgcatttaatgtttcatcaataatatatattttgaatttgatcattaaaaaagatataagatagagaaaagaaaatttattttgagtttaatatatttcagactaaaatgcttacaattccaatcccaattgggaaataaaccaaacaaatgagttagaaggcttctctaaaataaagccattctaaatggaatcggcatgctaagcaaaaattatgatatgggatacatattttacaatcatattggcagtttggtcagcttaatactagaaagtaagaaaactaacaaattaatgtctttactgttatagaggaagtcatcaacacaacctgttaagggtggtttaaagcagagttctcttccataactttattcccttcccatgctagcgtgatcacattacgccatattctgagattttgaagcgaaacgcgaacacttcctacggttggttttgttaagtgtgcagacgcaagtttcaagcaactcgtaatcctcatcccagaacaacaatgctgccttctctgggttctctagaagcattttagaggctagaaaaccagcaatggtccatgtttggcgaagccgagcttgtttgcctatgaatcttccacttcttgtgtcatagtattcaggccactgatctgcagcaagtctattctctgccaaatcaactgcctttcgtgctaattctggcctccccattttgatgcatgccaatgtaaactaacatttaaaaatggtaattgaacaaatcagttaagtacttgtatcaatgtcgaaatttacagtaaatcttaaggaaaaaaaggaaacttctccaatcgaacacgcccttacctgccacaagagtgtaggccaagacccaccattgtgatatgaccatgggctgaaagcaaagaacagaatatttatcagtaactgaaaaactaattcaatcataacactaaaccattaaaagaaacaaggctgttgaaacgatcaacgaaagtaaacatcaaaagatactcacgtattctttgggtcagcgccagtgactatacgccattcttcatgctccatagcagggtagcaaatcttaagaggcatttgtgccacaagatcatcccatttgttctcaatcaaatttaaaatgccctcattctgtttctgggtgcccaaggatgaaacaatagaccaaagatttcccagtctaaagaacctgaaatccatatgggcaggttgaagattgccaataaggtagccaccttcttcaggaatccaatcaactagccaagaaggaatttgatctggatatatattgaacttgttgatagcatctgtcgaatactcctcagtgttgtaacgataaatctcattgatcttcttcatatccacccaatagtattctctaatgtgaaacgaaagtgcactaagtcgattattgactgcagccactaaatttttagtgttttcattcacaataagcatctcacgagaggatcgcagagctgagtagaacaaagcctgtaaaacaatctccgtttaagcacacttaaacataacaacataactaattaagatcataaaaagaaaagccatcgaatggaataaaaaggtaaagattcaacaagttcatcatttcaacatacctgaatttctagaggatgcccgtgaatccccatccgcctatcaatcatgcaggaaccatccgtgactaagagagtgggaaacatgtcaaaaccatcagccaaacacaggttaagaatcaatcttatacctgtctggacatcaaccctctcttgcagcgcatagtcccctgttatttttccatatgccctcaacaaaataatccaccacaaccctatcaaaataatggagataaagtttaggttcccttaatggtgataagcagtttcagttatcagctgctctaataatatctgtgtaaaagcagctaagaaatgcagcaatgaacatgggtaatgagaaagttaccagaatcaacaggtgcaacgcgaccaatggctgattcaccgaaatccggatctaaaacttcctcaaatttttcatcacttccatcaagaggcatagttcgaactttaaagcttgcaggcatcagcccttgcccagggctatggcagtccacagttttttcccaactctaagaaatggtaaaaacataagcattagcacctcttaagcaacagcagcaacaaaactaaaataattgagcataaggtaacaaaataagaaaacaaatgagaaagagccatccacatacttgtaattgcaaagtgtgaagcagaaaattcttcacaatctcagattctcccttgagcaaaaaagcaagggctgatgggacgaaatcgcgaataaagacttgatcataattcagaggttggttgtcggccggatcatttgcagctacagttcccacaggattcccacaataagtgacaactgaatcccaaagcaacttccacccctccttctcactcgcagacacctctttctcaaccttagtctcatttaaattagaactatctacatccacattcaagtctccaacactagaagactcttcctctttcttgatcacatcattagaacccggctcaatctttttaatcaccaaaggcttcacattcaaaccaccttgaatgtaaatactttcaaagcttttttcattaacactagcttccaccgaagaagaagaagatgtcgaatggtttcgaaaatccgaggctacatttcttacaactaaaaccctcctcctccttctaaaactactactgctaccactaaatttattccctgtaatccctagaaaatttcttctaaaaaccctagactgaccccaatttgaaccagattcattaaaagccctccggttctgatcagtaacacatacatagcctacaatttgagaattagagccaccgaatcggcctctggtgaccgatctcgatgaattttcagtgatggaatcgttcaatttgggtgaagaaaacccaaaaaaggaacgatttttacaaccaactagaattctacaacaaggtttcattgaatgaatcccaatacaactgctgctactcatattctcaaactaaattcttaacaattacacccttaaaactataacccaattcctttttttcaacaatttcaaattttcttcaataaaaatcaacaatttatatacagattcctctgttaatcttagaacacttaaaaagaaaagaaactagatatataaattgttcttaaaaagtagaaaaatttatatatttgtatgaatataggaacttaaaaatgaaatctttatacttacagtataagaataccgatctgatcagagaaaatattttgattgagaaacaagagaaattctttttttgtgttttaaggtttcttctcactagatttttttcttatatacaaacagagaggaaaaagggaaagttcatacgtaggatacaaattagttagtgtgagattacatttctgtccctgcacgtggatggtttttgaatatctttggatgtgtatttacgaaaatagccctaggctcaggtagttctatgcgttggatgagatacttcccagaaaatgggagggtagaatggtcttaagatatttgaatttggaaaatagtggataagatttgtcggtgagggtccagcacttttttgggtcataaaaaatgtgcggaaatctataaaaacccgagtttgatgtgtcttttatttattatttttaatagaaaaatataaataaaagtcgatctcaatttgtcgcgtcttacacgtgtctggtccttattcggcttcgccttaagagagattcttacagttgtgatttaatatctaattacaaggagcattcttcttggactaaaaataatattaattacaatcccttattataattttttaattaattttcacatttaaaattatatgttgaaatatttttttcaaatttttttatagcagtatttattataataacagtatgatccctataaaatttgaaaatttctgaataatttacaatatcaaaaacaaaattccttgcgtgttcaaaaaacttcaaatgtaatttcgacattgtaaactattcaaaaaatttcaaaaatttacaggaatgatgttgtaagcataacgaacaccgtcgtaaaaaaatttgaaaaagaatatcccaacatgcattttcagcgtagagattgactaagaggtctgaggttgtaacagaaggttgacagtagcactcttctaggattaaccatttgtatcgagtttgttccagatccggccaatccactccgacccgacctgaatattaaaaaatctcattcagtgtgagcaagttttgggtttgattttcaggtaatcgggttttgggttagactcgacccgcctgcaaacccgataaaattatgaaaaattaacataataaaccaaaaattaaaaaaaaaattataaaaatacatcaacataggaaaaaaaatatttttacaatttgaacttttttatttacataagtatttcttcactaaaaacaataaactattcttttagttattttatagtttatttatatagttatattgtatttgttatgagtatgttttttttattattttatagtttatttatagttgtcgtaaggttgatttcttgtcattttttagttgttttcttactttatgctatgcaaagtgtatttttataattttaaaactttacaaatgtatttttgtaaataaaaaattttgggtcgtaaaattgcaaataaaacataaaaaaaaaagtatttttcaaaattctcctaaagtctttcttctatcatcaagcatgagattggccaaaatactattatgtgtttagtctgtgggagccatggtccaataatttcacatttgttatttgctgacagtagatttttcttccttgaaacaaattaggagagttgtattcgattccataagattatgaagaagcatcggcttagttaggtaacctcaataaattagcggtgtgtttctctcctcgtatgtttagggacttgtgtattgctctggctcacgatttgggtgttcggttggtgcatttccatgataagtatttgagtctctcgtgcattgcagggaaaactaagagtgggctctttcatttcattaaggataagatctagaataagaacactgggtggaaatcaaaacatttctcctctgggggtgtgagtttcttttgaagtgagtcattcaagcgatttctacttatgctatagggttgttttgacttcttgtgggtattgttaatgagattcatcgtatgtgtgccagattttggtaggggtaacccgaagaaacatatattcaagaaggctaggttgttaaaaggctagatactttcaaagaggcttcctatttctatggactgcttgtgggttgtatggatgttttttcgaagcaggatataaaagaatttcttgtgctatgttggaggattttgtatcgtcacaactcttttgttcatgagaataggctgctatctaatgatttagttgatcaatgggccttgagttttctttggcgttatcaagacactcaatccaatttgttgcacatgtgaagccaatgacgtggttaggctttctagtggctcgactgagactttgagtttgggtaattttaatctatttgtggatgtaggtatcaatgaggaccactgtgttgcgatatatagcacacgcaagtgtatgtatcgtttcaagtagtagactcactaggagtgaggt

SEQ ID NO: 18723 - DNA, 4932 bp, Cannabis sativa
aattgtaattgttacaagaaaaattaccagaaaatcattagagcttttgctgtcaccagaaaatcattactacgacgtcgtcactataattggccattgaaatctacagtggaaattatttagttatttgtcttcggtattagataaataccgaagacaaaggtcttcacaagatccggcccaaaaacattaaaaaaattaaacacttttaatttcgattattaataaaaatcgaagatataaccaaaattttatgaaccactacttaaaaagcgatgatacaagtattaaaatagttttatcttcgaatttttaatttattaaagaaaaaaactgaaaataaaagatatatttgtagtagtgctaacacacaaaaactagttacgtttatgtgatagctcactccactcaacgtattaacaaattgtacgaggttgctcttaagcattatttgtcttgttaactgatctatatgaggtctagcttgatcattgcttttaaacttcgttgacatctcttcttctctgaaagataacatatctacttatgttgaactttttaaaacctttttccaaacacgtatctcttaacactattgggatgtccaaagaacatgcacttgaaaagtgaactatatgatctagcttgtcatgtcaaatgtgtacataagttgtgcatccaaacaatgttaggtgttcatcagagagtttcttccttgtgcagacctcctaagagttttaaaattcaaagctactgaggggcacctatgtattaagtagtttgttgtatattaacaacttctccataaaatttcctttcaaggtcagcttccttgaacacacatctaactctctctaagcaagttctataaattctttatgcaaatctatttcgttgaggagttctcgttactgatgtatgtctagcaataccaacacttatgctatactgattaaactctttggaatagtattcaagaccattattaatcctttgttttcttactagtttgatttttaataaacattctccatataataaaattatctaaatcttgatcttttgatttgaagagtagcttccacactttttgagagtagttatctacgatactcatgaagtagttagcttcacctaaagatgatactcttgctcgtccctaaagatgagaattaatataggcctatgaaaagtagttgtgtgaattctaatactaaatttcactatgcaacatttaccacaaacacaagtcaagctttccaccaagtttgccactcagaaccttttatttcaacacttgaacaatccatctttcagtaatttgaccaatcttttggttccaaagttgagttaaatcaacatctttatttgaagccaatgctgcaaaactaactattttcctaccatgaaataaattccacctctaaattcatccttcataattattaaagattcctttaaaacattcatagaactgccctcaagtttgattttatactaagactccaacagattacaattttcttctcaatacaaccctttcaacaaaccggcgataataagcagctaaactcaaacaccttctgactttagtgactgtcttcggccttggccaatccttggcagattcaatctttctcggatcaactataattccatctttactgacaatgtgccctaagaatgatacttgggatagccaaaatctacagttttcaaattttgcatagagcttgtgttctcatagtcgctgtaaaaccatccgtagatgctgctcatgtttcacttctgactgagagtacacaaggatgtcgttagtaaatactataacacatatattgaagaaatccttgaatactctattcatcaagtccataaaagttgttgcatcattgtttagtctaaaggacataaccaagaattcatagtgaccatacctagtacgaaaggcggtctttggaatgtcctcctctcgaattctcaactgatgatagcccgagcagagatcaatcttagaaaagactgtcttcctctaaagctgatcgaacaaatcatcgatccttggcagtgggtattttttttgattgtcaacttgtttaattctctaaaggcaatacacatgcgaagtgatccatctttcttcttaataaacaatactgcagctcttcaaggtgacacactgagtcaggaaaaccccaagtcaagcatatcctaaagttttatcttttattctttgagttcagcaggagccattctatagggtgccttggaaactagttctgctccaagtgctaagtcaatcacaaaatctatttcccgctgtggtggtaatcctagaagtttttatggaaacatatccagaaactcttgaactactttgataccttcaggccgaactgattcaggccgaccggtatctaacaccactgcaagaaaccctaagcagccttcttttaaaaaatttgtggcttttattacagagatccctggaacttgggaaccttaaactgataccgcaaacacgaatgttattcacctttaggttagaaaatcaccatctttcacttgcaatcattgttaacggcgtacttggacaaaaaatccattctaagtataatatcaaaatctacaaaacccaattccactaggtcagggctcaactccctatcctcaaccctaattggcacagaactaatccaccttttggagataactaattcttcgctaggcagtagggttccaaaccctgtttcatagctatctcacggcctacccagtttattaattattcaagctaccacataggaacgtgtggctctgagtcaaacaatacaaagtaataagagttgtaaactaaaagttgacttatgacaactaaaggactagcttcaacatcagcctgagtaagagcaaacatgctttgcctctatcttctgctcttctttctttagttgtgggtcatctcttttataatgtctagttacaccacattggaaacacctttgacctctcgtccagatgatgcttattataattagggaattctaggtaagtgtatcagttctgagacccaccctgtcggtaaccatggccttagttcccttggaacctcttgttctagttcgagccaccggacctagatggagcctttcttttttgatcagaggtcgagtcactacaacccctaccataactagaggtaggaggactagtggccccactaacagtaagagtccttcggggctcttgaatacactccactatgccctcagcttgtagtgctttccctaccatatcagcataggtagtggcatcatctgttgcaataattaaatcgtgcttgatcttggatttcaacctatccaagtatttttctttcttactaaatttagttggcactattcccaaggccaacctagccaatctatcaaactgtgtcgtatactatataattgtcatattctctttttgggtcaactgcataaattcttctctctttacactatgaattgcttcattgtaatactttacattagaaaactcttgagattcttcccatgtaattggtgacatcccgggtgagagacaccatgtgccaccaaaccaaggcgtcgtcctggaactggaaagtagcataggtcactctgtcgtttctagtgactcccataaaattcggtattcttctaataactgttagccattgctcaactttcataacgtccggacctcccacaaagactggaggtgcttacttatggaacatttcgtataatggttgcattcgattaacaacagtaactggccccacttgcataacaggggtaggagccattttcacctcaggagcaggcattccaggaccactatgttgtctgagatgacaaatttcttcatcctgttcattaattctgggttgcatttcagccaacctattttcccaatcctgggcagcctgtggtgggttaacatcaccccgatagtgtgccctacctctttgtcctctgccccgaccataaatattagagggaaactggactccatgactgccactagatccgaccgaattaccctagcttctcatgttctacttggcatttgttctattagaatagccagtaaaaccatgagctagcctggtcagattgcgatcaagattaaattctaattactgcttgcttgagaaaaaaaaaacatgcacctattcaattatcaggctactaacatgcttcctatcaggattttcttatcacatactaataaaaaaactactaaagcataagaggcttactaaactgtgagtcgagcataactctaatgatgattgtacatatcatgatgatcttcggaagacaatctggcagctctgacaccaaactataataccctattagtttaggcgtgttattatattttcttaatactgtgcactctttttctaatcaaaggatttataaaaaaaaaaacatgaataattgaatttttcttaattaaactttaaacttgaataaataaatactttacataattcgggatcccatttttaaagttacaactgtttaaaatacttagttacaaaagttgtcacctggcgactattaaaagaaaggctgttgtcacgaagatcgtacactccaggtctaacaaccctaatttttgcaatcttcatcgccttgtattcactactgttcaaccttagcttttccttttacctacacatataaacaacaattgtgaattgacagactcagtaagtaaagcataatcataacattatcataaactggattataacttggtgcccatacacccaattacaatcctatcctgcgtcccacacgtaatgagtttagaacgttcgtacgataatatgattgatcataatattagcctatgcttggtactttagcggtaccaatgtgatagcatgaatcc

SEQ ID NO: 18724 - DNA, 2252 bp, Cannabis sativa
atatttaactcaaactcaactttttcttttcaaatttttcttgctaaaaaacatttttttttttaattttattttaccaatggaataatctcatcccatatgatataaaaataagatttttttaattagatagaaaaattgagcataaaaactcaaagttttctaatgttacccatttatgggtaatacccattaatagtgcatccatatatataattatataaagtatttagcattctaaaacttagttggaaagttaaagaaagggacttggatcgattaacataccgctcgacacttacattccaacaactgatttaattcagaattaatgtataattaggtcactttagattccattaacacttgaaaattacttgtatatattattcttataaactttctaatactacatacataaaatataattaaagtaaaagaaatatatatataatttgtacgtacacttttagattcagatacatatagaatagatggtacgtacgtaaccactatattaataaccctcatatatatatgtggcgcgtatcacatttcattaaacgctacatatgataacaagaaaaatgttgataatgggatgatcccatgagaatttttattataatacaatatataatgtaatatattaattaagagcattgtggtgactattattttctcacgtgttgtgatttattagtaatattttttaaatattattatattaaactgtatgcgattcaataattagttagaccaatagtaatattataaaatagtcctaaataccactagttagtgtcccttcccatttctctattaattcattagtttaagttgagtacccgaataaagaaatcaactatgttagtttactttattattatatattaataatattattattgttcaatgatgttgccactacccagtattaactctatattaaataaaatgtacactgcctgacaaaaaaaaatatttatatattccacttcttcactgtcaccgttttgtttaactctctttattatatagaatttgagttaaaatatatatgtgaaaactgatcatcaattaagataaattaatttattcataaaaatatggtctttgggttttgtcaaatatttgaaaaactcgattggatttttcttagtttacaagaataaaaagatgcctaataataattaccttcttaattttaaaaaagaaggggtttcaaaaaaaaaaaaaaaaagaagaaaaagaaaaaaagaaacaatcatgtaagtccaacagtacccatgtatttaacatattaaaaaaattgatttttgtatatgtatatatagtatgtataagtaggcatgtctattggctattcagtgaaccataccttagttttgttttcttattgttgaattattggcctagaatttatgtatacacatgatcatgacactacaataaaagtatcatgatcatataaatttattcactttagaccttgctttccaaacatccaaaactttatgatagctcattagcatgatttgacaactttaattttctttttctctttttagggataaataatatatatatttcgacttttgttttacctgctttaagtgaatggatggtttcattggaatgattttgtctagcatacaatgagtataatgatgatgaggaattctgggcaatttcacagaaccactagtcaattaaagcaatttcacatctaattaactattaatagtggtagggccatcggttgattgaaatttgtatggtttgggtgttaaatccatgttaccaaatctcaacctcatcaaggtaattaatatatatagttatttaattattttatactcgttgaaaaaaaaaatacaataaagagatatatgtctgtatattatactaattataactcatatatcataagtaatattctaatgatcatgtactaattatatatgattacaatgttgtctaattttcctaaaaagttatctctatttgttgtgattggtcactaagtcaagtaacaaatgcaattggctcaatcccataactactaactgttttacctaactgtcagttataacaggattgggctcaaccaacacaggctattatagccatctgctagtgctatttgggaacagaattgagagagagatcttaagggtattgtgagtagggctgtacatcggtcggtttgggcggtttatcctatatattttctaacccaatctaaagtt

SEQ ID NO: 18725 - DNA, 2449 bp, Cannabis sativa
aaatcagtttaatttttaaaagctattttataatttaaaatctttattaaatgattttttatttttttaaaatgaatattatgagatggaccaaagaagtattgacacatggtatttatattagcacttaacagaatagttaaatgggtagtaacggatgggaagaaattgaaaaattgggtatttatgccactatttttagaatttgggtatttatttgcaacaaactcaacaatttaagtattaatgccgcaaatttcccttttaaatatagcaatgtgattttcgatgattgtaatatagcatagtatagttatcaaatttttactgttctcaagccaattattatagggcaaaaatcacatcatgaaaaaaagttagtataccaaccaattcagagataactgaattatttttagccaaaaaaaaaaaagaaggagacatgacacaattaggatatgatctacaataaacttaagtatagataaaagtccaaaataaatagagctcaacacaattccgaccgaaacaactacagttcaattttgatatgtgataatatgagtcttataagtccagaatcatatttgtaaaattacccctgccctgcactgcagctattattacattatgagacaccattaattttgactgttagctataactataaatacatcatgccatatattcagatagattatatattacgtattaacatatgttttacagctacgactacgagtaatagttacttatcattggatagtcataacaatttctttcactttggagctgtcaataatcatatttcattcacgtttaaaagaatgaatatattgtttttttaggaaatggaatgactattgtttgaagggttgaatagatttttattttattattactggccagtttcttatgaatagaaaaattaatggagctccaatcaaagtgcgctaagatttgattcctaccgatttatatcctcaaattaagaaaatgacataaatgaaaaagtgaacaaaatactttttcaacaaatctctcattaaattgttgattggtttataaatgtaaaaagaaaagtctaaagataacttaatatcaataataaaaataactagtacctgtttgtccttctctcatcagtcatcaataatttatcatgcatccaactccctttgattactaacgttcaattattaatgcttttttctttatcaaaaataaaaataataatttatgccttttaatgtgttaatttatgttcataaagaagaaaaatgaaaaagcccagaccaagaagattcatcaattagagcactcggttcataaaaaaaaaaaaaaaaaaaaacactgtatggattttggataatatatgtggtgctctaaagcaaccccattgccagttcttaaacaatacacaatagaaacattttcaaaaacatctacaatatatttaatctcatgaataatgctcctgttaagattaaaagcatgaaaaagaagtcagtgcctcatattagccaacgaaaaaataaaataaaaaagcaaacttagtgtatgccagtgccaatataattataaaaagaatgaaatgatatctcccaaattaatctcttaattcagtttcaaaaaataaaaataataaaaaaaattattatcttaattttcatttgtgcaatccgacaataattttagcaacagctcaagattatagtagcataaataaagataaaagtgagaatatatattcacacctcaccttcttttaattattttatgctgaatatatttacattctataaatgtgtaaatatttatttattaaaaaatattagctaatgtacttttaaacattttttttatattattagtttattttttgtattaaatttaggtattttatttattagaatgtagatttttcaaaaaaaataataaataaatttttattattttttttttttttgaaatggaacaaattttaattactttaaatgtaaatttttatatattttatgttttattttagatatattttatattcatatgtatattttaaaagaatggatgcaaggaaataaaattaaaagaaaataaatagaaatcttaaaaaaaatatatacgtgttaactttaataatcaaaagagcattgaacatctctagtggtggtgcttagagatgatgtggtgggatgtttgaaagatgctaattattgggatatttgggtgctaaattaaaaaagaaatattgatcacaaaatttaacattgatgacattgatgccatatttattttttaataacaataaaacaaataatgttaaataataatgtgtggcattattggcaaatttgaagactgtttattattgtagtacttaatgttgaatagagatacaataaaattttaattttctgatgattggagaattttggcactttaaatg

SEQ ID NO: 18726 - DNA, 4544 bp, Cannabis sativa
cattgcctccgagaagtaagccgccacgcgttgcgccgacgtcccgaacggcgtcgacagctccgaaatctcgagaagaatcttgttcgcatcgtcaaagttgtctgccgatactgcctctgcgcattggagcaaaagggttaacagatgtaaaccctcttcgtcccgcttctgttgccgaagctcttccttcttctcccggagtagtaccgccggggatggtaccgatacaggttcctccacaggagagggattctccggctgttgttgttggatgacatcagcagtattggttgcggttgacgtaggaagaggagtgggaggagggggaagcacagctcctcccccccagtgcaagtactgatcgttgggtgaagattccaggggaggagagaaaacggggacgttggatgggtcggatgctaggagggagcggaggcggtactcgaggagagtggctaggtttgggttgcaaggatgaatgatttcccttacgttgtggatgagttgagggattgagacgttggtggaactgtggatgaggtccttaatgataccatcgatccatgccgtagcggaggcactgttgttgtgattattattgttgttgttgttatcatccattgatgacgttgtagtgctgctggtggtgtttgaggggctaataaccctacagccagaaccagcagtaggagttggactaagattgttgtgaatggtattattgttagagttgttgatactaataatattggcagtagtagtagtgtttatttcacggctagtagtagtagtagtactttcgggtgggaacaaaggcagacccgaaaacccacaaacggctggggactggtactggtggtggtgggtctgggggagtgacctgatttgattaggattattattgtgatgaagatgttgataatggagagggtcgatttgggtcaagttgggacttgtagaacaagtagtagtagtattagttgataaaaccccagaaaccccacctgacgtcagatttgtcaaactgggtaacaaagtggagtagttggggttaatcccggtcgtactcactgatgatggtctggccgaggtcggagaactattatttggattaggaggaataataccataattattattattattattactatcaccagtggccggaaaagagaacccgatggccataggaacaccacgccgagagagcctaagataatcagcggcggttgcagtctggacttccatctcggaagccatcctctttctcaccatctttccagctccagactctacagattgtaccctttgttgttgttgttgttgttctgctagtaaacgacgccggtttaaggccaagtcttcagtactgctcccgctgctattggaaccaccaccaccggcaccggagctcggacgagagcttccaacatgagcagttgtagtggtactattaattgtataattggtggcagggtttccagtcaaatcagtagtagcgtctcccccgacattgtcactaatcaaagcagtcataatgaattgaaacccaaataagaaaaagagaaaaagtaataaaaatggggttattcagaagagtatataaatgagaagataagtacttacatagtgaagaagaataagaagatgatgatgatgatgatgaagaagataagtagatgtgatgagaaggcagtagccaagcagataacagccgtgaggaactggacagtggcttcgggattcttttctctctctctctctctaaaaacaaattgattgctcaaacatagtctctacaccccaaaacacgacctcctatgctctcttattataaccttcttctctttccttcttcttttgattttaataatacgactaagccgaagttttgccttttggatccatctgatccttacctattcttatacactttatacaacccagaatcccaaataaatcaataaaatattattaatagaaaaatcgaaaaaaaaataaaaataaaaaatgggagagccgaggctgtctcagttgtttatttctgatagtagtgaaaggtggtggcgattgtctttgctcgaatggattagcttcatttgtctctgctcaaacccatatgcagcagcatttatatataaatgattaaaaatcaataaagtttttcaaatgaaatacgtatttaataataataataattatgagaaacgagaaaagaaaaatgggtaggcgggggaattaatgcaagggaaagaaaaagaaaaagaaaagagaggagcagagaagagaagagagtgggagacgaagaagagaagattagggaaagaattaaagattgggtgggattttgcgtttgtttgtttgttcgtcgttgagcatttaacgttttcaaaatggttaaagacaaaacgacgaccattactatgtagtccgaggcgtacagggtccaagctgtatagtagtaaatatggtagctagcgttatcgagccaaacacacagaaagaaattaaacaaattttgggtttcacagcatttaagttttattcaattaatgcaaacatcagaagcatttaatttggttaggtaaaaatattcttcgcatttatgtttgttttgataatgacacttcaagctcatgcttcataaaatattattagggaacaagaatgttttgtagtatttttattattagtagtagtagtagtaattaacactttggaaaagaaaaataatattaataactaaaaataaaaacttgttaaattgtcctcttccttgcgtcttataatcagagatgatggaattatttgaaacattcatgggatttaactaaaatgttttcgctaccaaaaaaaacatttattaattttaaaaaggagtcagtatttttttttattattatttttcccgtcttctcattttttttaacatacaccacaaattaaagtgtaaataattttttgccagcaatgaaaatgtgtttatataattatttaagttaatttattttaacaatttgaattagtaatgatattaaaggaagagattctaattcaaaattagtattttaaaaatgaaaacttgatggaaattgggcgggcaatgtagagaaagtgctttcttcaactctattcccgttaactattttaatacatattctctccctctattgggatgataactcctgtggaaactcatttatttaaaaattaatatatttataaataaaaaagataaattatgtaaaaattaaaataataaatatatgttattaattttaaatatataatattatttaaaataaaatataaatatttaaaaaattgctaataaattacaaaaaacacataaaaatatatgtataataactaaaaataatattacaaaataaataaataaaatcaaacgggacctgttaaggtgggagttgctatcccatccctgtcttgtttagcatttgggaatggaaaattatccctattccttattttggcaggaaatccttgtctcgttaagggtaggtatctacgagatcttagcaaggcatttgatcgcattgaatcggcttaccttaatgctatgcttcttaagctcgattttcatgagaaatgggtttctctcattcaccattgtttatcctctgtcaaatataaagtaatatgtgggaatcatgagaccaatgtctttagtccaactagagggataaggctaggcgatcccctctcccctctccccttacctgttcctggtgtgtgttgaaggtctctctgctcttataagacatttagaagttagaggctggttgcacggctgtaaagttgccagaggagctccagttgtgtctcatatgctctttgttgacgatagttatctttattgtcgtgctactggtgttgaaattaacaaagttaaagagctcttgttaaccttcgaaaaagcatcaggccagcaagtcaattttaacaagtcttccgcttttttcagctccaatactacccaaaactcaaaaaatctcatttgtagctcaatgggaatctgtgaagcaactgaagacaacaaatacttaagcctccgtagaactcttggaagaaataaaaacgttgttcttggctttctcaaagacaaaatgcaaaagaggatccatagtggggatggaaagttcttatctcgtgctggaaaagaagtcatgatcaaatcagtggttcaatccctccctagttatgctatgaatgtttttctcctctcaaaagacacgtgcaaataaatggaaactctcatgaatcgtttctggtggcaatcaaaaggtgaaaactcttagtaaaaatctcagtaaaagcaaatccaaaggcggaatggggtttagaaatttgagagatttcaatattgctttattgggtaaacaaggatgtcgtcttctggttaatcacaacagccttgttgggcgtatctttaaggcttgatacttcccaaacctgaatttcgtctggcgtagcttatttgagacaaaaaaaaaagtctgcttcttgctggctgtagatgc

SEQ ID NO: 18727 - DNA, 4027 bp, Cannabis sativa
atcttagaaaagttatgtgatacactccaatatataattaagtgcaaatgtcattactcatctcatctacacttatttaaacacagtcaaagtcaacattgtcaacaaaatccaatcttcaataaaagcttctcacaatcacaatcaacacttatcttcacttggatcattttagttttctcccaaaacccaaaaatgagcaaacttcatctcaccctcttcctcttcatcaccactattcttacccaccactgtgtcaaagatgcctcagccgcctgccacgtggatgacgaatcagctctactgagcttcaaatctggtatcacagctgatccttcaggcatcctcagctcttggaaaaaaggtactgactgttgttcttggccgggtattaactgtcggatcaacaaccgggtcacggagctttcgttagtgggtcaacccgatcaacccaaaagcttcttatctggtacaatctcaccatctcttgcaaagctcagatttttaagcggtctttaccttcaagatcttcgaaatctcacgggtccatttccgggtctgctttttcagctacccaacatagattttgtctacattgagaacaacaggctttcgggtcgggtacctgaaaacattggggatttagcccgtttaggtgcccttagcttatacgggaatcgattcactggaacgattccgagttcaatttcgaagctgactcagttaactcagctcaaactcggtgggaatctcttcactgggtctttcccaactgtgatccgaaacctaaaaaaccttactttattgcatttggatcgaaaccagttttcgggtcctttaccagaaattttcgggtcatttccagagcttaggtttctcaatctttctcacaacaaattttccgggaaaatcccaaattcaatctcgaccttgtacccaaaactaactttcctggagctaaaccacaatcttttcacagggaaaatcccagattttctaggaaaattcaaggcactcgataccctttttctctcacacaacaaattatcaggaactgtaccgaaaacctttgtgaatctcaccaagatattcaatctcgacctttctcacaataatctcaccgacccatttcctgaattgaaagttaaaggaatcgaatcactagatttgtcgtacaacaacttccatttgaaaacaatccccaaatgggtcaccacttctccgatcatatattctctgaaacttgccaagtgtggaatcaaaatgaagctcgatgattggaagccatcgcagacacatttctacgacttcatcgatctatcggagaacgagatatctggtagtccgatcgggttactgaacagaacggaattgttggtgggtttttgggcatcgggtaacaaattgaagttcgatttggagaagttgaagatagtgaagacattaaagtatttggatttgtcgaagaatttggtttttgggaaagttcctaaggctgttacaggggttgggaaactaaatttgagtcataatcatttgtgtggagctattccggcgaataagtttccggcgagtgtatttttggggaatgattgtctttgtggagctccattgtcaccctgtaaagcttaaatggtggaacttagtatattttagtattggaatttggaagttaattaatcaatattttctgttaaatgataagactgtgagttcatgttgtctttttctagtttaataataaatatttctaagcaaataaattgtcttttttaatgtaataaatttctatttatggtcatggaattctagtagacttataattacttgtttgttttattattatttctttattttcttgttagtttgtgtgacaatgtgccatatatttgttttttaattgtcctacgattctttttcagtttttaaagaaaattaaattgtttagtacgtcaaaaaaaattagtttactggtaaaaacaaaagagggaagtcataatcacaaaagggttattagcgataaaatcacttgaaataacagaagtacaaaaatcgaatttttaggacaaaattgcctaaactctcgttctaatgaattgttgacatgtacacacttttacctaacaaatttttagtaatccatataatgttaattattaaaatattataaaaaaaaataaattatttcacgcttagacaggtagttgagcttgggtcaagcccctaaatttgtagtgtgccttagattggagacctatctcaaatcacaatcaacatctttttgtatatatacattgattaaactagttttgacatcaagaataaatttggaaataattatttgacaagtggtgacaaatatctcatgaatcacaaacttattttgctttcacaaaattttggaagatggagaaccacaatcttggctggtatggagaaccaaaaaatgccaagtttgggcatgagtcatgaccaaaccccattataattttcatgagttttgagttgagatctaattctcattagatgaaaattatgatgggatttggtcataataagggcccaagtttgtaagccttcacttcagtgctgcttttgctcttgctcttgctcttgctgcagcattttctgctgcatttgcttcttcaatggcttttgaggctgctactgctgctaattccgcttcttctttggctttcgctgcagctcttgctgctgctttagactttcctttggctttttctgctgctattacagctgcttccgcttcatcattcgctttttcggctgcttcttctgctgccattgcttcatttatggctttcacaacttcttctgcccttttggcttctttttctgctgctcttgcttcttttttcgcttttgctacagctgcttttgccttctcttccttctttttattctaataataacaaacattataacacaaaagagttacaacaattcacctgattaaggagtaatcaataaaacaggaaaaacacacaaaaaaagaattactctagcaagatcagattccatcttccttctctcctcatcatgttcaaaattcatttgtagctgctcatcgaaaagttttcgagcataggcatccttgagtatgtcatatgaacacttgagcctctggaatttagcattggcttttggatcatgtgagtttttatcagggtgcaacaatagggcctttgctttatatgcctttcttatctcttctattgtaaccttagcaccttctttgccagttggcaacccaagaattgtatagtgatccatgaaaacatacatatcttatgcttctttcttgttctacaaccaaaaatctaccatattcaggtctctcaaagattagtagaatggtacgattatgtcttgttattatgattcttaccaagttttattgcactgtatttaatttggtacttgtacttttctcaacaattacaaaaatgaattctttaattttcaaaccaagaaaaccaaacttattcatatcattcctttgggaaattaactccactaaaagtattaatttttcttgtaattttcaccatcaaatctaatctcagtacattaactaatcaaaaattcctatggaaaatatatacatggacggatgcacatataaaaagacttataaaaccatgtaaagaacaagattacataatatatgaattctttgttctgttttttttttttttcaattaacattagtataaaacaaaattgtcaaaacaagaaaatcaaaataattgaaatagtgaaaaattacttcaaaaaaagctcatattgggactgagaatctatatatatatttatagattaaaagcatgtaaagaaagaaatgaaatgttacctatgaagagatgaaaagtagaaaagcggtggagaatggtagttgggcttgaccggaggagatgaagagtgagtcagtcaagagagaagctctcttctaagtaaccgaacaacattaattaacgaataatggaaaatatgtgtgttattaata

SEQ ID NO: 18728 - DNA, 2117 bp, Cannabis sativa
cgttccgctgcgccactctgatttggggatagattatatacaaaattataaataacctttttcaattacgtaatgggccttaatttcgagcagtagtaaatagtgggccagagacagaatcccagttggcccaacccaattaatcatttttttgggctttgcttatcactttggctgttggattgattgagatgtttttgtataaagtgcaataaacataaaacatgctccgctaaacctcataaaaaagtagtgtagtacacaaaaaatttaaacaatacacgaccaaaatatgtaatcaaattatttattaacaaaaaaccaaattgggtcaatttgtagacaaactatcattgttcctttttaattgtaaaaagagtaattattattagatatggataatccaaatattattccaaatctgaaacacataaaaccaagttttgtaaatcaaattgttgagcatatagtagacaatagacatttgcatatgatgtgtatccattatccatatttgactctctctttatttttttatattttgggcccatttcaatcttctccactcactactttatgaggcataattttaaacattgaaaaaagaaaaacacaacacaatccaatgtgtttcaacttatataaatatatgtgtgtaactaggaaaagtacaactacaaaacattcttttagggttactttaataattaattggaaactctcaaaagagaaaagagagagtatgtagaatagaagtagttgaaaaatgaaattaataaataaaatatatatttttattttatttatttattatggttcaaagtatgagtccattttagtaagaatgaattgtgaccaaccaaatggaaagaattaaaggatttgagtataagaaccattattgaaagtatatgtggtagttcaaagttagttgtagcttgaaagagacttatatactagaattaactaacataagtacacaagagaaatccaccaaaaaaagtacatcaaggggattgagatagagaaatttctatagttttttcactcaatataatacataatgagataagttcatctcaatatataaatatagggatataattttactcaattgttaggtcaaattgaaattaagttatagtttaagcttatttggttgggattctatgttgactttctttgagtcttacttacctaggaaattctttctttagaacttattaaaaactaacttcatatatattcaaagaatattttaaagcttaaagacaaaacaacaaacattagcaaatatacctttcgattagggaaaaaaaaaataattagtggttctaaaattaatttttgtagcaaaatccattgaattaatttattttaattagtaattaactccaaattataaatttgatacaactataataaatacttctgttggtgggatatttagactaagttcaaggattgtgttgtaaatatacaaggaatttaagggataaaataataaaataattattatgaaacttaattatatggtttcatttgatacaagttataatggtaaatactatttgaattctgtattttgtaaaagatactaattaaattatctgttttgttaaatgataaatatgagctcaattttttatcaattttcttgttaatataaccatcgccaagttaatttttaacattaaataatacaatacatataatcaatctggttataataactcaaagtcaagttattattatgttctatatttatgaaaattgagcttagattattattttgtactattttaaaaaatataaaatctaaactcttatttaataaaatagaaagtaattaataatttttgtaaaataaagaattcaaatgatttgttttttttttttttgcctgaaatatatacccaatttgaaagcttaattgctaagaaaagtgttcaaggactattttgctcatctcaataaatttaagaggcaaccatgtaaaaactctaatcttttatattataatatttttttattaaagttattaaattaatttgacctcattataatactagtcacaatataaaaattatactagtttcatgttaggctatttttag

SEQ ID NO: 18729 - DNA, 5012 bp, Cannabis sativa
aacatgtatttcttgtgattgttaaaatgattaaaaaaataagaaaagaatctgtaccacgtgatcttcttatttatttaagaataaaatagtattactataagccacctataatacttaatctagcaccacgatattacatcccacaaaactactatacactataacattctcaaaagagaaaattactatgaacaccaagttttttctagattatatatatgtttttaacagaatttttaaaatatatatgaaaggattgttaatgaaatttgataaaaggggcacaatttcctttctaaaaaaagatgaagcacaaatttatggcaaagaaagagaatgagaatggtattttggagtggaaattgaaagatgtttttggtccccctttggaaaaattgcatgatggaagttaacatccatacccacttttacaaagtttttattctagtttctattaatatttagatgattgagtattttgtgttataaatatttaagagtaactctcaattgtaaataaatacttcagtttaatttttaacggcaataatattaaattatatttataaaattacgtaagtactggtcattaaaagttaagttattattcacctattatttttttataggtatattaaaattaatttttttaaaaaaataaaattttaaggagacactttttttttttttttgagaaaaagcgtttatatcataaattcaaataagtttaaacctcacggtcattacaaaattttaaggagacacttaacattagatatttataccgtaaattactttaaatgattgatttatatgccacctattttcactagccgacagcccaagaattcaccttctacacttggcaaaagaaaaagggacagaaaaaagacctcaccttctggcttttaccaattggagaagaatataatgaaaattatattctaaccatcaatatttaataatttgttagatgtgattgaaaattaataatttggtacatgaaacacatgctgaaagagaaagagaagtctaaataggggtaaaataatatgataatatatcaaatgtcaaattacaatatatataaatatatataattaatattttaataaatatgacattatatatgttcctcaaatgttcaggaatcatcaaaagccataccccaaaaccaaaccgggtgacattgagacacaaatagattgaaagagagagcatagaaatacaaaaattacatctaacaaaataaataatgttctcacaacaaaaaagaatcttggtgtcaaatttgtgactaatggccgacaaagctaatttggggctcaaactaagaccaccacctttattattttttatactggataaagaaaagaaggaacaagatgatgcaacctatcaagggaggaaaagaaaacaaataaataaacaaatctcggggcgcattcgcagcagcagagtacagtagtataatattatgtgtcttcatacttagttagctgcatctcggctgtagtacaggtcaagggtcttggctggaatacgatgaagaagctctcgggggaagatgcgaagcagtgtccatgccaaatcaagtgactggaagatgttgcgagtgtcgtatgctccttgagcgacaaacttcctttcgaatttgtccaagaattccaagtatagctgtgtattggtagagaatcaatgtcagtatattctcaagaaaatgtattagatattttttagtattaaggttaaaaggaaatgaaagagaccagatcctcagaggaaagagcttcttctccaaccacagccttcatggcctggacatccttcccaatagcataatttgcatagagctgagatgtgcatgagatgaaaaattagatggtttcatgtgattacagctaaaaaagggagggtagtatagatgttcaatcaaacctggttggaaacatcagcatgatccctgcgagtcattccctcaccaatagcactctgcaattattagaagttaatacttgtttgaactgtgaactctcaatgcttttagagcttaaacaagtcggtgttagctttttaccttcataagacgagagagggaaggaagcacgttgatgggagggtatatctgcacaatttaaaagaaggatctcaaaatttcatatacgaagataaaataaactattcaagtcaaaagcatacaaatgccaaacaagactcaacagtctgagcaagtcttataatctaacctgtctgttttggagttgcctatcaacgtagatctgcccctcggtaatatatccagtaagatcaggggtggggtgggtaatatctagcaaaataagatttcaatgtcatgagtgtatggtcaaaagaaaattttgaaatatttgggagataataataaaattggtataaaagtacataccatcattaggcatagttaaaattggaatctgggtgatggaacctgttcgcccttcaattcttcctgcacgctcatagattgtggcaagatcggtatacatatacccaggatacccacgtctaccgggtacttcttctctagcagcagacacctacagtagcaatatgataatgttacacaaatcttcatacaaaggcatatcaatggcaatcatagtaaaacattctatggaaatatgctaaaaatacgagtacttatacaatttattgtttttaacaataaatatgttctacaaagtcgaaatgatgttacagtaacgttacctcacgaagagcatcagcataagaactcatatctgtaaggatgacaagcacgtgcttcccgcattcatatgccaaatactcagcagtggtaagagcaatacggggagtgatgatacgttcaattgtagggtcatttgcctataaaatagcaagcacagtaagttactggggtaccatcacaaaatttgagttagacaggccaaaaaaaggactggcaacatagaggaaagtctcatctggcattaaaagtataccagattcaagaaaagtgtcactctctccattgagccattttcctcaaaatcacgtttgaaaaattgtgctgtctccatgttgacacccatagcagcaaacacaatggcaaaattgtcctcttcagattgctgtaaattcaaatgcattagacaaattacaaatttagataatataccaccatcatatgaagaattggaaaaccatgttcacagagagaagaaaattgctatcatttcaatctaaatagaacaaacaaatctctaagaagttaaacaaggagaccatactcttattgtacctactaaagccaaggcaatccgtgagctactaaaaactcaatgcttttagattctattaactttccaacaatgttacaaggatacaattttagtgtttaacgtctttgaaccaataccaatacttaatcaataacattatcatctttgaaaatatttgtattgctctctgtctcaaaactgaacctacataaatcttgcagttctacccgttttaaggaaaaattggttgctatttactaccaaaatcatacctcgagaagattttcagttttctccaatcgcttgaccaaaccagcctgacgacagatttgagcagcaatttcattgtgaggaagaccagcagcagaaaaaagtgggatcttctgtcctctagcaatggaattcatgacatcaattgttgaaatccccgtctgaatcatttcttcaggatatgttctctcactaggattgatagaactccctgagggatgaaaaatagcaaattgaaggttgatgtaaagagtaacataaaaggaacatgtatatacactcacatcacgcatgattctgtgtgatcactcacactgccagcttacctgatatatccaagtatgcctcaggcaaaattgggggcccattatcaataggttttccagaaccgttgaaaatgcgtccaagcatatccaaggagactggagtttttagaacctgcaaagatagccagaaaaaagatgttcaaaacattgacagattaatgatgataaacaagctatgcagaaagcagtctggtcctgttatccttggccttgcttaacaatgcaatatgaaataataggggtttaatacctctcccgtaaactgcacagttgtaaacttgttgtcgatgccggatgttccttcaaaaacctggggaggaagtgacatcagttataagaagggaggaaattagacaattattgaaacaacaaaggacaaaaatatcatggtagaaagtaaaggagcaattgattaaatgattagcaaaaataaatttcaacttgaacatggttctaaggttatacaaaagaatattggtatgtggccaaaatttaagattatgcacccatccaaatcaaagaatgtacaagtaaagtacttcctgattacgagaagacgatgaagaatgttcaacagcaatacctgaacaactgctctctctccatcaacttctaggacttgaccacgtcgagttgatccatctcccaaacgaatattaacaatctcctgatatttaggtccctgagaccggaaaagagagcaaatcagtcctacaattctgaagagaattgacatctaggtgtgtacgatgaaaaagtagggaaaaaacaaattaccttcactttctcaagaatgaccaacggtccagcaacaccagagacagttctgtactctgcaaggtgtggcaaggcaataaaattgaaaaaaaaaatgaatacaaaggtgctcagcagtcatgatcaaaacaagtatgagtaccatacacttaatcactaactgaatttcttttagtaatgatcaataaaccaaatcagataccatatgttcttcatttaaaaaaaaaagaaaacccccaaatacaccacacatacaacaaagtgataagtgatcgacttacccatcccgatctccaaatttccctcctccaagccatggttttcttgtgcaacacccattattgagcttcacaag

SEQ ID NO: 18730 - DNA, 4152 bp, Cannabis sativa
atgaatatttagttaaatactttaattttaaatagatttaccgtttttttagggggaaatatatctattactatttgttgattgaaatatagatgttttttttagaaaaataaaataaaacaatcaaatacatgtatgtttaatcaaataaatatttaatgaacatattaattagtgatttgccaagtgaaatatcataattaaaatattgaatggagtttttttagtaattaaaatttataattaattagatgaattttcatttataagcgcgagaatgtacagttttttttatatcaagaagaaagaatatcttattaatcaccaataattgctacaaatgcaagacaattgaaatttcatttcaaagtattaataaaaaatttaaaatagctaaatctattggctaaaatattgagaattctagctttaaaatttcctttaatcaactccacaatagagtgactttctatcatatatggatgagtataaatgagatgacatgccttgggagcagtttagattttccaatctatttcaagtatataaatgcatatgagaactcagataatagatatgtgagattgatatatatatgcaaagaaaacaaagtgaacaaacaaaactttcctcacattttttgagtaactaaataaaagttttacttcctaataaataaataaaattttactttttacgttcaatttttttttaactgatgtgatacatgattattcctaaaattttacagccaatgaaacattcatagccaagaaattatgagtgaaaaaagaaagaaaagacacttctaatttatattatatataattacaattctaagtacatatattaaatatgtaaataccatgtctagttagaatattctaagttcatcaatggattaagagaagaggacatccataatagggcatggtttacacatagcctctaatgggacagctttaggcatagtaagtcctttaccttcactcatatcaactttttccttactaatattttcccattcaaagcattgtatcaatgaccctaatgttaatccaaccacacgttcagctagtccaatacctggacaagcccttctcccaactccaaatggcatgaatttatatccttcagtctcactaatattattactctcaaatctttctggcttaaaaatctcgggatcttcccaaaacttgggatctctctgtatggcccatgcattcacaattaccattgtgttacatggtacatcgaatccactaatagtgcaatcgctggatgagtagtgtggtatgaggagtggagctgctgggtacaatcgtagggtttcgaaaatgacatttcgtaggtacgatagtttagtgagattcgattcctccaacaattgttgttgaccaacttgagaattgagttcgtctcttactttttgtaaaatacgaggatgattcaatagatttgacattgcccattctaatgtcacagccgatgtatcacttcccgccattagtaatatctaaaataaataaaaaaaaaaagtttattgttatagtattaatgtagtcaaattaatattataatgaaaattaaattatttaatcaaattaaaatattgatatgtacacacatatacaataaattcaaatcccaatctttcttacttttaatataattaatgattaatgatatatttcatacaaatcggcacattcatgatgataattatattaagagaattgccaaaaagtattattcgtgtttagcataatattataccgcaaataattgatgccatgcatggaggcgtctaactccatttttcccttcttatatgttgtgggttattatgaaataaccgatggtataagatctccttaccatcgattaattatgagtcactcttacaatgtagtttagaatagtgtctagaaagtccttaaaactacctctaaagctcaatttttctaacagtgtttagagaatatcattaaccaacataaagtaccacatataaaaggtgatgtagccaataacaatacttagaattaatggtatggtattaattctcatacaattgtttaaaaattttagaattaaaaaaaatagtgggacccacacaaatcaaggaaaaaacaaagagatgtccccctatttttatagggagatacattttcctttcctaactaattactttattttttttttttttgaatggaactaattaatttatttaaatttaaattgtattaattaaaaataaaaaatatatataaaatatcaatttaaattctatataaaatatctaaaagaattaacaactgatgtttacacatatataatatttattattattcgatataataagctaccttagccttatccctgtacaatattcaaaggtttattggacttttcctagtaattaaaatataatatctacagtgatgtcacataataatataaggaccatccattctcaccttatcttttaggttccattgctatcaaattaaaatagtaaaatacattcaaaaaaatagtaaaatatatcaattttccaagtattaatttatcatatataaaacacatttatttcgaactttctaatattttagtggacaattaattatatcaaataaataacaacataccaattttcgaattttatttttatggaaataatataactagatttttatttgattgaggcttgtatatatctctctgataaaaaattatatcaataatattattatacatatttatggtaaaatattatatttgactaatttatattatattttcataaataattgtttaattgagatcttaatttgtgtatatattcggtgcgcatgttttaatatcagaatatgtcattttcaatgttatatattaaataagttgttttaagttatagcacttatgatttcaaaaaaaaaaaaaaaagttatagcacttacattagattaaatgagataaatttaagttattatataacttattattctctataatatcaagaaaaatgagaaagttttagaccaataaataataaaatttagaaaattattaattttaacctaataaattaaatattattttactatttatttattgttaattatatttttatacactccaactttttgttataacaaaaaaaaaatagcatcgcgataaatggctatattacttaatattttatagaagttaaattttatattttttaaaatattataaaaataaaattttgagttcaattttaataattttttctaatgtaattaatttgaaaataatttttagtacgtaattaattttgttaacaattttatattgagttattattacattttatttttaaaaaatctaataataatactatttattattattttaaaaaatatataacctaatttatgatttaagtaaacataagttgttcaataaatatcttttacaaaaaatatataattcaaaataaaatgctatttactctatattatatatgaaaagtatattcaaaataatattataaatacattgcaaaaaaaataatattataaatataaaataataataataataataataataaatatttcacttataaaaaaataaataattaccagaacaaagcctttgataatctgatcggagtaatattccggttgagattcctgcaaagtcagtaaatgatcaatcacagtattccgatcaccgccatctttccgattccgatgctcttcgatcaaaccctgtaaaaacaagtcagccttcttcccaagcctctcaactctcttctcataattattgatcggaatccacttcaaaaccggcaaaaaatccgccgggttctcagctccagcattctcaagaacctctttcataacctccctaaaccgccgagcctcctccgccacgtcatcaccgtagtaccgttttccggccatcattctcattatgatgttaaaactcatctctgtcaatttcgacctcagctccacccggctccaccctccgccggcgccggagaattggcggaggagccggaggatctcgtctttacggatgtcgagaaagaggttgagacgggttgaggataagatctcgacggtggcgatacggcggaggttccgccagtgg

SEQ ID NO: 18731 - DNA, 3946 bp, Cannabis sativa
acttattatttacccaaaaaaaaagaataaaaaaattagaggtgatgttaactatttctttcctatacaaaaggtcctgtctctttctttggaagcagacaagtagaaaatggagcaccactactcataataataaattggttctaattcccaaacattctctacaaattaaataaaattatttaaatataatttattttagccctaaaaattataagaaaattacgtggtagggtacgaaattgatgatattgtttgtaatgatcaataatattatttatacaattacaatgacacatctcaaaaatatatattcttctttatttattaattatgatacacttgttcccatatatatatatatatatatatattacatttaaattaaaatattgttattaagtactagtgatatttagtattttttcgacatgtcacgttgcgattagttagcaatactctctaaaagttattatattaaattatatgggatctgatacttagtttgactaatagcgatattaacacataggagggtactagacgtacaccaatactagtgtcatttagcatttctctttaaataatgcattatatactttttagcactgtaaattacaattattatttttttggacaccatatgaaatcttaaaacatgtgtcattaaccactatagagaaattatttgttaaatgtaagtgtttcaattcttattaaatatatcttgtttcaaaaaaaataaaaacttttaacttacatcagtgcactcaaaaagtccttggtgcttattaagtttaatgaaaatggacataatacatttttcgtattatttttttttccttaataaaaatatataaaatattgttagtggatgagtttgctaataagtctctgtttatccaatagggaatcaaatacatggatttataagcacgtcatgaagtaacaaaaaaagaagtgggattgattagaaaagagcaaatatttcttgtcatcaaaaagtttttttatgacatatatatttattaattgttatttttggaagaaactgtggtgtatggtttacaaaaatgatagtaaattttttatttttaaaattttgattttaaaaaataaagatgtgttttatatataaccattttattaattatatttaagttaggtttgagttttggagtcggggtttaagtctaggactactggagttcatggtctggttttgggatcggggtccaagatttaggtttgggttcggggtcgggggcccaaggtctggggtcgggctctgggcccgaggttggaatctaagtctgggtatgagtttggggttgtggtccaagttggggtctaggtctgggtcgggtccatgtcaaggttcaggaccgaggggggccaatcttaaggcatatggagcctaaggtaaaattaaattttgagaccctataatcaaaataatagtttaaacactttagtgtaatggtaaagctgttaaaatttcttaagagcttcaatattcaatctttcatcgctacacataaaatatttctaaaaaactagaaaattagaagttgattattgatctattggcatcttagcttaaaataagactctttaccgctacactaaataatttttattttattttcttattatttaatattttaactacatactaacattttttttcacaatattggggccctgggcgttcgagggctcaagccgcatgcctggctcgcctaccctcaaggcccgccctagggctgaggcctagttcggggtctaagccgagtttgagtcagggtttaggtttggggtttgagtctgggtctggggccaaggctaagggctgtctctggttccaagacccatgtttaagatggggttagggttcgatgttcgggtttgggtcgcaaagtccaaattagagtagaagtccaaaatattaattaaaaaaattgtttaaaaatattttgaatgtgactttttttttttaatttttttaaaatattgattctcaattaaaaaattagaaagtaaaagcaattttatacaatattttttttattttttttaattaaaatagcaaaaaactaactaaaaaatattatcaaaggcataaagcttttgctctagtttcagtagcttgtgtattctcagccttcaagtttaccctctaacaaaaaagttaattttactttttagtttttagtagaagagtttcctaaaaaactaatattgaaaacataaatttagccaaacaagtccacatacatcttttcattcatgttactatagatacatatatatatatgcacattaaaaactaaaataatgtatactgtgtacgtccaaattattattccaattccattttcaaaaatatatatataaatatattattattattattattccaacgtatataaataaagtgtatattttgtatgtccaaaactccaaattattaatccaagtgaagatatccttctattttatctagattggcccaacttttataaagtatatatataaagaagtacctttgggttgtaacttgtaaacacacatttgagaagaaagaacttaatttgttgtatttttaaggtaagttgttgaaacaaattatttaattattgagttatttggcaatattataaattgtattttaaactacactgtatcacaccacatggcatttcttatgatgttttgtatttttaaggctggtttggtataccttgttgtattatatatataagtattacttaatacaatacttcacctatttagtatttacttgtattaatgtattatgtaaaattatatattatctttatcataggacaactctaatgataaaatttaaatttggggttaaatcaacaccaaataatactattctactactaatattttttcctaatccaactatactaaaaattacacaatatagtatattttttaaacttgaccccaacctcaacctcggccctgcactcagatttcatttttggtcacaggccacaaaccccaaatcgaatttaggatttgaggtcgagttccaagttttgatatccgtcgttcaaggttgagtcaaggtttgggtccaagtttgagttcgagtctaaggctagggtctgtagtcggattcaagtctacaatcctgaaacctttgtaaatattataatacaagttgatgcgaatatattattatatattaaataatataatttacattatattaaattttttagtcatgatattaaatacaatacaaaattttatctaaatataaattataatgtttcttgttatttaatataatacgatttttatacaatctaacaaatgagcccttaaggtctttcaatgcagtcgtgaattcacgattcaaaaaactacaaaaattacatgtacgatttggtttgaaaaataatcaaaagttataacactggcaatgcaaacacattctttttttattattgtattagacactttagatgtcctgtataaaattaatgttgaaatataggttacacaatttaaattataatgtttaattaattaaaaacttaaagaataataagattaattaaaaaaatgagttgtgtatgtttattggaccacattcaatatttataggcctatctagatctgatccaatcatatattggatgttagattttactatttgatctaatccaattaattttagtcattcaatcgatcaatatctattggatgttggattagatcggttctatctgttagatgtatttcatatatttattgatttaatttaggattattcaatactttagactttgtattttttggatcaggtcgattcatccaatattttagcagacccagtatgtattgaattagattggatccatccaatttaagaaaagaagagtttaattttaatgttaatttt

SEQ ID NO: 18732 - DNA, 4013 bp, Cannabis sativa
tggcttagagaagtcaaggtgccgcacaggtgttccgttgcctgaaaaggtgagcccgtgacaccaggtagggaagggtttttcctcgtgtttgaggaacctagttggattgtttgtccattgtctacctgtttgtagactctgcctgatctatctatgagtctcttttgtaaaagatctcttatcaaatcctaacctctttcagtagttctcttattgaactaccttatcgagtcattagcctccctattaaggaaatttagttctacctaacgggcctagaaaatggcctcctagtgatccatccaccttaggaatttgcatctctgctaggcgaaagcatcgcatccggcagctcgtggttcttcttgtcctgtttgagtgacctagcctataactgagcctagccaactcaatatcaccaccaagggccaagtgaggctcaccaatgactggttccccaattcttggccctgtttcttctacaaaacatcgtggaatagccctagttgtgttatgtggaggttgttccatattgatttgctcttttgcatgagatcatgtgaggaatcacggcctatcaataagatttgcaagattggcaagattgaaagtgttatccagattagtaggcccttttgtgattggaggaacacgaacatcgggatttaccatcatgggatccttacgaggatccgaggggggagttcttctagttagaaccatggtaattgatcagaacgaggtgaatgaattaaaaaaaggctctcgatgaaagtaccaaaatattgactcagaatttggcaacttacagcggaccttatttatgaatgacaatcatcgcaggtaaataaaagaataaatagtaaagatcagatagcaatttatagaggttttccccttatttggcgggtaatgatctactgccctttcaattgtattcacttttaagataatagcatgcaaatcataggtgaaagccttatgatttctcgctatggctctcttcagtataacaattgtgggaacaatgtgttacagatcaagaattgatgagttcttgtgaaggacttaagaatatgctttacttagtgtcttcgaggcattaatagaatgtgaggattgggagagagagagagagaggcttgcacgtgtgaaaggcttaaaagagcatgagagaagacttttgtagcttgtggaatgacttaggccctaaatgaatgatggaatgccctttatatagtgtaggggttagaaaagatcctaattcaaataggtagagatatccctttagaatagagatattaacatctttttatctattatttaagttacaaaaaaggataacaaaattcctaggaaataggaacaatatctagaggaaaaattcctattttcgtgggctgttaggcctgtctcgcaagttgctctgctgtttggagttttgcacataagttagctagccagtcctatttcttagggcctggccagcctatgctctcttatggacggccaggtattgctcctactacctcggtatgtgtctgccagctttctatgtctatgtcagcctttttatgtgcctaccatccttattagattctttgtacatctttccttgcaaagatcacgcttccttggtcgtacagacctttcttggtctgtcagacacttcttcggccgactagcttgtgctcaaaccctggctggcctacaagctttctctggccggtcttcacacttcccttggtcggccagacatggttggtcagggtcttaacgacctgctcaactcctttcacttattgcttaacagttttacttgattgctctagaacccttaacagttgacatgttgtgtaaggagacttcgtcctcttattgacaagttgtattccatgtgtccttagtcttgactatgtggacatgccaagtcaagtgtataaaatttaaaataatatttacaatctcatcataaattctattataaaaattaatatattattattattcaaaatatcattattattcttcttaatatatatatatattcttttaatttttaaaaatctataaatttcttcttttaatttttaaaatattattattatttttttatacaatttgaatttaatttattgtttaaaactttttgagagataaattgttctaaaaactttgagtatttgtatttattctttttaaaaaatatatatataaatactattatattttcttttatagagttttaaaataaatatttttctactaaaataatattatttatttaattaattatatataagatttttattttaatcttcaaaaatcaaaacacttaaaataaagtttaaacatattactaagtgtacatgttttgttggtaatatttatctggtatatatatctatataattagactcaagaaagtaggaagaaacgcacacttttttttttttttaaatcacaccaaatatatttatccaattactaaaatcgagattaaagcttggtagctacaaaaatatataatacaacatctaatggaagggtgtttcagcatcacatacctattattttatagatattttataattggataaataataaattttaattgatgaggatccaaaagttaaatttgaaaacatatggtgaaaacagagtgagtgaatgaatgagcgaataaaacagagtcaacgtggatgtaaatagaaagaagtatcctagtgtggattagatagattatagagacagcattttaagaccaataggaaatagccaagatttaacgacagccacatgactgacataatagagaagaggcagacaggtagtgagatgagatggcagcaacatcttggccaagtctcaccttcacaggttgtctaaacaaacacgctccaccctctgtctcatccagaatcaagaatcttcctctccgccctgccaaatcaaattccctgatcatcaaggccttcttccacgccaggcccaccatcttggtcactgagaagctgggcgaaccgggccttcaactgctcaagagattcgccaacgttgactgctcttacaacttgagtcccgaggagctctgcaccaagatctctctatgcgatgccctcatagtcaggagtggcaccactgtaagccgcgaggtttttgagtcgtccgggggtcgacttaaggtggtggggcgagctggtgttggtattgacaatgttgacttgtctgccgccacagaacacggctgccttgttgtcaatgcccctaactccaatactattgctgctgccgagcatgggatggctctgctcatggccatggcgcgtaacattcctcaggctaatgcttctattaaacaaggttagcttttgtttattattctcaataaaatgaacttaaatatcatacataaggaacacttctggggaggcccgctcattcatatcatatgttttaattttatacctttaattctttatttatttattctttttttttttttgtgtgtgataatgctctttaaatttacttttatttataaatgaaaggtgctagttgaattttaaattctaattgaattgtaattatgtacacttgtgtatacataccatattttcattggatttgaaattttaatgttatttgtatataagtgtttatagcggcaatcttaattggcatttaatggtaaaatttaattagcgtcttaaatttacaaacaaaaataaacttaaaaaggtatggccataaaataaaataaaataaaaatcagtatataaaaattaaaatataagttttgctgttatgtgtcacgggctcaccttttcaggcagcggaacacccgtgcagcaccttgacttctctaagccaaggtcagcattccaaccatctgagtaacaatgggttcatttttcacgccaccgtgtaactcgtacacactttcgtctctcaaacaactcccgccgagtcatgctcgcaagcatccatgagtgcatccatgcatcgag

SEQ ID NO: 18733 - DNA, 5223 bp, Cannabis sativa
tttttttttttttttttgacttagttcggtttttattttatttgaagctatcttggccacgtgtaatacagttagtgcttgcgggttttaacactctctctctcctctcctaaaggcagtggaggcgtgtgaggtgaggtgagttccacacgagagaaatgccaatatcagaatcaattctttcatcgtcaacacggcttaccgccattccttctctatctcttgcaactccacagacacaaaaattggtaatctcctacatttcttatttatttatttttgattaaatgttctgtacttatttttaatatttagtttatggaagtgtaggttgggaataagtgcagacatttgagagtgaagtgtaattatggaagtttgggtggaggaacaggggcaagttttatggggtctaaggaaaatgtgaaagttgtaagcaattgggtaaaggggggtgacattgacaatgcttcagtggagttggatgttccatttcctcaagactactctgagcttctccaacaagtaaagtagtagtaactctctttaatttattccatcttaatatcactattttttgattaatttgttttattctgttcagcttatgttcaattatttgttatgattaagaaattaaacttgtattaatagaagaaattacaatttgaaagtccaccaccaggaatccattaactttctacattgtcctcaaaccctaacaaggtgataaaacattcatcttccacagagttttttcttgttcccggaaattggtgtcgaatttaggcatcgcctgtttcaaactgaattctatcagcactttatgccacaactactatgagacactttcatgtgaaaataaattctctgttgaattctcattgccttttatttattgaattctctaagcccttttatttacttctgtttcttaattgttaggccaaaaaagcaactgcattggctttgaaagacaacagacaattgatggtgagttatggagccctgctggtataaaattgagtagttacggtatattgcatagtttttgacttcggagtacatattacattacaggagattgaattcccaactgccgggcttgaatctgtaccaggttgtccacaggaatagggatgcctaatacttatggtatgatttgcattagagacaatctcaaatttctttattactcttgtatcaggggatggtgaaggtggaatagagatgacggagagtatggtgttaattcgtgacttctgtgatcgttttgttgatacagtgaaagctgtgcgaactagaatagtgagcttcttgatatatgacaacaaatttatctaatctttctctattatgttatggctaccaagctaatattctggcagtctcagagagactataataaattgttggtggatagattaggaagcatgtcttaagaaatagattcaaatggttatttagtacaaggaaaacactgataaagtttcaaatgtttaaaatgctagaaggaagagtagtggagaaagtgtaaataaaatacttgtgtgtttaaatatctctttgatctgtatatgatagttgaataatcttcagtgtgctctcctattttgttataatatcaacatgtgatgtcctatataataatttattgccttccttagaactattttataaaactagcttggaatggaactttcagttttttcctgaggccaatgaagtaacttttgcaagaaattcagtctttggaggagcctccttcaaattggattatttgacaaaaccatcattttttgaagattttggttttgttgaaaaagtaaaaatgaaggaccgtgtgaagccagaagatgaactattccttgtcgcttatccatattttaatgtcaacggtaactcacacagtcctgtctaatagtgaataacttagtattgaacaagtaacttcagtatcttatattatccagttcttcagaaatgctcgttgttgaagagctttacatagaagctgtcaagaacaccaaccgaaaattgattatatttaacggagaacttgaccgcataagatctggctgtatcctcttctcattagctgactcttatccatgaactcatttgttcatttgctcatctagatcatgctaagtatatctattttaataattaatcaaataaactgccattagcacagcatacacacttgtacctgttttgttaatagatatcttcgagtttgttaagtatgcataactagtatttattattttgtacttgtgctaattttgctcttgcagagaaattatagatattaatattacaaattgtaagggatagaacttttaagtatatgattgaggtactaaggtcattgcatttcgcatattatttttgggactccaataattaatgactgatatgaaatggtctggcaccttccccatatgtttgatgattgatttccttgagtgtgaaggaataaaattgattgttttggttactgtttaacctgtattaccaatgatcttcataatcaagttctgtattgtttttcttgaataccataagattatccaccatttttctatccgaaactggctgcactttcaaagaccctgtttccactgatggagactgtatattatatccacaactttaagggatccaaagggggaacccttttcaggtttgctgcctagaagattgattattttgatagttaatatttatatattcgattgcatactaagtacatttattacttgcaactctttcaaaacgtttaggagctatcccggtccttggaaagtccttcgaagagtagggaacaaatacatttgcattcatcaacaagaaactatgccttcactgaaggaagttgctttggatattcttccatcagcttgatataatctaactcatttggtaagatcatatttgtttccgtatataacttagacttttgtattataaatgttacttgcatatctttcttctttagtagtcaaaagagaaagtaaccttcagctcaactttcttcattttggtcccatgtgtgtcaaaatagttgaattgacgatgaagtactaattaaactatcaaatattcaacattttaatagttcagctttgtcctaggtagggttatttctagaagacagccttgtgaaaaaacttgttactttcagacaatgtatgtctccctttgttttctttgctttctataggtttctgtgtcgaaccttagtttacaaatcttaccaataatgcttaaaaattcattcattcattttttctatgcattattgaaggctttaagtctatttggaaatattgatcaaactccaattactaattaaattgtgtgctgcaaccaatttaactaatgctctaattaagttatattaatgattaaaatagcttactgtaatgcaagagcacccctgagtagttacagtaaatattcatattcataattgcatggatattgtggcatatatatataaatatattcgctgtgatttgatttagtctctatctccattatttacacatttcagtttttcctttcagggttttgtacagagaagaaacttcaatgaactatgtatgtacatgtgctggtttcagattaattgtagatagttttatctgaacagactgaaactttaatttattttttcagtctgttacataagcattgacgcgctctgcagcataatataccaaaacatataacttcagagtgatttattggataatttatagggatttgaattgtaatctttagttttttatttcctgtttagccttgagtattactgttttattgtacatctagtagaattgtattcattttgagtgccttgggaaaatggtcatttgaccataagcagtagaatcgatgtcaaagatcctaatatcgagaaatgctaaaaagcaccagtaatggctagcatcatctagaagtgtcatattgttattagtataattaaatatcagctcacgaataatttaatttaataactatgagctattgctaaccatttataaagcgccatctcttggtgtgttggacaccactagtgcctaatagcaatgctctcttgatatctaacaaatacgagaaatgctaaaaggtaccactagtgcctagcatctttctcggtgtaatatctctattggtgtaattaagtattgagtctcatataacttaagaaaatagcttttagagaatatcgctaaccaatcgtaagacaacacctatagaaggtgctaggtaccactgatgcgcattaacagctacaacaaaagaaaattagactttttttcaagagtaatgatatgtgtacacacaaattaaatacaaacttgatgctcgcttatgtgactgttaagcaaaaattttacattaaaatattaaaaataaatacaaaatataattttacttatgccaaatttatatcataggttttattaatttaagttcgacccattcaagatcataagaataacctcttaattacagtccttttattctaagaaaacactttttgactccaattacgatgatatttgtttaccaagattttcataaactaataaaatataagaaagctaaagaattaataatcatcgaagaatgaaatcagattttttacgtggttagagcattaacaaaccttagtccacgagtcactattattgctacaagacgggaaaagccttatgatttacacaagtgtttgaaccttagattttgcctaagctcaaggattgagattctaacttttatatgagtttccttatatttatagtgctaagattcttgcccactgatggggtaaataaagatagtataatgactttgggccaatttggtgaggctcagcccgtgagacgttgattgtttaattacgtggaggccacatctcgttgatagttgtcaaactgtatcatactattgtggataataaagacactttaatgcttgatcatcaattactatatttccatattgtgaagatgtcatcatcatatgagatcttgatagttaagtcctaatatcgcaggatctggtaattaatgaatataattatgagctagatgtctggatgctcacttattacttccccaaacgctctgactgaggtctttcgaatactcactatgatggagggttttctcgcctagacaagtcttcaatccagcatccggagga

SEQ ID NO: 18734 - DNA, 2981 bp, Cannabis sativa
actaaaatgacaataacatgtgaaaggaaaacgacataaattaggaagagagagaaagacatgaaccttaccaaagtccaaaacgactataacataaaaaataacaagagactaacaattcaaataagaatttttgaggacgccgtctttgcaccattctgaatttttgagggctttggctgatattagctcttaacgttttcttcaccaaaaacagaaaaagtaaaatcgtttgtgttatgttattatgtatgcttaatacatgggcctatagcatgtataaaaagcccactggttgtgaaagagtgaggccagcccaagtggtaggattttgtagtttcttttctttgtggaaaaaaatggttgctgaactgaactgaagggactaaaagagaaggaaggagagagagagagctttgtcggagaaactaaaaggcttcaagtcaagggaaggtgtaactgtgaacccgggtaagtaattttcttatccttattccagcacaaaattagctctcatctaaactttactcaccgatgcctacaactttcaagtttcaacagagttttatagatttataaacaattaaacttagtaactcttgtaaaataattggtgggtcagtcagtctcgtttgaaagattcattgtataaagtgaagatgataacttttttagcattgttattataattttgctatttgaaatcgataatctgatcggtggtccttattgactttttttcttcttctatttggtccatataattctaattttagctattaatttctctattttttaacttcgtacagcaattaaatctttttttgtaatgtaaattaaatttttaacagaaaatttgcagtgaagagctgaattagtgatttgttttaactgtttgccatgtcaggtctatgtatactatcctttaatattactactggtaaatggaggtagaattagttagacacaatggaggttgccactgcaggaatgtaaaatggcgagttgaagcaccaaagagagttgtagcttgggattgtaactgttcagattgctacatgaggggtaacacacacttcattgtccctgctaaaagatttgaacttttgggcgattccaatcagtttctcacaacttacacctttggtactcacactgcaaaacacaccttttgcaaagtttgtggtataacttccttttatattcctcgttcgaacccagatggggttgcagtcacattcaagtgcgttgaccctggtactctgctccatgttgaggttataagccatgatggcaagaattgggagacctcatacgctcactcaaatattgcttcatattccaaagacacttgacttgatgttctacctactttattgttttctctcttgatttcaatttcccataaagcatcatcttcatgtgtctttgatactaaccaataaaacattttaaacagatggctctgaaagtttctcaagctgtcaatcttcagttttgtatgtatggtgtctgtgttttgatgatttgattttggttgtaaaacatttgtcattcaattttcctcctggactaaaactatcttatgtttatagagatacaaatgaagcaacacctgtttcttctgttattctaaatgagcttcttcatcaataatagcagtaatttctctcggggggaaaaaagtgctaaaagaagaacaaacaaaacgagtatgttgaatgttgatgaaatacagtgaaaaaaattaaatctaaggtaaagactttgacaacaagaaagaactcctaatttgtcacatatagtgttaaacttgaaataagtccaagacagcttgatccatatgtaacctcttaaatattcttttacgaaaaataacctgcaaaattcaatttgatattcatttagtttgcttacttagttaattaattatctaaactccttgagctccaaaaaacaaccctgtaattgacattgtagtgcaatattgcatgtactacaaaaatcacgattgcttaataaagaaaatactcaactctaccgattggttttattttattttcttatctttttcgtcagattgttctgttttaaattaatgcgaaaccgcatactaaatctaaatcataatataatgcaatcccatacattaattatttggtccttttcatacttactagttactataatgaagaaaaatggttgatgtgaaagtaggaggtgaattagtatgcgaagttgaaaaatggtgcaggagaaattaaataatttataaaagtagacataaaataataataaaatttctattaagccccttgtaagttgtaagcacttgactttcgtagctaacattaaaattagtctaaagaaaaacgcatgcatgatattttctcaccgtaaaaaatcatatgtcgtcttcgaacaagaatacgtcaaaaggtttttttttcttcttatcatttatgaagcaatagattcagtatgttgaactcaaaattgtcagcatcatgagatattgacttcaggccgtctctaaccaattgggagccttggtttaaacaaatataacaggcctttattatttttatgacaaagtttaagtattctttttaattatatatcataagggggtggtaaaatgaggtttgacacacaccaatacgaacaaaacataatttttacgggttatagttaagaaaattagatgtgagttggaaacgagttgacacgatttgatacaaaataaaaacgaatcaaatacgacacaactcgcttaacgtaaatttaacacggttttttaaaataaaataaaataaaaaattagagttatttgcgtcgtaaatatttaaggtttatgtcgggtagcagagaagtacctaagtcgtatttttggcagtaaaattatcctccgtcactagtgtggaacttctgtaggttgttaactgttaagattttgaatatctgattatcattgtaccata

SEQ ID NO: 18735 - DNA, 4124 bp, Cannabis sativa
tcagcatcagaagatccaatcaaggatagcctttcactaggagcaatatgaagaccatggtgcatggtacctttgaagtagcttattaaatgcgtttagcagttccccaatgaacattaataggtctcttcaggaattgactgggcttattaacgacaaaagagatatctggcctagcgtggcttagatattgtaaagctccaacgatgcttcgatagttaattggttaagatagaggtgttccatcgtgtatagatagtggcttccctacagttataggtgtaacacttgactttgtgtttttcatgtttattttttttatttttattttgtaataattcaacaatatattttccttgagacaaataaatacctgtattgtccctgaacactttaattctgaggaagtaattaagtgctccaagatcttccaaggaaaaagccttgtttaatttagtaatgaataaattgagttccctggaactacttcctgtaactacgatatcattcacgtatattaagaccatgatcacaaatgttgggtgcttgagtaaaaaaagaatgaatcaacttttaaattttccaaattctactgcaacaatgtatttctaagttgaaccaggctctttgtgccagtttgaggttttgaagagacttatgtaatttacagataaagtgaggatgttgatgatcttcaaaaccaggtggctgtgacataaagacatcttcatcaataattctatttagaaagaaattaatgatatcaaattgcctagcttcccaatcataagccaaaattattgttagaaccactctcatagttgcaaccttcaccaatgaactaaatgtctttccataatccaaactgggtctttaatgaaactgatttgcaacaagtcgtgctttcaaccttcagaaagttccatctaagtaaaatttgaatttgtagacccatttacgcccaacaatattgcaatgaggaggaggaggaataagtgtggatgtcttgtttttcttaaaagcataaacctcgtcatccatggtagatgaccaccctacatcaaatgaaaccggttcacgagtattaagggagaaggtagattggccaacgtagactttaggtttgattatgtctgctttatagtgggtcaccataagatgtgaaagttgtccaagttctagtggagtaggattaggtagaggggataaatcagttgctaaaataataggtgattcaatggagaatatgtcagtggcataagcaataggtgaaccagcatgagaaaggcaaggacttacatgatgttgttgtgcagtaatatgtggagatgaattggagacacctgtagaagatgagacaataggtaaacaaagaaaattattttcatcgaatttaatatctctactgttcatagtcttaaaaccaccatttttgcttacccgtagtgtatagcctttacctcaagatgccttagttaaacacattttaaagccttaggttctagttttcctatactttgatgtgtataagctccacatctaaaaacctttaagtgagataggtttggtagtttatctgaccatatttcttctggggtattgttgtcagttgctcttgatttgcttctattgattaaaggcaatgattttagggcaacttattctcggaatccttgacttaagcctgactggagtagtatacatgttcaatatggttctattcattctctcagccaccctattatgttgaggtgtaatcctcattgtcctatgtttctgcaagctattttctttataatataggtcaattaatctatcattacgaaattccaaatcattatctgtccttagtatctttacgaatactgttcctattttcttgtccttaacaaaatatcaattcttaagaaattccaagaagacatcattattatttgttagctgagaaacactaataaggtttttagtcatagctagaacttgtgatatagaattcatatgtaaaagataagaatgtaaataatatggtacagtagatccaatatgagagattaagagtttcttactatccccaatagttagagtttcatgaccttgatagggaatagaggtttcaagattggagctgtcaaaagtaatgtgattggttgcaccagtatcaacataccaagaatgatcattacaaaaatcttgaaagttgaggagtaagcttggggtttgtaagataggcacaattttaagaagcaccaagttcgggggtaatctagtttttgtcgaacctgtaatgacacacaagagcagtatgacccgtgcacatatacaaacttggcaaataactctatggtagaaatatcaaccatagcctctgctacgagtagtagtctattgggcattatcattagtgaccattttagagttggtaaagggtctggaaccaccagatcaaccattgccaaaggcaggattttcctgcatcttgatcaagagatttgccatggaatggtgatgttcaagacgactttcatgagataacagtaatgtcctgtgcttccctaatggatagagcatcactccttgaggttatccttgatacaatagaatcaaattattgacccaaagccattcagaagctgcaatatgatatcttgattacttataagggaatgagcaatagccagagcatcaatgatggtctgaactttgtcaacatactccgagattgttaaaccactttttgggacgtggaagaattgaccttttagttgaagacattgagttttggtctgagacgcaaacttttgtccaagagccctccacatagtagatgaagagacgaaattaatcattgatgcaagaatactatcaaacattgatgatcgtaaccaagaaagaagcaggtgatcttttcgatgccattgagtatactaggattaggagctccattaactagaacccgaggaggaggaacaccattaaatataatatcatcaagatcgtgaccaatcagaattggcacgacttgagatttttaggaaagataattgagacaattaagcttggtcgcgagagaagaattaagcgagttggagaaagaattctagggagtagcagcgatgattgtggcaggcgccattggagcggaagagacaatcgccattgaagcaggatcggaggtcgaagaagacattgacgcaggttaagaaaatcctgataccatgtagaataagaaaagtgcatagcacataaaaactgagcaaggcttgagagaaacaagaagatagaaaagagagagtaaaagtatttctgctctaatagatggatcaataattatacacattgattacacaaaaattaagcatgaaactgttacaacaaactaacagtaactacttaactaacaactgacataactagctgataactaacatcaaatccttttgagctatactaactaagtcttctccctctaaatctactctctctaattcaaactcatataacaagcactctactaagttatatttgattgaaatgaatgaaaatatagttagaataagaatgacattccaatactttaaaattaaaccaaacaaataaatgtaataaaagttgtttcacttgtattttatttaatttcattacccctaaccaaaagtcacctaaatgattatggaatggttggaacattgctttatcctgaggatgcatgatttggctttctttagatttagaagtattgataaaattaattggtagcaagccgggaaaatatatcagcagcatttttcatattttatttctatataccttaatagccaatactatcagtactattacccacatagttattcttatatataggcaataaagaagaaaatcgaaatacaaaaaattacaaatgataaaacaacgattattttcatacacttgacgtatacgtaattatatacgaataattacacgatgaatatatgttctgaaaaagttatatatggaacacattattcataataatttattaaaaaagttgtaagcaaaagttctacactgttaaatataaaaatttcagtgcccagtaaaattctctggctccctaatactattaacacatgatcaaattatat

SEQ ID NO: 18736 - DNA, 3550 bp, Cannabis sativa
tgagctatcctggttcgaggtggtgccgccgccgattatggattgtcgctttgttaatcatgtgtgaccgcgtcaaaaaaaaaaaaaataaaaaatatagctaaaagtgaatacccataaacctatcttggagtagaagggcacgtaaagttaggcctcttctttctcttcctccttgagtggtcatgtggatactttaggaggcatttgatttttcctctcatgagaaaagtgtaggagagagtaagataacagaagtacgtatcctcataattattttgcttttgtagaaactcatgttgtcaatgtcaagtgtaggaagataaaaacacgtggtagtcaccattttaggctgtattagctagtggacaatcgagcttgtggtgtcaagagcatgagactttgcaggaaatgatcataagagaaaaaacatttagacattttcttctcgagtcctacttacccttcttggtgcttaacccttggattagctccttagcatctctttccaacatctttacacttgatttctcttcaactagctctttagtgttcttgggaactctctttggtgggtacaacgtgtcaacgtgagaaaatatagacaataatatgtattaaaaagtattaacatatataaaggaaaaaaatagattaggtgtaataataaatgtgaggtacactaaaaaaatggattttagtgtatttttgaagaatgagggcgcgttttgaagtttctgtaattacgagagtcgtttaattactatggtatagtaatattagtaagtacaaatttggaaatgagtggtatatatgaattcattttgtcatgtttgccaaaatatgtttagtaatttagttaatatttaaagtgtcaaagttttagtaattataatacagtaataattacatcaaattttcttaattaaaagaaaaaaaaaattacacccatagaatgtcacgagaataattagagagtgtaatttggataccccaattatctctatagataaataaacatagtaaattgaattacactaaaatccaattgcacattcctttttgaaacgcagccaataaaaaagttatctattagaataagatagacaaatttattgtgtttggttggatgaatgaaatgaaataggaaagaaagaaaataattctttctacttattcgtttagaatatagaaaaaaatttaacaatttttttattaattttttttttatttttatgaattttaaatttaatttcattccatttatattcttatcgttcttatttctgcattttcattcctttcaatgttaaggcaacctaatatcctttcaatgtaaaattaagcaatcatcatatgcaaaatcctttggcattctcttttccacaaactcttcctcgtactaattaaacatgcacactccaataatataatgataaaagtcaaaaagcacaaacagtagtgtgaaaccaagtataaatatagtatagcaataagactagagttaattatgtcttattaatttctttcccttaattatctcaaggggttagagtcttttaattttatgagtagaaagatttctcagaacatcgtagggaatataagtcgtaaagaaagacataaggaataataaataaataaaattaagaaaagaagttaagagagtggagaagcagactttttgttttaggtgtacgtacatggcctaataatattatatagttaaagtccaaaacaaaacacagcaagattttgcaacaagatgcgcctgacaattaataattttggggccaaagaagagctcttattatttcttttgcctttttcctatggcttcatttgacccacacgttcttgtctccgcctcaactgcaacgtgctttgccatttcatctacccctttttcataatatatataaataacccaactaaacaaacaacaaagtatcctatgcttcattttcatatataccatttcatctactactagctaagttactatatacaaaaattattattagtaacaaatcttcttttgtttggacagtttttccttagttggcaaatgagtgaagggtttgtttatatatatgtatataattaatatatagtctaatgattgcattgtatctccaattaagggaaaactgtcccactaattgcaatgagaaaattgtttagtgggaagcacaataatatacggtagaagacttgggacagttgtttgatgcggtttggaccaattgattctttattctataattttttttattatttattttaaaaaaataaaatatatatttgttctttagaaaaaagagtcatgtatatgccaaaaaaagttggcattctcaaatgacactatctatatatggtataaaactcgaacctaataagatcactttcaattaataagacctcatcctcaagtggcttggattattacaagtcgtgttgactctttatttatttatttttggaacatattttgaaccaatgtaatattgtgagttttttttttaataaacttgtgatgaaaaggaatgggaaccaattagatgctatctccatcacaatattcatttttattgaggctttggccatttggggaccgtttgaaagatagcttttattttttgctaggttcgatgggagtaaatgcttcacgtgaaaaaatttgactaacataataaatatataaatatttatgtatatatgttatgtgggtagattttgtgtttgctggtttttatagtccaaatcttttcattcttgtaatgaggatatatataaaacaccgtacgtccccacagcatttaagggaatcaacaattcggttctgtttggctccgtttgatttcaattccattgctgccttgtctcccttcctacattaactattacttaccttattattaccaataaataattataataatgtatgcatacaaaagattatataaagctttgctagttggaattttttggcatgttttggtgtatgtatgatatttttttttttggttaaatagtggcataagtacttaaagatttgagtttgtaagcggcataaacccaataattttttttagtggcataagtacccaatatttgtaaaactgtaattttttttctatttttgtcagtacaggctccgttttaaatttattaaaaaaaaattggaagtaactgatactacatatttttcgtctagaccaaataatttaaaatttgggtcttatatgtgtcttgtttaagacaataacagagtttgtacttatgccactaaaaaaatcattagatttatgttgcttacaaacttaaaactttgggtacttatatcactatttacattctttttttctttttattggttgaattgaatatatatcgtgttgtaattagtattgtaaatatgtacatattttgggttagtcccacttatattttgaaaagtaaaaatataggttgggttgtgtaggtatgcctagtattttagtatcgtgctttagttaaataatttgtttttttttttaataaactaact

SEQ ID NO: 18737 - DNA, 4280 bp, Cannabis sativa
  modified_base (4181)..(4182): a, c, t, g, unknown or other
gttattttacaacatagtacgtcatagtaaagctagctctttctttttggattcataatataaaatacttgaggttacaataaaaccgattaaattccgtaatgtgcataaaaacagtcttcaaatttgaaagttacataagaaaacagagagacagagagaggttctgtgagaagtttcaaataatagccatgaaacaaagttacaaacaagtggcaaacacaatgccaaagaaaatacataagaaattgttaagaaaaccccatttcatatgtataagaacacaagaaaaggaggttaaaacaacgatcaaaatcgattttgaagaaaaccaacacagaaagatgaaaactttataagtaccacgagcgaaaaatggctcaactaccatagtaaagagaacccaaataagaaaaaacaaataatgataaaaaaaatagcaataataaaagaagaaatgtattctataccagctctttgccaagctcaatggcagcatcttggtagctagttttcttcccttggctactcccacaaaacacacaaattcttccaaacctggactgtttcatttctgtctctatctccattgatctcaccaaattatatttttactatctttatttctttcccttaagactttataatactgattccttttttttttcttctttggttatttcaaatcaaagaatatctcactcacctccctctcttgtctatttgttccttaaaactttacaaagaaaaacacaagaataaactgaataccccttttctttcttttttttttcccttgcttgagcactacacaagcttctctttagtgcgtcctctgctctatatatgtatactcacacatataaatgttgggtatttatagacctcatcacacgtgagaatggctcagcagttagcacgctttgccctcccaattcatacacacacgattaacattgacacgcgtggaccactttcttatttcttagttttcctccctcttctccatttcaactatattgataatataaaattatttttatttttttttatagctgattcttggagccacagctgttttgctgaccacaaaatatttaaaatgaaaaagaaaatgttttgtttcaaaattgaatttctttgaaaatagctacatttatcttaaactactcttgtatatatatttgtttccctttcttatggcactctgtgacttttatctttcccttttatagtcatataagatattagaggatgttgaatcaaataagtaagtttgaatcaacttctcttgtgtgagagtgtgcgagtgtgacagtgacaaatatataaataataatagatatggctacatatctcactgtctttttactctgtttttttagtgtgtgaaaatcccaaaaataaataattagaagattgacctttataagagctattatatacaggaaggaaccaccataagttggctaggctggttaaacaatataattgctgaagcacttttcagctaccaaaacataaaacgcttatatatataatatatatattaaaaaaaaaaagtaccaattaaaatttgtagacagttgagattctctccctattgcatgaaatgaagaagactcaaaaagtttggagattatatccttggatataataaaaatagtggacacaatttcataagttttagtagggcagataaagacaaaagggcattttaaaaattataataataataaacaaaacaagtagaaaaggttagaaatggacattgtgagatggggtaatagtagtttaatcaatattgttgaaaattgaaaatgggcaatatagattaaaatgaaaaagtatgggtaaatagagaagttggtcagggtagggatgtgtgtgtggtgttatatagagcgttgtgcattgatgattgaataaaaagatagtaagtggggaggtgggttatggtgttatgaggttgtgccctcatccaccttccttctctcgacactgttgttctatgcataggaaacatttcatttctatttcacacgctaacccccttctcttgatccctttccccatattctccaagcatgctgtccccaaccccattcaatttcattccgaactaaattcatttccaccacccccactttccacaaacaaaaacatttacatatctataatttacttatcatcatatatctatagagaagtttaaaataattttattaattatatggtaaaacaaagaattcgattgtctaaaaattaaaattagtaaacggtctttgattgtgcttgattatttcggccggtcttaagatatacgggacttaaggtaaaaataaattttgaaacctttatatatatagtttaactattatcaaaatgataattttagtatattagtgtaggtaaagtttttaaaaactctctaaggttcaatccttcataacttcacattaaatatttaaataaaatacaaaagtaaaggtgagaaattgatcccttggtctcttaatataaagtaagatcttttaccactacacaaaataattttaattatattttttcttatttaatattttatctatatattaatattttttttcacaatttcaaagtactgagcgttcaggggcccaagacacacacctagctcacctatcctcacaatcggccctacttccatttatgttgattgaattacattagaccatctcttacatggatatgtaaatatatgttatatttgacaccaaaaaaataagtttatcatataacatctttataagaatactttatttaaaaataatctctaatttatttaaaaaaaaaaaattaactcaacatttaatttctaaattgtaattagttttacattttttaagtcaagtatacctctataagaataattatatcttaataaaaatatgtatataatttataaatttgtttatgtagaattcataataataaatgtataaatattatatttattcaataataattttgttgcaatatatcaattatatctaataaaaataaatatagtttataaattcatttatgtaaaattaataaattttattccaaattgtaatatatgtataaatattacatttatttaacaaaacttttattataatatagtataaaggattatttattggtattgttattacatttgacacattttgatgttttgatttttcttctcaatgtacctttatttagttataaactctcaattagaatataatttactttgttttatgtgtatccttagataaaaaattttactttatttacattaattagtatttatattaaaaataaaaacgaataataattttaccaatttattttgtaaaacaataaatatatatataaatagctatttttttttaaataaaaacatatcagttttattaatgatgaggttaaacctcaaatatccaaaagatcaaacaacatatgcaccattttcaatggggtaatatacacactctcaattcattagaataaaaacttctcatcactacaacaaaagaagacttttaatcccattcttacacttgaataaaaaaaaataaaaactgtgataaaagatatcttgtaactttttgttctacttttacatttggagccttaaagaaaagtttggaacaagaaccttgtttggcaaatgaacaaaaaatagtattggaagggctatttttatgcatttttcaaacacacccttagcattttaagccggactttttatcccagttttcagcaaagaaccgagataaaaggtccccgtatatttggaccttttcacacggtaagttgatgggcctttaagacacatataaaaggtaaatttaggttttagggtttcatttattagggtaacatttttttctttcaaacactctctctctctcttctgcccacctccatgtctctatcattctcttccgccaacatcttattttttttttttcttttgtaattatgatgtctctcgtctttattctcaggtggacggagcttcatggtgaatgaagctttgggttcatggtggacggagcttcacagtgttggattttgtgtcctaaataaaacccattttaatataatcagatttacaaattaataaagttcagaaaccatctatgttgcatggttcacatganntatttcatgattatacttaatgtataaattctattaagtgcagaacatatctgaatatatatttattcatgattatagtatcgtcagcacagtagaat

SEQ ID NO: 18738 - DNA, 3044 bp, Cannabis sativa
tttatgatagttgggatgacttaattagttgctaaaatttaaaaagaaaagttatattttttaagcttaaaatgaggaaagaattagtaaagtaattaaattaaatataaaaaatttaaaaattatagcatttatttttcttaattttagtttttagactagaaattattcttttaaaaaaaatagaaataacgtatataacatataagatttttttcacttaagtaatttttaaatatattttttatggcatattttaattattatatattagttaaaattaaatgttataaaactaccataaaataatattgaagaacatgtcgtttgatgcagccggttcaagtttaacgacaaatagtactcttttgctactgtttaactaaacgacaactttctaccaaaaaaaataaacgacaactattcttttcaataaaacattaaacgacaactattactcaatttcacgtttcagaacgagactcaactcaactcagcttccaagcatcaacaatggcgtactccgccgccaggcgtagcttagggtccatcctcactaggacgtattctcccttttattctacctcactctcgcttcgcaatcgctttgctttggcgcttctcaaccaacaatcccaactcatccccgactcagtcaaaatgccgctccggttcaagacttccggctctggatactcgccgctgaacgacccttctccaaactggaccaaccgcccgcctaaagaaaccattcttctcgatggctgtgactacgagcactggcttgttgtaatggagttcgccaacgaccccaaaccctccgaagatgaaatggtcaattctttcgtcaaaacccttgcttcggttctgggaaggtagtacgctaactctattgttaatcattgaaattcgaggacaaataagagagtatttaaatggatttatttttgtatgtttcagtgaggaggaggcaatgaagaagatttactctgtttccacttctacgtatactggttttggtgctttgatttcagaggagttttccatcaagcttaaaggtatattgatattactacattgcttttgtaatttttgttgttattaatggcttcatttaaccatttatgtttaagagatgttattctgttgataagattttgagtctatggtgttctgtgctttgatcttatttttatcattttcattgaatgtattggttatcttggtctttcatgttatatgatgatttaaagctttgcaatatactcttttctaaaatttgtctgatctgttattttggttggatacttggatagcacaacctggtgttctttgggttttaccggattcatatcttgacgttcccaacaaagattatggaggtgagtttgtcaatgaatttaagtttttggagtttatcatattttttggggctagtcttttctgtaagtactgatttttcttttccgctgaatttaggagatttgttcattgatgggaaagtcatacctagaccacagttcaggttcactgatagacaacagcaaacatctcggaacaggcctcgagtgaggaatgataggcgtagaacagggtgaaaggagagactcaaaacaaaactctgatgagttgaaatacactccaactccttttgaccacttttatggaatcaacaatagcttgaaatattcttatgtggctggaaaacaaatacagcagtttcgtgatcaagattatcatgctttactgtacatggggcattcttccttggctgaaaacatgtgttatttaaagggttcaaccattacaaactatgtcagaacatgagcaaaaaacaaattatgcagtacactctgtaattgaagaaaatggagttggactgtgcatcaacagttgctcagggtgacgctcgaggttgacttggtaggtcttctacacgtaataagtaaatgttttacaaataatttttatgattttcaacaaatattttagtagttaagatattgaattatgaactttacttcttagatctttgtttaaaattctcttaactatgtaagatgaacttaaacatgctatctgcttttgttcaagttaatagaggtgaatatttgcaagtaatggtgcttcttcttctcttatttatttgtgaaattttacttctttttgctttcaactgtagaattggaataaccttaaactatcaagactcctctcctatcaattttttgcctttcatcatctttgaatgatttcattcatatgctcggagtggtgtagcgggataagatttctagtgttgaaaatgatggtttgttactttaaactttatggtgttttcaacattggctaaaattatactaatttcataagtacttggtctgctcaaatctgctaatttcacctacctgtgctgaacagagtctagagctgatgaagagtataatgcttctttctgcaactttgcttgatgtttgttttgaatgaaatcttgcagaatactttcttatctgtctacatggacataatggaatagtttgatttgatatatgatctattatgtgacagagctaggagtatatggtttagtttaccagtcatctctatcttctgagtaagctgtctgtgccaatgtttgagagtacttaagttcaggttcttcagttttctgttaaggcttacagttccagacatgttagtgttgatgaaagataccatttttgaaaaaaagaaagatgtttaactctctggcttttctagatatcaaacagctcctatttttataaaatgtttgccattgtggacaggatttggatttgtgagcttttgttaatcatgtttgaaattagaacaagctttaccctatgtttggtatagtggaaaaatagaaggaaagaaaagtggagagaatataaaaattagtgtgtttggtatgagaaggaaattggtgaaagagaaaaatgtcctgaagagaaaatgaaagataacaattatacatatgtaaatttattaaattactctcactaataatttttaaaattaaa

SEQ ID NO: 18739 - DNA, 7947 bp, Cannabis sativa
aatggagctgattatattgataaactggataatgctattatggatataaaacttacttgaggaaagtcatacttgcatgtctttggacacagaaaatgacaattttgttgacaaatgtattcaaaggatttttatgaaattttgtctagtgtagactgtagacagtattaaaattggtgttagaaattagaatagataattaaactagtaaaatttaaggggagttcagtgataagatagtcccctagcaaaaattttgaactctatttctagtatggagacatgttatgactaaaaataaacactatgatagtgaactattcagtttgcaaatcatttaacaaaatattaagaaacataggccacactctttccaaatgtaataggcaaacactgaaaaatctataaatattttgaggatgaaattgcaaaatacaaaaagtatgatgactagaaatattttgccttaaaacaaaaagatgctaatgttgaggagttattacaaactagcaaattcaaaaaatttaacactctaaaagaacaaataattactctttaacaactttaaaacatattttatattttctcttaaattttttgtatgtataagataatatatagttaatattaagataattattataatattgatctaacttaatataatgggaagcttatccctatttataactagtgccaagtagagctaaaagaattatgactacatgagaattatttcattagagttacacatcatggaagcttttccatgcggtttatatacacaccctttcatgtgaataatctcccataaccaaaattctcacaaaacggcattcaaatcagtatgattgcgtggttgaggttctcgggcgtttctgctgtcgacaggaagaacctgaagttaaagtcgaaatcatttgtgggaaggtggggctgggatcgacggtgttgttgtagcttgagacggttttggtgattgagtaggcttaatcatcaaccgattaagggcagacgaataagcctgacctgtaagacttccacgcatacgacctgctggacgccaattctgctcagatgccaaattcatcgatttagcagcagcccttctcggccttccttgtgttaccaaggaaggctgcgacgaagatgggacaacattggctacttgaggcggctgttttatgagggattgaaagaaatgtttctgtctttccatatcactgtatactgtgtcagtaggtgataaaccacccggagaaggcacagcagaagaagtatttctttgttgtggagtttgtagggtcggggactgggccgggggaacctgaattgtaattggtgtcaccccgctatgcatttcagaagcgatgagattagtatttacacgatcatcagcttcgtgaggagtatgcacaatagttgcgggattagactgagagactggaccgaacaaggcttctgaccacactgtggtcgacaagtcaggagaattatagagagcagtccaatttgtatcctctacttgatcatcaaaattttgattttctatattgctcgaatcaggcgaagaacttagatcacccttggaaggattcatgtcatcaatgtcacaaacattgatatccatttcattgtcgtcgtcactagtgagatccataatactaggaacatcgtttggggtggcagtacatgtttgcagctcagacttttctttccgacaaccaaggtttgtatcattagccttatctgaattatcattttcctgatcaaccttccatgacccgtctgtcgagataataacatcagtgacattattccccacctctttcaagacctgagagagaaaacatcagaaatctacacaacaacgataaaacccgtaagtaacaaatgtctatccacttaccttaaccattttttgatctatacgaatttctgagtaagaaacatgctgattacagtgagggcagcgccaagatggtcttcttgaatttatatcaatgtagttattgaagtcgaaacactgcataaaataagaagacaagaaataagatactccgaaatcacatcaacaatgtcaaattactaaacttgcagctcataaaaataaaactacacagtccccatcaacaatgttaagttcattttttcatgagaaaaaacaaagagaaaattttccatttgctgatatgccaagagataggaaaatgtatcaacaaaagaaagacttgtgctttttttttctcttttttttcatgttttgccaattctgtttctctactctgtagctactagacctgatcaccaattcataaagtaacattaacattgttccgatttcatttgattaacttacatctagatacttgtaattattttactacaaaatcttctgttgtcaaaagccatttatatgtatatatcatttttagagaaacacaatttcaggccttaaacaattaactgttttaagggttagaatcccagaaacaaaacaaattaatcgataactacaatgctcggcctaatcttagatagctatttcttttggaatcaatgagcaccaatctaaaactttaaatttataaatatcttgcataataatcgtgtgtgcacactcacctgaagatgtttgcataaatgtcctttgactggagttctaatacgggtatagctacaaccaaattaatgaaagattatcagttctattacaatgaagaagaacaatgtaagaacatgatattcatataatatggatatgaaatttagcattaacaaaaaagagattttagaatgatataccttataggacagttcagtgatattcgggatggcccttcaattagatcgagatctttaaaaaatatacacataccaaagttagctccaagaaatcataaatataaatggatattcaaaaacatacacacacaaacagaacaaaaaatacaacacgttcgcgtccaacaaatattaaggtttgtatatgtatgtatatattatagtctccaagtggataagtaagaatgattgagagcagactggtagggggtaggcttatgtcgaaattatggccggcagcagtgctagccattatgtggacagtgtggggtgagagaaagaaacaccagaatatttgaggattaagagtctacagtagaggaatgttgggaaagatgaaatttcgggtagcaactcagagttttaatcaagatctttttctcctagatttgtttcgagagtgggcaaacctattgttctagctgttttgttctagttatctaactggtttgagcttctgtaatcattttgtaattttagaactttcttatttctttcggttgggagtccaacgtccaagtttcatgtaaccatggctttcctccgccaaaatgtgagggtttccaaactgcatggtcggtctcagaagttcatgatcctgttgtagtagttgttgttgagttgtatattaatcagggaaaatattcaacctttctccagctgatccatagaaactactactctgtgatatatgattttacgatcataagtacaactaatcacgttgccatcttgtcaggtagttcgagaaagtgaatcattaccattactattattatatagtacttgtcatggtattggagtaatgatgatgatgatgataattttgattagtactagcggctttaataaggttattattataagtacctaattgatgatcacgagtagaagtagcagcggttttagtcctagattttccttttgctttagctctttctgggaagttaaggatagctttccttccatagaggcggagagcggtctcatcataagcaagagcagctgcctctgccgtgctgaaagtcccaatccacgccttagctctactcctggggttgcgaatctctgtcacccatttgccagatttcctttgtctcacccctctgtagtgttttttcctaacaatgtttctcggtaggtcatcttgaagagtacgagatttgctgtgctctagggttgtgataaaggaagggtttccataaagacgccatagaagattgagtggtgaggagaaagatctaaaatatcaataggatataaacagccaataaaaattccctatctttgttccgtttagcacacctgaatcgactccatctgcaggaggctgaatataatctggcaggactggaagttcacacaattttgtctctctcataaaggcaacaacgataacgtagtgacctgaaaatcagtagccaaccgtcatggaacgataaaatgtcatcactattttaaagctaaaagactattgtacatgcttactattgaactgccccgcaacttgaagtagatttgttccgtattttaacaacggggtcacgttagttggcatctgtggtccggcatcctagtaaaaaagaattacagggagatttagagagctactatattaagccattataaagtagattcgattcacaatgaaagagacaaaccacataaacgttcgttctcttatccactcctcttccattcacaatgaagctacagatgtcaaaagaaaatcttatcagaacaaaattgtatcaaacaactctcctgatttctccagaaaaattgatccttactttacttgttgaggagttataatacatgccgatgtctccacattatctacttgagctacaaataaccgctgcaagaaaaataaagaatgtacaatttagagtaattcccacaaagtatattcccaacttcagtaagcaagtacgaaatcgcttatttgaactactgattccaagatataaatgcctaaccattcatgactaaaaaatctatcgaaccatcaagaatatacgcgcatacatatgtataaattaatcatgtatatcatttgtaaacaaatgcaacaaacaaaagcaacagaaagtttaagttagatcggaaagatcacacaaccaataaaaagaaaattagtaagagagcacgcgagtgaaatggaggcaggattaccccttctagtccaggccttagaccaagaaaaggtcataaatttgcaccctataaacgagttgaataggtgtattacaaaaataaatgtatacaaacaaatctagaactataagaattttgtatacaaattaactaaagaaatgcttacaatcttttccttttcagcctgtgcactgttcttcaatatatggaaatcaatcgcgtagatcccatatccaggctagaaagaaaaattaaaaatataattaaagagagattacagcacgcttcaaaaacgcaatgtacagattttttagaaaatatgctaccttgacatcaagagaaacaagaatttggcccatctccaactgtggataaaatctgaaaaagaggacactcaacaaaaagattcaactaccatgtaaccaactaggaaaaacttaataatgctgaaattagattttaggaaatgtttagttgaactaagctcggggaaaaaaattgaacactaaatcagatcaaaattcccaccttgtcatgactgttgcaatggtagaatccacacagctaggtgccgtgttaacattccccggactgcagaagttcatctctatctataagaatgaaatggatgaatgaggaaaagggccattaaaagccatctaatgcagaccataaattctaccaaaaaaaagtaataataaataacataaacagttaaaatatacaatagtgtagaaacctcattagctagtgtataaagttccttggtctcctcttctgaaaaccatccacctttacaagcattctgcagagtacaacttcataaaagtcatataacagtcattttaagagacatctttaaagaagagaaataataattaaattaagttaataaaatatgatcagaaaccaaatgggtttcagtaaaaaggtctaattgttagttatgaacataaaaaatttgcacatcattggatgcattttaacatttaccttcacggaactcattaccatcataatcatagcttgtaaggagagatcacttttccgttcaaatatctacaaagacataagaagaaaagtttgacttaaataaaaaatcttatgtatgagagaattcataaatctggagagcaatgtgttatgccaatccgtccccacgaaaatctaggtgaatataaaaatgcagataaattcatcaaagaacaaattgtacccaataacatttaaagttttaaagaggtgtgatctcatgttgtaccgatcccataaatgcttgaagttgttgtctaaattcctttgagtcatcctattattaactagatgcaccaaatctaccatgtccaaatttagtatagtaagcaacgctatctaaaaatcgctcacaatcaagaatgcatttgcaaaattaaatatagaaccacaatgattcatacaaagttactatcattcacttgccacttttatggagaatagttcctctacccaccacaatacatacgtgtacaaaaggaaatggtattatgcaaatatgaagcgggcaataatgcgtagtaaagttgaatacgtgagggagtggccggtgtgttgtatttgcaagcaagatcgacaaattttagtcaatataccacaaccaaacaataccaaatcacgctgtttactgctcaaatcttcacacatgacagcagtatctaagtaggcatgtaaatctttctgtagtttacaaccctacacaaatcttctgcataatatatgctaattatacaagccaaaaaaaataggagtttgattataatcagaaaatcacctgcttcaccaatgtaaataaatcatgagatttagttaatttttccttgtatgcaactgcaaaatcaatacccctgtattttcaaagtaaaccgagccaagtaaaagacacaattagaaaacaacttaacgatttcaacagacacaaacgaagcatcccattcgaagaatggagcagctaatcgacatgacaacaaagatcagaaagatgtgtacaatatctgccgattaaaataaaccgaatcaagctttccccccatatcaggttaaataggtcttcttgttacctaagctagttgaccaagcgttttcttaaaaagtgaggtggtctttgacagggtaagagaatacctggttcaaagatactaaaatcttaccagtaacaaccatatgaatctaaaatttactcataaatcccatacattgattacatctattccaaagaaccaactctgtaacaatatggttactaaggaaatgattaaaggctcactctcctgcttactcttaaatcccattaagcttctctttcaccaacccaatgattaaaggctcactctcctgcttatctatgactgaccaagcttggtttttatccaactaaacacctctccagtctcttcaatcagttttactcaaagttataataaaacatgaagctctaaaattaagaaaattatccaaataattacaaactccgcaatgcagcactaacttctaccatctttactcaatgatcccaaaacaaaaaaaccctaaaaatcaaagcttgatacacaaaaagaattcaaataatccaaaagaaaaaaggtcatatagtataatcaaaatactcaaactacttccatcttttgtcgaccaaggaaaatttaaaaaaaaaaaaaaaaaaacaaagctttaaatcaaaatcaagtacctggagagggataaacagagactgaagaactcgcgtgagtctacagactttccggaccctaaaatggaggccaatttatccattacaatggagatccgataccaattcacaaacgaagctcgtatacgccgatcagcggcaccggcgccggggttaggtctctggtatttttccgccgcagtggccatttttgctggcttaacacagctcaaatcaacttt

SEQ ID NO: 18740 - DNA, 3063 bp, Cannabis sativa
tattagattataagttaattattagttatttttatttaattttcaaattaatcacaaccattcaataataatttaatagctaaaaaaatgtaaccttgttacatatttaatgtaaccgttaaaacctactccttatatatatgaaatacttctcaaatgagtattatccgtaataaatacatatatatttaagagtttgtaagataaatataagtaattttttttctttttacatttttttttataatatagcaagtgtgtccggatatcaaagtagtaattacataatcaagttggcaattacttagaaaataacattgtataatgattaaaattatctaaaactgttaatatttcataactacaatttacaaattacaaattacaaattacaaattacactcaattctgatagctaatgagaatatgagaattgaagagtgtaaataaaactcttcaattatctccaattgtgtaattacttagataaacacaccaaataagtaattctcgagttacatcaaatcttgtgtttttccaaacacacccttaataaaaacacaagggtttatacctcaaacacacttctgagaaattttctgtttcaaaggattgaagtccttcaaagtttgattaggaagttgtgcaaatgtttcttcattcgggtcgcagccagcagctatcattttcttgtaaactgcattagcatggtctggatttcctgacatgttgtaagcttgaatgagagcattgtaggtgtaaacatcggggtcaagacctttaagctgtagttcattatacatactcactgcttgctccaccattcctgtgaccccaagctttagtattagtttattgtatgtgtaaagatcaggaaatattcctttactcctcatttcagtgtagagagataaagcttcttctaccctctgtgattttacaagtgccttaatcaaaaggttataacaatgtgaatcaggtctaatagcactattctgcttcagttcctcaaagtaatacagggcatcatcaattttctctgaaatgcatagacaattcatagcaattctgtaacacttcaagtctggtattactccttctttaaccattcttttaaacaattcacagacagtttccacatctcccattttgctaaatccatttataagaatagtataaacctcacagttaggtttgcaaccatatacagtcatctcctcaaagaaaagcattgcttcttcatgtctacctgacacgaaaaggccatcaatgagcagactgtatgtacaaggagaaggggcgaaatcacgaccttcatgttcgtaatagaaatcgatagccttatctacactaatagatttcaccaaaccagaaatgactgtattatatgtgattgtgtcaggcatgacacctaaggatttcatatcactcaaaagttttagagcctcatccaatctacttgcttttattagtccctcaatcaaggtgttgtaagtactaagtactggagagacccctttttccttcatgaaatccagagtatcaaatgctttgtcaacattgcctgctttgcataaagcaccaataagaatgttgaatgttcgtacatcaggagcataaccatcagctttcatttcatcacaaatttctatcaaagtttccaactttccacaatcacttaacctgtccaacaaagtaatgtacgttacacgattgggtttgagactgctgttacctttcatctttacaaatagtgccatggcattatcaagtttacctgctttacaaagagcaccaacgagaacattataagtaataacatttggatcacatccctcttcttccattctcttgaatacatcataagcttcatcagtttttccagcctttccaagagctgtaatgcatatgttaaatgtataaatatcaggcctcaatcccaactgttccatctcttctaacaaacccattacagtttgagtatccccacgctttccaaaagctaccataagtgttgaaacagtcttcagggctggcttcatcccttccatgaccattctattgtatacctccagagcctccctacaaaattctgactggacaagcaaatggatcaacccattatatgaacaagcattcaaaacaaacccagcctttctcatcttctcaagagcaattggtgtttgtgtaattccaccacttatgtaaagaccttgaaatatagctagataagtattcaaattccggtgaatgaatttcttttgcatgaaatcaaaaacagcagccatatccaccaccctcttatgagtcatcaagactttaagcatgtaattacacgtttcagtggtgtgaacaacatggggtaactcagcaacaaccataaaatatgaaaaagcagaacttgggtcagttgtagactcaagaaaccttgtaacctcttctgaaggtgtcaagattgtgtgcttttccttggtgagttcctccccttcatttgggattttcataacaaacccacacaaacccattggttttttcttcaatgtccacctgtttcccaagtacccatatgagcaaaccttcaaatttctaaagtgtcttcctttaaaagactctctatgactcgaaagagctgttacagtctctttaaaaatgcaagtatagctgaaactaatacagtacatactcgaacaagaacctattaatggacccatcaaaagaaattagcaagtgaacaaaaaaatcagcaaaagatagcatttttcacacactaaagacaggtcttgatgatgttcgtcaaattgctcctgagtatataacaaattactatatgtatatattaggggtcaggcacttactgaaaaagttaaggagagaatcaagaaagaggggtgaaccgcaaagctagccgggtggacttcatttcacttggttatggctattggctagtactggaagagagggagagagagcttcgacttgatttatcgtctccaataaattagaattttcatatttatttatgaaaaagctaattagtaatttaaaaatttcttgttaaattta

SEQ ID NO: 18741 - DNA, 1923 bp, Cannabis sativa
cactaaaatatgacatttaaacgactagaatctgattaatcaatgccacgaacttaattacaaataaatttctcttcaattttcatacccagaaaaagactgctgctctgttcaatttacttaaggctcaaccttaaccatgaaatcccaaatgctcagacaaacataaccaaatgatattcacttccaagaaccacaaaatcatagagcagatagtcctcaaacgtaatcagcattctcattaagtaaaatctagaaccacattagctcaaatgcttacaatggaaacagaaagttacaataggtcaaaagaaggaaaaaaaatatattgtgaactaacattggaagagaatcatattcacaatcactaactgaataagccctataaaactaactacttaattaaaattccacacacagaagagcctaccaactgaccctaaagaacatgatgaaaaagagtgctaagtcatcttcacaattgatatagtggaacactagaagaccaagaagctcattcttttcttctcttttctttttacgggtcttcttcccagacatttaagaatcatcatcagcacctgaagccttcgacgaagctccggtcttcttagggagaagaaggttgtgaatgttgggcataacaccaccattggcgattgtcacatctccaagaagcttgcttagctcttcgtcatttctaacagcgagttgaatatggcgaggaacgattctcgtcttcttgttgtctcttgctgcattaccagccaattccaaaacctgaataatacagacaatgaaacccaacattaactagctaaccaaactattgcactgaaaaagattatactagaattactttttcctcgtaaaggaatactaaaaattatttcaaattagagtaccaaaatcagtcgaatggttaatgtactttaaagattgaatatttccattatgaagattgactaaaaaaagaaaaagaaaagaaaaattaccaaaattaatgcccaatttgagaaccctaaccctagattcttgaatgaaggaggatattaattaacagattgcacgaagtaaagaccaaatgaaagataaaagaggaaaaaagggatacctcagcggcaaggtattcaagcaccgcagctaggtacactggagcaccagcgccaactcgctcagcgtacttgccggctttcaaaaatcgagcgatacgtccgacggggaactgcaaaccggccttactactacgagaggttgccttctttgcggctccagatcccaaagttttgcctctacccgccattgattatcctcacacagatctatagaaagaagaaaactttacccgagcgagagcgtatagagagagtacgaaaaagcgcgaggaagtcgaagacacggtaagaatgaggtgagagttttcatacggttttagctatatatagtgggcaaccctttcaaaatggccaataatatcaaactgcgcggatcgtgaattacaaccgttagattgaagacgatataagcggtcaggattcgttcaaacttagctcggaccgattttgccttaattatttggtttggatcgcgtgtcagggggatcaacgccagttgctattgggtcggggaatgaccataataccctttttttcaaaaaaaaaaaaacaaaacaaaacctttttggttttgttttttttgaaataactttgttattctgaacaaaaaaaaaataataactatttttttttaatgaaaaaagtaataactatttagttactaacatagttaacttttttttaaattttaattaatatttattttacaattttattaattaaattatattatattatacgacaactaataaacttttaaaataataaaaaagtataaaataattgatatataaaaattgtagcttgt

SEQ ID NO: 18742 - DNA, 7062 bp, Cannabis sativa
atattctgttaaaccaagaattgtcgttagatagacacttttaatatataaagatatatattcaattgctaacaaaataataacaaacacttacctaataataataatgtgtaatgaaaatgaaaaagactggccgcaaacaaaacgccatcaaagtgtattattgtccaagtattgaagcacacatggcaaaaggagctgaaaattttgaagaatgttactctaatttattattatttgaagacaaaaaaaggattgtagtttgtattttcttcaaccccatcatactacaagttgctactttcgtgtattttgagattttcttttaaggatatcgtagtgatattttagattatttaaaaaggtaaagagtattattattttcttaaaagaaaaaagaaaaaaaaaatgatcacgattgatacatgtatatgctaaagaacattattagtgagtgtagattctgaaagtaaattgttcaggattctaatttaacatttagtattagaacaaaacaatataaatatgagtttagagtaatagtgcatatataatattaacatatatatatatttataaattataatatatatttttagatatattatactaaatgtgcataattaaattaataaaactctattattagcgatgacaagattgttaaatcgaaaataacaatcgaattaaagcaggagcaaacagagtaatgaaaactaaaaaacactaaatgcataaaataaaataaaaaattaatatcaagttatatactggttcaagttcgatagatcgatgtgatctatgactctactccaattctggaacaccaccataattcttctttattgattgagcaagaataggtacaatacagtcgagatgagattctttgttgagcccttactaagtatttcaactctcatactttacacccaataatcttcttcatctacagaagattcctcttacaaaatcctaacccaatctatctcttttctctacacctctctctctctacctctcaatcttttctctctcaaactctcaatctcatttgaacagagttctcaaacgtgtatccaatctctctgaaaaagataagtgaaggtggtatttataagcttcggatcaagatcttaaagtcggtagctacaagaaacaagattgttaagttagttagaaataactaacttaaacaactcctctttgagcaaattctccacatcagcttaagtattagagcctccgagaacataaataagctcccaggctcacgaaccactgacactcactgaagacacttttggataggattgagtctgttggagtcgactatccagaactaccatttcagcagtgacaattagtcagcttgaacttctttctaggggagggctagcaatcttgaaaactagacctggagtggacatgataatcatatgagaacatccatctggactcgactatcattccacaagactacttttgggattgactttcgcaagtgaacaactttccagatatgatgtttgcggagactttttcatttagagaaattatacaacatacatatatacttataatatagtacacatatatttataatataagaaaaaaaatatatatcaaataaatttgacagaatgttatttaactatgtctatgatagtagttgaggtatgattatatttttattattagatagagattacaaaattaagaataattaacatatttagtggtgtgaactaaattagtatgtgaataggtgttttgaatcttgataacaaaaattggtacattagttttatttgtagggtaaacaagctaagagaaaaaggcggagtgcatctaagcatgatgtaaaattaatttttattaggagtgtttatcaaatttaatccgcactattttactcatagtgcattcgatttacactaagtgcggatttcatttttttgatccaatccaatcagcaaaagtgcggattggatcggttattttagattagttactttttaatattttttttttcacataactagcaataaaataaaacaaattatagttattttatgtctccaacaacacattaaaataaataaaatagtaaataataaattcaagagaaaaaaaattgtatgtataaagaaatatttaatatttttttctacataattttttttaaaattgtatgcagaaaaaaaaaaatatatatatatatataagaatagaatatacatatgatttattaagttgtgaaatataattgtattatatatattagacttttaaattattattttcttacattaaaatgttatttgtatatatatttttttaattttttaataaatatgtggattggatttgatcggttacttgtacatgtcgatcaacattcgatctgcacaagtgcgaattttcaattttccaatccgcacaactgcgaatattcgcactttgtgaattggatcggctattttatgaacacccctagtttttatgaaatttttattagtaaaataactttacaaatttttttattaataaaataactttttatagtcgcaaaaacgaccacaaattacactgtgcgaccataaacgaccatagatttatattttgcgaccattatggttgcataaaattaattaagtgagattattttgaaaattttaatattttaaatagttagtttggcaaatttctcttttgtggttggaaatttataagcaagagtgtttagaaaaaattgagtaggatgcgtataagcatgatatatggtttggtttgttattaacatagatagaagaagaagaaaagaaagataaagttggaggttgatagaaagaagggatctttctccctcatgtctcttctcctcagctaaataagttgtgtataataaaatttttcgtaaatagcgtcataaatatttaaaattttaagtttgtaagtgacataatttcaatatttatttttagcggtataagtatccaatatttataaaattgtaatttttttttaattttgtcagtacaaacactgttattttcttaaacaggccacatataaagtctagattttagatcattaggtctagacagaaacatgtagtatcagttgcttccgaatattcctttaataaattcaaaataaaactataggaaaattacaattttacaaactttgatacttataccgctaaaaataaatattaaatttatgcggcttacaaacttaaaattttggatacttatgccgctatttaccctaaaataaataataacagctaaaaaaatcatatgtaaatatatatatatatataattttatatgtaaatatatttaaaatcaaatatatttagacttttcagcgttattgtttatttagtatacactacttatttattcgtcaagacaaattttatgtaatattaactttactttcaaagaaagaaaagaacaactaagttgtcaattcaaacaaaaaaaattcctcaaaaaaaaaaaaatccactagagattttcgatatttacgagtgtaaatatgtttaccttacataaacgacatatatagttggaccttaaaactattttttattttattttttggtttataaaatttgcatataaactaaacttattatttgttaattatggccagcttagttttataaatacagcctgttttttcaataatcttttcatgttttggaggagaaccaatctaaatggtgtgactcactttgtttcctagttttttcagtgttaatttattgtattctcctcctttaaagttaaattatattatattatattaatatccaatttttattttcatatatatatataatagttaaatagaataattagttaagatactttaaatttacatgagagacttttgaatcccagtgttccttttttctatgtgtatttactttttatttattagaaaaaacaaatgaaatacaagatttaaattaggttcaaatttatgaccgctataataagaggatgttgctaaaccatcattctacctaaatttagctaactatttattgttttagattatattaaatgtataattaagccaccctaaaatttaatcctgaatcgatctgccactgtattagagcatctctaattatgtgctaacttatttatgcatcgttaaaatagaactcatttaataaagaaaaaaatattacttcaatagtatactaaaaagttgtgtcaaatttgcataaatataaatactataatttttaatttatttattattatcttaagttattagatgaaatgttaaatattttaccttctaaattttagctattaccaataaataagtaaatattattttggaccatgtattttgcaaaaattattaattgatccttttgttttgctaaataataattcagaccttgtattttttaaatggtaaaaatagactctaaattcaattttcgtcattatttaaatataactaatttgaagtcaaatatagcacgaacatatcaaaaaaatacaaccactcttgtcataatacttacaggtcaggtttataattaaattttaatttgacaaaattaagctcaggatctattttgtaccattttgaaaaatacaggatctgaattatcatttaacaaaacatagagtccagtcaataatttttacaaagtacaggattcaaaatagtatttaccctaaaatataaaaaaaaaattaatatttttttatatactttcaataaatattaaattaacattaatagaaaaaatacataaacttttatgattttgcattgcaatataatgctaaatattgttctatatatcaaataataatttttttttgtaacaaatataacacaatattatcattatagatgttcttagctatcatctttttactacctaggaaataataatagaccataataagaatacaacctttttaatccttctctatagtaaaatcatgaattaataaattttattgagttaattataagtttaggaaaattctagcatagacaccctaataacggacacaataataggtctattttgttgttatattattggttacaagtgatgtttgtggacccatttaatgtggatgcatatatatatatgtgattactccatctgtgagaaagggtatacccctgtgtcctttagttaatgttttgattggaacacgttgtcgtgttcagtaaattttagaaataaattaatttgataattaaataagggtttggttagcagaatgatatttcatggagggattttcttgaatctcgatgtttccttgaaaccatttgaaatctttaagactccatcctagcaacaaaatctgaaatgtttcaactactaataaactcattaaaccagagatcctatacaattgatcaaaaaacccataattttcaaattaaaattccagaattacatacaatgaaaaattgaagaaagatccttttaaaaaagaaaaatgaaaaaaaaaaaaaaaaaagagagagaaaatagtgggcaaggaattaataggtacaatctgaaaatgtattccaacaataaaaaaaatgcctataatggaatacaattctcttttaagaaaatatagaaatatatctcctcaaaacaaacccataatagtaaacataaatttggtcgtatttacttagtaaataaaaatcttcaaacatttagccctggagaccagtagcgattagaacacagttgaagagtccagaacaagcataaatatttcttcttaccaatctggtgtgtattgcaacaacataataatatgggatctatttaaccgccaataaaatgagaacaaaaggagtgttcattggtgtgtctgttttaagggtctccactatagaagtgcccataagtttactatatgattaaaaaaggaatttacacaaaatattatttctagtaaactttttaatacttttacgtttaaatatatatatatatatatatatatatattttttcttttacatttttatgtcgtcatataaaaacaacacaaaaacaataaaaaaaccacataaaaataataaaaaaaatataaatataatatacaaattacaaaaaaccaacaacaaaacaatcaataacggacccaagatttttgttttatgggagcttaattgttataaaaaatatttatacttactttagataaaaaattataatattttgtgggagattttttatattttgttatataattatttaattaaaaggaagatatttaatttttttaaaatgtaatttgttttagcccataaatacaataacaagagtacagcataaaaataatatgaaaatataaaaagtctatattttttataaataaaatttaaaaattataaaaatatttaaaatactatataactgtattttttataatttgtttttttttagatatttatgaaattatgcctttagaaaaatcaacttaacacaccctttcaaatatataattaattagaaaaaaaacaagatatttgatatgtgatgtgattctacctaaaagttcactttatgaatactataataagcttataaacacacaattcgggcacttcattccactttgaatcatgcaatttttattctcaagcccttttgtgatatacttactcttttcgtatgttgccccacttgctatggttgtcatccactcacattccttattatttattatttttttgttattcaacaaggatatcataaattttaacttaaatacagggatattttcataattactcaaaattaacaaaagttttacaaaaatatgaatttatattattttacatttgtacggatttttttcttttttattttccaataatacagaaggttgctttctaattttctagttgttcaactaacaaatacaaaatttattttggctaattaggattttttcttcccgaacattgacatgtatcaaatcatgcctcctgaacttttttggtcgttaaaaattcctcgtgaactatagagattgttagattt

SEQ ID NO: 18743 - DNA, 4551 bp, Cannabis sativa
aactaaaaaatggatcacgtgatgtaaatctcttttccactcttctagtagcttcgacaatcacgggaactacgtaccaactatatatatggactttatacctcatcttgtcataattcgatcataggtatacacctcgaggattctcatcccattaagaatgtcactaccatagcaagttagcttctcataaggccaagcacaatccttcctaatgaggagttgtggtgaaatttaaacccttaatccaagtaaaaaaaatgttagcaaatgcatctgtactattacactatacaatacgtgataatttttatatataatccttaaaaactataacaactaataaatacccgaataacttttattaaaaatatcttaacagatttttcctaaaaataaaaattttcttttaattttgaggattattatttagtactttgaaatatctaacaccccactaatataatacattataattaattaccaattttctaatatttcatatcttaagttacccctcaacatttttctaactctttttctctcataaaaaagcaagaaaacgtttcacaaagagacaaagagattctggttttaaaccccaaaaccaaaccaaactccaaaccccaagaaagagagagagagaaaagaaagaagaaaaaaaaatctaaaattttcaaaaactaaaccaaaaaaacacactaaataataacatagacaaaaacaaaaaacctaaaaaaaaaaaacccaaaaacaattgcagcaacttcaagaatatgtttttcttttaccaccaccacccacacgagcggttctcgaattgcatgcactgcacacacttttttgttttgtttttttcccataaattaatattttctttcatgagagagaaactaagaaataaaaataagagttacaaaacacattattactactgttatgctaataaagctttgaactttaatataaaatcagtctcaaaataaggaccctgacctcattttctcagaggtatatgtttgtatatatacatgtatatatatatattattattttatatgtgtatatgagtgagaaaaacagtgagagaatcgtgtggttggtttcccatttcttcatctaacagagtaaagaaaacaccattctgttttgagtttttttctttctataacgtattttccttaaaacccatataaaaagatttcatttttactgatttcttacccctcatttcactttctcaccaactttctctccatccaaacacaaccctttactctctcaaaactatccaagttaaaaatcaaacctttggtttgattctaatcacactatgaatcttcagcacttgaaaagtgatttcaactgtttaaatgggtataataataaaaatatgagctttatcccatctcctcctcaactttctctcttcaaaacaagttgtgatgaaatgggttttcagattttgagctcttcatctgagaaaaccaagaaagaatggatttttcctaaccaaatggaaaacagagaagaaaagagaataagtgatcttaatgtgtttgatgaaatacctgaaagagaagaaatcagaatcaggacaacatctggtgtgaaaaatgttcacacaaagctttgtgctagaggccattggagaccaatagaagatgctaagcttaaggagcttgtaacccaatatggtcctcaaaattggaacttaattgctgaaaatcttgaaggaagatcaggtaaaaataaaaagctaaactttttgtattgttatgttgttttgtttcttagtttttttgtttgtttgtttctagggaaaagttgtagattgaggtggtttaatcaactagatccaagaattaacagaagggcttttagtgaagaagaagaagaaagattgttgggtgctcatagattatatggtaacaaatgggccatgattgctagactttttcctggcagaacagataatgctgttaagaatcattggcatgtaattatggctagaaaacatagagaacaatctaatgtttacaagagaagaagaccctcttcttcttcaacttcatcatcttgtcattcccaaattctagtccctaaagttattgacatgactttatcaactaacaataatgatcataattacaataatggttcaagtactacagagtcaacaatttcaaataccatcaatgatcatgaatcaatctcaacttgtactgagctttctttaactccatcttcaacatctcatcactatggtaagtgaaacttttttttcctcttgagttttcaaaagggtatttctcactctttaaagatttgatttttatggagaaagttattgtctttatttttttgcaggcttaaaaaatgggagttttgacaagttacttagtctctacaaaagaagagttggaattggtcaatcagattctaactcagaaaactctgcagagtactattcagttgcaaccaataagagcattaatttaaccatgtttgatccaaatcaaacccaaaacatcaaagaagataaggttgatgagaaaaagatcattactttgtccttcattgactttcttggagtaggagctaactagtttctttagtacttcttcttgttgttgttgttattattgttattattatgactagtttagtttctactactacaatggagtttagcttaattataacccaaaaataatcacttgaaaaagttcagagaaaatggagtggtagtaggctgagaatgatgacatttctacagtgtttgatgtacagtttagatccataaatgggaagaaaaaaaaaaaagtaatataggtaaaaaaaaaatggagaaaaagagagaaactttttttttttttttaaatatatattttatttaatgtaattttggacaagaagaagaaagccaatatttttgggtactttttttggaccagttactgaatcaatgaatgaatctgcctatctttcctgacttttttttttttttaatattaatgtcaaataattcattggtttttaatactgttttttttttttttttactttgtgctactatggttttatctaaaatttgatagaatttattttgttgtcattaacaaaagtgttcataatgattttgaaacacattgaattgaacacagtagtgtttcagttttgtttttgttttttttaataaatgagatataacctgacattaataacacattgttatagctattacctaattgtgacatcaagtggggtatatatattgctatatatatatatataaatagtagtatatatgtatatgtatgtgtagatattatgtggggtcttgtaaataaatcagaaaaaaacgtgacactaaagttgttcatgattgtttagtggcctatctttgactaacatcataacaataaaggtaaataacgggataaatattcaaagtttgaaattcataagtaacataaatttaatatttatttttagtggtataagtatttaatagttataaaattataatttttctctaattttgtcagtaaattctagatcattaggtctaaatagaaatatatattattgtcttaaatatagtacatataaagtcgaaaatctagatcattcgatctagatagaaatatgtagcaccagttacttttaaatattcttttaataaattcaaaatggagtctgtactgacgaaactaaaaaaaaaattacagttttacaaatattaggaactcatgccgttaaaaataaatattaaatttataccatttacaaatttaaaattttggatacttatgccgttatttaagctcctactactactaataataataaaaataatataagttattttatgaagagggtgatgtcaattcatagagaaaataaaggaaaaagggtagttgcacatttatgttgtgtcaaccaatttttgttatttttctttaaatgctaaaaagtgtaatttgaagaattcaaaatatcaccattgtgagcaaattaaaggtctttatttttatagagttctccatcacttttgaactttaaatttactctgaatttggggtagaagaatttttttcttcataaaaattaaaatattaagaaattataaatttctttgtacctttttcttcggccttgttgtacttactatttagggcattccaaatctttttcgcaaatattgtattgatatagaggtcataaaggcttaggatatgacctctacgtaagtattggaaaacagtgtctcacataaagtaaataataaagtattggaccatatataatatcccataattctcaataatattttttttctcattataaacttacataggataataataaaaaatacaaaatttataaatacaaaataaatatatatacatagataaagaaatattaacttatggaggacaatataaaatttttgaaaatttatatatcaaatgttaattcataaaaaattgacaagagcaaatgactcataagccctcctaaatggactcaagaatgtagctaggc

SEQ ID NO: 18744 - DNA, 6716 bp, Cannabis sativa
actcatctggtattcagtccccactatctttttctccaatgataaaaatagggatgatcttgtacaattatgtcgataaatatgtggaacaccgcaagaaaggtgcggaatttatggtcgattcagacataactagttttgtgcttcatatgaatggagaatgtcaaagaaagtaagttttacctcatagataaatggttagcttatgttgttgggaaaaaggtaaaggaattaaagctttcggcgaatctggatccaatgctgtactacagcttaccacaaatatttttggaaaatgcaagatgtttgactattttagagttgtgtaacatagagttggatacttcttgttcatttagctttccatctctaaaaactctatcgttgcacgatgttcatattttagatactacagaggatgatggggcatttaagtttttgttgggttgcccttctcttgaaaagttgctgttacgtgatgctgaattcgatgatcacttccgattgcaaagttcaagcctcaagttcttgaaagttgattatttaaacatgtatcatgaatcatatcttcaagttgaagccataaatcttgagtctttgatactaaaggatgttattttcaacaaaatagatctctcttcttgcaagaaagttagaaatctctcattagctgaatgtacggaagatagtcagtcatcattacaagtttttatctctaattttcctcttcttgagcacttgactttgagtttctatagtttttatgaatatagttcaaagcatcttaaaatctcgaatcaacacttgaaaagtctcattgttaaggagtacgatccagatgaaatgatcaacactattacaattgaatcagctccaaattttacatccttttgttatagaggtgatatctgttttagcatatctctagagtcatctaatttgttgaatggaacattcgatctatacgaggaaccttggcttgactgcgacacaagatttaccaatctaatgaaatttttctcaaatttcaattgctcttggaatgttgtaagcctacttttccacgacaataaggtattatgctttatttgtttctgtaaccttatttcaagttagtattattagtctacatattgtatattagccgatatgtttatatgtttgtatgtaggctctcgtattgtcagaaaagttgaagaacatatgtccttctcccttgattaattggaagcatctcaaattagttattggtgaatatgatcctgaaaaattatcagattggaaggattcattgttgtggatttcaccttctttagaaacattatttattaacgggaagctgatattttagtttgcattacaataatgtaattgttgattatgagtagcaatgactttttgattgtgtatgaggttttttcctcatactttttttttttttttgtgaattagttgatattgctcaatttatttttatacatattgttgcaattcttataaataatctacaaacttgatatataaagtttattagaatatatgattggcttttctcatttttcctaaatgaaagaattgctttgaatttgaaatattgtatggctacattattttaactttgctttttcatttttagtattataaagaagacacaacatatggcatagtctgtaattgttctagcagtgatgtttcttatctcatttctctgatgtttttttgttgagatctgtaaaagtgaacttatgtctcagttgcttatcagaatgatcttccaattgaaataaagatcattctgatgtaaaagattaactatgcatgcaattgatgattgtgatgagcctgactcagtggaatcttttagcatcttgatcacttgaaccctttgaatcgattcctcaatcatttcagaggaattcatttcaagaaaatcagtgccagccaagttttgattactaagttttatatctgttttgttgattataattaaaacacgttcatgtaaaaattcagtaaagttctttatgcaagtgttatataccagcggaattgtcagtgaaacatgttcatgtaaacatgatcataattgtcagtgatcaaacttgtattgtcagtgatcatttctctcagttctcttgagtaatgtattcatatcttgtgccaactcctatgtttcacggactgtcatctcgccatagtgagtccatgattgctgcaagctgatatataaaagcacatgttttacttctctctgaggagcaaattctaaaaactcatggcctcccacaaacaactctacttgcttttttatacgaggattgttattgggcaccagtagtacccaatacttactataggtgacgtcttacaattgattatcgatattccgtaaaagttatttttttaagttatataggactcgatacttaattgacaccgagaagggtgttaggcaccagtagtgccttttaacaattctctttttatacgggtttaaggaggagggtattttagacattttatattattatagagttaatcttttgattaacttatacataaggtttgtatctacttgctataaatatgggttaaatgagagttatttactttttgtttggccttgtctcttctttttcttcacatttcttgtttcttggatggagcagcagcattaatattaatacttatttgattacgttaagtaaaaaaaaagtactaaatatttattgctggctgtatcaactaaataattttatatattaatttattggaaaggaaacatctcttccttcctctctatttattaattcctcaacctcaatctcaggttacatacaacatcaggtaaccattttcatggctttactttttttttttttactttctttcttttggaatgacttttcatgtttttcttatgttatttgtgttatgttgttacagcactagctcacacagttctcatcaatgggaaatgatgatgacagaatttcaaaacaacctgatccactgctcattcacatcatgtcgtttcttaccacacaagatgtcgttcgaacatgtctcctttcaaagcgttggaaactcatctggtattcggtccaacaatctttttctatgatgtttctaataatgttaaaaagttatacaactatgtcgataactatttgaagaatctcaagaaagatgttatgataactagttttaggctttacatgattggattttactatagaagaagcaaggctgaagttctagacaaatggttagcttttgcagttgagaataaggttaaggaactgcatttttgcttagatcaacagcctgtagaatacatgtattcatcccatcactatatcttgcctaagtttgtattacagaattcaagaaatttgactattttgaagttggatggggtagaggttgacactagttcttattcatttagttttccatctctaaaaactttgtcattgggacaagttcgacgttcggataatgctgaggttgatgtggtatttcagttcttgttgggttccccttctcttgagaaattgatgttacttaactattgcttcttaggtgttgaaagtatccccccctgcgaagtttaagccttaagttttttgaacttgaaatttcagcatgtttgtttgttgtcaaatttgaagccataaatcttgaaactttgttactacatagagtttcattggacaattataatttcacctcttgcaagaaaattagaaatctctcgttagttgactgttcggaatctgaccggccaatattagaagatcttatttctagtaatcctcttcttgagaatttgacattgaaaagctgcacttcagatttggaccatcttaaaatctcaggtcaacacttgaaatgtttcagttttactgattgtgaatatgttggctataatgttgggatagtgagaaacattacagttgaatcagctccaagattagaatactttagttatttaggtcacataaattgtacaatatcgacagagtcgtgcaatttgttgaatggaaaaattgtaattacttcatccagtgagaactataacacattctggttcacccttttgctgaattttcttatgaatctcaattgctcctggaatattgtaatcctaggtgtttacacagttgaggtatgactatattgttttgttgttttatttaatgttcatattattaattggtatatacattgatatgtttatgtctttgtatgaaggctctcgtattgccagaaaagttgaagaggataagcatctcagagttttactctacaccatgaacccgaacgagtggtagactcaaaggacaccttgatgtggatttcaccgtctttagaaacattgtccattaatggagaggacataatttagtttctttaccatattgcaactgtcatttatatatgatttgttttgtcatgaatgtcctctattagtagctttgtagtaatgatgaatttgactactttgcataagaatgagatttcttttccttatattttattatgaacaagttgatatgagtatattacaattcttacaaatatacacacttgcttattatgaacttgatatattcattggcatatataatggagttttctattttgtccttaatgaaaacttgaaacttgaaaagcaaccactgagttcctttgagatattctatggctgtattttcttgttgagaccagcagaattgaacttgtttctcagctgctttgtttaatgatctaacacacttaagtttcttctaaagattaactatatgcctctccaacatattagacatttgtttgtgatcaatatttttactttttacatgtaataatactctcttttggtatgaatataacccataacttataaggaagaaaagtttgaaactataaagccttaattcaatcctggttagttattttaaggcattttatagatttgaaaaattgaaaaataaaaatggttatagaatatattttttttttcaaaaacaaaattttatttttatttttgtgattaaaaaatttaaaaacaaaagtattaccaaatgctgccttaacagaaaattttatctgtcatcaatacctacttcacaaaatgtaccaatacaataaattaaaaatccaaaaaagaatccaaagcttctccaacagcaaagatatataaaaaaaaaatgttccagcattaacaaatagagcgctctaaagcaaagtattcaaattcatttactaaaacatctcaataaaagtagcacttagcaaaggaaaaataaaatcaactaaaatatgacatttttgttaatagataatgattctaaggagggtgatatccacatcaaggtttctttcaagtctgactcgtacttcaatttaaaatgaatattaagtctgagatgcttccaattaaccaagggataacgaattaagttcttcaaatttttgggcaagttttctggccaaatgagctcctacaaatttatgaaaacatataaattatagtcttaacaatatgaatgaaaacaaatacacaatacaagtaaccaacataccttatcgtcaccaacatacaattccacaaaattccaagagtaactgagattcacaagaatattcatcagatcaataaacccttccatgtcatagtttcttttccaattccaaaacgtgtcaatcacaatttttccatttaaaatcgaactatgtgactttattgatatgttaaaactgggaattccttcataacaaatgtatgttaattttggagcagattcaattgtgacactcttcaagtgacaattattaaagtttctttcttcaaaatgttcaaaatgttcaaaatggaaaaacttcaagtgttggctcgagattttaaggtgctctatctttaaagtatcgcagaatttcagagtaaaattctcaattggaggaatatttgaagtgagagcctcaaatatgtgattccttctaaagtaaattttgtccaataaaacaccttctagtaccaaagattcaagatttatggcatcaacttgaatttgtaaataatcatgatcatattcctgcttgcaatatagaagtaccaagaacttgaggctcaaactctccaagcaaacattcatgttattacctaagaaacaatatcttgttaactccaatttctcaatagatgggcaacccaacaagaatttaaccaccacttcttcctctgcattctccgaattccaaacgtcctccaatatcaaagtttttaagcatggaaaattaaatgaacaagaaaaatccaaccctacagaattcaactccaaaatagtcaaatatcttgcattatctataactttaggtaagcagtaattagactcaaagatacctttaccaaaattctctgggcctatatgaagtcttatttccttaaccttattattatcaattacaaaggctagccatttatcaatgatgacagccttctttaatttataataccaaaatgtttcaagcttaaaactagttatggtgagtgaagaattgtcaacaataagatcatgcatagctttcttgcgttgttctaaataattattgacatcattgcaaaactttttatcatgatcatcatcataataagtataatggttatcattaaaaaagagtgtggggatcgaatacggaatggatttccaacg

SEQ ID NO: 18745 - DNA, 2191 bp, Cannabis sativa
gggggctccagccacggcaattgcgtgcttgttctgttccttttcagagtctgcaatgtaggatctgagccaggcagcgtccgaaggtgacaaattgggcgaaatatttggctgaacattcccatttgcgcttgttcttctttctgacttagcaccaaagctccacctcttcttctctttccggtcactgacagcaaccgcatccgccgttgttggagtctcaacattattctccttgtctttcttcatacccaataaccctttaagccatctagtagctttccccatggcagatatagttttctggtctctgtagaatttggagtttaaatatagcttgaaagagagagtaccctttttaagtcaatgagtcaaatatgaagttttatttggaaacaaacagtcatttttagtcaaaatactattgaaccacccactgtgttactgtgaaatgtgaagtaagaagtaaaagacagcaagtgaagaagtgaattgaggaaaataaccccagtgagtgactgagaagcttaacataagtagctacctttctcttacaaacaatagtgagagagagagagagagagcactgtcaaaatgtatatatttaaatatttatattgtttagaaaactgaatccagagaccccaggtggagcttattgagcagaaatgttctgaaagggcttttggaatctttacaggttgcaagcagagaagtgtggagcaaaagattaacaaacaaaaagcatcaataaccttaacaaaaaaaataaaatcggatataaaaagataggattttttaaaaaaaaaattaaaagaaaaagaaattctgacaacacctcgtgaagaactgcattacaagacaaaaagaggtcacagaaagatacaggggagaagagggagggagctaagttccctcaactcaaaccccaattaaaatatacaaacaaaagaactttcaaaaactcaccacaacatacatacaaacaagaatacactaatcatgaaaatggcacaaaatatttactctcataaacataaaaacattcaaaataaagtaaataaagaaaccaagggaatcgccccaccttcttaaattcaaaaagagcgtcgaattagcaaaaaacccttttctccaactccaatagctgacttagtaaaaacccctcacaacaaaaatagcactagaagatctctcctttcttttttctccttaagaatatgaagagtttccaactttatggatagcaacgtgtactggtaaaaaattaaagaaaaagattggaactgacaatctcgtgaatcagctttgagtgtattaattagaatttgatattttgtaagcaaagaagaagcaaaagggccctggttttcgtttgtttttctttttaaccaaccttctctcaatctcaatctcaatccctttttaaaagccaagattttctctctatagtctctctctccgtacttacgagtctacaagttcggtgaaccagaattaatggccgtcccaataaaagagctccttttataacttctcctttgtctcaaataatgactcaacagaaggctgtgacaacgctttcttttcttggcttaaaagaaaatctttcagtttccgtatctctctcaaaaaactatttttatttttcaaaactaaacaaaaatgaaaaatctcagtgggcgtggcacataaaatctctgaaatgatgctttagtagaaaagtggtattttcccaattgagtgtagtgaagttgctctgaatacttttcactgcttgtgatgaattcagcatttgcttatttaagagagagagccgctcttgggatttgaaattccattaatgctcgattttgtttttctttttaaaaaactaacattattcaagttttttctttttttttttttaaaaaaaaaaaccctgtaaacacataattatatgtcattgaatcattgactgtagttgtgtttatttatattaatttgaaatgagattcgatttgaaagtttgaatacagatcttcttctagtatacgttgctatattgtttgaaatttctttgattactaattagttttatagtgaggattgtaatgaagctactacctgagaaaaaaattgtttattgttatttcagttcagcttgattcaaacaaatgtatatatgtggcatagtaacatatgaaataat

SEQ ID NO: 18746 - DNA, 5376 bp, Cannabis sativa
actcaacttgagtagaactactgcgcttgagacggaggccccccctaagtcacaacatatgcaaaattgataagtgatatgctaaatcactttttgaggacttacactcaaaaataaaagttttcctatcgataaatagcgtgactaaaacctaaatatcaagaaaattctaaaaaatgaggtttcgagaaaagttacccaaaaaaaaggtaggcctacctgtaaaaacgataggtcatttttttgggttttcttcctggaaaaatggtaggtcgttttctcataaacggcatgtcgtttctatagtaagaaaaattcaaaacctcaaaactcaaccaaataaattccaaactttaccaaaagctccaaaatacctaattgagtcataacaagcataatccaagtgaaaaatgcatcatcaacaaactataacaagatctatcattaatgagcaaagcttgagttctaaagctcaaactttatcaaaactcaaccacaagcaacaattcatgcttaaaatagcttaaataactctaaattaacaccaaaaattactctctaacataaacccaacatacaacagctgaaataacaaaataaccccaaaacctagttatattcttgagaaaaaacaaagagaaaagagtgaatgagcttacctcgagatgatttttaaatttctaactgaaatccttgcaaaattgataacctaagtctggaattggtgggattcttcttggggattctagggccaaaaatgggagagagagtttgaagagagagaatgtttttgttatgtaaaaatttgattttcttttcattatcttattagtatttagaatataatacattcataaaagataaaatattgattgatactagaaatccaacttatccctaaattaatactaaaaccaaaatgccttaaataatctttacttctctaagaagtaaccttgaaacctaggggtattatggtccaaatctataactacaaatactcccaatattctaaatatctatccaaaatgtcccattaaaactaagatactaaacgttgcctaagtgattctataggccaaccgtcgtattccactattaccgggcataaaaatatgaagaaaaaaaacatcaaattcatatatattataattaacacacctagaattcaaatatatcttcacaattgcataaataataattaaaagtttaatcttgaattaaacactaattatttgttaattctcatactaaagctaagcggtcattacacatggactttgagggttcatggagtaaatacttgcctttgatagaattttcttacaacaatagctatcagagtacaatagggatggctccatatgaaatgatgtatggtaggaaatgtcattcccaaattcattgggatgagaccgagaaaaggaagtatttgggtcttgagttagttcagagaaccaacgaggcagtagacgagatcaaggctcagatgcttgcttcacagagcaggcagaaaagttattttgatcccaagcgcatagacatagaattttaggtaggaaaacatgtttcctacaagtttcaccaatgaaaggtataaattgctatcagaaaagggcaagttaagccctataggttcatagggccattccaaatactcaagaaggttgggcaggtagcgtatcggctagtcttactaccagcactgtcggatatacataatgtattccatattttaatattgaggaaatatgtgtcaggcgcgactcatatcttgagttatgaagccctagaactacaataagatttgtcctatgaggaacaaccggttcaaatcctcgataggaaggaaaaggttcttcagaacaagaccatagcattggtcaaagtactttggaagaatagcatggtagaggaagccacttgggaactagagtctggcatgaggactcaatatctggagttattcaagttagattttgaggatgaaatctttttaacggggggataattgtaatgatcacatgattgaaatatggattagtaaggcaattagtattgataatttgtattttataattttatatgaatatatatgttgtgggctatatttataagaaataggcattagagttataatttctcaatttctgagattttaataaactcaaattatattatttatgctatatgtgaaatttataatttttataatttttgcttgataacgatagctattagagtcacatgggtgagatttggacatttttttagtgggacaaatataagtgatatttggaatatcaggttccaatgggattatgggtttggactattttactccttaaacctatagattactaaagttggaagtaaaggggtagttatggaatttttacccttggttttagattttcttttgttggttattattagacttttaactcttattatttttattattattattaagataagactaagttttaattaattaagtcattggaagaaaaagttaagaaaaataaatattatctttttctctctctcttttcgaacccaaaggaacaaggaggaaccaagggttccatttctaatttttcaaatggtttagctggaattcaaggggtaattctatagcaattggaaggaactgacaaggtaaaccctaaaaatcctattctttgagtttttgaagcttttagttgggttatcgcatgttatttttggaatttaggttctgcatgtgttaagctttgttttgttttaatttttagattatatttgagttgaatttaacttacttgagctggttttgctagtttgaggagtggttgagcaagttggagtttgagaactcaaacttggctcaacagtgtcacttttcatttatgtgtgtgtctgctattgttattgcttggaaattattgttggatgtcattacaggtattttagaaagtttggttaagtttgggaaagttttgagagagatttggggtttttacaattttctacagagtactaattgaccaattttgtagaaccgattaactgtttctccagacaggaccctaggaaccagtttgccgtttagaaattcagtttactggtttagggaatttatagagccttagtttttatgtttcctcgatatttagggttttgccatgctatttatcgataggaaaatttctagttttgagtttagatcctcaagaaagtttagcgagttatttacccatttatgtgattgtggcatagggcctccgttcagcgcttgattttccattcaggtcgactgacacccttaaatttagaaacgaggtaagattagtataaaacatgtatatgtatatgtgtatgtatgtaaatttcatgttgtgtatgtgattcatatgctaccaacactagtatggtagtggtactaagtgcattggtacaatctatgatgttcgaagggtacgttgcagtgttaccaacactagtatggttaagtacgtagtgcatgtggtacaacactcaggggtactcgaggtacggttcaaacctcccaacactagtgcaatagttgtacttattgcatatggtacagaggtcatacttttattaagaacgttcttaatcatctgttaagtcttgtggatagatgtatggattgcctaaatacaagtcggtcatatactttgtgttatatgattattttactgagtttgttgactcacgaatattgtttacatgggtaggtaaaggaaaggctaaggctgaggaatagtgaatccagagctcaggaatgattgtacatgtcaagatggtaagacttgggctttattttatagtcgctgtgcgacatatttataaaatgtattttgaacatgaatataaattttaaaagcgagatctcgaccttctgtatggatatatgtatatagttataaaggtttacagtttaaatttgacacgttattgagaaaccctttgttagcaatgtgcacagtaattagaatgtaaccgtagcatgtctaagcagtagggcgttacaattgcggagtgggttacgattctagtttctttgcaatcaaaatagggtgagttgtgagatggactgcaactttggtttctctgcaaccaaagtggtgtgagttgcagggtgcattgcaattctggtttctccacaactaaggcattgtgagttacaaggtatgatgcaattatcatttctcacaaccaaaacgatgtgagatttagggtgggctacaatgctcgtatctctgcaatcaatttggtgagacgcgttgaccgacgcaaaaagtactttttgtagtagtgtgaaaggtagattatgacaatggtctccctaatgctagagtcctatgagttgtgagatgggttgtaattttaaattgtcaacatgggaatagtatgagttgtggggagggttacgattatgatttctcttaaatggtagcagtgacaattgtgtggtctctaactctccaaggtcgagtggttgacgaagagaaaagaatagtaacaatcatgatttgatgaataaattgtatattattagaaatttgaaaataataataataaaaaatcgtataatagaaaaagactataaaattgaaaaaataaatttaaataataatttttttttccaaattgtagtatatgtggttattttataaatatataattagagcatctctaatagagtgttaaataagtcatgtattatattttttagaacttttcaataaattttttttcaaatagtatactataagctattttaaatttgactcatgcgaaaaattgagtaaaatttaatacaaaatatagcattataccaaaatttgacacacaataagtactatttttatttttatatttgtctttaatcattaatgacatactttaatacactaagttgatgttacgagcaaaatgcacgtataattaattttctttttaattaggttgaataaggtgatatttgttttaattttttttaattaggtattgtattttttttttttaatttttggaatagagcttgagattttgatctttaagaattttttttttagttattgctacattagtgtgtcatttgaatgtgattatatatatatatttttttttaaaattttaaattttttttaattaggtaatgtatctgataatgcatatattgtaatttacttattcttaaccaaaacttacataaccaaatttgagtgtgtcaatatataaattgaattcgtaaatttgatataaaggttttttatttgcaaactttatgaaaaatatggtgtgtgaagtcaatttaaaatataaaataaataataatatagttaaaaatatggttaaaaatat

SEQ ID NO: 18747 - DNA, 2800 bp, Cannabis sativa
  modified_base (2691)..(2710): a, c, t, g, unknown or other
aatttaaaattaaacctataaatttaaaaaattagatttttaacaaacctaaatatctattcaaaaatgtcaactaactaaaaaaaataggtcaaaatatgtatttatggtttaaaaaaaattagagaaaaattttgtacttcttaagaatgagatagaaaacttttgaagatgcttacttagaaatttctaagaatatatatggaattattacatagaaaatataaattaatactttatttaagaatgataaaagcccaatatagattgtggcatgagaagctttgtcaacattgggttgaataacatgaagtggtgctcttgtagtttcttccttgtggatttatggttacattgaatacatggttgctcaagtatgaatattgatccatataactttccaagtacaaaatcaatggattttctctcgacttgttaatgacaaatctcaattgctgaaattttacagtaggaaattgcaacatcctctgtatcccactatggtgccatttgctaccttcttccacacatcatctacatcaaatatttcaaggttaatctcaacaatctgctgctccattttaattgtctctagaattcgtaaaacattgaaggagactagttctttaaagtctataaactaagaccactctgaaaaattcttcttaggtacaggtgccactgtgtattgtgtatataccttcttcaaacggcaatatataagcattgaaacacgagtcttttacccctcttatgctgctggcagaaagtacaacatttgtagctaggttatgtgggaatattaatactttgattgatctcactaagctcttgaatcacttttatatcttcaggtgaaattagacttgaggagtttggaggcacatttagtaacaacagacaatttcttcccgctgatttgtagtatatgtcaacaagagtcaaagcaaattttggaaattctgatgcatgccaaaaccatccaggcctaatggagatatcacactcagctaatacccagtgatgtccatcttggtctctgcctctcgaatatctgttggatttaacattcaagtgtaactttaagaaattgaagaaaagaaatacatttgaagtagttcgaaagcaaatgttaatgctcaagaaaatccaatgtaattatcttttcttaaccataataacaatcacatgaaaactaatggcttattaaatgagattgaataatataattgttagtcgagatgtttggacactaataaaatataaacgaaagctaaagaaatagataaataatgaagaaataacaccatagcttttacgtgattggggcattaatgaactttagtccacgagtcaatattattatgctaagactggaaaagcctgaggatttacacaagtatttgaaccctataatttgcctaagtgattgaggaatgagatttcaaccttttgcatggattggtgctcttatatttatagtgatagggttcttattcattttcattttctcactaatggggtaaatagaaataatatattgactttgggcctatctggtggagcccaacccatgatatgctgattgtaggttgatgtggatgccacatcatattgatagctattcaattcgcgtcctagaatcatagataataaagacatattaaattcttgatactcaattattattttctcatatttgagaagatacaatccgcgcacgagatcttgagagttaaatcctgatatcgtgagatctggtaattaatgagtacgatacggagctggttgtctgaacatctgttgactactatttcagatgctctaaatgatgtcttttagattttcactatactggagggttatataacctagacgagttgcctatccttcatctggaagacttgacttcaataatagatccaatcaataattctgtttgggcctgttattgggcccaaagtatctgagttgtgatcgctattggaattacacatgtctccatctagaaacacggataacatttaccctctaagctttcgggactctagggtttatggaagtttgcacccttcttcttgaatgatgtggggacatgtggaggctaaaggtgaaatcttttttaattccaaacaaaaattgtttgtggttgaaagcttcttatttttttgaaataaagcgacacgtggtattatatctttggctcgtggggcttactttcattaatgtggcacgttcaacaaggtttttgtgaaacaacaattgattgcgtcagtatgtgtatcgaggagaatataatcattgggatatcttgtttccaagcatcgtattaaatgcaaatctgatagttttcctggaccattagatttgtcttgtgttttctttgacatgatcttagccattgacattggatcacgcagatcacctcctttatgtataaatatggtgaaagtccccaatttatcacatttgcccaaatttgaaatagaattcacatttttagagagaaagacaaagacaaacgagagaaccctggagtattacattgatcattgcattcatattcttcttcgtatacacgagcgagcgaatccaggatcaccacccctagttccaactatcgactcttaaacatcataaaaaacactggatattcaggcagaggtcgaagtgttgggttttatgccctannnnnnnnnnnnnnnnnnnnatcagatttacttattaataaagacaagaaataacatttaaatcttgcatggttcacatgatttatttcatgattatttacataatgtat

SEQ ID NO: 18748 - DNA, 2126 bp, Cannabis sativa
tgcaattaaccaagctttgtatctttcgatagatccattcagattatacttaattgtgaatacccatttgcattctgccactcttttgtcagttgctaattcccaagtttcagtttttttaagagctctcatctcgtcattgatggtgattaaacttgatattctactcattaaaataatcagtgttgagtccaaataggactaagatcctatggaaagtagtgtccctttaatgttaaagtattgggttggttagtggcattgggagaagtgagtgttcatgataggatgcaaaagagacgtctttttctttccatatctcctggggtgtttgctgcaagagaagtgaggaagattgttggtttactcgcaaattatggtgtaaactgttagaggaatttgagctggtttgggttttctcaggttactgttccaaatatgatagttagttgagcggttgcaggcggaggagaatactttggaggactgcgattctggctacactttgggttatgtggttagaaagaaattcgagggtattcgaaggctctgaaaattcagaagcacagtcatgggataagatcaagttttggacaagtcccaaatattttgaccaaagatttcgaagaaaaaaagacaagtggcatcttctttttttcaaagaaaaaaagtattgagcccaaagatttcgacccatttttcttactaaataaggcccaagtcccaaataaggaatagcccaatccgactgtgtaagctgcgaaagagttcgcatcgcacacactgagattctccttgtcttgatggaagcatgaacatatttcagttgatgtcatcgaccttctaaaacgggaaatgtatgttgctaacgtcatcgatctacgcacccaaataagctagggcgtaagcggaaagatcaggacccaaaattcaaattaattcttagttagctacatttagcaagttcattgatcttcccgccttctgcagagctctactataaggagtgtgaaaacaataagtaatggggttggttaaataattggattctctctcactaaattcaaattttagttttcatgtgctttctctctctaaactatgaatctcttgtgacaagaatctggtgggatgcaagtggttattcacagtcaaatacaaaactgatggcactatagaaagatacaaggcaagactggttgcgaaagggttcacttaaacttatggggtggacttcagagagatgtttgcagcagtggcggaactaaacgtagtaagaattctcctatcaatagttgctaatattgttttgccattgcaacaatttgatatcaagaacgccttcctaaacgaaaccctagaggaggaggtctatatgaagattcctcttggcttcgaaggaaaatttggtaaagaaaaagtgtcactaaatgaaatctctctatggcttgaagcaattaccacgagcttggtttgataggtttactctattcttcacgcactcaggtaagattgtaattcttattatctatattgatgatatgattctcactggaatgaccttaatggaatggaagagctaaaaaggtttcttgccaaaaaatttgagataaaagttcttggtctgataaaataccttatgggcatggagttgcaagaacaaaacagggtatttcagtctctcaacataagtatgttattgatctgctcaaagggactggtatgcacagatgtaaactagcagcaacacaggtgaaatttaaaggaaagtacaagaagaaagaaaaggagaaacttgtagacaaagggatgtatcaatgactagtgggaagattgatctatttgtctcacaccagacctgacattgcttttgtagttagcttggctagtcgatatatgctcaaccctttagaagaatacctataggcaatttacaggatatcacgatacctaaagaagaccccagggaaaggtttgttattcaggaaaaatgaaagcattcacaaatacagactgggtaagttcgattgaggacaaaagatcgacattaaggtatggggaaaccttgttacttggagaagtaagaaacaatctgttgtcgcaagaagtagtgctgaagttgagct

SEQ ID NO: 18749 - DNA, 1692 bp, Cannabis sativa
  modified_base (1080)..(1081): a, c, t, g, unknown or other
tttataaaaatacagtatttttaaaaagattttcgtgtgacagtatttttgtaaaagtttatttttgtaaatttctctatattatatattgtatagatttatatatatacataattgaatgatttcaggaagtgtacatgtataaaataaatctgtaggagagtaaaatgaataacataaattaagatagagagagagatggaaaagggaggtgtaccaccaatatatttagggcttaagttagggtgcagcaactacagggggatggggacagaacgtatctcatatgcattcaacacaatgggtcccatataaaaagagagaatttgggtcccactttggaaaatgagagattgtacatctaattaagcatcatttgcaagttgcaacccatgcaagaacttccgaacttctcgacctcattcaaggacactttgttacctaacttactatatattttcattaaaattcaaaaacaaatatacgtttcttttggagtaataatgtcttactcgtatatttcgtggggttctatttcaatttaatgatgtctctctctctctctttttgttttttcataattcattttcaattttttcatctggattctccatgtgaatgaagcttttatgaagaggacccccccaatttagggttctgtgtggactccactacctcttttttcctttatgcaattaaattacatcttcccaactttttaaatgtttgttttagaattttgtcctacatttgtgaattcctttcatttttattaatttgtagggaatatgtagtaaggctttaaatgatgagaactgtactgtttttctttctcatttgtggacaaaatgaaaaccttatttacgtacacgacatatatttcctactcttcttatataaatatatatatatatataaattacaaatcgattatttaagtatattattataagattacaatatatacagttaattaatcaaaataatgttatgattaattctatataaaaattatgatctagtagaagctagaaggactatatatatatagataggcacgttatatatatatatatatanntatatatatatataagagtagtagctactacagaaagagagggacacgtacgtaattactattcactgttcattatcactagccctgccatgtaattaaatggggaaatttattctaaaggaaagagcatatatatatatatgtatagtgtttggatgaatctatattatagggatagagagagggctttatttggatgatcagtactaagtacataggaatttatctatattcacaaatgcgacaataggaaaacaacaagaaactcacaaaattaatatggtagttgttttagtgtagttggaaataaatttttgactaatattatatattcatatatttgtgatatatatgacgtaaagtactagggcttaattattttgagagtacgtgacccaaactcgtgtatgatctatctttttgttgtatttttgttttaaacttgatatctaactaattattttatttgaagattaagttaaatattatcacttaaatatatattaatacggacgcatgaatgaggttccatcccaaaaccaattggcaatgggaggagtagccctttcatcttatatatcacaatttttttccacacattagcaatgtgg

SEQ ID NO: 18750 - DNA, 4971 bp, Cannabis sativa
tattattattaatctatatatgttcttttattattgcactatctatcacattatttttacattggcatcctgttattaggataaatgcaagcaacggtcatagttgcatgaaatttcaagtcttattttaaatcataacagtagccccattaatggtcaccatcaaactccacatttatatcttgacgtgactcaccttttgggctttgcatctatagaatagaatactatgggccttatttaaagcccattgggacggttatgtgcctaaaatgacacatttctctctctctctctctcttgtgtgtgtggcaattttttgtttacattaagagactgtttggttatgttttcaaaatttttagaattttgattttgaaaattagaataaaaaataatttttttgtcattttacaaatttaataatgtttagctaatattttgtaaaaactatttttagattttttttactaaaaaaaattcaataatctaccatgatatgaactcagtcccaccccaaatctggacctgaccccaaaccctacccgcaccttgaatctggaccctgaatcgagaccgagacccggtgcctagatccggtcctggccccaaatatgtaagagaaaatatataaaaaataaaaaatgttagacaaaaaaataaaaattatttttaaaaatagaaaacaatatataatttttttttagttttttactcagttttcataaaattatttttattagtttttaaaaaaatgtttttcttacagtttttcttttttaattagtatatttttcttacaaactcccacaaaaagaacatgaaaacaatatactataaatataaaagcaatatgaaaataatataaaagtaacatagtataaatatttggtgaaaacgatataaaacagctgtctgtattcttgtaaaaaaaaatagcattttaatattttataatttttaataaactataaatttgtattttttataatatcttaatctttttttggttaattatgaaaagaaaataaaaatcaatgtttgtcattggacaactgagcccaacgcaatgatgttttctgcatttgaaaacagaactgacaaagcccgttgggcttgtcaagggttgtgcactacagtggacagtagagcccaaataagtgcccaaaaaggagctgggctttgttgtttgtaataaagctaaggtatttgagtccaacaaaatacccgatagaaacatggctttgtttgtcacttttaactattttttatgacaatttacatttattattgtttttgtgggtttcttttgtttaattttagaaggttttgttgtaatactatattttagcattaaagaaaattagttctcgtatacactaaatcttgtgcgaaatttagttcatgttaaaagtaatataaaattttgcacaaaatataatgttatgccaaatttaacacacaataaatacacattttttaattacaattttacgattgattattaatgataagttttaatacatattttttattacaatattaccaataattacttttttaatatttaatttattgataactattattgctattttacgttttgttataatttgcttatgttattgtgtattcgagcacaataataaatattataacaaatatagcatttgttagtttttattgtgtcaaatttagcactagaggatggtcttaaagttaatgagtaaaagtaaaagtatagctttttcaaaattaattttagaatcggtagaaatatggttaaactatattttaatatggttttattccactttcaaccattccaacaaacttgttatgtaataaccaggagttttaaatttaccaatctaatataagtacgctttttattcaaaaaaaaaaaaaccatatttaatatggtaactactataaagttatattcataaaaagctctctctttttttgtatatttgaaaacaaaattgacaaaacccatcagcctcgttaagtaattgagcccataaaaatgtccgttttgtgtaatgtttttgttttgttttttctcaggataattttctaactggaactgaaactgatgaaaaaaaatccatggctttaattagctgaaaaatcctgaattgactttctacagacaatggtcatggctttggcaattcgagctccaacatgtctgtgttcttcttcttcgtccacttacataaaacccaccatctttaatttctcttcttcagtaagcttgcacccaaaaacctcaagattgcagctcttttcgctgtttcctcctctgggtctcggttccttttcaacatggagtggtttgaagcatctgggtgtttcagttaagtggagatctttgaatttaggtaagaaaataataatctttttgtggtctagattgctgtttgattactcatttgagtttatttgctgggttgtaagattttgtaatatgattgtggtgttgcagagaagaagaagtgtaaagatagggctgcttatgcttctctttttggggttggagctcctgaggctctggtgattggagtggttgctttgttagtttttggtccaaaaggtctggctgaggttagttgccacttccattggtgaaacgttcagattgtcgtttttccccttttttatttgtttatctttctttttattagctattaaattagatgaattctggattttgggtataattcttgctttttgtatgtgtgtcatgtgtggaagtatgacaaggaatattgaattacagtaatgtttatcttaatttatatatacgatggaaattctagtatataaaataaaagtattaatactttgatttttgaaattggagaatggagaactaatcatttagttatccaacttcacttagtgttgttaaagtttgagtttccatgtgaaattactgaaacaaacttaaaagaaaaatgaaatatgttagtagaggatggttataatcttgatattgctcatatagcatgtggaatctaacctatggtattggtaatctgttaattgcaatatattcttgtatgaacatcttgcagactatatctgtatgcaattagaacagcataaagacacgactatctttcaaatcctacagttttcgagatcattttatcatcgaaattatgtctagtttctaaagtatttgtttggcatcacatcacacaggttgctcgcagtctagggaagacattacgtgcttttcagcccaccattaaagaacttcaggtacatttgtagcatgagttttgactctgtttataaattattacctttgttttgaagaaggttgattccaggattattaatttgccttttacatgtaggaagtttctagggaattcaagagcacacttgaaaaggagattggtttggatgaaatttcaaattcaagtccaagaatagatccataccaaaccaacactactttcaactcttcagtttccagcacccaggaacccaagattgctgccgaccccagtaagtgatttgagcttctgaaattaatggctagttgcaatttacattgtatattcatacagtacattttcattgttagaccctatttagtagggaacatatataattggtacaaggcacactatgagtggtttcactactgtggcttcatataatgatctatcaactcccgttgtgtatttttcatatacaattattccattgataatatcaattcatgattcctaagactgtagttttgggacataggcaacctcttcagtatttatttgtgtttcagaaattaaggagctacaattcatgtgtcttgttgatttaataaatcttgtgtcacataaactgctcatggctcacgaattttagaaattaaatagaggaaagatatgaaactcttgtagtcactaatacaaattatcattaatgctattcatgatattcattgtttactctgtcgacaagctagggggtgaaaccatcaaagttgttacatgtaagtaaatagcaagtctgtattcatttttgctcagttaggcagggctttcgcccatatgtaatctataattacataagatatgaccattttgtttcaactttaaaattctcatcagtggcaatggttgcggctggaagtaaattctaaatcatgcttgatgaactttcacggttatatctttctcttaaagcgatctgaaactgaaactgaaatcttacaggtagcaggagttctcccccagctaatgcttataccactgaggagttattgaaaattacagaagagcaacttaaagcatctgctgctcaacagcaagaacagacatctcctcaatcagaaagccctgttgaaactccaacgaaccctcaaaacgttggagaacagccaccaaatgaagctccagttaaggaaactgctggtggaacaccctcaaatcaataatctggaatcaaaatgtgaagcctgcttgaaaattaacaagtccttctgcagtaccctcagtagcaaacacgtgagatgtcatataaacatgagttaggattgtttcttctcatattcaagtttggggcttgagttagagagtcttgtatttcatcataatagatagccatgcaaaatttttctttcctaaattcattgtagagtactcttttggttcccataaccacgcaagatatcctaaattgtttagaatgaattactattgttattgttattttttgttggggtcataataaataagtgcaatttaaggataatgactcttatcccttaatttctcattatagatttttttctaaatatgaaatagcaacttcattgaaatattagcattgttaaaagagtttctaaataagcttaaacattatgttcaaaaatgctacgaccagagagaaatctagagtgtcttaccacaacatgagcaacttgatttgttaatcgtctgataaaac

SEQ ID NO: 18751 - DNA, 7818 bp, Cannabis sativa
agctttgaattgtctttctaagaatttctattcatagttaccaacttaatccaaaataaataaataaaattgaaaaagcaaaattaattaacagtaaggtatttgttattctttccttatgtagatgggtacaatattaatttcctccagctagaagattgaccaaagaccaaaaaaaaaaaatgatataattggtatatagaaacctggatgtgtcgaaggatcttttcgtgtttcgtgttttgtgttttgtttggtctggtcttttttcttttgtgcttattctctttaactggttggtccacaattttaaatgattgtcttacatgtgacatgtgttgtttgttttaattttcaggtaattccatttaagtttctctaagtttaacgtaattgtggttccgaagtttcatagcacaccagatagaaacaatggggaaacatttacagaggaatgactccattgctgagggaaactatccaggctgtttgtgtggcataatgcattttcttgaccatcatcattggcaaagtgtcaaaaacttgatcccacataaaaagaacggtggtaaaagacgcatcaaatgtaaattctctcatctttttatttatttatgtttttcttttactgttattttcatttcctcatttctttcatacatgtgagattatgtaaactatatctgtaaaagctttgagaatgaaagcgtttgtgaacttgtgacttggcagttttatctgtttatgctgcacatctatacttctcttgaattatgaacttatagcattaagttatgatgtttgtagacaaaggaaaaaagaaaagaatttcgaagaacagtggctctgatgaagtgtttattgttgattcagctgatgcagaaccctttcttgtaagttattatggtatagcattgatgtttaaactgaatgaaagttgctcatattggttggttttcttaatctttatataaagctcctaaatgcatgagttaaattgaatatttcaggtcaagcaacagagtacagattcagttcccgcaaggggaagatctggaaaatctcgagttaaaccgcatagaggctggattctgagcttcccattgcagtcatggctgcaaagagctaatccagtcgatttagaatcttcggaaaattatataggtcatacaggtaatggtaagagaaaatcaggcagtgtccctcagagtagtggtactgcaaataatacaagaaagcaggttctttgtgcagaacataatagtgatacagtaaaagatagccagcttagtgcagatatatccaatcagaaacatctcaatgaatgtgttgacatactggagatattcaaggttaacaaggaattttttttgaagttactccaggatccggatgttggcaaaaaccaattccatggcctcaagaattccaatatcaaggtccgtttaaacaaatcaagatcatttccagtacccaattattcacaaacaagaaatataaggcctattagtacacttaagcacaagcaaaatgaagtttggttcttccttaatggagaaaaatcaatagcaggggctcaagcacaacagttggaaggttcagaatttcaaaatgatcaatatacaaacgccataacaggtgatgttgataaaatagacagtgtcaataaccatggatggaatcagttggtcttggaccgtttcagaattatcaagcagaaaataaagcaagcactcaaggaaagcaaaacagaaaatggccacactactgaagctggtatgctaagtgacattttcgaaggtagaaaatctatcaatgggagagagatgtctgaaagattggagataactattggccaagatggtaacaagattgataattcgaatgatgatcttagaatgcaaagactccaacgtgtgagacgaacaacttctctaaacgaatcattagatagatatactcagttgtttgagcacacttctggtagtaagaaagtgcctaattacagccactctaggagcttaagagtgacaattgaagagaaagttccttctaatactcgaaaaaactgcagaaggaatctctcccttcctgatctcgacgacttttcttcctttctgaatggtgcatcccatgacgcatttttccgtttaggaatgccgattaagactctaatggctggtagtcatagcacaagtaaagacagagacaatcatagtggaccatatcactctgaacccttggagcctgttcaagagattgaattgcaggaaagtgaaagcagtgcaaattttggatacacagacagtttaactgtggatggaagtaaaaagagagcctctatcacagacaccattgttaaggatgaagacaagtcagctacagctagagaaagcagtgataaccaagaggaagaaattaatgtgacaatggatccaaaagaagagcttttacatgaaaattatgaatcagttattgaaaatcgtctttctaattatttaaccagctctactgagttccccacttcagaaggtaatcacaagtttttgttaattctcaaactttttagctaacagctaagttgacagtctcaaggcttatctataagctaaaatgtatcttgttgtgttcattactctcatggctaataaaactgtttcagaaataaaaatcacaaccagaggcagcaacttgtcttgtcactttgagaccgaaaatgcagacttcaactacgttcaatttctactcaaagtgtctggcttcacgagcaacgacgagcatgattggacatggcactcggtagaccaaccactaagtccttcccttttcaaggagatggaagaagaggaggactgctttggccatgatctcatcattagtgaacaagaggaacaagaagaagaagaagctgcagacactactggcttcatcaatcgccacattctgtttgacttggtgaacgagacacttggagatatgattgagaaatcgtatacatacttccccggagggttttcatcgttcgggtcatcaattcgtggaacacctaaggggcaacatctagtggacgaggtttgggaaagaacgagcagaagtttgagggtgaggccggagttggaccagacactggacgatgtggtgggtcgagacttgaccaagggagatggttggatgaacatacagtgggagatggaaacagtgacgcttgaacttgaggatttgatcttttatcaattattggatgaaataatgttttgattcttcttcttcttttcatttttcaacatgaaattttgtaatacagttacagtatgcatatgtaaatatatagatatatatatttcttgatcaaactaggtaggataaacataaaataagcaattcaatcatcaaattttaataaattaccttaattctgttgtttttttagcttttataagtttgtaactttttttattttagagaagatggacattcggacaaagtccattacataaacatataacttatagagcaaaattaagcataatagacttaccaagtggtctacaataaaatgaaaaaaaactccaagaacaacctcaactaaaaatctaataaactcccagcaatcaaacataaaaaaaagtgtgaagaaaattaggttttcaaatcaaatgaacatgtaaccgaatcaacctatcaatgacaatcaactaatgatctttcaataataattgggacataacaatcacattattcatatacgaaataagagaaataatcaaacgatcaactatggcaaagcatccaaaagaactgaacaccacgaaacatagggccaatagatagatctggccaaaaaagagaaaaatatctctccctcaccgaagtaatttgatccaatcaatgaaacatcgacgcaccaaataagagcaaactccactccatttgccaaaatcatattaatcgctactcatctataagagcggtcccaaaacaccattattgcagaattaaaactaatatgaaatatcataaaactaaaccaactgaagaaattaaaacaaggcccaaggggcacacctactaccaaagttattcttatttttatgatttcttcattgttttggtattgtaaatcttaatctaaattgtcatctttaggaataagtcaattagatttcacatttacaaaatacttatcttacacgagctaatactattaaattgtcaaacagatgaccatctgttagggatgtgtccatttgaaaataattactaagtgtgatcaataatgaagatttgaaatcgatactacataatcaataacaaaaatcaatgctatgttcaatataaattcttactacatatttagaaaattgtaatacacataatcaaatatggaagatataagaaaaatactaaaataaaatatatttcaaattttttaaggttttaaatcaaatgatatataatgtcccgtattgggcgagatgcaaagatataaatagttaaaccgagtagtgagctcttctgaaatgaacacatttttgcaatcttttattcaattaaaataagaatcaaacggtgtccccctatttatcaatttattttaatatatttattaaaattactaactttggttacaaaaattaattttacattccaagtataaattttgatctatattaatgaaaattactaacttaagaatttcaagaataaataaatttatttttgaaccttagtataaattttcaaattaaaataaatttctatgaaattaataaatttaggtaggtcctaaattaataaattaattttctacccaaatataaaaattttaataaaattatcactttagtatttcataaaattaattattaaaattaattttcaatacttaagtattaatttcctattgaaataaatgtatgaaaaaatactaacttaagttgatctaaaattaataaaaagaatttataacttaagtattatttttcttatttatttatgttaatctatacatttatttaaagaaaatacccatttagataaattaaaaataaatttaatttaatatttataaaattataacttaagttgttctgaaaattaataaaatatattgttcttccttagtttaaatttcaaagaaatattataaaaattaggtctaaaattaattaaattaattaatttccaacacaaatttaattttctcaaaatatatataattagtttccaaattctaatatattttaaattatacatattaaaaattcaaagtaaaataaaataaaataaattttgaaaactacaataatttatgttaatataaaattaataaaaaattaactttcaacacaaatataattttctcatttaattaaatatcacaaattatccattatttaagtatcttgattcttagaagaaaaaatcaacttcaatattaatttgatttataattgtatacatagaaaaaaatacaaactattttacctaaaaattagttatctagaattatttcttaaactaaatgttgattttttaaattaattcaaaagtaatccattcaaaaactaatttcaaatatttttagaattatatatgttgctaataaattttaataagttaaactaatgtaattagcataatacaattgtttaaacaaggcaaatgagtcttcataattgaggttgtccatgtgaggaaaggttatgttcagtatatcatactcaataataacagactcataactctcgcacaaggcccaaagaagagaaatttaacttttatttaaataattattattcattggatatacccattactaatcgggcttaaataaaatctatgtgattattttagtggtcaacctggttcatttagttatcaaaaaatttgggccactatatgcatctaagcccattaaacaaacatattgtccatataacaagttaatttgaatgagacctatcatgtttctaagtttatgcacatatgaaagaaatgtgaaaaaatataccttggttacaaattattttattgatttattaataattaactatgattaaatttagatcatgagatccatttacaagttaatcataatcatttaaatcaattaaataataggttttatcaaattattgatataattggtaaaaatctattaacaggttaaatatagttaatttggattattggatctattaacaagttaaccatagttaatttatattttatcaataaattaattcataaaaaaaaaagaaaaaaataaacacacatgtaacaaaaaggattgagatatttaataattataggattaaaatatcattaaatttaaccaactaattttgaaaagctaaggttgttaaaataatccaaaatatccttttcaaaattttaatttcaactaaaattaaaatatctaagttattttaaaattattttaaataaattaaataactaacaatataaataacataatatttataactagctacgatatgttggacacagttaagaaaatttcattttgtaaataaaataataaattaatgataaattttaaaatcatgtctaattatgctaaaatatttccattttaaccatttcaaaatttctacaaaaatatttatgttatttaaatgtataattataaatttttgataggtaaaatgatataatattatatttttaatatcaattttctaacttatgattttttcaataataaattatataataaaaatttaatttttgaattaaaaatattttcttaagatattcataaattttctaaattggtttcaaattttattattatttaattatcatataagataattagaaatataatattttaaattaaaagataatgttatcttttaattaacatatatatttaatattaaaaatatttaattttataaattaaaataatgttaaaattaacaaatcgaataaattttaaatttatacaataatattatatatacaagaattttttttttaatttaaacttcaaaatatcaaaaattaataataaaatattaaccgaatgagatattattaatttccaaaatgatatttatgttaaaatatataaaaaaaatggtattttatattaaattttaggatttttaggatttttaggattttaaatttcaaaaaattaaaatttagatgaaggaatcacaaaaatccaattttgggtgacaaagtcaccttgtccgagcatggaggctcctagaactgagaatctcggtccttgctcgagcaacactgtaacgccctattctatagggaggccacgtgtgtgattttacaaactagtttaatactaatatattaattaattattaaaaaccacgagaattaaggttaaatatcggtcggtttggttggttttcttttccgtataaaaattcagaattcagttttcggtctggattggtgcaatacgaaaatcgaccgactaatctagaacatatcttaaaattgactgttttgaatctcagtttggtcgttttaaaccacccaaatcgaacttctttttcttctttaatatatgatctaatttattctataaacatattattctacattttacaactacaaacatacaaattaattattcaaaaactaattatcttattcttgtaactttaatattaataaaataataatatattattagtaactacaatacataatgcaacaaaaaaaacttaataaattaatatatatgtttgctataggcccttcgagtacccatccaggtatcaattggataagcttatgcattttggaccatcccggttc

SEQ ID NO: 18752 - DNA, 2204 bp, Cannabis sativa
attagaatactttgtgaacacccctactagtagcgaaaccaccaccactaagctggccagagaatttttcatggaaagaaagaggttattgctagtgaaaatgagagagaaaggaagtagtagaaaaaacataaagcagaaaaaaatttaaattaaaataaaaactttttgaatggatataaagttatattggtaagaaactatgaaaatattgtataattataattatccgataaattaaggttattttgtggaatttcacatattcttgagaaagttaaaaattgcccacaaacattaatttagaatagaaaaagagaatacaggtgaataagcacaccaaagcacacttatcatttctgcgcacttatcatttccatcttccttcatggttcaagccagtttagcaatgttacatacgtagcgagctgttaattttttttattttttattttctgtttcaaacaaacaaagaacgaaagaaccaagacccaacgaaggaaaaaaaaacattatatagtccactatgaaaggaagacaagttagtcttcaactgatccttttattttgggtctgagtctaaaactgacttgatatgctgaaaaacaagttaccaaacccctcagtttctccgcttctgtacttaaattcactaaacggccaactggattatgtaaaagactgaaactttatcctctacacattgtttgatggatttcctggccaactggattatgtaaaagactgaaactttatcctctacccatagtttgatggatttcctagccttaccggtctatgctggaccctctcatagtggtgtgggtcctcactcaccagctggacctctctctcgagaagtaaaacaaaaatttcatgggaaaccaaacacttccgaaaggttctttaggtcccaagattgaacattttgggacataacagctgcaccagctacaagtgcgatggacacaaacaccatgctttttaagcatccatggccccgcgtcagtcgtcccaaaagtgctttgctgtacttttccgcttccttcaacaaagcatgatgtgcactgtctcctttgttcgttaattccttgagattctgatgaaaaccgataatgaatataacaattacacttaatcgtgacaacattgaaatctgaaaatattgatcttagatattgctagtattaaatactcatgaattcataacatttttatagtggtcatttgttcatccattgaagcttcagcaaaactgtcgtttaaaaggttagggggctgtttggcttcataacttaaaaactgtttttagtttttaaaaacagtaaacagtttttaaaacatcaaaatgttatcaattttcaaaacaattttttttgtctaacatattatattttatatttttgctcacatactcggatcctacacctggaccccaatagattcatattatggtatggtgttaaattattgatttttttttaggaagaaaaagattaaaaatagttttaaaaaacttatgccaagcaccattaaatttttaaaatgacaaaaaactgttttctatttacacttttaaaaactgaaaactgaaaatacaaccaaacaagctctaagagatggactttaccttttgcctaaagctcttcaatgtttccctcaaagggtcaagagtaagatgtttaactgagtgcgccttccattcaccagtcagctttctcaatactacaacactcgattcaagattttcaaggtacatcatgtcctattttgagtatttcaacagagcagtgtaaaccaaatgtgttaaaatcaggatgtaggcagtagatttaaattatgtatacacatgaaaaattgatactaaattattgtggtaagtttttcaaaaaacaattgtttatggaaagagtatatttaaaaatacataataataatatagaatttaaggtaataattttaaaactcgagaattctacttaaaaaagtcatagaaatataaatacaattacgaataaaaaaaaaatctacttaatattattttcaaaataataaaggaatgagaatttaatatacaatgatatagtttattttttattttgagagaaaatgatattgtttatatacatatctattttttcaaaaattcaagggtgacttttatattttttttaggctaattagcaattttttccccgaacttt

SEQ ID NO: 18753 - DNA, 2755 bp, Cannabis sativa
aaaaaaatgggaatttcaacttgattatagacaagcataagaaaatgatacagtcaaaacaactaaaaaaaactagctactgatcgaatcctagcaccgtacaacaacagaaaatttatctggcagtacatgtaaatgctcctcgggacggtgaatccagtacatatgttactaattgagatataaacttgagttagctattacctctccaaatgcacccttcccaatcattgttaatggctcaaaatcatcagcacccattttatgcctttgaagacgcatgtattccgtttccttcttctccaaatacttgagtaagttgctctgctcttcctcggagacttcagcatctgccaacttcttctcaagtacattacgtctgtattacacaaaatgcaatcactccaaatgactaagaattgaaaaaagataaccattgcttcatagcataaacagctgcatgttatatttaagacttcgaaattttagcttctctcaactcacaagagagttttaccataacattgccagcatcatttccagtagctattttgttattttcaatagtcagtgcattaaagtacattcaatccgaattttctatctcatatcccaccaagataatatgcaatgcctaaaatgattgataaccatactaatgccattagtccatgaaatgaacaaagcaaacatgcaaaacaattgaaaagtgaactccgaagttaaaaagtaactcaaaaagcataaaaaaccataccgttctctcctctcctgtaagcttttcatctgcttcttgtaatgattttctatatactgctttgcagctgcgaccttctgtttcgttacagttgaaggtacttcttcacttgcaggtgctttcaatccctctttcacattgcttgttgttgtagtttccttgcttttcgatgacctcaccttttcctttgatttcaacttattgacccaagccctcacagtgtccattattgaattcaacttataacactatacgcccttgtgaatcaacacttctacacatacatttcgattccccgaaaattgaagggactgcagctcaaaacgaaatctataacattttgcagatgacaattctgcaatggtaacaaaaagtctcttactttttgagtctcaatcaaaaataccccaatcgaaagacaacataaacaacaaaataatcagctaaacagccttttaatatggaaaaacaatccaaaataaataatagaaacatacccagaaagaatcactgagaaatttaatatggtaactaaatttttttcaaaactaaaactttgtacctaaaagtcctaaatatagaatacgatgagtaagttacaaacaaaacgtaaacaattttcagttttatgttaaaaactcaaaatcaaacgatcaaacaaaagtacaaaaacaaatcctaacaattcttttatatgtaaacaaaaacaagaacaaacccatcaatcaaaaatacattaagttcaactccaaatctctcttcaaaacaagtacatttcctgtggttattctcataaataaaccaaactaaaaacaaaaacccgatcaagcagaaccatttagtaaaaaaagaaaagaaaaaatacccaaataatcaaaccatgaaaagatttcattttgaaccctaaattgaaaaaccaactaaattagcagataacccaaatcagaaagctcgaaaaagcttggtcagatacaataaaaaagtaaaaaaaaaaaatcagtacctgatgaagaaaaacagcagtagaagcaacaaaagataaccctaaaagcaaaaatggaaaatttagggttagagtgaagagcttatagtagagagaagagaagggaagcccttggtttcttcatcattctgatgataccacccatttcattcattgctttccctttgggtttttttttttaaaaaatttatttaattaaatttaattttggacaaaagtttcaactgctgctttttatagttcctttgactttattagattggtttttaatttttattaattaaatcaataacttaaattaaattaaatttaatcatttttatgttttaaatgttcacgattactgcgtgtttgtacaattgtacgttttcttttttctattttttattttataatttttaaatcatgaatttttgtttatttatttatagtattttttgttttaagggtgagaattgagattaatagtaagatttaatttgtggggacaaataccaaattcatttatgtttttcagcattttttttttgttcaataaaaaaaaaaaaataatttaagagtatatattgaaaaagatatatgtattttatttttatatgagtgaaatagtaaaattctaaataaagaatatgattatctaagcaaaattctctaaaattgttatatctttaatcaaaaaggatggaacatattactattgttatttatttaaaatgaattataaattattatgagtatataattcatgtatgttataaaaaatttatgcaagactctctctattaaataatgaaattactttaagctcaatttttgataatataaatttaattgtaacctcatcttggttatatttttctttttacatgtattgagacttcaaattaattatattaaaaaagtgaataaatatgatttttgtccttgaattataacatttgtagaattttggcctttaaattttctttttgttgtaaatttttttctcggacaat

SEQ ID NO: 18754 - DNA, 4231 bp, Cannabis sativa
cacgaaactacttactgtcacagtgactttattttttctcaataacattgtactccatataatgaataatttctctcagttggggttattttgatctttttgatccaatgtgcgaaaatagtacaatacatttatcttaaaaataaagaaaatgcggaagaagaaatgaaactggctagttgttagtattgataaacattatatttgtctcaacaattggataaaattccatcaattaatgtaactatatagagatgtagagagattagaaaggaaaatatatgagtgaacgactaatatggaaaatataaaaaatgagaaatgtttcttatataaattaacaatgagaaaaatgagcaagtaaaataaaaaaaaaaaaaaatacgaacacacatacaaattcacaacactccaattcaaaaataatgttttcctaagcaaaaaaatattttcctatctcagtcccaagctagatctcgaacccagaccccaatcttcgatgcagacttcagaccttgggtcccataacctaaacctagtcctgaccctgcacccgaacccacaatcgacctcaaccccagacccaaccctagccccgaaatcagactttaaacatgtccctatccccagggccgggcctgagctaaggctaactacgcctgcgcttagggcccacccacctaagtcccaaaatcatttttttccttgaaaaatataaatactttttagtattttctaaaaataccacatatttcttccttgagggcccaataatatttttttttgtcacaatagaattcataaaatttcagggtcggcactgctgctgtccctaccttgacctcgaaccaggaccccgatcctgtccttaacctcgacccacaattaacccgaacatggaccttgacccataatgcagacacgtcccccgacccaacaccaaccatcagcctcatccctatcacccaaccacgaccctagccctgctcccaaccttgacactggacctaaagcttgaactctgccctagccatgtcatcgaactcaaactcaaacctagaccttgacccgaaactcgaagcttgaccccaaccctcaacccaaactcaacccctcgcctggcccccaaacccccaacctcagactaggcgctcatcctaggggtgtacattgatacccgaaactcgaaactcacacgaaacccattcgacctgaaattcaaaaaacctgaaaaaattgggtgtcaattttagtacaccgggtttaggtgtaacttggttatgtaccggcccgagttcagatttaatatttttgaaacccacctgaaacccaattaatttattttattttttttatttttatgtatatataatattatataattatattatatatttttttaattgtgtatttgtgagtgtgtgttacattgttaatgtgttagtttatgtaatatggtatataataatatattatataattgtattattttgaaattttttttgttaaaaaagtgatttttattttaaaaagcctagcctaccccgaaacctgacccaatctgcccaaacccgtcccaatcgaaacccgacccacccgaactggaaacccaaaaaactcggtctccatacggttgggttcgatgccaagattccaaaacccgaacccaaaaacccacccaatgtgcacccctacctcagcctcgaccctagagcccggacctcgatcgactcaatccatgcgtcgccgcgatcttagagcccgaagcggcccctcactcggcccatgaccctcaaccctggactaggccctcaaccttgacccagagcctggacctcaactctatccctgcgtgaccgcgatctcagagccaggcttcgtccccaaccttgtccccaactccatttaccacaatacatcctacattaataaatatgggttgtgttaaaattaagtattaattgtaataattaatacgatacaacttatgtttcaaatataataatttactaagatttaatacaatatggaaggcttttaaagtaccaaacaaaccctctaatttatcattgttagttcttggcttgaatcactttaatataattttgactctacttgaaaattatttatacacaaaggttaattaataaaattaagatatataattaataccttaatagatagtgacattctagctaagaaaaggatacgtttatgaataatcatataaaaatctaaatctgtagatgatattagtttgtaaatgttattaaataactttgaatcattcatttcaagataaataccattaacaccataatataaataataaaaaaagtaataataataaaaagctaggagccatcaacttattgtgaatggcaagttagggaaaatatatctataattaaaacaaatccttgtcttatattttgtttttcatgtgttctattatatatattttgacattttctcatgaagtaaaccatcatgatctcttgattatatttaaaactatattacatataattattaatttaccctacttttccattcctatttatagctgccatttcttgcatatgttataccaaacaaaaccacacaacaattatatttattaataattctccaaaatgagtatccatagtactcgtagagttacaataagtgtagtcactttgtttgttttattgggattggtaatgggtacttatgcctctagagctctccttcataatgatggtataaatagtggtgcagcagctgcatatggaagtggaattaatggtgcaacacaatatggagttggtggtggtattgaaggagctggtggcgcagccggaggcgaatatggcgggggtggtatgggaggaggagaaggagaagctggtggtagcggtggcagcagtagcggcggcagcagtatcgggtttgctgctaaagaggaatatgcaactaataacagaggtggtggccttcagtagccatagtggctatgcttcatatgaaataaaaatttgtgtatttaacagttggagagagagctcattcttactctcattagtactaaaaataatagtatgagtagtaagagttatatttatatcagattaccaatgccaacgttatatgataaaaaagttgtatttctcttttgtataataattttgcattctgattctatatactttacaagtttatgaatctatgttcacttataatattataaaaagtaatttgtggcataaattcttaagtttaaattttaattgtaaataaatacttaagtttaatttttagtggttataatccctgagttataattctaaaaattctgtaggtacctagatgttaattaagtattaagtaaattactacgtgataatcctagagtggtgtcattaaatttttattttttaaaaaaattagcttaaatataccaataagaaaatgacacgtggatataataacttaacatttaactgtcatgtacctacagagttctaaaaatatagcttaggcattattgtgaaagacagagctcgagtgagccaagaggtgatgagacttgctccaaagttaacttctgaacatactaacattctccaagttgagtttacagctcaagaagttaaagatgctattttctctattcctggaatgaaatctctagggctggatggatttggcagtagtttttatcacgataattgcgatttggtgggttctgaagtggtggttgttgtaatatctctttttaatttcagggaagatttttaaggaaatcgatgcaactactatcactctcatccctaaaacaagctgtccaaaaattgtcggtgactttcggctaatttcctacagtaatgtggtatacaagacagtttcaaaagttctttgttcgacattaagaaaggtaattcctgacttaattgctgaaaactagagtgaatttgtgcatgatagatatatagctcacaatattatactgtgggaagacattgtgaggctatatggtagaaagaatttcaagcctagttgtatgatcaagattggtttgtggaaagccgatgacattattgactatgacttttctcagagattcattgatttaattatggtatgtataaaaacttgtagattcttattattactcaatggttcttcacaaggattttttgcagccaaaagaggactctcactactacaaaattgatttttagtgaca

SEQ ID NO: 18755 - DNA, 2677 bp, Cannabis sativa
catggtccaaccatcagacctctctctcttcctctttctgaaatctgaaaaaaaaaaaaaaaagaaaaaaaaaaaaacccacactaccatataaattttgcacttttacaccaagacctaaagagagatagaaatattattattacagtatacttacgatgaaaggttggagacaatgacaatgatctttttattttctgttttgatcttagatcaatggaaacattattaagagtagtcattatgtttgttatacagatcaaaattatatctgaaataatagatctatatgtataaatagaaaatgcatgcatggatgcgtcttttcattttccgcggtgataatttattaaataattgcacctttttatgtaatgtttattatataccttgggactagctagctaggatatgtaggatcatttcaccattatcactacatttatagctaataataattaataaaacccatctcctctcccttgattagtaatgtcatgttcccctcctctaatcaaataattatttattattaatttgaacaaattatatttattgttttgtcttttcggttcacctgcggtattgatgattgggttgccataaagatgttttcctaagtatcaataaggatggggaaggtggtgtaccgaggagctctcttccgagaattttgtgggtcggcatttttcaattttctcttctttctatttttgttgttgttgttgtcgtttccattgaatttggacttttaccaccattgttgttattactattcatattctcttgtagttgagaattttggttgtcttggataggggcttcagggctctttcctacactggtattgccatggtgaacgttatcgactcttcattccacctcttcaagttttatgaacacaccagcttgatctataaattcttccattgaccccatcgtgagccttttgatgtcgaaccaagtctccctttgggctcaatccaacctaagactgttgccaatcgtccttcgtgagtcaaagcttttaccttggtggcttctgtcatgaattattggatataatttttaagggttctctcggtatttgttttgcttagaccaagtctttgaggtgagcaagtagttggcatgaggaggagatttgagtgtaaaactcagatgcaaaaggcattacatgagtcaaatttctcaggtgtcaatttaaaccactattgcgcgaactctaccaaaattgctgggaagatccaacacttgacatccccttttactcattgcaggtcggtatgtatctcaaaatacttgatgtgggacataggattttctttttctaaattgcattttgaacttggtcgtaatttctaaggaattgatcttaggagagaatggagaacctcgacttcgatcgagttctagctaggtcagtgagttttgggccagtcaggcttttaagtaaatctaatgggcttgtacccctggatctatttgtgccacctgttgaccgacctgtgtcaccggttgtttacttggaactctgtttggtacaaagttccttggttattttggacaaagttgccctgattgttcggctggaatttccctttggtggggcaaagtttgattcccgattttctcttcttctattcaggtcatcttgtaagtcatcgccaggcctcaaacccatccttcgaaacacagaatcagtcatgggtctcccaacaacattttgtctttatgtcctttcttgcctcgggggatttccaccattgtggccattattgcgattattctggtcatcattatgattgttgttttgatcggcatgaaaattttcacaccttttgttgtcaattgtcatctcaagctcgacttttagcctcgtcatcgtcatatccattatagtattgtcaacgactagagactttggggtcatctatccttctctaaatttgatgttgtttttgggcgttgtttcgacgttaatcatacactcggaccccttggtttccctgttgtgggatgactcgtccccatgaacctccagcgggttaagttggcacctcatttcttcttccttttgacctgggtcagaaatttttttgattattttgcccaaggtaatgtctaggcaagacttgttcatatgtgggtggcctctattggtcattcaaatgtcccctctgacctagatgaccaatccctcgactaggccttggttggtttttagaaagttcttttagctcataggcgagaccttttcccttattgttgttttccctaggcagctgagcgttagtttgttgccgccagcttgctgtgtaaattgtttgatgagttatgtggcctgtctcacctgacagttgatctcttcctactaggctcgcatctcttgggcattatgatccatccactcctaaaacttgcgtcgctgctggtcgaaggcttgattcattgtggcacgagtctctcctggtcatggtggaggcagttagtgtggcttgggacctgccctagaacttctcagaaattttctatcttcgcattatctcccaagtcgacattaggttctccaacagaaaggttggccagtcccgactccagtttctccagcgtacgacctgctttgtttccaaactcctgcacaccaggagtaaatttgtgggtgccaatggtgatc

SEQ ID NO: 18756 - DNA, 2175 bp, Cannabis sativa
  modified_base (1926)..(1943): a, c, t, g, unknown or other
aaaaaaaaaaaaaaaagaagacgatagacagagaaaacgaaaggggtaattcccagatttcaagattgaaaaagaaaaaaaaaaaacccaattcgataattactcgattacacacaaaaccaaccttatccatcagatagggaccgacccatttgatacaaaccccggtcaacaaaaccacgcatgcaatcagcacaatcaaacgaacccaataccaccaaggccttctttttacagaagaagattcttccaacgagtcatctaactcctccgccggcacacattctcccggtccagtcttcaatttcacataacatccattctcaacatcgccctcaaatcggatccccaggaccggtaccacctcgtctctactatcttcctcataataagtcatggaaaccccccaatacacaatcaacaacacagaagcccctttgtcccctccggtatctacaaatacatatatttacaattccctctctaatgtggatctcgaatcagtaaatcaaagcgataatcctagaattgtatgaaattgtagagaatgagaaccggagagaatcaaaggaaccctagggaggtttgcaacgaatttgggacagaaatatgggaaagaatgggatttttagacagaacaagaagaaggattcaatggcaaatttcgatatttaatatggaaagaagtgtaataatagaaaataactctgaaatagcagaagctttactttacggttctcccacatgaaacggcgtcgttttaagtacgcgtgtcgtgtcgtctcgtgaggaggagtgtgtttaattaaagtgccaaattacataacggttatattgagatgagagtatatgagtgacttttgctttattcatttttattggtttgtcgtggtttcaccgtcacggtggttaagtggggtccgccataatttgggtttgggcctgatattttttttaaatgtgggccctagcagatattttgggccgactatttgttagtgatgtagaaggaggtcagcactgagtcgactcgctcacacttttcctgtaatggccgagttgaagttgacacgtgaaatggggaatagtaagttggcagattgtggatgcaacacgtggaattgggtggcgaaaactcaaagaaaaactagtggcttcaagcaattgtatacagctagatataagctaagcaatttgagttggacctttttttcttttttctttttttgtttttttaaaatatttgttttaagagttagaccattgtcaaagtttaaagataaggcgtagaatagaagtatgatattccttttaatatataatatcgtattaattattattattattttgaaaaaaaaattattctctttaattaagaaaatattggaatttttgtttttgattaaaaaaatatctttttttgaactattaaaaaatatttattatttaattctgatcaaattaaaagatataataattttaaggagcatcgctaaatatttagaagtgttaaatattattagtatttaataataatattttataagtaagagtaaagatcatctttgatagaaaataattttatacttgttaaaatacatatattatcttaaaatattatttcttttatattctctcttatctacataagatttgacattatttcttagaaaaaatacttcaagacaattctatgttgtatactatgatcccacatatgacattttggacctgtttatttcaaaagttgttttttaaaagaaattgtaataaaaatgtatttggtaaactttttgaagaatttttaaagaacctacagctaaaaactaaaactgctccaatccaactattaaaaaaaattgtaataataaacttttttgtaataaaatcatatttacgtatttattatatattaaaaaaataaannnnnnnnnnnnnnnnnntaattataataaaataaataatttttttatcaagaaaaaaactcttcattaaataacagagccaattaaaaattattaattattaaatctctcatttttcgaaaataataatttatattttattttaatattaagaaacaacaatttttgttatatacttgagttactttttttttttttttacatttaataaaacataataaaaaaatactataaattatttttattaaat

SEQ ID NO: 18757 - DNA, 3651 bp, Cannabis sativa
ataccgaaacaagtagagggtgcatcaatggggtgcattgtagaatcactcaacaatgtttgattaagtttctacaaattttatttttggtttttaagattaaaaaggttattttaggggtatttgaataaaaaataaaaattattttcttctttttgttatacaaaagtttattattttgagttttttgaaaagtattttgagaatttatatttagaattggaataatttatataatttttaatttactcacaaaatatccttttagtgatatctaatcattttgaaaagaacttttcagtaaaacaagatacaagatcttaatataataatagttctttaattataaaagatctttacttactttatatatgagcaaaagtagaaacaaagataagaagagtacaaagaagtgattctaagattagtctagtaattttacacatcttcttacaaaagattagttgttttaatctctctcttatccttttaggctagaaaataatgatgtgaaaaaaaaaacccaagagaattgtgattcactttgcaaaaacacaagtttgaattgtcatttgataaattacaggggccacaagggccaacttagtatttttcctttgagtaattacataatttataaaaaataaaagcattttacttatattaaagagtagtttgattaaaattgtacaagggtataattttgatttattttagaaaatacaaagcacaaattaacatttaataaacataatctaattgtgtaatatgagaaatataaagggtaaattaaaaattttcattattttaaatttcgctcttaattctcgcttccactaaaataaatattactatttttatgtcaagataatttcacaacaataacttaggagtgacaataatatgactcaaaatctacatgaaataaatggatttaggtttgttttaaatgagtttatgttatttttggattgatacagatgacttgtttatataaaaattaatgtttaattttagttcacgatcaacttattaacgtatttataatctttttatgatacatttattatcaatttaacatgtttatgtactatttaattaaataatataaattacatataataaatataatatagttacgagtgtatattcttaaataggttattattatgttatttttgggttaatgtcaaatcaaaaataacacatttaataagcaagttatgttaggtcaacccgttttgagttttagttttcaatacgattaataaatgtactgggtttgaatttagcatttacttataatacttaagtcttgacacgatacgaccacgatctgtgaacacaaattaccatccctacaacaaccatacccttgtcttgtttaaactttttattttgtctatgtaagagcttaaacttttgttttagttagtgtaagcctaacatagtgtaagagcttaaagtatttattatatcataataatatacatgactttcttttgttattatttgagttgagacagcagtcaaatcaaaccaacctctcctaagagggaaaacaatattcaactaagaatgataattaaaactacaggaaaattcttcaattaaaaatcagtttttagcatgtgaaaatttcatttctattttttatgtgacaatatatagtgtagttattataaattttttaattttcaaaaaattaagaataatttattatactaaaattagagtttagagagtcttatgtcacacgagtataaaaaaaatgtcacgtctagaaaaaaaaacaatgtatagtatattgtaattttttttaatttttttaacattacttttttaaaattctaattttaattttgagcaatttttagaggtataaactttaaatggcgtagtgcgtttggttgtgattattgaaaacataagaatatgaatgcaatgaaataaactttaaaatgtatgaaaaaaaattgataaaaaaaataattaaattttttctcatattacattgaaatgatttttctttttattttgaaataaaatagtcattcttctaaaatggtagaaagaacattctattagaatgatatttcaatactttaaattttaaataaatattaaaatagaaaaaaaaaatattttcttttcatttcattctattttattacctctaatcaaactacttccttaattttgtgtctttaagaaaaagaaaatgaattattggggttggacttttctagaacaataatgaatagaaagaatatccacttgggatcaagttaaagtggagagaaaaaggccaagagaagtacaaaattgtggtccatttttatttatatttataaatggttttgcctgccttgtgttatgggtatggtccatggacctaatcatcttttctagtcttctcaagcttccaatggttatttgtcccatactccttaacactttttcccccgttttactattcatgttattattagaactttgctattagataccagtggtgtttagtaccttcacgacatattatattatgattggttagcaatactctttaaaatctattatattaaactatgagggacccgatatttagttggaccaatagcgatactgacacataagaaggtgttagataccactggtgtattttagcatttctcctattattattattattattattagctgtctctttctttgttcaagtgtccacattttctgaacattttctctatttttagtcccaaaattattttatttgtttattaaaaaaaaagaaaaaataataataattatatgagactcacttaaaagcctatatgggttgcttagccaaagtattgtcaatatcatttgatcttaaatcaaatgagaagttagagaactcaattggtatatataatataatttttattttttttaatataaaaatacattctttgtctttaatactagatatacattcaaaatttaggaaatatccacttattttttttagtaagaattatcttctttaaaagaatgaataacaattaaaatgaaggagaagcttccattaataaacaatgagtcataataattatagaacgtttaacaaaaattaaatttagtacagaaaaaagtcttacactcctcaacaacaaaaccaaaagttgagaacatttttaaagaattactaataaactcaacaaccactaaacatcctaactttactacaacttaggatactttactagtcttcaaccaacttaacacttccttaatgcttaggacctccactaataatggtttcgccatgccaatctgaaccctgagccaccaccagtcttccatcaccatcccgccacaaaaaacctaactcaaacttcctatcctcatcaaaagtagttgtatccacattaactttgatgcctctaaccggtttagtccatagctcactccccgtcatcatcccgtaacagtatcatagagggaatatttactttatagtaattggaaaagttataatttttctttaataatttaccgtgttaaaaattaagtttgagtatcatattacattgtgtccttatttagttatttttttagtttgcgaaataatttttttttggggttttttaatttttacacttcaaa

SEQ ID NO: 18758 - DNA, 2609 bp, Cannabis sativa
agtcaatagagttaataatttgaccaaaaattgaaaaggaattctataatatgatttatcaggtgctacaaaatgttggattacaagcatctttcctggaaaatcttctcgaggttcttcccatcgatttgcgagtggtgagggaaatcgaatggcatttccaccggagaaaaccaggcttcgctgaaaactcgggtgacctcttgatgtaccacagcattgccatctggtgtcaggtgcaaaccatcactgtaatgaagaaaaaagcacacattagttgtacatccatctagtttcatcagaatagaactatacaaatttttcattatggtgataaatacaactgagtattacaaagggagtaaggatgcttggagaactaatgcaaggaatttgagtgagagattgaccctgtcgacgattaagaaaggaatacaaaccttaggaatttcttcttccaaccttctgtttcctgcatcttggtccatagatcgatgtagcgaattcccatttctttagctagttcaacacactgctttgcatagactcctgttacttcatttgtcctctcaggtaattccctagcattttcgccgtataaagatctgtaagacccaaaagcagcaaattagttctttttttaaaagaaattgaatctgtaaagcataagagtttccaaaatagttcagtgatttctggacaaattaaagggtgattcattcagggaacaatatataccacaatctgagaaaagtgaaaaggaaaagaaacatttactgcaggcctattggctacaactctagcaggtcaaggcaccatgacagaagccctgaagctgtattggtgttaatactagcctgtgagttaagacagaattatggtggttgagtagaggtacaaacaaagctcgaaaacaagcatgacagaccaacttaaggttagcattggcagatgtgaaactacacataagttgatggacccgaaaaaagaagagatagaaggcatgacattcagtagcattggcacgagtgataaagcagcaacactacaaaaaatgtacctcgcaaagtcatctcgcccttcctcatcaacaggaggtggagtaataagcacaatcaacacagttggggagcattcctgcaatcaaaattactggccaaagtgagaagaagaaagtcatgctgttatcacctacaaaccacatttgcagtgcatgaaaacacaaacaaaaaagaaaaaaaaaatcatatagttcattgaactcagtagtcagtaggtgcaaactacattttcattggcacagaaagctagaaatggtttttacttctgcccttttacataataaagctaaaataaaatctaaaacacttaagtttgtaaaggaatcaaggaacagaatctgaaccttcaaatgaagaactatttttctgagattctccttgtactcatcaattggaacatgttgtcgttcacttgtccttcctaagatagctgcatcattggcaccaaagaaaattgtgactgcggcgggaggctttgcaacattctgaaaaagaaccagtcttatttatttcttttgtctcaatttatttaattgaaaagtcttaacataatcttaagtatcaccatggcaaagtaaaataacaattgacacaaaataaccaccaagaactgtactattttcccaaaaaatttgcaaccacagcctagtatgcatatcaataaattgtgtacatcaatcctgtcaatactaatcatcaaagtttaaattctataataaaaagtacaaacttcacatcctaattccaagcattgcattaaaaggatgcctcatcaacaaaaacccattgtacacgtacaaaatcctaatttgctgccataaatgcatggttgttacaagagggtgtaccatcccataaataaatccaagaatgaattaaaaaaaaggaccattcaccaactcaaagatcaaatccaaacattcatggaatactagtgtatagagagcttaccagtgggaatagatgatgcagcaaaaacaaagcccatctggtgttgtaaccaccatatccacgaactaatacatcagcctataaacaaccccaacacaccaaaatcaaaactttaacaaataattgaaaatcaaaattgtgggtcattcttgttttgtcttgtttttcccagattaaatgggcaaaaagaaaaaggaaaaagaaagtgtgaaccttgcgagagtaagtatcagcaagagcagctccccagccaccaagtctgaaggactgttcagtgattgaatcaccaaagagtaggatctgaggcctcattctttggtgtgtctcgaaacaaaacacaccgaagcacaacacaagccaccactcagaagtgagatgcacaacacaaccaactgaaattggttagaatacgacaattccaaaagtgcgtgagatgcacgtaccacacagtaatcactaattaatcactgtggtttttactactagtactacatatcattttccttaaacgactgagtctgagatattaaaaacaagaattaaataggatttttgagtaattatgattcttgtagtgttgattcttgaatttttctc

SEQ ID NO: 18759 - DNA, 5019 bp, Cannabis sativa
  modified_base (4055)..(4063): a, c, t, g, unknown or other
tcattcgtcatcactacacaattgcacatctttaaaaaacagaaggagcggtttggtccttttggaactcaaatcaatagacaataatcaatcatggtattggtaagcaagtacgttgatttcatcgctatcattgctctgtttccttttttttccccttaaatatttataaaaataaaataaaaataaaaataaaaatttgtaagctagttccccacgcctcgtgcataattgtagacttctcaacttcttctggatcttctcctttatttttcttttccgacctttgactttcctgtaggaacctctacagtttgaatactaacgaaaactttgatttctcaggtacagtaattaattttgttattatatttctgtaaatgaaactgggtttgatgtgtcttctggcttatttagttgagtaggaaaaagtttttccttttttttttttgtgtgtgtgtgtgtgtgtgtgtttgatgaagtagagcagtaaagggctttgcatcaactttttcaaatctaaggcaatatatttttctttattttgagaaagtttccctgaaaagaatcaaaagatacgacaattcaatccatgtttgttcccttgagattgattctatttttgtttttggtttgaatcaggaaaaggaagttacagagacccaataaggcatatgtcgatttgagaggttcgttggtacccaaaacgaaaaagaaaaagaaaaagagaaacaatgggttctttcaagggtcatgctctgccaggaacattatttcttttagttgggttgtggcacatatggtgtgctttggtcaggtactcatcgaatccaaagtcgtttcgggttcgggtgtggaacccagttccaggttttgatggaaggctaaagtacttagagctttatcttatagccattggtgctttcactgatatgtgtattgaacttctctactcgccccatctcaagtttttcgtggatggagtcttgaacccatctcacatgaacgattttgagcactcggggatgcttttgatgttttttatctttggccttgttgctcttctctcggaaaagacaaggttagtcattcatttattttttttcctttgttctttttgaaatcgaagaaattagtttgagtgaatagaacagaatagttgaactttacataccttgcttgttgaaacttgaaatgccattggttccttggtgattcttatacaacaacgctttgttgaacttaaaatatgtgctgagcttgttgcatctgaactttaaaaccagtagagatgaacatatgaagttgaaatccttaaattatcttgagcttcttgttaccttaggtttattgcggagtgagcttgtgcacaatctagcttatttctcttctgcggcataaaggggttttaaaccttcataccatcttgtattttccaaaaccatactaggtttttttactattgttttttttattgaaatgtgttgaaagtgggattgctgagtcgggtttgagatggcatagatacctaaaaaaaaaaaaatacatgtagtcggtacaagctaaaagctgaaatgtcttatttgggatgcctaattgcatatgagaccaaaacagggtcacgaattgttttgagacgtctaagtcctaatggagtaggaagtcatatgggttggcggtaatcattattggcaattatcatcacttagatatgaatgatgataagtgtaactcttttgatgaagtaagtgaacatgaactacacagtttagtacatttgtctgtttgaaattcatgtgatctgcttaaaatttggtgctaaacattgatggttgggtgaagaaactttcttccgattttccgttcaaggtttagttgtagatatttcctgttttcttgggtcgagaaaagtttccttcgaaactaacattttgtatctaaaaattgattggagatcaccatacatccttgtgggaaaatgttttgttatgtgatgaagtattctgatatgatacaagttgcaactgaaggatcacttgtttcaaggtgactcatattatgtcctcacttacaatagtctttttcattagaaagaaaaatacattcaaccacctataattttcagtacattctaggtgccatgcttcagtaggtggattttcaacataataccagtacaattttgtttgaaggtgttctctagatttccagttcattctacatggctaatgtcatgacatggtactttactacagtttctttgattgtggctgcttgataaacaaactctatttcatgtatactatgtagctttgctcaactatcactatgcagaaatgagatttgatcgttgttcactgtcaccgtagctaatatgtttctctaatttctcttttttcgttttttttttttgtttagactacttcccttgcctgaaggcactctatgtttgattgctgctacagctttttgtgctgagtacctcttgttctattttcactcaacaacacataaaggcttggagggatactaccacctcctccttgttctcttaattggcctttgcatactatccactgttgccggagcactgttaccaactagcttccctgtcgatttgagttgtggcattgccatgactcttcaaggcctctggttttatcagactgctttcactttatacggcccaatgatgccagatggttgcctgctcaaggaaggtaaagttctgtgtcactcggtggacagtgaggttcggggtgagctgcttgctaacctccagctctttgccatggtccttggagtcttcctttcagttgtgagcggtcacgcctttgctgcttctagatttgggcattctgatactaggagcttgcacacaggtcaaaatggattagatcatgattaagactatagggtaagaaattttacaattatgttcttcacttcagcatagagaaggccatagaattttttttgttttcttttgtctcattttaataaaaatgaaaaaatttcatgtttgaagcatgcaacgaaaagggcaatgatgtttacgctagagaatttgttagtgataagtatgtaatttaggagtttttttttcttcttctcttcaatgtgacttctctagcatcaattttgaacctttttacttttaagttatactttttgtttatgaaacataatcaatactttttaggaccttaaacctcttccaaattgataaaatcttgttctatgcacaaccttaattggcaatgagttagagagtgaaacattagaggtgccttgaacttttaatgttgaattacacagtttatgttaaagtgttcataaaatatctagtttaatctaatccacaaaatgtaagtgcctatattatgcacttgtagagattgaatattaatttacatgtaaaaatattcatctaatctaatttatatttatttatttaaaagattatatataattaatattttaaagtgaaaaaaattataatttaaaaacttatacatattgtataaatatattttaaaattcaatatatcaaatatataccccatacttatattatatatataattttctttttttttaaaaaaaaaaaaaactaaacatttcttttgcatataatttcttttccctttccctatactataagcaaaatagtgtgatttgggttggataaataattggtacttagactacctccaatacaaaatgtaaaatttgtgctaaatttagcacaaaaattgagtttgtgctatatttgtttcactatctacaattttatttcaatacatgagatgtaaaatatgtaaacaaaaattactgatcatttaatatgttattaaaaatatacattttttttagagacatttatacttttataatattttttattcatttataaaaataaaaacattataacctcgaaaagaataatcttaaaatagaaacaattttataaaatgaaaacaacataatctcaaaacggaaacaacataagtggaaacaacttttataaaaatgaaaaaaaaaaaatttaaaannnnnnnnnaaaaaattaaaaaaaaaaaatggaaatgtagtatacatagcacttctctttttttttttttattgtttaaataatagtaatatggtaaataaagaatgtaaaactgtgtaaaatgaattataataattagtggcactatcgtttataaaaaaaaaagtggaatttatgtaggccaaatttagcacaatgttatatcttgtgtcaaatttggtacactttttaaaacatcattaaagtagtgttttctttttaaatgtattaaaatatagtaatacaccacctttttagtactccattgaagacactcttatgtatctatactattttctattaaaatattattgaaaaaatttatgatacaccctctaaaataggcttactgatgcatccttctgtgttttgatatcatatagttattgttatccgtgttttgtgcaaaatgtgacacatggtataatggagaaggcccaactaatattccgttaactggagtcctttaaagacgctccgttgctgaagagtctccctgaactaagaggcatccagggcaaaaggatacgcagaagcctacttacgacagtccttgcttccaaaagagcgagatgagaaatgttctgggtacgtgaggaaggatcgttcacttggttcccaaatgagcactagaaaggcctaaagcggatatcgaccctcgtgagggattgcggatgttgacttttctcttacgccaggtaaccaaagtgacgattgtgcttttcttgacaaaatcagatcttgtctcctacatttgagcatggtagtgcgtgcaccccccatctttcttttactagacagacactacgaatttctatttgtaaaggagcaagctttgagtgacacgtctctctcgcttttaaaggttaatcatttgaatgacatgtccaagtggtacaaaatggtcctcattatccagctactgc

SEQ ID NO: 18760 - DNA, 8098 bp, Cannabis sativa
  modified_base (2119)..(2129): a, c, t, g, unknown or other
tataaataatattagaaaataaaaaaatgggaagagccaaataattgcacttggctccgatccggactagagacacactcagtattgcttataatttttactcgtaatcacgatcattctatttctaccatatttaattttaagtgggaaagcgtatcaatttcatttttaagactgagattaattacatattatatatttggtgtaaaatatatgggtaatttaagatatgtgtaatttaagtgtaacacaatcattactgaatatatatatagtcaatgaggaacttaacataaacatgtgctaatacaagcatcaaattctcaaaactatgggtgaaaaattatatatttatgttgacatgcctaataatgtccagctcgattactaaataaccatgtttatcactatatatatatatatatcaaataattattacgtgagtgttattaattgattattacataaattttatattccaaaccgttgactcatatttgtattaataataataatatatatacgctttgtcaactaactgctaattagtgtgctgctcatgaatacgtacagtttatctgtaatgtatatatataggatttgtaattaatgaagaggcatattcttaattatgtacagatatacattaatttaatataatggaagattattaggaaaagtggagtgagtgcaatatacaggtgtgattcaaaaggtgcaaggactcttggatcgtgattatagtggatttattaacgtcatatatataaaatcttgtaatgggtggatgttcatgtcaatctctaaatgttggactgtttctaatttatttttaaattctacagctaattacaaatgtgcattcgtacacatcaaatagtactagaaaaaaagatctttattttcggtttttgtttcagttttaaagtattctcccacttgtagtcatcacttctagcctccaatgttcggaaaaatcgaatggccccttttgacctagccccaattcgtaattttatcgaaattggaatgttaaaaatagtcaagtgtcgtgacctttgatagagaatcgcggctcttgactatgcttacagaggtgtgatttttcaatttttccaaacaatgcaaccttacttatcgagaattgcagcacttgactattctttctgaaaactgtttttcgtaacgattggagagttgttacctttgtgagaggttgcaatctttgatactgaatcttgaaaacttgaatttttaaatcattcagaatgcaccaagtcaaaaaattcaatcttgaggttccttttcacataatagttgatccttttatcaccaaagaattcgagaaataccatattttcaacaaaaagtaaactttcttcatctcacacctaaaatcaatataaaagcaaaaataagtgtaaactcgaacaataaaacattaaaaataaacttaatgctagactttaaaataacttaaaaattaatagaccaagcagaagatttacctcttcaagttatatattttataataacaagacatagataattttcatttttagttattatgtaataaccgaagttatatttttttttcttttcttttttattatttaattttgaatattatttttaattttaattattatatattaattctgttagtgattatgtattaactttttaaaaaataattataacttaaataataataatgatttaatttgaagtagaaataaatttaattatattttaacaaaattaaagcactttacaacatgcatgctaagttcttacagtctaagcattaacaaaatttatacagaatagaaaataggcattttctaaataatagcattaatgtatctttgattttttattttctctatgtaagaaccgaaaataaaagtgttaattgtagtagtttctatgtactcacatattaattcagcaatatatataattaatatatatatatatatttgtaccaatatattaattaaagagtagattagatattaaagaagattagaatagattagataagagcattgctattaggcactagtgatgcctagtaccgtctcgacatgttgcgttgcaattggctagcgatacnnnnnnnnnnnttttatattaaattatatgggacccgatacttagttggaccaataatgatattgacatgtaagagggtgctaaacaccactagtaccctttagcatttctcattagataatgaagagaaatttttgtgatagtaccgagatatctctcaattatgaagaaaagtaaagtaaaaaataagaagcggcaacaggttgatgaaagaatagtgataacatatatacacgtgatactcaaatcaatattggccttgtgtggcttgtacatataatgctctttgtcactgttccactcatataataaaagacggatacaaaagtagaacactatactatcttttggttgttttcatttatatttcattatatatatatatataaagactacatcaaaccctagaaagttcaaagtagtttaaattaaacctctttaatttatcacataattcgtatgatatgatattgtatcgatatcatgtgatttttttttttttttggatatttatcatgaaaatactgatgtacgtaattgagttttgttttcttcgtgaaagtctgttttaattagtgtaataatctattctgttattcattgcgcctggatgatgctaaatatacttacaaactaagtactttatatctcttttattgagtgttatacgtgtcgcaaaacgtaggaacaaatggtcataccaataatgcagccaaaaccttttttttctgaaaataatgcaaccaaaacttgaattgatactttgatcaccaaataaatacttgatttttttcttaaggaacagactttgataatatcattgtaaatgtaagataaacctctctacttatactaatatcctttcattaagtctttacaacgaaaaatatatacacaaaatcactgatgttcagtcttctacatcttaatccctaatagaaattagttagaatagattatgacaggtcatcaatccacacctaactaatttctgtaactaacaaactaaaaaagaaaagacctaaggctatatatatacctactactcagtctcatcgagttaaggttgaggagattcttcaagatccaagaacttgatctttgtacaaggaaagagactcgtatatgcataggaacaaaacttgagttagtaaacagagtaagaaatcaaacacattgtatgtaattaaatctatagattaccagtcaatacatacctgtgacttgaaatctcatccttgtaactcagaacaagttgattgatagtaaaatcggatccatgacttgatagagcatttaaatagctagcttgcttattttcgtaactttcttgcttgggataaaatttgaggtcaatagcttcaaaattttgattaaagtttgagacatgacttgatagagcatttaaatagtttcgaattacaagtttaatcaaaatcaatattgagtgagttatggaagttttgatgaaagtaattcatgacccaacgcccagagtgacatccaggacccaagttcatatcccagtgcccatgttgacatatgatgtcaatctggacgctgggtaagtgaaaaaacttccaatggatgtattttaagattcttaagtgatattttgacatcacttagtatgtttaagtgttctggcaaagctcatcaccagttctcaaagatgttgtgtgcggaaatgagagactcaaagctcttcattttcgagtgagtttcccatgctacaaatgagaaataagaagttgtgaatttgacatcactgacttcatggatcttacttattgtgaaaaactagacaagcggtcaaagtgaaatcaaaattagataagcagaacccagcgcaccaggccatttgtcaacctgggcattgggtatcctattttcgagctcccagttgttgttttgatacttccaagattcttgaccatgaggacgaggtctcccaccatgtttttgcccattctaaattcaacctgggcactaggcttagcaccaggtcacctaggcgttgggctctacttccaagcatttaggtttgtggttttctccctaagtttgcttgaatctacattatttatgttgacagaaaaaatgcctagaacacttttttgagaacttgattagaaacagaccaggttgacaatatgttaacctgggcgttgggtccagtgacaggtgtcaacctaggtgtagggtctcaattatggcccttcaaaaattctattttgtccccaaaaatatttgaatcttaatattttctaaaaatagagaagatggtttgaagagttctcgaaaaacaccatcagaattggcccaatttgacaaaatttcaacctgggcgttgggttagccccatgtgacaacttgggcgctaggccatgcttttgacacccaaaaagtactgtctcttccctaatacttggaaggagcccagattgagaaattgctaacttgggcactgggtgcccaggcattgggtgcttcgagtgctcaaaaatgaactttctttcaatttgtttctaatgcctcaaatagtctgtgacatgtctagttcatgtcccaatgcaaattttgacccagttgaactaagatagtcctagaaactacaaccttagttgaggatgtcaactgaaaccctaggtgcccaggttgactctcggagtgcatgtttatgtaatctcagctctcggggcgttgatttggttgctccatgtctttatggtagagaatattgaaagatattgagttggaaatgtgttattgaagtccaaacttcaattctggagttcttaaagtcaacctgggcgcaggcctaaggacccctcccaggtcgacctgttatgactcaggactacttaacttcaagatttcatctttctttcaacgtgtcaaaaaattgatgcccacatcatcaggaatactcttggtgtaaatatttgcccccaagttaactttacaattatgtgaggttgacttaatgaggcgaactaagcccatttctctttaaactaccaggtgggcattaattttaacaatcttggaaaaaaaaattatgttcttcaagcattcccactgagagtaagagttcaaattcccattccctgttgaatagtaggattcaaaattctaagtatagaaggagaagagaagagatgatcttcttttcttatcatgtaccttatcctttttaactttaaatttagatgacaccttgagtgattttctttgagtggagatattgtgaaatcatgccgacattttaatgtcaacatttactctcatcttcggttgttatcttagcattgactcttttgtcacactgtgtgtttatgtgaatatggatgtagtcttgaagttctttagcattccctttggttgtgtttcagcaaaggtgctcttgttcatctcctcgatttgatagcaaagaaggcctttttcaacttactttacagaataggaggccttcatcatccctcgactttgctggaaaggaggccttcatcaccccctcaactttatagcgaaagaggccttagtcatcccctcggctttgcagtggaggaggtcttcttggaaactgtcaataatgtgttgtagtagtcattggtcgttctttggtcaattaaggaagtgaccaacacctaaagtaatttatccaatatgggggttatgtcttccccatctcgggtgcaccttacaaagattgtaggtgcggtcacctatcttatgagggaaaacaagttaagattcttgataggaaagataaagttctttggagtataattatagtattggtcaagatacttggagagacaatgaggtggaaaagccatcatgagaactcactgtccagagttatcctgattagattttgaggacaaaatccttttaacagagggataatagaaatgaccgcatagttaaatcatggaaatcactagataatttagaggtttaattattattatgtgattttgtgcttcttagtagaaattagggcttatagttagaaataggccttaggagaataatttctcaatcacgtagatttatttgaattctaaatgcattatatatgttaatttgacattttatattttttatattttatgtccgataacagtggaatgcgatgtttggcctatagagtcacttaggtatggtttgtaggggtgaacacgggtcgggttttcgagtttttggggttttgggttcgggtttttgggcttcgggtcttggaaatgcataaccaaacccgattttcgggtgtacgggtgctccaagtatccggtcgggtcttttcgggttgggtgtcgtcgggttcgggtcctattgggctgagcccgaatgtttaatttatgggttgaaataaaatttaatttttaaaaataccattttttttatttttaacattggctggacctgtttttttttttataattaatatgtagtgctttactgctttatatatagtagtgttagtaataagtataggttttttaatgaaaaggtgaaaactaaaaactgctttatatataatatataataataatatgttagtaagtgtatacaataatatattttttaatgagttagatgagtgttagtaataagtatatgttttataataataagtgtatacacccactgaaaaatgaaaatgaaaggaaaataggaaatatgagaaccagtcggagaagagaacatatctcaccggagaagagaacagtcgccgtcgctgactggtgggaggacacaggatgtcgaactgagccgagaagagaaccagtcgccgtcgtgggtgggtgcctactgtgcgtgggtgggtgtcgagtcgactagtcactggtgtgggtgagtcgactggtactggtttaagagtgtatattatagattcacatttcacacagaattgattaattgaatattgagtattgagaagagaatacgaataggcttagcttttgtttgaaattgaatgtaataaattagtaataaataatttaggggtgcacatttatgatttatacaataatagattagtaataggcttaaattctgtcagataattaagaataggaatacgaataggtttctttttgaaatgatattaattattaaattagtaattaagtgttaattttttaattaaaaaaatttataatttcgagttacgggttataacccgaccagaaaaaaaaaacaaataatcaaatccgaatttgaaacccatttggagtccttttcgggttgaacccaacctgaccagacgggtttttgggtgatcggttattttggcagcgggtcggggtgggtagtcggatttttcgggtttgcgggtctaaaggtgcacccctaatggtttggtactttagaaatagcagggtaatttagttagacatttggaatgttaagaatactcagggtaatagttttagaccattttatctctaattatattgattacttcttggtaaagtaaggtagaagaatcttttaccccctttttttgtcttttatgacttactagaatgttagtgtttctttgttattatctttagttgaaatataatttaattaaaaccaagttatattaatttgtattattagaaatcaatcaagaataaaaatataatccaagtttctttttctatctctctttgtttggccctaagaagacccaagaaccaagccatttctttcttaatttctgggtaattcagctacattcaaggtatttggggaagcaaagaaactaaggtaagccctagacactttgttgtttttggtgtttatggttggttcaagcatgcaaagttatgtttaaggtgttgttcggattgatagtgttgggttggtttgtagtagttatttcttggttgattatgttgtttattgctggttttatttgttattgttgagaaacaccaaagtttgagctctcaagctcaaacttaggtctttaatggtg

SEQ ID NO: 18761 - DNA, 1466 bp, Cannabis sativa
accgtattaagtctacaaaatctttcattgtatcatatcaaatctacatgtcactaaaaattaccacacttaaaattgtagtgtggatttagtccataaacaagtatgacatgtgaacacacccaattggagtagaattgaactttctttaatatgaaatataaataaattgggttaggagtgacaccacactaataagtaatttcaatattaatttagtcaagtagtgggtttttttttcctactcttattattggttgtcgttttatttatggtattaatattatcttctccaaatgatgtcgttttgtattcctaaacctttgatctgaaccccaatccactgtggtattagacagagcacacagaatctgattgcgcgcgttcatttcttatgctgtctctcgcaaagcgactccaaacccttcctcaatgcctcggggccgccacacatcacctccggtggttccggaacgatgctgccggtccacccaggcgccgtcgcaagaccccggcacttgctcgtaagagggcggaagacaactctgagtggtggattgtcgacggagaagttcacgagatcggcgaaaatgtacctctacgcgagcgtttcgtccttcctagggataatattcctaataagcgtcggaagcagctcagggaacagttcatgcgccggactcgcctcgttatcaaagaatcggtttgcttctctttgttctcaactttttttttttttttcctgtttggtttacaagaaaatgagagaaaatgaaggaatttcctcaaaatgtttgcttaattttaattaaaaggagcatgagccttggtgcaaaaggtatttggagctgtatcaagagcttagagaaaattgggagaggctttactgggatgagggatacactaagaaacacggtgaagatcatgcaaattacgagtctgctgaagatgatgatgacgatttttctccatataggttcgcacaacccattcttgtggtgccattaccactcattaaaatttgcttcttaatatctcgttggtgatatttacagtgtactaatttttctcttgctagattctaaatattcctttctgtctttttgttgataatttcaggaataggtcatccaatcctgagcgactaaaggtacaaatttggttaaactggaaatttttgttatgcaattggatcaagaattgagaatgactcctgtttgtttgttttgattataatgacagtagtttaggaaaactgaaaattcactcaagcaaagtccttgtaggattagaagttgaattctgctactaactgaggttactgttgtatactatatacatatacaaactaagaaaatgtgtaattttcaggagactctagtgattgttataatcaaaatttggctaatgtgattgctatttcctaattttgatttactcttagtggatagattgtgatgttttgt

SEQ ID NO: 18762 - DNA, 1839 bp, Cannabis sativa
tcacaattggatatccaatgtttggcggtcgcttgtaattggatcggtcggttctcattggatttgatcgatttatgcacacccctaaacatgtatagtaaatataactagttccgtcataacacctctagatcagattattattaagttttattttgataaaaaatcagttcagaatactatttaatattatttaaaaaaatacatgatctaatttatcatttattaaaatagattattaaattaataatttttataaaacaaggtctaaaatattatttatcctaaaatatataattttttatgtacaatattcaagtcttattcatattcttttctttttctttatttcttatgaattataggctatttctttatagggtcaaaattgttgaagagaaatcctaccaagctaacaaagctaaaaaaataaaagaaaaatcataatctgacctaattaataataaataaaatctacacaatataaaatgatactaaactaattcacaacattaatagacttcatacatattgatataataatgtgtttaaacattctacatatgtacacattttaggttcacatattattatttgttgtttttatgaggtagtttatgtgcttattaaactcaaattataattttttttagaaaaatatataataattacaaataggtgcctttttttttgtcttaattataatgatatgtattataaggaaaattatataatgttttcagtaaaaattttacacttttaagttgaaagttttttttacagtattttatattaacaaaaaaaaataataaaaaaattacataaaaataacaaaaaaacaacatcaaaataacataaaaaatagtatacaaataacaaaataacagaagtacaatataaaaatacatcaaaatttcgtattttatgtaaataaaattttaaaaccgtaaaaatatttaatgttttgaacaaccctattcttataatttttgtgttttttttttaaaatagtctcataattatattcaaccaaaaaatcttttttttttcttaattgcaaaattttgatgtgatttagtattttcttttcatttcattttgttgtatttttattgtttctattttacattttaattaaagctttataaattgagctgatttagagttagtttaggcatgacctacttgagttaaggtttttttttttttttaattttgttttttgtttttgtttttattttttcgatgtaagaaaatgaattctcattaaatcaaataacacaagataagcttagaactaaaacactacgaattatttacaacattagcgataagcttatcttttaatgccatgtttaattaactcgctgatagtgacaagacaaaaattgtaaaaaaattaactctaggggctaattatcaataactgtaaatatatatttttacatttttagaggattacataacaatgttcaagatacaaagatttttattaaccaaataaaattgaccataacaactataacaacaacaatgaaaacccaactttcgaatccaaactcttccttctaagtacacaatgggccaagctgtgaaactcacacatccgtgaaccatgcgcaacagcgcaatagaaaaataaagggtaaatactattttggaccttgtattttgcaaaaattatcgctaggaccctatgttttattaaatgataaaatggactctgtattttctaaaataggaaaaataggaatctaagcttaatttttgacattttttttttaatataatcaacttgaaaacaattcctaatacgaacagatacaaaaaatgtaaaca

SEQ ID NO: 18763 - DNA, 5346 bp, Cannabis sativa
ctcacaacaatgcatttaaatatattcttccattttataatcttttgaagaaactggttttttttttaattctttaactataatgattatctaactataatcactcgatcctgttcctcaaactttttatgttatttaaaatttttcagaattattattaaagcgttctcttatgtctaaaatttagggagataattcgaaaataataatagtttaagagacaaatcgataatttaattatattaggagaaattttagtaatatcagtgtgaatttaaaatagttaatatcaagttatcatgatacatccatcttttctagaggtacattatttaatggtggtgatagttgaaacaaaatttaaaataaggtagacataatttggagtgataatagttgagactgtcaaaattttatttattcattttttttacacatataaaacacacaagaggttggtcttaaatagatcttagtgtctataagaaagacatttaaggggattacataaaaacaactttagacaaagtaacatttgaacaactcactacattatcttttcttctatctttacattattatttattaatagtcattaggagtagtactcatctattttgtttgcatttagtacaaatgtgtagagtagttgaagttcttattaaatgttgagatttcatgccacaacaaagtatggcttttttggtaaagatgatttcaattcaaattcaaaattaaaaatgaaaccataaatgtagacatgaaaaaagaaaaatattcatttattgaaatacctcaaagagataacaaagctaataggaagaaaaaaagagaaatttgcgtcgtaaatacctaagtttaactctcggcttaagttttaattttttacggtaacaatacttaggttatatttctaaaacttccgttagtatcttgtcctttaagtgtcaaattattattcgcacgttatttttttattagtatatttaaattaatttttcaataaaataaaaatgagttttttcatttttacatttctaaacagtttttttttttttttacatttttacgaaattctacatagaaacttctattgcaactagcgttgcaacctaaattacaacaaaaaatcgtatagaaattataaaaataaaacttagatatttatcttactcaaaagagactcccaaatgtagacataaaaagaagaaaaatattcatttattgatcaaagagataaggcatcatcataacaaagctaaaagaaaaaaaacccattcttttatacataacaacaagaaagaaacaaatgaatttccaccaaaaaaaagaaaactaatacataatctatataatacaacaacctcatcatcatcatcatcatcaacaacccttcataacacaaccaattacaaagtgaaaacctttcctaaaaccttgattgtctacactcaagaggaacaccttgtgggaaacgttttagatcagaacaataattgtaaatcatgaaatacttttgaacccatctgagtcttctccttgcagggccatcaagtccattggtttgccaaactgaattatcagaagaagacaatgagtttgaagatgatttcaagtccttgaaactgaaatttctgtagtaagctgtaaagggtgcctttgaccaatcagttttgatcaatccacctcttgtggcccaatcatcagcattccaaagacttgagtaaattttcataggttgagtttttgggaatggaacaccaactttttcagcatttttgaatacccttatgggagtattgtcaaccaagaaactgcccacaaaaaaataagcaatgtatgttaaaaagatataatctttattagaaaccaagcaaaacccataaaagaaagcaagctgtattgtgtgtagttactaatttagtataaatgtacaatttttaagtggtttacttataaattaagcaaaacccatgagagaaaacaagttcaattgctttgtatgtattatgtgtatatatagattatatacatgtaagtatgtgtatatattcaagtgttctaactaattagtagaaaggtacaattttgaactagcttgcttataaactaagcaaaacccattgaagaaaacaagtttaattgctctgtttgtaggtacatatatagataatatacatgtaagtatgtgtatatacatgtgatcttactaactaattagtagaaagttacaattttgaactaatttatctataaactaagcaaaacccatgaaacaaaacaagttcaattgctttatatcattatatgtaaagataatatatatacatgtaagtaaaacacatgaaagaaaacaagctcaatgtaaaaataatatacatgtaaatatatgtatatatatacttacataatgtgttggggtttccagataacagagtaagtgtggaagtttcttgtggggtcaaaccatagatagaattgttgttctctgtttcctttgccttgagtgaacacattggtgtgtaatatgtatggttcaccagtaacatttcccaaaaattcaaaatctatttcatcatgagtaggcccttgtgaagaaagctacaaataacaacaacaacaaacattttacaatttagctcatctttattattattagtataataaaatcttgaaagaaacaccaccctgaaaaagacatatcagaatgtcccacatgctaaaacatcaactaaaagacaaagtagattttgtcaaaactcataagagataaaccaaagtcctcttgagttttctttctttattgtggggtataaagtgtatatatatatatatatataggtatatatgtcacaagaaaatatgacaaaatgaaccgtgatcaccaagcaatcaaatcaaacctcttcacatgaaaaactctcatgtagaatgtatagttagtgtaactatatctatagattctatacatacaattagccagtaaagttgataactttcacatttgattaactaaaacaagcaaaccccattataaaaaatatgatctttatcacaaaaaacacaaaaactaacaataaagttttgaactttttaatcaaaacacatacataataggcagtgacagttccagcagaatttccagctacaagcttgagctgcatatcaattctaccaaacatgtattcttttttggagacaaaaccagagccagaaactctatcaagagaaagagaaagaagttggccttgtttgaacactttagccctattatcaccccaagttatgtcaaaatcttggtgaaagtttgcagagactatagagactaaaaaagcaagtagaagaacaattgttgaaagcccatttgaaaatgaaaaccccattttgaaatagagagaagaatatagagaatttagtgagtgaatgagtgagtgagtggaagagggtttaaggagagaggtatatatatagaaagaaatgatatattaaaggcaataaggtatggagagagtaagggagtacgcgtgagcaattactaggaagagcctaaagctggtgacagctatgctttcaccaggaaagctggaaacttttgtttgagcattgggagagagagaagaaaaagaatttgtttgaaagattagatttttatttttaatttttagttgagtaaaagagaatgttagaaattttaattttaatttaataaatattataaaaaattattaactaattataagacatcatgttataaaagtgtgagatactttggtgtcttgtaataattttctatatattgtctagcgttttattcagtgttataccgttcttataacttaagaaattaacttttaatgaatattgctaatcaattataaggcgtcacctatggaaggtattacaaaccattagtgcccaatagtaatgctcataattttttagagtattgctattggacaccagtgtatcttttatagctgtcactctacgattagttaacaatattttctaaaaactattttcttaagttatataaaacctgatacttaattatactaatagttatataacaatgaagaatgtactaagtactagttgtatctttttgatttcttaattttttgtttgtacatattgagagagagaaagtttggtttagaaagatttcatttttattattggaaaaaattatagtaattactcttttaaaagatgtttaagtgttgatatttaagaaagttttttcctcaatttcttttgttgttattaatagcaatgttgtagttttttagtattacttgtaattttttttaaaaaatttatataattcacagtgctaaaaataaagttgaaacaattatctattaggcgtataaaaaaatagtcatgcataccataaaatatttaaaccgtatttttaagactctaactattcaaaaaatttgaaaatttatagataattttaatcaactgcaatatatatgatcataaaacatatttgagtaaaaattattttaaatcttgaaataaataaagaatgtaccgaaataacatttttactaggtgagagaggtggttttattttaaaagatttgattttttattttttatttttttgagagagagagagagatggttttcttttgaaaggtttgattttgatttttaattttttgggtagagaagagaatggaatagtacacataattaagaattggattggtatgttacaatgatattgtccaaaggggaaggttgattgttgggtaggaccatttccattctttctttttcttttgtatcatttaaattttggtggtggatgccaacaaggtatggtatggaagaataactttttagggtttatattatttgggcattttaaaaataatttaaataatttatagtgttaaaaatatatttaaatttaaaataattaggtgtaaatacacaaacaaataattgtctaaatcctatatttgtcactacattattcattaaaataaaaaaaaattagagatatttattataattataatatttaaaaaaaataaaaaagataaatattatcgcgtaacaataatatttagtattatcacaaaatgttatactttatttttattttttgacaaattttaattacacatataatatttatctaattactaaaattccataaaaatctaatataaatattgtagggtgattctacaatgcaccctcttaaaagggattagtgatgtacttaacttgtttcggtatccaaaagaattttttagtctaattttttttcgtattcatgtacgttatagctatttaagatatcttataaaattttgaaaaatt

SEQ ID NO: 18764 - DNA, 1531 bp, Cannabis sativa
attatgtattggtattttattaatgtgtgaatattctgaaatttatttatgtatgatatgtaagaacgatatttttacccttgtttgatgattatgctctattatggccttagggacattttgatcttttggctatattaattgattttccttagccctagctgaaccccctctccctctttcgttccatcccttcaatttactaagtgttgaaaattttgtcatggaattaagcttggatttttagtgagtttttgtgcttacagcttggtattgagcttgaggtagttcttatcttctttacatgttgaattttttgctggtatgagaattaaaaagcatggttttatgtgtttatattcttggaaatgcatggatgagaattggtgtgatgatgatgatgatagtcttgtttgaatcctttgttgttgttatctctagctaagttttggatgtttaggagcttaggttgagttttgaatgtgataacatggtgattatatttgacattttcttgctgtggaattttggatagtgaggttcaagtttgtggaatgatatttagctagatttgagctcttaactttgttatggtggctcatgtttttgttgattttaatgcatgttttggtgataaatggagagtaagattagtagtatcactctcagtttatttgatatatgcttcgtaagaatttaatttgagtttggacttgtttagcatgaaatttggtgtgtttaggcttgaattcgaagcttgtttttaagggtttcatgggtttgaaacctaggtgtcgcggcccgcctcctgttggtggcttgggattcgaacccaggtgttgcggccccatgtggggtgccgcggcccgcccccttgtttttgggtaaattcgaatgtaattttcgaatgttaataactttattcggacttcgtttcgagagttctttatatcattgaaaagctcgttttgagctgtatatgattatctataatctgaattccaattttatattatgtgcaatagaatttagggattaaccctatacttgtgaatcccatattttgtgactaggattaccaggacttggtcaggagcacccggggatttggaatctccacgtttgtgggacattatgtaagatagtagttagcatggagagttatgcgatatggttcttatattgaatatgatatatgtgagtaactagaaatcggaatatgttattactttaagtgagtggtttaaactgagaccgatacttttagtgtcagttcatagaaccgaacctattccacagtgacaaaaagttaatttttggtgtcgtttctaaatcgacactattgagtttttgtgtcgttttaaaatcaacacttaaagtatacatatatattttctctttcatgtcggttttaaaccgagactaaaaaggtatttttataaaaaaaaaaataattattaaaaataaaatttagtaattctgaaatacaaattttgaaatgctataaacttaaaataaattacacacataa

SEQ ID NO: 18765 - DNA, 1496 bp, Cannabis sativa
taaacagaggatttggaaacaggacagcctttttggcccatggcttatgccttggtgatactctgtttgcagccacgaatcgattgttttctttctcaatttctcttttgttgggaggagagatcttgaagttgattctggagcgagcccgcctaagaactggtgtgatggattcgtactgagttgatcgagttttgttttgcttttccttctttcttttgaccttgagctctgtgtcttcttcaatgtgatggattctctgttttctgtgttgacttaatggcgttttcggatcttctagagtgattttcttggttttggtattgactgaagccactatttcttttgcaaattgacttgcttggagaatttctcccactgtttctccgacgagcatggccggcaatgacattcgccgccattcccctgcatcgaatatatttattagaatcatggataccaagaaaatgttcaaagctttgagttaagccaattggaaatgaaagaaaaggaaaaaaagaaaatccatttggttcagatgatgaaattcaagggtgtgagagaaatacctcccgagtttcccggaaacttccctaccggagatttcctaggggcagcgtttttaatccttcaaatttatgaaaaaatacaaagacccatttgagtttacacatcaaataacaataatgaagctgaacaatccaatctttacgaaatatttaaacaacccaaatgaagtataatgactaatttttttttaccttaatgattcttgtttgcatctgaggctagtcttaaggtaagctctagtacttcgagggctaagagtcacgccggagatcaccttcgttccacctgaaactgtgtactgtagttcttgcaaccgaaccatgcatcgatccacctaatttgaagaactcatggtccaattttagaactctgtaattttctcagaaaccaaacagagaaagaagagaagttcagataaatatttaaaacatggctcaccttttgaacaatttccctgagcagaatcggattgagagctgctaccattttcttctgcttagatgggcttctcgcaaccattttcttctgtttagtttagtaaggatttctctctttctaaactcttctgttcctttctcttagtttatcctcgaagtgaagatgtcaaacatagaactctggtatatgttttttagttttctttattatttgttttttttttccttctttagttccaacggtcgaatttatccaacgtaacgcctgaaacacggctctctctctctctcttctctattttcaacttgtcgcatgctttttgatctcttttaaagcgagccgttggttcgtgtgtcgatccaacggtcgagtctattataagacttaatttcatttatatattttcttagctttttacttgtgccaacctaactgttttcaattttcattttattccaataatgattatactagtttttttttttttt

SEQ ID NO: 18766 - DNA, 7050 bp, Cannabis sativa
  modified_base (5489)..(5498): a, c, t, g, unknown or other
  modified_base (6148)..(6153): a, c, t, g, unknown or other
cgggagcatgatcgagtcttccaccgatgagtgtcctaaccctaaaaggtgcccaatttcatgtactgccaccgattcaagatccaccgccgacgcaactgaggaagtgctaatgtcaccgccaaccacccagttttcgtcaccgtccaagtggaacctcccagccgtcggagagaaggcgtgcgccagtgtccccaaaaccccatcgaatggctcgccgtcaccatgatcgccgacaaagaatccaatcttaaggtcggcggctgagaacgtctggatctcagtgaaggtcaacggcgtgacctgtgaccaccgaaggaaggcgcgagcgaataccgtctttacttcgtttgtgagctcgttttctggctggaaagcgtatgtgaggtcgcggcggccgaccggccagaccggacttccggggaagaaggagtagtgtccgacagtgtggaaattcgtggagttagaagccgacgacgacgaggatttcccggagttcatggtggttgtgccattgacgatatcggcgtttccgcagcgaggcagaatgaggtgttggatggtgatttggtcgagctggccggtgacgttgagattgaaattcttctggtaagtctttatggccgattcaagctcatcatcaaagtcgtctgtgaaattgaaaggagatttgggaatgtagccgaagttttggaaatagtttttgagcttggataggccctgggttttatctcccggacgacaactatgaaattccttaaacgcatcccaggctcccaaaatggagtcgtttttcgggattagccacggcggtattgatgatatgttaggaaagattcgagcggagattggagtgtaaccaaacgaggatagacacgttgcaatgaagaaaaggtattggaatttgaatcccatttttttcttattttaactttattttatttatcagaacaaatttggggttgatggttatggtagaatttgtgtttggagtgaaagaaaatgaattttgatccgagagaaagtgaagtgaaagtactctctagtctctactggttttgaataagggagaagagaatgctgccacagccagcaaaattgtttggtttgatatttcccatgtcttgtatttgtggaggcatttatttgaacgcgttgaattattccattttgaatgtttcagttgttgagcgaagttttttatgaagttggcttcaaacgaccacgtttagacgattaattagtgttactagaagataaataattgagtttattaatagaaaattcgaaatggatatttgacttctaaggttgttcgtgttgagtaagaaattgaaaaataagatattagaagactaaaacaaagaagccatcaaagttgggagttaaactgtttatgtcgctgacgtggctacttcataaccattttcgttcgaaacgttgagcaattagactgagctatacaataaatttagtttaggaagtactttacagttacagcctctttagactaatacaacaaataaattgtcaaccaagcaaacaaatttcatctgaaaaagtaaaaaatagaattatatttaaagaagaagaaacaattaggataccttcgttagtttagctttcttacacgtaaattgtatctgacccattatttgacaaatacagttttcaatactaaaattgattttaattttgacattattttaggcataataagaagaaattacatcatgtattgcgttggcagttagttaggtagttgatactgctggccaagaaaattaagatttttctaaattggccaacgcttgtggttttaacaacagccgaacagttaatattgaattttgtagggagaaggttcgtttggcggttgagtttgcttttttcaaactaggacgatgacatacaatcgtcctatgttctagagggaaaaaggaaaatagtaaatcacgggtttcgtagctatatatgcacattcaaaccccagattctctctagatcattatctaatagagagagaacctaccaatcaatcaattctcgttccaacttatcccttctttcctggttctttttggttcaaagattttgtgtaaatggaattgaaggggggtcaatggggcaccagggaaccaaaaccagtccattcttacgaaaaaaggacccttggtggacgtcccaagggtaaatattgcaagaaaatggaggatggatttgataaaacaaaagctgctgcctcgcgtggtatcatgagtgtcaagattggagctaacatcggcgtccgctggatcaaagccaagtaccgcaaaaacaccagaaagcactagcagtagggcttcagttttccattttgtacacattattaaaaagatttttttattttggttttttttaggcattaaattctggttcgctgttgtttttcgttacatattcattaccttttcgcaaaaatccatttttctttttcacatgccctacttaattcattgaatggttttcatttgatctgtacttggacaaatttgaggttgatggcacgtgtataagatccaaatattacatttacattatcaactatttatcacatctcaaagtattggaataacgtcaactttctattacgactattattcttggggacctgatcataacagcccttgtttttttttctttgctaatagcacttggtagcaattatatacagatattgataacacataaatgatgtgaaaacgagaaagcaccaagtgctttagaaatgtcagagaagacttcccgagacgtactaaaatttgtgtacaagtaatacgctacataataaacatgatagaggtacttaacatttaacaggcctgtcatagctaggaggaagagaagggcagttctcattcatgtgtgcatacggttcaactgtgttatattcaggtagttctatccaatactcaccaaggatttggcagaatggaagccgtccattctcagtgttgcaccaacttggcaggcgggtatggttatcctcaaaaattttaagcatgtacgcatcacgaatctgatcgacaagtaagtcattatcgctaggtttagataatgcaacgaccagcaattaataggtttcatccagattaactcataaaatgacttacagtgaattcagtaacttgaatagaatttgcaattggtccaaagattccagcctctttgtacattgcaagaataaaagcaacacatgtggtagactttccatcactgtatacccattcatcttgttctggaatcgcaagcaattgatcaaatgctaacccccgcttttcagtctcagctagaatctcgtacaaatccaaatcctgaaagaacgaatgagtaaaaattaggaacacacattcaatattaagagcagcatgggtctttatagatcacaaggacaccagaattacattggtcccaagccgcttattcaaagcttcattccacatattcgcagcatatgcaggctgcattctagtccacatagacatgacagaaacaacctgaaagaaaataccacgagttagatggagtaattgcaaaatgtacctgttatttttatattacacccatgttcaaacatgaatcttagacatgtataatgctgctaaatgaatggtgagcaggtacacaatgaacactctttcttaaccctagtgaatgaaaaaggggcatgcaaatcatgacaagataacaaaaccaaagcaagcaatataaaaccactgtgatgctattcatctcaagaatactaacaagatataagttaatgtgaaataaataacaatgttctatagttaacttctccatcactagtagatctattcgtaccaagtgagcatcaagagggggaggatagttgtcagacatagtgtcgatccaactaaatatcatgttatggtatccatatggctttccagacatgctccgagcatattcccaagctgctgttgagttgaatttagcacgcaactcagggtgcaagggaagcaaggctatctgcggattagaattatcctcaagtgctaagttccaccattcatcccaaggaattaccactataatttcctcaccctgcagatacacgagatcatcatgataattcactacttatccatgtataaaataggacacactcaatttacacttcttagaagcattcacatcgttgcaccaaaaaaaaatagcagtaatcataaacaatttaaatgaacaccacatatccaaaaacattatttgcggcaatcaataataacacaaataaaatattctaaatcataataacagtaatactaaaaacacatcctacataagcttgagaggtcaaggcatatgcgtagatgtgtaacagctgtaatcaattccaatataccttttcattctcatgtcctgattcaccaacccagagattgcccttgttgtccttcaaacacaccgcagtatggccagcaaatgcacctgtaacccatttttctaaagtctcaaatccaccccaccggccacgaatctttgaaactgccaaaaagtcaccggagtgaacatctttaggatctatagttccacgccaaggcttgggacgtttttcaaatttggcgcccatgtgcttcttaagaaaatctatatttgcattctgaccccaaccagtgttggagaacagaggcaaaacatctactaaagaaagaagggttcccagcatccctgatggcatgagaaatacagaaaccccatgctgctttacctgctcaaaatatcagctaaagagtcaaggtaatgcaacaaacgtgtcaaatatgtaactgcgaaatacaagacaatgcacacataaatacaaataacttgagcatacgtaatccatctcggcagtttcttcccacgaatcaaatttcagtgtatgttctcgagcagagaagtagtaatcccatgttattcggtatggtgtagcgaaaacatacagatccatacaggtccagctatgggcctcggatgtctacaaaagaaaaacagttaaatttaacgtatgtttgaatatatacagtatacagaaacgaacatttactgagatcatcaacaggactatccctctagtactttcatatctaaatcatatcaaagaagattgaaatgtgacgggctatgaggcaaggatacaaatatcgactgtgccttagtcgtaatgctttagaacagtttttcaaagtaagaatgcacaattttccgtgtgttcatgtaagtgcagaataggattcctactacccgaaagtctacaagacaaggaaattagatatggccacaattcaattttacatactcctccaagtgcagaatttagacccaagggacccatcaattaatgaaaactcctaagcattcaaaaatcagttgaagatctccatataaagaatattaataactacccgaggatgatcacaactgtgttttttttttctcaaaaaaaaaannnnnnnnnntaataataataaaaataaaagaaaaacaaaagaggaaataaataacacctttagatgaaggacaccacctcccaaactgggttgctcccgatcacctcctgtaaactcgaggtgagcctcgttcccttgaaagcatgctcccttccactcaatagtcccattgcccggagaaacagatccaacaaaataaggcaacaaatccacagcactatgaaaattgttgagcaccggccatgaaacctgatggggcagaaccggaagcacgtcattgaccctaaaaggaagcttaagagcgttcccaaacccaaaacctaaaaggcagaaaacgagcaatagccatgaacaagtaggagagaacagcgacatgggtggcgttctcttcgatcaaactcaaaaacctgataatagagttacaaagagaacaaaaccctaagcccagagccgttaagggcggttgagagtcgagaattttgagaggagcggttaaggacggaggtggtaccggtagtccatatttaatttttttcttttttttgggacaaaaaattaatatatctagatggagtatgtattagtcagaagaagtttcttgctatttattgtttaattatttaattagaaaaggaagaggataatatatcgtttggtannnnnntggttacaggctacggagtttattatagtacaggtggcggataaatacacacttcaagtcttttctctatcccacgtcaacgccaactaatacgtcgaaaacgataattttaattttagcggattttatatttttaaaaaatatatgttctatataagtttaatttctaaaaaaaaataagataaaatatcattttttttttcacaatgtttacacaatcataatatatgtttatatgatttttttttttcaacattgaaataatggatttgaagacccataattttttatcttaattattataaaaatatttattatttactttacattaaaattataattattttgtgggggcttttttactattttgttgtataattatttaattaaatagaagatatttaatcttttttaacactaactttttttttactgggggctactttcattattgcgtctgtctctggtttgaagcattgtttgcccctcaagtttattgtggcagtcaaggttgtgtgtgcgtgtgtgtgtgtgtgtttttttttttttttttttcattttaactactttggttagttttctacaagtttggacaatttttctgcaatttcttctataaccgctccaaatcccacttctccctctatttcttcttctttctcccatgatgttcctcattgttaacccttaatttctgtttctccttctctgtcgatcctttatttctcttcatggattctttcctaaatgatatctataatgctctcactactaaggaaaaagaggttgtcaattgttgaccgaggttttcggcaactattaaaatataattataataaggagctgtaagaaagtgagatgaagactttttacgtggttggggtgttaatgagcctt

SEQ ID NO: 18767 - DNA, 4831 bp, Cannabis sativa
tttttttactcattttcatattttttttattttaattaataaaatatatataaaaatataatattataaatgatatagagaaaaatatagaagctgatgtatggtttaatgtaaatatgtgaggtaaaataaagaaaatagagttttgataagatattttaaagaataaagtaaaaaaactggtaagagtgccaaattatttgatgttataaagctgaacataacaatgtcactctaccatcatcaattagtcacgcatggcttactcttctgtaccataagtttgtgtattagtaatttgttgaattgggtcaacaacaacaaaaagttcacttctttaaattacatcaaatgatgtatgtaagtttgccacaaaataatggatttagtagttaaattgaacttcttttcaatttaggagtgtcaatgggtgagacatacatggtaatacaatttgaaattggcttgaaataaaaatagttgagttttttcttaatgagttcatgtcatttttgtattatgtcacaccttagccattgtcatttttgtattatatcataccttagccgttttgtaaatggataatttttgaatgatacgatgatgacaatttttgtattatcacaccttaaccgtttattaaacgaataacgtttgaatgatacgataacgataattactttaaaatatacacttatattcattatataaaatatattaagttagttaaataggtcatttaacatgtgttaaatgattaaaaaaatttcatacaaaaattgtgaatatgttaaattttttataaatgagttaatgagttgatcattttttgaattgttgtccgtacttttacttggatgacacatggcctctttaggaaggcctagaagcaacagatctatcttcagccgaagtagattcgtctatagtgaaattaacaagtcgagtttatacccagacttcgtatttgggtaggtcaagacatcatcctcccggatgacaacaattatcagatttacatcaaagaatcaactcttcaaagaataacaacaaaagatgaggtaacatttctttgagaaggttacaaggatccgaaaggatctcatgctcccggactcatcacaaatgactaagatgtctcccacgatgcttctttatcgcggctagacatgttaacaatctagaaggatgtccaaaaaggaaagttgaaaggtcattcaaggtcgtccatcaatctagatatcacatacgtgccacacctttgatacgatctcgtaagatccagggatttgtcccctctaccaactcatagaaaggtattctgtcaaaggtacaaccgccattagaatgttacagttggcctatcaacgtcaatagtactatgaaaagtaactttactgctgcttttaggatatggcttttaccatcaggcccaactcatacaatgttacacttctaaatatcccatttgtggatcaaagatgtaaataatcttccttacttggtcttgattagtcggactcattgtgtacaactacctataaatagggcatcaccgccattgtgaaaagggtttagactctacgatttacagaggactctataatgtgtaaagtaccattgttaaaagctaagtactattaattcatggactaaaattcatttacatctgaaccacataaaaatatcctctttaaatttcttttaattattttcttttgctttgaatctcttgtgtaattgatcttctaaaaaatttaataaacttaaataaataacacaagtcatataaatttaacatatttacaaataagcacagtttaaattctaatttttgataatagattaagtttgaatttgacatttatttgtaacatacttaacctcaacacaacacatactttctataaacactaccaactctactttttctgagaccattttgtgaattctaactcatgcccggagaagcttggcacgtggtggggcattttgtaagggtgcttagcactttgagtaaaatgtgaaagcatccatggtagtaactgccaagctacggtgattttctttctttatttttttgataatttactatatatatctattgtaaataataatgtatgaatatgctaataatttttagagatgttcagtatttaagtaattttaaaaaataaaatgaaatagaaaatattatattttagtataatgtggagattgttggctagcattgaaattgatcttaatgcaagcaacattaatgttacctacggaacccactcaaaattttaaacttatcacatttatatcacaaaatctcacacttctctcctccaccaagcaccaaggctagccactccattggacttgcccttaacagactaaaaagatgagatatattgattgaaccagtctatatttaaaagtgaaataatataatctatctgtcaaaattatataattggcaaattcattattattatctggctgacctaccattaattaatttaagtggcaagtggggttgtctctctttaattggggaggaagataatatggcttattaaattattggaaagaaaaaagactaaaataaataatgaacattcaagagggtcaatccataattaaataataacattaaactcagccttgccaacttccacagagccaagtatatactgttctttcagaacacttctatacttaaacacttcaattgtccaggtataatcagaagatgtgaaactataaaataccaaaggtccaagtcatatttccatgaaagatattgtaaggctccactttacaccatatcaatttaacagaaatgacttcactttcatgggaggttatcacctcttttccctaattgacaaccagccaaccacacatgaatgtgattagaattgttaaaacataaccttaactaccatcaaaataactagctttccaataatctgaaactttcacaaactaggataggatatatgttcaaatgttatgtacctaaaactcacttccccctcgtgagaattatcacacaacagatatgccctgaaaagaaaaaacacccatcatgccacaatagctgaaattacccaaacataccataaacattgtctgccaagcattgaggtttgattcataagggagtatagagcaaatatagagaaaaaagagaagaagatcgaataccaagcagcgacataacattactaggtaatggtccttcaaaccagcacaaataagaacttacacacaggagccagcaaagaaatcgtcaatgctaaacgaggaatacataattcccataaagatgtcctcattataatggcataagcatttttaatcaatataaaggacacctaacaagaccagccagtcattcctatatcaaaccacatggacaaagagaaaaataagaaagcatcataatttgacacataaaatttttacttagtccatgacctagatcttatcaagcttctctgccttgactacaggattggctttagcaatggcgtcgcgacccgaagttcggtagtcaaacggacattcgtgtttgtcagagtagcgatgacttgagcaaaagaggttcccacacttgcaattgaatcctgttaaaccgacgcgttttcgacaggtgtggcatcggcttggcccttgtttcacattttccaaaagcttgctcgaggaagaatcacttgctggttctgttgtaagaatctttgtctccacttgtcccacctgtacatcaacaacaccagctacaacaggctccttcccgttgctgctagagctgccattcacaatactatcaaaggatgaggctgcaagtgtggcctgttcctgcttaagtagcatgtccttgtagcatttagagcacatgttcatcgtggctgcccttccaaagaagccacagttgttaatgcaaaggatggggcattctggtgcctggcagcctgtttcgtttggagactccatcttcgcctgcaaaatatatacggtagtatcttaatttaacgccaacaacatcaacaaaagttgttgagtgaataaaatacacataagaatgacaaccccaaagccaataactgacactagcttagaatagagtccccaagaaacattaacagtccacagtcttccctacagattatgaaaacctaatcacacaaccgaaatcagggacgagcacaagcaccataaaaattgtaccatataaaaatgatcggccatggccaagcaaagaaaacaatattatatagtttaacatctgactttcgttgtgctaaagataatatataagtatgacaaatgattccacaacaatgcataataaaaaacaattccacaaacaaattatgcaacgaccatgaaagaataaatactttataagaagggtatccagcttttgatcattaacacgtaaagaaaattcatctatgacaaaacaattccaaaaaaaaaaagataactaaaagaaccatgaaatttgtacaatccgaacaatgtcaacaaataatggatgaggaaaaagggaactctgttacatgtctcaaagaccataatggaaaaaccatattcaaaaaaaaacatacataaaatagctcatcaaataaaaacagtcaaggatgttagcaacgctccattaaaagtcacagaaaaccaaaaaccatgaccccagaaatctttgaaataaaataaaataaaaaaaacccagaaaaatctgacgatgaaattcaaataaattaaagcctatggaattaacatacccaataatgttaatcttcaatcataataatagtatatatatttaaaaaaaaaa

SEQ ID NO: 18768 - DNA, 4670 bp, Cannabis sativa
  modified_base (52)..(56): a, c, t, g, unknown or other
aaatgatagattttaaaaaagaaggtaaaagtaaaagaggacaatataaaannnnnatagagtgtaatttcctcatatatattcgttggtttatttgggcctggatgtcgtttgggcctataatggcccatctcaaatcgaaccgttaccagcgcgctcctgagtcgtccgttgacaaattacctcttctcatatatacaactaattttggcgggagatgtacttcttcttcttcacctcccaacttccacgtccttttttgttttcctcttcagtaaaagaaacaagtgttgaattccttagtcaaaatgacgcaaacaacggagccatacatgtgggaacttcagtcagattggttctcacctactcgccttcgtagcaatcccaacaccccatacgattttccggtttaaacttttttgccttaattcttgtaacacttctttctttttccttctttacaagtttggttactgattttattttccttcttgattgcatttcttcaacaactaaaaaaaaagggagatcggtttataccaaataggagtttgatggatcttgatcaagcccacagtttgttgacaaacaggaccaaaccccatcacaattcgaaattcagtgtacattttaaaatggacttttgtgtgtttgatcgaatttcattgaagggtttttgagttcttttgtgtttatgtcatggggagtctgattttcttggtgaaagtattttcaggaatcataccggcaaaaagtagaggacaatctgactttggattcacaaggtaatccgtttaggatgttggttttcagagggagtccaaaatctaatcgaagatcgattcgatgtgtcgatgagaagcggcgagatgaggaagaggaacagcatagtcataacaagaagtttcatattcgaagtttgccaaaggtgtagggaagaagcaagttcacctaaagaacacaacaactgtttttatatttttgtttagctttggttttttgtgtggattattagattactttattaagttttagtctgcgtgtgtagggagaaaccaggattttagatgcaccaagaattgtaaatgacttctatatgaatatcatggattgggggaagaacaacgttcttgcagtggcattgggatcagaattatacctctgggactccaagactctgaaagtagagaagctatttcaagatgttgagaatgatcttcctacaagtctagcctggtctaatgatgccaaacttttggcagttggatatatgagctccaaacttcaactctgggatcatgagacttctaaacttgtaaagttcttgaccattaccattagaagtttttcttttacttagaaaactcgttgttgaagctgttattctttgacaggttagaagcttggattatcatacagataggatatcaactgttgcatggaatggtcacattcttacatctggaagtcaagacaagtccatcattaaccatgatggtaaatattgttcacctatcttcagctactttgatctggtttttaatggatttgttgattgaacttttttcacaatttgtatattctgaaatcattttaattatttgcagtaagggtagcaaacaaactggtttcccgattagaggtacacaaagaagaagtttgtggtttgaaatggtcagaaggcggcaaaatgttggcgagtggtggcaatgaaaatctcatacacatatgggaatcttctaaaatgatctcatcacagttcttgcaccgtttcaaagaccattgtgctgcagtgaaggctcttgcgtggtgtccgtatcagtctgaattgcttgcatcaggaggaggcaccaatgatggaactattaagctatggaatacgcaaaacggcacctgcatcaagagcatagagacctatgctcaggtaagttatggtgtactttcattgttctcattcgtgtttaaacaattattttttggccgagaatgcatcgctatctttttctggctgtgtaaatcatggcgttgttgctgtgtggttccagatatgtggacttgagtggaacaggcatcacaaggagctgctgagtggacatggcttcggttatggcggccttggtaatcagctatgtttgtggaggtatccatccttaactaaagtgggagacttaaagcggcatgcatcccgaattctccatctttcgcaggtttggatatactagctgagatttctttaaagattcagaacatggaacttactttctttttctggtttgcctgcagagcccagatgggttaactgtggtatcagcgggtgcagatgagacacttcgattttgggacctgtttggaccgcctcgtgctgaccatacaaagctttcagatttagatggccttttatctctcaagacttctcttataagataatgaaatcctacaaacaggattatttattgctctccaatacagagaagattagattcaatagtgaattttggtagtagattatttgatttttaaaaagcagccgaacaagaagctcaagacagttacatgattaagattaatattttgtacatgacatgttcagagaatgaaatagtgttctcaaatttatttcaaatgacaacagagaactacatactcaagcatagacattcacaatacaatagaaataacaaaatcttggtatgagtatctcatgagtcctgagtagtgacacacactgacctctatatcaccttcacatataatattttttttaccaggaatttctaagattactattctcacgtcacggcaaaatagaaagaaatcattcagcttctgagtcatcactaatactgtctactaataattcgtcatcttcactgtctgatggattgttctcctcctttttcctctctttttctaactctctttcagcagcttgagcctttgctgcttcaagtctagaactgacggaatcccatgacacaagtttctccatgaagagtgatatgtaatctggtcgtcggttctacatgaataataaaagaaaattttgtcagattttgcagcattagacactttccaaagattttacaatgaaaagaaagggcagactgtttttcgtttacaattcacgataagtcaataagaaatctcacctgaaaatcaaggtagtaagcatgctgttgaggaagaaaaaaaaaacaaatccagaggtcagtaatcagtaactaacatttttcgattcaattaaaaatgaagacaaaaaaaattgaatacctcccaaacgtcaatggtaagaaggggctgcatgaaataaataaataaaatatcattacacacaaaagtaactgggaatatcaaatttatgatgcatatctgttaataaattgaatcatgaaatggttttgtcgataataaaactcacatagtaatcccaaacaagtgggtttacagcattagggctcttcacaatcacaagctttttatcttgctctgttggcttagggttttctgcatttccgacatcaagtgtatttgttttgtctatatcaaaatgcaaggaaaaccatgaaagttaatacaaaaacagaacttttatattgaacaaactgctgatatgatagcaaagcttaatataacactcacatgctagccaagcccagccagatccaaattgtgtagctgcagctgtcttgaattctccaacaaacttatcgaatgatccaaaatctctttcgattagctctagaagctccccggatggctttcctcccccacctggtttcatggattcccaaaagaaatcatggttccaaatctgcagcatataagcaactggaaacttcaacaaaggctactgaaaatatataaattacttattgtgcatgtttgtctatgagagcgagagaaacgatgtgaaagtaagtcaatgtgttaaggttactacaatcaaagctcttatggcattcatagcaccttctatcaactaccaaaagaatacagactatatgcctaatgagaaaagtaactgaaatcatattttgaagaaccaagttaaattaataaaataggagtttaacaaaacagattcttccaatgctaaatacaagttcacaaccatatgatactcttgtttgaatacattttcctaatccaatcaaaacactagctatcaactcaaaaactcttacctgcgctgcattgttgaaaggaggaagaatattccccttgttgtaggtagtgactataacatcttctaaagacattccttctagttctgttcctacaatttgcttattcaggttatccacataagccctatggtgcttcccccagtggaaatcaaaggtgttcttgctcatatgcggttccaaagcattctgccacataatgtatgatgatgaaatttagcaaagttatttaacactgtaatatagtttcattaagcaaccatgatatctacaattgtttctttttatttttttggaataaacttgctagagttatcatcattatgaaagttctcaatacaatcaataataataaaaaaaatgggatttacttgaaaatctttaacttcccagtttccactactaaacaaattgtacaaaaacaatattacctttaaactctatttcttttatttgttacacaaaattctcctttaagaacatttg

SEQ ID NO: 18769 - DNA, 5280 bp, Cannabis sativa
  modified_base (583)..(583): a, c, t, g, unknown or other
tacattttttaagtcccgtattaataaaatatacctctatataaaaataattacatcttaataaaatatatacatgtattttataaatttacttgtagaattaataattttatttcaaattataatacatatatcaatattatatgtactcaaaaataattttaatataatataatattaagaattgtttattggtatttttgttacattgatattttttgaaattttgatttcttttttagtgtaactctatttagttataaccacaagtgaaattcgaagactcaggcaggcgctactaatactataaatagaggtacatgagaccgccattggtcagagagagctcacagttaatgaatgaggttttgctctcagacagagccaactgataatgggttggatcgttttcatgaaaaatggttgcccatttctttggttctctctgaatgtttgtagagccaatgattttctcttctctcaacagcaacaaacaacaacaacaaaataaaataaaataaaaacataatggtggtgattgcagagtattttcctatggaaaactctctctctctctctctcnctctctctctctctctcttattgtgtatgtatgtatgtatgtatgtatgtgtatatatgtatatattttctctaggccctgaatcctaaaccctaacgaggcagtgatgatgatgctcttgcatgttgtaaaaatcagactgagagaaaagatcacgttgcttggcgggggtcgactcggcttctccgccggaaaatggatgggtcagtccttttccaggtggcgctccgtcgtcattcccagccactggtagctgtttcttctctctctttccttgtctgagaaaaggcgaatctgagcctccaacaacccttttcccaaaaacttcactttttcatttttgtgtgtatatataaaagttataatctgagtgttatattaaagaaaacagaaaattatgaaaaattattgcttcattgattgatcattatttttgtgttaatccaatttagcagacgaaagaggtaaaagaaccaaaagtttataataaaatttactggttaaataagactgtcatagtataaaagctaaatcaaagtgtttactaatggcacaaatttataagtaacagaacaaatgaagaaaaagaaatgagaaaagaagtagaagaagccacactgactgagccaattgttcttgtttaatcttttaagaacagaatgtgagcagcaaactgggtagtattgctgccactagagaaaggccaacatttgcagcacttgccaaaccacttctggacccacctctctgaggtagattttccacatcttttggttcgttgactttacccagaggaggaagaggcggggcaacaacatctttgacttccagaggttgagctggagcttgtgctggtggttgaatctcaggtgggattaagctcaggagagagcctgcttctgctggcaatatggcatatggtatgttggcttttggatcagtatctgtacatgggcaccctgcaaatcccccaaagatagcacattaaacttgtaagatagtaaaatttagatttatagtatagaatggagactagtatggcaagtattatatatctattaatattgtttactccattcactactaatttggttttttgtgaaagatgggttatgcttacttaatctttgttaacacatagtaggaccaagtttagagggtaggaataggatgtgttaagagttgttagatattgcttacttcattttcaaccaattttgtacttttgctaaaggttttgttgtgttgtgattaataagtgtgttcttagtgtttgtgaagaggctgagaatagagaacttactcatgtatttacttgcagttcctggaaaatcagtgatgagtccatcagcttgaacagattgaacataagtggcaatctccactattgggtcactgaagtaatcgaaagccagagagacgtactcgttcctgaactgatagacatagacggagagatttgctgccttcatttccttaacaacatttgtgaaccccactgtaaagaaatcattgactttgactatggaacttctgggaatggtcactgcctctgcatacttctttatttcgtctacagaagctttaggtgcatcccctatcttctccttgattttcaacacccttttgtaagctgggattcctttgaatttggatagaacagaagtgtcatctgattggatcagaacttgctgagttgattgcttgtcaaaagtggcattggttaatgctgtagctactttagctacaatgtcaaggtttttatttgatgctatataggcagcattctgcgaattagggggtttgacacgaaatataaagtaagttcattagatcatcttatgtagaagtatagaaagatggcaatcaatgtgttgtttgagatgagagttcacctcaatattgatcaggatcccagaaactgcctttgcctttgcaaattctagaaattcggagagggacacgaagcttcccttgttcttgttagcagggtttcttataatgctgctgttaccaaaaggactcaccagttgagctgaaaaagggggaaagttcataagttaggagctaattactatatcaaaccagcaggagttaacatttctctgcaaggacagttatcaaaatgaacttacattgcaatgtttgaatctcattccatgtaagatcgaatgaaaacactccttcttccggttgaatttcagggatgacagtttttctatcaatgaaaggcaacatggcagtagtatctccggctagatctgcacttggtaagcagaatgctactccgtcttgtgacaattggaccgagcaatctattatgtcagccccgtcttctactgctctctgataagcaaggtcactgctgccaggatatatcccactggctccattgttactaatgatcaaagaggctcctgcagaagttacaagaaactattatcagtactttgcattgggattaggaaactagtatgagtcatgacagtaataccatttttaggtttgctttcattcttcttgtgtgcaaaacaggctgcatttgaaacaagcattggcaaggttagttcattcagagcccccaatgaaaggtttttggatcattacatgaaataagaagctctgataatctcacctatggcttctgatgctgtaggagggaaatctgtaagcaccccatcaacagagaacttagagttatctacaaactgggtgtactcagctgttggatcataattatagtcataactcatgggaacatcgtttgcgaaaccataagcataaacttctaatcctagtttgtgggcatcgtccacaagagtagttggttcgtccaaatatccatcattgtttgtaggccatatgtattcttttgggacaagaattccagatacatagggcttgaccaaagaatcaagactctgcaggattgatttgtacttgtgattgattgttggttcaacatcttcaaggcccaggaactgaaataccagctttgttttctttttatttactttactattcatgagtttcaagaaacctatctcaggagatgaaatgtagtttatactcatatgttttgatgctgtgtcgatgtatgctgccgggctaagtttacgctcgatgtagaatctttcgtactgccattgaagaaaaagatcaagcacaccaaaattatattatgtttatatacaggtattcattcattgttaacagtttttgctcattgcagattgtagaagaaaaatgtatctgagaaagatcaatcaacctggacatgcaaccaaaactttggtggcttaattcctgtgacatcttcaacagtagagattggtaattgaccatcgaacaaattggatcgagagtatacattctgcatcactgtaaatcaaaatcaaaactggttatcactaaaccttataagagcttgtctgtttattgaaacttgtttagtaaaacttacatgtaacattgctcaaaagttgatcagatgtataatctactgtgaaccacccacgaacactttgaccattaaccttgtaggtactttgtccttttggatagattgatgaaatagtagttgaattgtcaattcgtatatcgggaaggcataatccaatgccatcttttgtgagttgcaggttgcaggagacagccatgtcggacaaacttgtagagacagcgatttgatttgcgaaactgctcgattctgggaacagccctgaaaacccgcctcgggctataacaagtggctgctcacctgccataaaaatgagaagaaaagaagtttttttactcaagaaatcaaatcaatgtaatgaactttatcgttgagcattttgttacagaatttgcataagttgatattgattataaaagttcttgctatttgctttgctgttattaccgtttaaagtttgccatttcgtcggagacgactgagatggcttctgtgctaaagttgagtgtatgaacagggaaacaaaaatcaaagcccttatcattttccttctttaacctgtcacatagatttacaaagggaaaaaagcatattagtcaagagatttcatgataatcatattagtttcaaactacttcacattataaaataataaagtaatcttaatataatgtaatttcattactttttatagaaaaattatatattgttatatatcaaaatgccattccaaagcatcatttgaagaacatgaaaaatttatataatgaaacatacaaacatgtcttcattaaaaacaaaaaaaaaagacacacaagaacttactcaaatcttattagatgataagaatgaaagtacacattccctgttaagtttcccaagctaattctctaggaatctaatgaagaaagagagagagaatgagaaagaataggggtttaaggagaggtagaaatgaaagactaagaatagaaataattacttccaaaaaaaggattttttattttttattttttattttttattttaatatgttgtctgtaattacttccattcattttctcggaattataattggctagcatttacttaaacaaaaggagaagtttttggttgaggtctaatgcattcatttactattttggttcgtctttcttggaccaacatctttgtgtttgtttcccgggaaattagacagctcaagtcctaacggctttaactgttttttttttttttt

SEQ ID NO: 18770 - DNA, 2067 bp, Cannabis sativa
ttatatattgaattataaattttaccattcgatttgattccaattaattgcaattattcaattgatccaacatctattgacacataaaacaaagtcaaatttgcaatcaaataattttattttgttcctcgatacgaaactaacattttttcaaaaaaaaaaaaaaagccatataatatatatgatgagttggctgcatataaaatactctactttgtggctcattaatgttaattgcaaagaaaataaaaaaggaaagagaaataaatgttgaaatgagaaaatacataaatcacccgctaacattgtgtaacaaatagttttttctttcttcctgtatctaaactgtcatgtcatggaataacattgaacaagatgatgttttcaaaaacatcatactatagtttgcatcacacattaaaattgttatattgtgttttttgctggaaaagtttgaagtctaacttctaacaggtcaaatcacacaaaaacatttctgttttggtttaaatgttacacggttagaaattactcgaaaattaattaataattggttttgaaaaattacttaatttttggcaatagagtgcaatatggaattttcactaggcttgccgatccaccctattgagattgcatcaacaaaatcatcatttaatgaaaaatcaaataaaagttaaccaaaccaatttcctcaagaaaaggtttctcaatagtaataatcaatatctgaacaaacaaacgaaataagaaagcaaaacgaaagattaaagcacatcctctcaataaggctagctagctagttgtaacttgattttggtaagtaagtatactaatattcaatgcaataagcaaatgaattggtctattctagtgtgtctatgaaaactaacgatcaaaaaattaaagatttatatactaatagtttattttatacacaaagaactagtaactgatctaggaaaccatccataataagaagaagaaaattaaaaattcaaacccaatccacaaaacggcgtcgtcttcgtcattggaacatcaaaatccttactagaactggcttcggagatcttattccgaaggttaatcaacttagccaattgatgatcacactcttcataccccatctcctccacaggtttctccaaccacgcattaatattattattattctctaaaattgaacccaatgttgcttgtctcactacttgttttttcttcttctcagcctcttccaactcaatcatggcattcaccaaattactagtactattaccattaccactactactactcggtactactacggctccagtattgagatatgagcttacgacgtcctccacagatgggttgccaaaggtgaagagtttgccgttgggagagaagacaatgacggctacctccgacccacaaaggacactgagctcggcggctttcttgaacagaccagagcgtcgtttggagaaggtaacttgtttgttactcttcttttctaatttcttaatttcgatcttttgtcttccttgggtagttctcttattattattattatcatgagttttggtttcttcaatggatgccatatttgaaaatgaagaagaacaaaagtaattgagagagctaaggctttattatttgtatgaattgattttattttattttattctcgatcgactctaattatgttggtttcctcttatttttctttcttttgaattgatttattttattttctaattttattattatgtgcgattgtgcgtggtttctttttttcttttatatttaattaatatactttctaaatcttccttcataaacaaaatcttcagcttaattaagattatagttgaaaattctaaaattgcagtaaaggcaaaatcaacacaagtgtttccaaattaggaataaagcacactagcttccatatatttagccaaattaagtgcaaattttataatagattcctcataatatactaaaaaataatttaatttcatcgttttaatacttaatgttaatacatcatatattagcttttttttcttcatatatatatat

SEQ ID NO: 18771 - DNA, 2306 bp, Cannabis sativa
tatatataattattttttgcttctttgatggtttatatgcacttttggtctaagggttggtatgattaataaaccaggttaattttcattattaagtataacctagaatatacctgacctggagtattaagatctagatggtggtgtttgatatattacaatccaatgtcatactggttcggactttttactattcattttttccagtcccgacttgttataattttatgtatttaactaatgctactgcttagataatggcagtgttgtccttcttctataaaacatgttttaattctgattatctcaagtgtgattgtggggtttcgaggaaaggaacctttcatcatttagagttgggaaatggaacctatccttaaaatgaaccaaccagcagggccctggctcatttatggcccctataatccattatgagccactgagcacaccttgattcttgccttgagattttccttttcgttaagaaaacaaaactttgcctttccccgaaatcccaaacttatagttggtgtgaattgactcaactatttctatttgtaaaatttcatcatctgtatcagagaactttttccattgtttcttatttgaatagaactagtcagcagacagtgaggcaaattaaaaatattattgttttattttaatccttttacacttattattttgggttggtgagggaatgggctgtgggtattttaaacacccttttccttgttaaagcaggtgacctcaaatttaagtgcttatgcctatattgattgacaccgtcatagtataaattcatttggtttcttttataactgtatgccaggagcatagggtctttaaattgtcttactcgtatcgttgtaaactgatgggattgtggtaaccctttcataggtggagttgcatcccttttggaggcaagatgaacttgtaaagttctgccaattaaagggcatacatgtatcggctcacacacctttgggagtaccttctttagctcctggaccatctgatagcagttctggtggagaagatgaacctggaactcctcgcatatcattcaggaggtcaagatctgtgcatgggcctatgctgaaattatcagtcgttgcagagatagcagacagatacaagaaaacacctgaacaggtaaatttgaactcacgttttctttttgtcgaaatactacttatttcttcatttctgtctttaattctgtcaagtttgtaaataggaagcatttggtaaagttaagccccattatgatcactatgacctccatggcatataaactttcatggattgcaaaatggggtagtctgaaatttgctaaatttgttcttgatatgcatgcagggagttttgatatgtttgtttaagaagtattttctttttcttagtaaagtagagaggtgattttttcaatgcttcttatatgtcctgttaaaagatcttaaatcactcatagggttctagacaccacattagatcaaaaaacctatacttcactggcttcaggtttgatcaagaaaacttaagtactttttgtgtcaggagttaacatgataaacttaaggtgggaaagtaacaaactgataagattagcttgtatccgcaaaattcttagtactagaattactgaaatgttgttcgcctttaatttcttgacgttgtatgcattgaccatttgcttattcacactttggattggaaatcattttttttacaaacagtaaaaatgttctattactactaagctgccagttttctttgtaggattcaaacttttctagcataatcacgtagttgtgttaaggtttctaagtgccactgtctgtcatgtttgcctgattcaactgcataacgttgatttttagatagaatctttgctggtttgaggtgttttaactttgttaaatagtggaatcatgccgccacccatagacaccctatatgcgagggatgcctagtattgtcacaattactatttggtctcatagtaaggtcccacatagggttctacatggcgatgtcagcaatgacttagacgatggatgtaagtgatgacataatcaagttgaaaatattttgaatattttgttcgaaattttaggaatagacattttcagaattcatttttttcatcctaaaattttgggagtgatcttcactccagattttcaatactgattagaggtttttgttttccttattttcttttatatattagagtattgtgactacttttattttgtgagagtaagacacctttaagtctatactagttgctatgaata

SEQ ID NO: 18772 - DNA, 3087 bp, Cannabis sativa
aaaatactattataccttgtaatagtaattaattaaaaaaaaaatttattatttgacctaaatttacattcgcaattaatgaaaatactcatctggttaaactatcaaaatatttaaatttaatttaaaataatatttaaaatttaactaattctaaatatcaaaatttgaaaataatttttattaaaaaaataaacaatatgaacaaattatcactcaataatttttcataaaccaagaaaaaatagatatatatatatatagtgtccaaaacacatgagatataaaatgtattatattatatgacatttttttataatatttttattaatgtgtcaaaaaaaaaaataatttaatgattattatagagtattaatttatttccaaacagaaaaggtattaatatttacttttatatgtaatttatttgaaaattttgtactacatttactataatttatattaatttttcatcatatatattacttaaagtatttttcctatttttttttagaaatttatattttgtcatctttttttatataaaacaatttatattttgttattagcacatggatactaatcaaatttatatttataaatctatcaatatatatatatatatatatatatatatttataaagtaatcatttaattttcattctcagtgcagtcaaatagaattatttagttagtttggttttttttagtaccacaatttagatatctttaaaataaaaatttaaaagagaaagagaggagattttaagttcaaataactttcccaatagtatcaattttgtcgtttcaaaaaaaaaaaaaaatagtatcaattttgttggtgactgactagtactttaattttctcttttataaagaataaatcatctaagaattgcaactgtttttcagggtggacaaagactatgacggcagaatcaataaagaagatgtgaaaaatgtaagcttcttctatagtcaaaaatagaaagcaaaaaaatgtagatagtaaaaatattattaagatcagtacaagtagcaaaaataaatttatgacctgaacatgctgattattgatttttgtttttattttttactatttgataatgcagattattaagcttagtgccaatgcaaacaagttaactaacattgaggaagctgctgaagattatgcagcacttattatggaagagctagacccagacgatcttggcgtaattgaggtctggatatatataaataaataaatatgtacataaaaaaaaatataaaaaaaagtgttatgggatttgaatctatgactttagacattatatcatccacatcaactaattaagctataaatattcattatttataatatacttaaattttaataattttttttttattttttttattttgggcccccaaaaagtatgggccctaagcacgggcctagctcacctatactagggccggccctgtatatatgtacatagttttagaatccatagatataaataaaaatcgcatttaaaaagatacgatgaagaaaaactctaaaattgatacaatatagtcctctctagaagtttttctaagatttttcttctgaaaaacgcaattaatcgaaggagcctaccaaaactaattctcctaatttttcttttctagtcccattttaacattttaatttggacaagaaaattttaataaacatctcaagtcatcaccaacatatgtctaggttgcggcctaacatgcattagctatatatgcatgaactatcaggtctaggctgggacttggactttttctaggccaagagtctgactttctctttagtattctttgacagctactaattagtattttgacagtacctctctcgttataactcacaattagacaactcaagatgctatggagagctaaaaaagagttctataacttctatttttgtaagtttgtaaagtgaggaaatcatgtttcaaaatgttgaagtttcaaaattgcattattaagcataaacgaagtgtgctgaatattttcaacttagtacttttgactcataatatataaagttctagactcaaaagctaaatctatcatcttcatcatataaaatatgttttttcttatttcaattcatatcatgcaattgttaaaaccttaagctagaaggaaacaagtcgaaacaaacacaatacttaagtgaaaataagtagatatcatctaaaaaggactctctaagtaacaataaatatcaacctaaaccatcatggcctactctttaagctctactcttggaggagtctttccctcaattcctttaagtttcagcctaaggagagaggtattaattaagttcaagtactttacaaataattcagggagcaaaatcctataagttttatagtttaggggtaaaatttttatttattcctaaatatataaaaaaaatcataaaatacctcgtacaagtttttcatttgataaggctagctctgcttttaagaaaagcccaataatgtggtggccgtactttgttgatgcagctataccaattggaaactctacttcaacaaggcattctagagaacccaaggaagaagaagttggatcatgagaataaagaatccaacaccataaaacgataccacaaaggtcggttcaagcaacttgtaatcaacatgtggagaggtttttggattgtaaaggagaactggaggcgtatttgggtagtggggttgtggctagccatatgtgtaggtcttttcacgtggaagtttatccaatacaaaaatcgagccgtgtttgaagtgatgggctattgtgttaccgctgctaaaggtgctgccgagactctcaagtttaatatggctctaattctcttacctgtttgtagaaataccataacattgatcaggaccaagacaatgttgggagtagtggttccgttcaatgataatatcaactttcacaaggcaatatcatctatactatttctaattacatatgtctctattttgataaagatatcacagttttattttcttaattatggaaaagtagtggtgtgtgttatttaatataaatat

SEQ ID NO: 18773 - DNA, 2492 bp, Cannabis sativa
ttttttttattttttttaataaaaggataaaatgggaagttcatgtaatcaatggaattaatttgtacaaattagtggagggtctaaattttgatattgtagattttattaagggcaaaaaaaaaatgaaatttcccattctaaatcattggtgttgatgaaaacgtgtagtattagctcctaaccaaacactaccaatttccttggccaccacttgcattgcaagcttagtgtactggttataatattctaaaaatatatatataacaaagcttatggtgcaccaccactgcatacacactgaattcaattctagaccaccatttccactgaacctacaggaaaggggatcagttggcaatccaatcaaccatatccagctcattttaaatatcaaaagcatcaacacacaggttccacttccaattgcttttattgctgcttctatgcactttagctacccaattttgttgtatttcttcatttgaatcttattgttaaatagaataattatacaaaaatacaataatatatgcttggtccaaaagatgtataatctcaaactaatacctctctccataataaaaacatgggcttaccagattttttaccccataaattattgagtattaaccgctccgaatttttacagacatcccgagccacgtgtcaccataagaatggttggagcgtagtaagcctacaaaaagattgctgctgaaacagcatgattcttttctaaattaatatcatcatcttgattgaattgaaattctacactgtaaatggttgctcatgtatactacaaattacaatagctatggatgctaatgctacaatcattataacaggacatttattatctttaaaaacaatgtgacctcataattccattaatttctcaaagaaaaataacagaatggtctatgatatgtattgtctcaaaatagtccaaaaaaaaattgtagatacaattcaaaggggtgttaagttattagtaaaccaaaaaaacaactatttctcataaaaaaaaacactttttttttcttcctttctgaattactttactcccatctcatttggcagagatcaatggcttaaaattgtcccacattggccaaaacacatagaaaaaacaagaacgtgagtataaatacacaaatgtgatacctcaataagaccaagcagttgcgtgataagcacaaagcgaactattctttcgccttttactaaagaataccgtgtgctttccacatagagcaacatactctaattttttaaagggatttcttttataagaaatcccaacaattaagtttcaattttaatatataaatataaatttatgtttatttaactaacattgactgtacagttttttaaaacaagttttactactaaatataaataaattagttgttcttttgttcttgttaataactacttacttttctgctaattatagaattgatattagataggattcgatgtgcttgctttactatatttatatttatatatacacatcggttaagttaattgttagaaaatattttcttgttaagaaaaaaaataagaacaacaattagagtttttaaaatgatatctctgtcatcattactacggtttaaaacttttcacagagttattttaatttgtgccattgtttttctcattggagattctcaaggtttgttatcacattttcaactcttacaatagagtaccaaataatttgagccaaagccatcccatacaaatttcatatataaacatgttgaactaagtgatcacatctatatttcttcacaattgattttttttttttttttggtgtttgttgtatagcccttgaaaatgaagaaatgaacattaagagatctgactttcccaatgattttgcatttggagttgctacttctgctggacaggtatttgagacaataaatatttacataaaataagtggataatgaaaatataatccaaaattgttttctttgaaaatgattaaacaaagttaatatttacattttatttttattgtgataattgcagatagaaggatcagcaaataaaggtggaagaacaccaagtgtttgggacacctatgctgcaatcccaggtaacacaaccttttaaattctaaatttaaaatgatatatctattattgagtcataattttaatttctcttaaatgtgtaggtaacattgaagatggaagtaacccttctacagctatagattcttataatagatacaaggtttgaacaaaaattgaaataataaatcaggccattttattttattttattttagtagtattaatgtattttttttcttttttacaggaagatatagagtacattaaagagcttggaactaattactatcggttttccatctcatggacccggattttgcctagtaagttgcacaaattaaatacaaaaatacaatattaaaaattgtagggtaaataccattttgga

SEQ ID NO: 18774 - DNA, 4209 bp, Cannabis sativa
aatgcatgttttgccacctctgtcaactccttgaggtcaagccaatcctaataattgtccatgttacttattattatgaggaatttttgacaatttggttagatttcaagttgagtatcttaggagcttgtataatctattccttgaagttgaggcaaatatttctgcctatagctcactgtggttttgaaaagaaattgaaactgtatcattaagagtttgagcctttctaaggctagtactcacctggcactaaatttaacaattataattctcaaaatttggtagggttgggattttgaaagaaatttgttggcaatgaatagagatattcaattattcatctgtttttttttttgaaaagggagcaattattcatctgtttgggcattgcttcactttaatacatcagttttggatagctttgttggttgtttcatgttaatgttttatggaatttcaactactcttaggatatcactaaaagtgatacagtggatattgggggtgtattgtttgtgacctatatttgctaaatctattatggttaagggtttgtttttgtattatttcaggttaacagtgtgaggcttcctcgtcatgttgctgacaagaggtttttttgtggcacggccttggttgagttctcaaatgaggaagatgctgaaaatattttgaagcaaagttttgattatgcaggtgctaagttaaacctaaaaccaaagtaagttttgcttgtatccactgcacatgccagtcgtgtggtctttattttatttttaatctttactttgtggtttagctttttatttcgatgattcctgttccaaatagattttcaatgtgtgaaaatctgatgtgggttatatctctacttttaaggatgttttatttaattaattagatagttgaggttccagaacttcgcaagcaatattattatcttttctttgtttagaatggataagtgaagcatagcagttttatctataacaaagctgaactttaccccaagaaataaataaaagagaagccttctaaaatagcatttcctactcaggaaggattttgatgccgaaagagagaaagaaacagaggaatttgagaaaaatcgttcccttgcaagttcaaaaggcaagaattcccccgaagcaaggtaagtagtaattcttgtgacgtgatttatgagggtcaactgacattctcatgctttactggttataatctcattatcttcacttgatgatgatcacagttatacaaaaggcttaattgttgcattcgcattaaagaggatctcagctgaaggttctgcagaaccaaatggcactcatgagccagccaatggtagcattaatgctggaactgatggagataatgctactgaagatgttaagacagacaacaacaaagaagaaaaagttgaaggggagagtgttgatagcaaaatagatttggagaaagatgggaatgaaattaaagacggagaaaaggcttctgaggctcctgttgcagagagtgaagagaaagaagaaaagactaatgctgctgctaccttcaaagataacatggaagtaattttgcgagaagatctgaaggctgttttcggaaagttcggtactgtcaaggtatcttatatgataattactaaactctgtcatttaaattggagcccattttattttttgttcgtttgtttagtttatggtcctcttaacactattcttttacttgagaaccctctgtcttccctcagaaatctactcagctatttttattttagcctctcaggttcctgaattctctcaggcacacataacatttttgttctcacatcttaagtactaactgttaagagttcttatcctgccaagtgccatgtaaccgtttttttccttctaaactactattcaaatttttatttggaaaagctgataaacagtatttcattctgaatctttttggtttggttttcttttgatttcatttttttctgatattcttgcacttgggttctttgttgtggtaagtatgtggattttaagatgggagaagaatcaggatacattcgattcgacgaacctgaagctgtgcagaaagctcgtgctgcagctgttctggctgaacaaggtggtctggttgtgaagaacttcgttgctactctagatccagtcactggtaggcagcaacatttaactgtgattaagttcatttcacaattattggttaccttcctatttgaaaatgcctgaaataacttttttcgccaattgctatttgctatgctacgtactcaggtgatgctgaaaaggattactggagcttactcctccgcggtaatcaagacaaacgggattttaaaggcaaccgtggaaggttagaaaaaaacccataatttatgattcaatcgatttatcatatgatgttgtctggtttttcatttttggattcccgaattctgattgtggtcttgttgttaatatcgttttttgcttaaacaggggaggtaaacacaacagaggctggaaacatggccgctcaagagacaatgatgcatcgggtggtcgctcagctaaagctcagaaagcaaattgagaaaatatctatagggaaacgtttagatgtagtttttcatgatcaattttgtttgaagcttacagagaaatgtggccattgagagctctatgctcataatggcttggtggtctgttatgctctagttttgtgctgtgaactgtaacacagcagtagcatgcttttgtaacttactatttattagcgttcagtttgtgacttttgaaattaccaagggaaatttgaggatctacggatcctaacttattaaatatatgttgtattgattgaaatcatacaagttaaaacatatgtgcaagactatgatataatatgtttgcgatggcttttttatcaaaaaatttgattttaaagaagcgatgctaaaacaatggttcttaatttttgaggccagaaacgaaaacaatactaatacgatctctctctctcttactaattttaaattgttttgcatgtatgctgtaatgattgaaaattcaggcaaaaatgatgtcgaaactaaactttattttagtggctcaaaattatgttaaaagagtgtttgcgataatgcgacgatagttttgaacttcttttcaccacttgtaggctttctatcttcatgcagtattgttagcatgtatgttgtatattgtgtgttgtaataaaattagactagagagggcaaaacggtctatgaatatcagcactgaaatgataataaaacactgtcccatgaaaatataaaaattacaggaaaaaagatgctaaaatgaagatctcatggaaaataaaattttgacgtgaaaaagaaacgatgctaaaatgaaggttgtgcgaggctctcgtcataacataatttcggaggcaaaaaccaacgttgaaaaacgatactaaggctatacaattcggtaattttcttggaaatgaagtgaacattattcaagaatagtttcatgaaaacattttagatgcaaaagatgcaaagaataaaaccatataaaaataagcttaatgatagtgcatgactatttttagacaaaaaatgttgataagtgatgtttaatgattgtctatcaacgttgctatggaaaattgttttgtgaggaaaagcaatgcaagacaatagtttcacgatggtttgcgattaaatttgataaaaaaaattggcgaggtatactttttcacatgaatgtttctttaagatgatttacttattttttcttgctatgttttagatatacacatttagaatttgtataaccttaaacttgagtgaagaaactttttgtaagattgatgtcgtctaatttgttacactgcggttgtgttagtaaatatctacaagaaataaaataacacttgaaaggacacttagtgagttctagaaaaataaaacaagaagcttgaatgtgatgaaaatattaagaaaataattttgaaaaattaaagatgtaattaaaatgaaaagtaattagaaaatagatatgaaagacacaagtttcgtacatgtaattatattttcctaataaaattaattctctaaactcaactataattctacaccattatttatagttggaaaatgtgtataattaagcccactagaaaaacatgttctctaattaaattaat

SEQ ID NO: 18775 - DNA, 8299 bp, Cannabis sativa
gcataccgtcttctaatttcttccatccccaagtcttgcagatataaatggatgctttgaaggatgcggtcaaggtcaacgtcataaatagtgctttgaagaacctatgcagcaggaaagccaagttgtaaaaatatgtcagattattttttggaacacaaacagaagattttcaaaaaaaaaaagggaattaagggaacaaaggcgaaaaacataactgaaaaaacaagttacctttgtaagtttaattaaacatttgacaaccagatcagagaacttctgatttctgacagcaaatgtctcatttgatgcaggtgaaggccaccttgagggatctaatggacgtaaaagattgatgagaacaacaaaggacgaagttctatctgcattatcctgtaatgttgaatagcaaatcagattagaaatcgtacatgcataattgggataagaacaaatggacgaaatgtaatgacaagtaaatcctaaccagaatctttagcattagaacattcaaagcttttaaaagctggctgccatcatccatatgtggaactctctcatccaacagccatagaaggagctcagtaattagactatcaagagtactttccttgacggcgtaagccagtcttttgttttgaaatgtctgacaatcaattggaattgcacatcaacttgttaggattaaagtaaggaatataaaaagaaagattaatagaaagcatcaagcattaagacattcaacaacataagccaaacacacctgcatgagggtgttgagaacatatttacaagatctagatgatgctccggtcaagctgaaatcaaaggtcttggcaacctgttttattaaagggaaaaaaagactcataatcaatacctatataatgcccccaaaaaaaacacccacagtaaaaaactagagtctggtgatggaaagatttaagtgctatgataaaagtatggttaccttgtttgcaaggcatgaaacaagtctgtctgcatctttaataagttcatccattgcactaccttctggatcattagtggcttgcgtcagctcatgacacacaactttcattccttcaacagactgcaaaaaggcatataaatttcttactatatacttatttataatttttatacataaataaaataacaaacaagtagggaaaaagaaacaacaaacagttgctcacaaaagaaaactttcataataaatcaaatgaggccagacattgatttttttttcttgtggtttttagctatacagcggaattgttatagcaaaacaatgtaagaattactaatttttaaacacaacagagctgtaaggagaatagaatgtagggaaggggaaaatgaaagattggactgaatgccttggcaactagctactaggcccaccaaccatattatggaaaaccagaaattagacacaatattttactttatcaatttggttttccacatgatatctgaaattctccgattgactttaatataaaatcaaaattaaaaacctaaagcattaaccttccaaaacaggaggctaatcaactgtaagatataagctagattcttctcagaactagtatttcatccaactaaaagtgcatataaaccacaagtacctgctcaggagaaccaaaagaaataatatccaatgcttcattccaatcagttggtccattggtaccagcaagaacacggggcataacttgtctctctacatgtatctcagcattcccaaagtttttcctgataaaaacatcataggtatatgaaaattagccacaagcacagtacatgtgatggaattgttcaagtaaaatttgtatcacttgttgaaaatataagagaaaacaattaaaggatcacaatgcctctaataataccttgcaagtactggaccagagacagatcgcataacctctccactttgttctgctacgtccgaactacaatagataaaagttcaaagttaacaaactaaatctaataagcttgtataaataggactgcctagatcctggttatagatgtttttagctatagaaaaaaaagtaaatagcctcaaacatgttcaaaaatattggtggcagcacaaagcaacaatttgaaaatctaactatcgcagctcaacagtagatatgggaaaacaccaatgtgacctctgtttatgttacaactaactatgaatagacttttcaaaagtgctggcatatttttcactttgaaatgcatgagtaccaaaagagacacgattaagcaagctttagatttggacaaaagcaaagactgactcctcgataaagaagcaaaaaactacacaaaaattgacagaaaataagatcttatactttattaaaatgttgataatcatcatagagaatgtcaaattagaaatatcaattaataaagacaccactaaagatacaaaaggcaagcttcaaaacatacccaatttccctcacagaacgtctcaaagcagctctggcttcgccaggcttcccttccttccttttttccatctctcgaacctagaagatacgataccattaaaaggatggaatggaaaacagaaacagctcatataataccataacaaaattgaaaagtttatcgtagactttaaattcaaagctcaaatatatactaaccttccatttaaacctgtcatccagcatgcttttctgagcatcggttagcttcccaacatacctccatatatcctcacctaatggggggaaatgatcattactagttagcaatataaaagctgtataattaaagagattaaaactaacagcatttacatccactgtatgcgacacctaatacaaggcaacttacataacaaattacaaactgagaaaacttaaccacacaaaagaggcagaaagaaatatgatgcctcaaaggaacaatgaatatatatttaaaatctaaaacaaatcgataatactttaaaatcaatgaatcatgacataccaagaatcttatacccagtggcaagagtattcaaagcagcttttctagtttcaccatctctttcggctgtcaagcttgcaacaatctgcaatgactttaactgcccactaatctgtcaagagaatagatgttagcatcctttctttcaatggggttggtagggagggtgaagactgcataaaataaaaagaaaaagaaattacctcagcaccatgattatctaatatatacccaacaaggtcggcacactctattcgcgtacggttgtttttcgaacgcaaaccctccaaaatataagggaagcattttgcagcagaatacgtctgtacaatttgtttggtcagctctcgtattttttcccgtaatttctcaatattatgtcccatctgcatgaaaaaaacagagtcagcattttcagtgatcgtaagaaaacctactttattatccaatgtgaaaagaattaaacacactcgcaaacagcaaaaaatacatcacagtatttgtcaatgtacgtgctaaaattccaagaactgctccattcaaaagtaaaatgaaaaaaatagcaagaaccttctctatcaaacatggtaaaaatatggctgcttctgactcggtcaaagagtgtccctcattcctcaaggtgtccaaaagttcaggaagaaattccagcaccttttattcaagtcaaagaaagaactagatattaagaaaatgcaaagagaagaaaagatcaaagagatgtaaaaacttgaaaagtaaataaataaacataccttcaataagcatgttgtgtttgatttacagaactgtaaaacaaaccatctcagtagtatatccagaacttcaactatttccttgccaatcaacgggagtgcctgcaataaaatcacaaatataatgtaaacaatatgaactgatatacaaaaaaaaaatgaaccagtgatgcattcaaaaaccttttgcagtatctcaagcccgtcaatttgcttcttaaaatctgtgcttagaagccgtctatgcaaatcctctctgaagtacttcatcaaatcattctgcataaatatgcatgttaaataaattctgcattaaattagatacaaaataaataaatttgagaaactactatagtccaaacctccaggtcttgaatttgttctatccgaggatcttcaaacttgaatctcctgactaccaatctttccctttcctcctgcagatagaaaagtccaaaggactagtgtaaacatatattcaaaattaatggacaaattcaacaattgcatgctttaacagtaccttattggaatctttaatatttagtaaagcctgtgattgaactgctatatcttgtacagacatacttgattctgacttcaatgctttcgtaccagcagttctctttggaaacattaaccaaaaaaaagaaaataaaataaaataacaatctccatacaatttgtaacaaaacaagaagtaagcatttaaggaaacatacagaagatgctgctttgcttccatgcttcagaacgccattagaagtggatttacccactttcgaaagggtcttggatgcaggggccgaaattgttttggcagattcaaaagattctaaggggataaacaaaaatcatattggtgtaaatcatcaagacaaaatacaagtgagtgacccataaactaaacaaccttaccttgaaaagcaccaccaggcttcaaacgttcatgaacaagagctaaagctggtccctgagtatccctaacaagtttctcaacctgaaataacacatttggacaaaagtgttcatgcaatgactgaccaatgagtccatatgttaaaagaagtacctagtgcacatacagtttcttgtgtacaaactctcaagatttcagcaatgcatgtctctgctgctttacgaacatctgacgatttatcctggaagaaaatttcataaaatcataagatcagaaaaaaaaaacagaaagggaactggattcatgatccagggatacattttaaccatgcaaaacttgagtagttaaaaagtgatctagaagacttgaaacaagtatagaggataaattagagttttgttaattcagaattaccgtcagagcagaggaagctggctttagtagctgtacagcatcaggaaattcagttaacccagagagttgctttgacaaccactcaaaaagatccttgcgcccttccgcgccaagttttgcatcggtccaagctccagcaatgtacggaacctgcaagaagaatacggtcattcccacccaagacacaaaagctaaacagttgtacaaagtacagcaaaaagaaacttaccattttatccagatgaacagcagatagccaagaatccaaggtattcaatgtgcattctctcatgtgttttttattgtcacccaaacatttcaaaacatccgctaaaatgccctgaaagaaatcaatactctcacattcaaatttaaaaggaagtatacagcataaaattagtaatcgtgaattggatatcaaccttgcttgctttctcaacagcaggacccattgcaactgcaacattgccaatgcatgtcaatgttgccatgactaaatttttgttactgtcacctagacgaccccttaaggcaccaaacagttcagctgaaaataaaattttgaacaataattaacaaattggttgatataaaagaggttgcatggcatacacaagaattataaattaaaataaaataataatattaaagtgaggggagagaaaatgtgaatgaaatgtaccagttccattgggttggatgcgcttgttagcctcttccaaaactttattcacagcttcaattgactccaagcgagcctagaaatcagaaaatacagaacatcaaaacactgtaattgctgataaatatctccccttcggaccttcagctccaagcaggtgtcaggctccatccctagaacattaattatgatcaaaagattaccttccaatcggtactttccaagcctttcagcagcgtgggtgtgattttcccactaatatcttcacgtggcaggccatctagtccaccagaagatgcagacgtagcttctgctgatttaatagttctcttcggagctgctgctgcaccctagatagaatatgggagtacatcagtaacaaataaacaaaaatgaaccataaatgcatcttggatgatcaagttggagcacctcaaatggattcttctcatactccgtgtcaagtgcactaagaagtgcaggtttaacatcagaaagaaaccctttaatatctgcagaaggggtaggagggagttacagtctaatacaaaaaatatatataataaaataaatcaataaatgggagcaattcaacacttcaactaaatatttaaaatgaaatcgaggtgtgtggacaattcaaataaaatgagtatcaacctggaccaacaaatttatgtaaaacacccaaaagtttgacagaagcattcctagtagcagctgcacttgactgcagcccagtatctttacaaaaatcaattaaatcctgtaaaacgaaatatatcgataccgtgaatagatgaacatacatggtaactaataacaagctaaacaaacaaagaggaaaaaaaaaacagaagtccaaacaccttaagtttcaaatgtgtgatgccaaaatcttccactgctgaaaccatccacagtagcccctcactcagaaccttaggattcttgtgctctttcagtatcttgtaaagctacaatacaaagaattccttaacttttattagacaaataaaatataaaaaaacaactagcagaaacataaaatcgatcaaggggacaagttacaagttcattaaaggaatgagatgcacattaaaatcattttaaaacctaatatttttcatccctgcttcagaagacacaagaaaagtgcaaacaagcttctctacagaaattattgaaatgttacgcttactctttcaaaaataaatccaggacccacagcttcacaaaaagtagtgaggcatttcatggcatgtgcacgagtcttgatgtcagcaacccgctcacttatacctgttaattcagggatagtgacaagcaaaaataaggaactatctaatcaactatcaaacaaataagtatgcaaaagatatcacacagttttaagcagacaaatcccagctagaaacctatgattattcattaatcaaaatcagggagcacttacccagaaggcaaagcactacacacttcttaggaaatttggttgacgaagaggctatgaaagtaataacttcaatagcctgctgctgaacctgcactattcaaactccatgccttaaataactatattcacaaccaaacgtatcgacaaaggaaaaaacaaaagacacacataaacagcaatgaaaacttttaagtacctggacatttttctcactccatccagggacagcacatagtaaacgaattaataactcaacccagtggtctaggtctgataagctttccacttgttgtttaaatgaagttattgctgcaagagtagattaaagcaatattacatcaaattaaagattttcattttattttttttcgaaaaaaaaaaactaaagcaatcgaatggacatatcagctccataccaaatgaaatccactcccataaaactgttatctaagaataaattacacaatcctagcaattattaaatgtaaaatgactggaaaagctcagtacaatctaaagtaagatttttgtatagttaatgctttagtggtgtctcagtgtacatacaatgctacgaaaagaaggccaactgggttttgtctccaaaaaggtgtgttatatctttcatgccgaaaagatggagagttagtagatcacttgtttcagcattgtaatttttctttacagtgtggtttaagttatcaagagagtttaaaattgcaatgggctaagccgcaacactattcagatcttttaggatatgttgttctagatataggacgttaaagatgtggtgtaatcaataatgtggtcagaacggctatcagctggcttatatggctggagtcaatagaagattctctacagatgctgaggaatcagaggaaggattatcaggtattttacatgccattcagtcatacgatgtgaagtgttcaagagtattttgctttgaaaattagtaaggaaatagagttttattttacatttgcaacgttattgtctgctttagagtgctttacacactcgccatgtattatttcgtcaaaatttgaagtctt

SEQ ID NO: 18776 - DNA, 2387 bp, Cannabis sativa
ttaaaaatccttttaaactattaacattgttagatttaatgacttttttctaattttagtaaagaaagtctaacatagatgaaagatgaggagacttgatttgctacaattcaaagtttatggggcatgaattggtagatatatatcaaagtttaggaaacatgatttagtacatggacaatcacacagaattggtaaattaaatgaaattagagaaatgtctttaaattcaacaatcacaatagtttaagagaattttcaaccgctaaaaaaattcaaaggacttaatttgatacatgtcaaacagaatgcaaaaattctaattagtctaattattataataaggtgtagtaatcctctaagactatatagcaattcctaataaaatttatttggataagaagtaagaagtttctaatgaaaactataatgcaggctttcatgaaaacatgggttgcagcatgccacttcaaaggaagagccagagttctcatcccaccaggggtttatgctctaggaccactcatatttgcagggccatgcattggtccaagccctataattgttcaagtttcaggcacattaaaaggtgatacagatatttccctctatgaagaacctgcatggtttcaattcgaaaacatcgacggattaatcgtcaccggtggtggcgctttcgatggccaaggtgaatctgcttggaaatataacgactgcaaaaacaacaatgactgtgttcaactcccctctgtaagagaaaatattattaatttctagtttttgttttcttcttgttatgaatatattgaattaattaaataataataatgcagaacataaagttgaataaagtgtcaaatgctatcttgagagggtttacatcagcagatagcaaaggggttcacatattcataacaaattctcagaacattaggctaaagaggcttcatatagttgccccaggtgatagcccaaatactgatggagttcatattagtacctcaatcaatgtcaaagtaagcaaaactatcattgctactggtgatgattgcattggtatgatcaagggctccaccgatgttgccatcaacaaagttacttgtggccctggacatggcattaggtaattctaccttaaaatatagctttgaatgcttcactctaaaaatttcatttaagaaaagtgaattttagtataaaatttgactatttttttttaatggtgagacatgcagcattggtagcctgggaaaatatgagaatgaggaagatgttagaggaattacagtaaagaacaccacatttttgaaaacagataatggaattagaatcaagacatggccaggttcaactccaagtttagcaactggtatgattttccaagacctagttatggataatgtaagaaaccccatcatcatcgaccaaggatattgtccaagtggttgcaagaaacaggtatacacttagattaattattaattaattaattaatcctaataaattatgtgttaataatattttaattttgttttgtttgtgaagccatctcgagtaaagattagtaacattcaatacataaacataagaggaacttcgagctcagaagtgggtgtgaatttgatgtgtagcccacaatatcagtgtgagaatattcacttattcaacatcaatttgaaacatataggaaatggacccatcactgccacgtgtgccaatgcaagagtcagcacttttggtggcttacaaagcccacgtgtaacttgtcataattagttgcattgatattattaattaattcattaagcaattaattatatataagatgaatttaattcctcctcctgatgacccctgatgatgatctacatataaatatatatgttattcaactacttactaatatttgagattgatttgattgtgtataatgtacaagggtgaaaatgatgaggatttttgttctaaatgaaaaattggatcgataataattcatctatactaactagatgtttattattaagtatcagttatattaaatactataacaattgtgacaataatgtttcattatagttattaactttaaatatgtggaactccacacttaattttctaacagtaatatgacactttatgtaattttgaacaccatgggtgcctctagtatttctctaaaatgcatatgacataaaaaaattaattaccaatttacaaaaataataatagaaaaaaaattgaactagttaatttaatttgtaacataaaatatttatttggtggtaaaataaatattaagttaataatttgttagagttcactccttgttagatcaagtattaagtttgattaaaatgatacatgtcaccatattggcctagttttaa

SEQ ID NO: 18777 - DNA, 2192 bp, Cannabis sativa
taagaatctgtaatacatgtagattgcgtaattcactttagaagaaaagacacatatgggacataactcataagagtctttaatacatgtagattgcctaattcacttaagcataagtccagctgttttatcaatcatctaaaactaactttagaaacgtaaggtgaaatcagctttaacaaaatttgaatatagttaaatgaaaattgatggaatgtgaaatttgttttagcgagcaattagtgtgatatatttgtcttttcttatattcttttaaataatggtaatagaaataatcctaattgtaaaacatatagaaaacacaatactcttataaaggaaaatggttactccatttaattatgaccgatcgattttaaattggagctccaatcctactccaaattttctctttgtaatttgtaatatgattcgtatcaagaggcaatgttaaggttttgaagcattccagttttgacgttgggacctctaggctgatgtgtgccgctttgtcatattgtgatgttcatatataatgtagataaattagtgtatatgaagatttctttcggctgtcaagtttctcttgtgtagaacccatgaaaaattgttatcaggtctttgcctttctttgatttgttggtagaaaggtgaaggaaagctagctgggaagctatttcttttttaatcatgacatgtcttgcttggttgcccgtttatcctctactcttagattactcgaggactaatatcaaactttaatttccagatgctagacgattttgtggatgtctccaaagatgaaaagcaacttatgcatctttggaactcatttgtgagaaaacaaaggtaactaaaatctcactactttgttctcatcctttaaactctaaaatcgcttctttttcttcttagttactcattggagtgctttttttaactcattttctttgtatttaaaaagtaaatctattttacatcatcccattgcgagtgctattataccaaaagccagttctaaagattattatcaaaaccatttacactgttattgttgcagagttttggcagatggtcacatcccctgggcgtgcgaagcattctcgaaactccatggggaggagctaatcgcatccaaacctcttttctggtactgttcttgcttgagtctatgtcgtaaactttttgacttagctacatgattgttgtactctcctaacttgaaatttattgcggtagctcaaatagtcaagcctgtggcttactttaatatgatttgaggttcgagtcctaagtagtcccgtgatccgtaaggagaaataatgaataagttctgcaatctcatattgcctggggaaggtcaagtgtgatgattctgaaattatgtaggtataagactacacaattcaaaaaggtttaaatagattgattggtactacatatcaacaaggtgcatcatgttttctgatagccatcactttaagaactccaactttgagtaatcttgagattggtgacctcctagaaagttttctcaaggagcatatgagtaaggacaaagcacgttgaaaacacttgtgttagtttgtagagtcagtcgtcattctaaaaaacagacatagtggcgtacttgtgtataagagtcattgaagtgggggtgttacggtatcaacctagtgattgttgtagttttgacttacgagtatatatgtgtatatataaatatatttatattttcggctttaacattgaaatgctctttgttggttcaggtgttggaggatattcatgatcaagctttggaatcatggtcttcttgatgcttccactatgaacagttgtaatataactctggagggttgtagggataaggcaaaggcgcctgttaatgagaaactaacatgaattaagctttgttatgtttggcctcaaatccaaacatttttcattcaaaatagtaggaaatagagggttacccttaatttattgcaatagcctttaatttatttaagtttaattagagtagaaagttcggcttacccttaatttatttactcttaccattgtattattcatatgctaaataatattatatattcttataggctatcacattttctattttgctgatttatatatatgattatgaggttgcaactctaaggttgtttttttcctttctaaattagagt

SEQ ID NO: 18778 - DNA, 2161 bp, Cannabis sativa
attttaatttatttttcttttattgacactttatgagatcatatttgtcttacaaattacaactatcaagattttgctatttctaaaagatatttcagaaatgttagttaacaattcttctacattggtttcactttatgtattgaattgttatcatttatgttactaaattatatttttatcaaggataaaggaaagggctaaaattaacttcagaacaggaaagaattaacatcaagaagaaccttatcatgatcattggaagctgttcggtgaagtacgccttctgtcccggtcctctccatgcttgaattcttcaacaactattagttaatcgtaatgaaaatcaatattaactcacctggtactaaggcctatgcgttagagatctgttagatggatgattagagccgagagtttgaggccgtctctaacgcaaacctgttctcgtctctaatcatcacagccaagcggacgaagaaggtttggggtttccatttgtatagggacttttcagaaaaattgagagaccaaatgctcccaaatcttgaaagttcaccctttgagagatcttgaaagattaggtttcaataaaatttcgaatcaattttggttttttaatttgtgtttaacaaagcaatagtaaatgttacaataacaaaaccagaagaagaagttgtttcaactcaaacttgaattgcattaaccttaacaaaagaacccaaatcaaagaaaaatcagagaagaaaagaaaacaacaaaccaaaacattaacatcaaatgatgaactagttaatcatttaatatgatccattgtttaccaatccaaactctcattgttgtttgatattcttgcatcaacacttcatcttttgtcttttcagttacaaaatgtttcttcaaaccacaaacttctaatctaatcttacccaattccttcttacattcattaacaccattcataacacattttagatctttcttcatctcgagtttcgatgatatagacaaacttggataccttataattgaatccaaacacagaattatcctcaagatcatgtcaaatgcttgatcaatctttctctcatcatcatcactgaaaccattatcatcatcatcactattatcttcgaaaggctcgaaaatctgtttaagctctttttcggcttttccaatcacaaaaagaatccttttgatgacattagtatgcttctcttgatgatgttgttgcattagcgatttgagtacttgtttcaacacattccattttccataaagtaataaattttccgaaacaacaaacataagatcgcaaagatttgaacaaaggcgatccccgatctcaattataacactatgaatcatacaaagtgttataaattcatcttcttgatcaagatcaagagaaaccaactcaatgaaagagaatttattattaccttgttgtgattgagccttaacaatctcatttcgcctttcgatcatcaattctcgaatcctattcctcaatccgaacatagtcttcttcttatttttcactctcaactctaacgaatcatcaaaagaagcttcaattggaagaagaagaagaaagagtacttgttttgaaagataatagtgcttgataagtttaagctttcttgtcaatgatctcaaaaccgaatcatcatcattattaattccgaaattgttaagctccaacatcaagtcatgttcttgttctttcatgtctttgaattttgtctccaaaagaaaaagagtgaacttattgagtctatttaaaatcttgaaattgaattcatgtgaatacgatggagaaaagcactgaataagtaactgattaaactttactttcaaaatttttcgatctttatgacattgatcataatcatcatcatcaatcaaagacttgagcttctcaatcattgtgtcattgtattgaattgacttagccaattcacttgctaatgattctaccatattcaccattgctggaaaatgagaaaaatgagagagagcctttatgaaggagttgttatatatataatttatagttagagaaggtagttatttttcggtttttttttttttttataaaaagacagtatttttgaaaaataaaattgtatgacaataaaattgtaaatttttacctaaa

SEQ ID NO: 18779 - DNA, 3700 bp, Cannabis sativa
tggaatatcagaaattctgttttcggtactgtaaaccattcagaatttttaaaaaatttacagggatgatactgtaactataacgaataacgctaatgaaattttttttgaaaaaaaatatttcggcatatgtgatttcagacataaaagttaactaagagataggaggttgtaattaacagccttcaaataaatatgttgattgagaaaatcactaatttttgtaatgttttggtaaatattttatatgcacatatactatttttcttttatactatcatcactacaaaaaaaattatatttttcagtctcaatgaaaaatctgagtcaaaacatatatacttatggcataactttttacttttggtaaatcagctacaattatattcaccacaaacaatttgtacagctcaaataccatgtaaccaaactccaaacttaattacaacttgtacataaaatctcaatccattctctaccatgtataaaacaccagcccaattgttggtattttttgatcgtaagcactatttatgatcttccaaatgttgtaaaccagagtagcttattaggaatagaacaataaaagtgtttgaacaaagagaaaatttctgtattattgaattgaaccaatgaaatgtaatacatatatatagtacaaaagccaagaaaaaagaataacagaaaaaaacaaattaattaacaaaacttcctaactaatttccctaattaatccttaataggtcccttcaagatggagtgtataggtcttgaacactcatcttggataatatgtctttgaacggagtagggaagagtgtctttgttaagatatttgcaaggttggcttttgagggaacatggttcctctttagggagccattgtttattttttctcgaacaatatggcaatcgatttctacttgtttagtactttcgtggtagacaggattctctgatatgtgtatggctgcattattgtcacaaaatagtattgaaggcaacttgatgttgatgttgaagtctttgaggatggagataagcaaggttgattcacagtagcattcaccattacccgatactctccttcagctgatgatcttgatatagtaggttgtttcttcaatttccaagatatgaggaaacgacctaagaagacacaatagcttgagattgatcgtctggtgtcaaggcataatccccaatcagcatctacaaaggcttgaagttgaataggtgatggtgaagatgcataaaagaatagaccctatcctggggaatttttcaagtaatgtaatattctggttgcggcaatcaagtgtggttatcgaggggattgtaaaaattggcttagtttgtttacggtaaaacttatgtcaggctgtgtgattgtaaggtatagaagtttgccaatgaggcttctatattgagtcgggttatggagtatttcccctgaatcattgctgagtttaaggttcggttccgttggggtggaaactggttttgagccaagataaccagaatcgtgaagtaattggagtgtgaatggtctttatgacttagaaatacctttgtaacatcgagtaatttctaggccaagaaaaaatcgaaggggaccaagatcttttaacatgaaatgtggatcaagagtggtaataaactagtttaatgtagaggtgttattggtggcaataatgatgtcatctacatagatgaggagagccaaaaaaacacatgattggtgtcttatgcaaagagaatgatcgcttagagattgagtgaattgttgctgtaataaatgagaacttcatttagcataccattgccttgaagattgtttgagaccatacaaacttttttgtaatttacccactgcattaggtgggacgggttctttaggtgtgtagccttgagggagtttcatgtagacatcttcatgtaattctccgtggaggaatgcattattgatgtccaggtggtggaggtgcaagttatggatggcagcaagagcaaatataagttttaatgtgttgaattttgccacttgtgcataggtttcgaagtaatctatgccaggttgttgagtgtagcctttagctaccaaacgtgctttgcagcgttctacagaaccatcagggttatattatttcttgtagacccacttcttgtcaatgacatgtttgtttggtggtaataggatttcttgtagacccatttattgtcaatgacatgttggtttaatggtaataggataacaatccaagtttttttcttttcgaggcatcaattttgacatccatagcattgttccaaattttatgtttggaagcttgttggtaggacgtaggttcagggattgtattaattgagagtatagtagcttgaaattgagttgagaatctatggtaagacagaaaatttatgagtggatgatttgtgctagttgtggctaaatcacattgatagtcatggagatattgtggtgcttgttttgtgcgccctgatctggtggtgttggaattttctagtctcaaatttagatgttggtgctgagatgagttattctcaaaggtgatatgtggaggtttaatggcctcggttatgttaacttgagatggaatggtctcagaagtgatgttgtgaggttgattgtccttatcttggttgagctgagatggattgatcttagtattaatatgtgattggttaatctcaattagggaaaaaactgatcaatgttatgttgttgtgttaagtttttgaaagggtatatgttctcataaaaaatcacatctagtgaatgaatgatgtggttggtttgaatgtcgaggagggtgtgagccttcatattgtgagggtagccaatgaagacacatggcttagcttgaggggagaattttgttgcaatagtgacaacagatgcatatgctaggcaaccgaagttgcgaaggtgaatatattgaggttgcttgtggtgaaggagttcataggaggttttgtctcttaataggacagaagggtcctatttaagagataaacagcagtagtgaccatgtagctccagtattgcagaggtaagtgttattgaaatgcaagtgcacgacccacattgagtatgtgttgatgtttcctctcgacaacattgttttgctgtgggaggcctacacatgagttgtagtggaggacaccttttgtgggataaaaagtattaagtgttagctccttggcattatcagtgcgtagtgatttaatattagttttgtattgaatcagtatgtgttgaaagaaatttttgatggccaaaggggcatcataatttgcttttaaaagatacaaccaagtgtgccttgaatagtcatctactatggttaaaaagtacctataaccttcaatggaggggacagaatatggtcaccatatgtccatatgaacaaggtcaaaaacagtgagagagatgttatttaattgaaatggcatttttttggctttgcaatgtgacatattggacaattaaaaggagtagagattttagaaacttgtaaatgtttattgatcttattagtaatctttacaaaaggatgtccaaggcgagtatgccattgaatttgatttagatgtacattacaagtttgtatagtagaattgtcctcagaatcatgttgttacagatagtatagattgccaagacgtttagttttcc

SEQ ID NO: 18780 - DNA, 3019 bp, Cannabis sativa
tctatctaactgtgtcaaagattctgcgaaacttgtgtttctatagggtaagtaaaaacacatgcatggtttagaaagaaaaacacttggcatctatacccaatatagcctattattgatcagtaaaatttatcagcttatgactgtcttgttatatattttcttgctcaatgcattaagataattcggtagattaaccccacttttctatttcatggtacctcataaaaactgagtacaacctagggaattttgaaacctcatacaaaattagcagttcattttagtcatgccctgactgtggagtatgtcttactgttttttttcttttctttataatttacaggaggtttgaatgtggaaggagaggcagatagctgggatttcggtgtaggtaagccgcacaaagctgattatttttcattctgcataagattttctaacattaaattgttatacgtccttggaaaaacttttgggtgctcgtcttgcatcttggcattgtcttcaatctctataataagcattgagcatgctcatgtcaacttggatgctctcaatgtaattttaatttcggttatatattatcaacttttgtctacttaggcccaactcttagtatagttctttcttatcaagtgaaattgttacttcatttaaaattttcgtataaaaatatagtgcaattgaagatgccattttctccctaccaatgctttgtttatcatgggcatttggttagcatagtacactgaattatgattccgaaaagaggaaaaaaaaaccattaaattgttttaatgaaaacaatataaagaaaaggtgtacaagctttgttaggaagtgagcttttatcaaaatgtgctaagttatttatctaatcattattttcttttaaccaggtgctggattttatctcaatgctacacaagagaagtggaagaactggcgaatgtatgattatgttgtgaaggagttgccaaaccttgtgaaagaaaattttccacagctcgatacttcacgtgcctcgatatctggtcattccatgggtgggcatggtgctctaacaatctaccttaaaaatctcgacaagtataaggtaatcaccgttgagtgcacttaaaagggttgagattcagctaatcatttgaagttctttgaaaacttggagaaacatttttctatcataaatcattgtttccataaaacaacttaaaatctgttccttttttttggtatatttttccgattcttcgtattctagtcagcatcagcctttgcaccaattgtgaatcccacaaactgtccttggggccagaaagctttcacaaactatcttggaggcaacaaagctgattgggaggttagttgctacaaaatttaacaaatgcaacatttctcgagttcaaagtatttatacttgataatacaattgttaaaatgcaggaatatgatgccactaaccttgtagctaagttccgtgacgtttcagcaacaattctaatcgatcaggtacgtactattttgtcgaatatttaattttcgtttacacatgactgcagctgtttgtgttgttatgttcctaagttcatcattaaaaacttgttgtgttaaacgagtgggccggtttgattttggatattgtaactaaagttatcaagtctcaaaagtttttgggctggaattttatcatactagaattactataaataaaaatctcttggaaatagatatatttatttgttctcttcaaatattaggagtaagtacgagtctcatgaccatcggtgagattagcctttaaatttaaagtacgaagtgagaacaagcctttcggatgacaacttcggtaagagaaggcacttgcttcgagatagctaatccctcagaagcgtgagcttgcaaaaggctaacactttggttgcgtgattaggtttgtgtgaagtcatgaaagtgactcaaaaagaatcgaaatttagaagattggatctttccgtgaagaacagcatgtttttcaggtttaggtagaagaatgtatgtctctatttcatttgagttaagccgatattgcaaattcatgatacaatctacaggagcaaacttcctttaaagtagaaaacaaaattaccttgtctttgttatgacaaaattggctccattcttttcaaaaatatgactgcttctttaatgcagggagaagatgacaagttcttggccgatcagttaatgccgcacaagttccaagaggcttgcaaagctgctaatgttccactgctactgcgaatgcagcccggatacgatcactcttactatttcattgccaccttcatagatgatcacattagccaccatgctcaagctcttaatctcccatgaaggttagcaaaacccggaaacctcggtcgactataaaccttatatattctgttttcgtttgtgtaatagttggttttcgggtgagaactatgttatagtgaaaaacaaatcagtccacttgtagtaaaaggatttggtagagatgttcatgtttgttgtgtggattggaatttaagccttgtcagtgttacttttgctatatacatcttcacttttatataactattgtagttattctgaatgctcttcttcttaactcgaatcgataatttgaacaaagttcatgccaaattatgttgggttccagattttgtgaacaaatcagatgcaagaatttcacattaggcaaaacccaaatattagatttattgagttaaattaggcaaagtgaagattagagtagttttggtagggtgcgcctgcctatgctgtagtgcaagacataggcgacactcgagagccccagcagcaagctactgtgatgggctctccccttaaaaaaattaatttaatatcgtgtgagtcattgactcacatatcaaatattaaactgataagaacagatactacacttgatcttagccaaaaggccgagaaaggtatgaatcgttgactctttttcttctctttttatgacaccttt

SEQ ID NO: 18781 - DNA, 3605 bp, Cannabis sativa
ttcttcttctaatttttattgctttagtacaacaaaggtaaaagaagaaaaaaaatcttaattcaccaacaaaacaatctggtttcttcttcttctgtttcgttgatttacacacatattcaaattaaagtgcttttaattttgaaatttttagtaattcttctctttctgttgggatcttaattaggatgaaaatactatatatgtgttttcttttggtatctgtaattatatatgttttaactttttttttcttctaataatttttgcagagtaccttcctcctattaataaagatagatctgggtttgctttatatttgctttaacattcaagaagcttagaaacaaagcaacaaaatccaggtgtactttaatggaaatctcatcagccaaatggatatctgaactggtaagacgatatttaatttgaatacattcccactcaacttcttatcatatagaaaactataataaaaatatcatcggaattgtttgattaattaatttatgtttttattaaatggtaaatttataggaaatggaagatccctctaatatcttcgagcaatatgaagtggactactcacttgatgaccttaatttccagtcattttcttctgagagctactcatcttacccccaaaatttcgtccaacaaaatccacaaaacctaagtacttcaactctagataatcatcatgatcaaactcctcctcaaactcaaactgagtcatcgttagaaaggccatccaaacagttcaagacaaacaattggaatagtaataataataattactcttgcaccaccacaacaacaactactaccaatgatcaaatcagcacaagggcttcatcttcttcctcatcccagctcatttcattcgaaaagtatgcgaaatcggcctcagccacgcccgagattaataatcatgctgctgctactactcttaataataatgttaagccaaaagacgagccaggcttcattaatggatataatatggttttcagtccttatgaaacacatcatcagaattattgttcagtaccaaataataataataataaatatggtaatgttcaaggtgtgaagaggcctttgggtgtttcattaatggctactagatcccctttacatgctcaagatcatgttattgctgaaaggaagcgccgagaaaagcttagtcagcgattcatagcactttctgctgtagttcctggcttaaagaaggtatatattattattactaatattaatttttgcttcataaatattaattattaattagttaatttgtatatctacttgcaaaataatattaattatccatcttgaaatcaatattatgctagggttaagattcggttgtcttatatataaaaacaaaatgatttgttctcttattggatgcaaatggagttaatcatatatatatatatatatatataaattgaataatatttactaatttttaatgaaattaaaccacgtgactaataaattaaacatttctatattggaatgaatgaatagatataatatatagctatagtccattattgctactttcaatgagtatatatgtatagtttatttattttggaatcaagctagatatttagagtgatcttaactcatcagatcgttacaaaattaattagcacgactacattacgacacatttttttttctattaaatttatatattttttaattaatatagatggacaaagcttctgttcttggagatgcaattaagtacataaaaaatcttcaagaacgtttgaacacacttgaggaacaatcagcaaagaagacagtggaatcagttgttttcatcaagagatgtcacctctcggccgacgatgaaacgtcgtcgtctgacgagaatttcaacagcaactcgaatcagccacttccagaaatagaagcaaaagtttcagacaaggacgtactcataagaatccattgtgagaaacataaagggtgcttggccaatatactaagccaagtagagaagcttcacctcaccattctcaacaccagtgttttaccttttggaggctctactactcatattactattgttgctaaggtaataataataataaattagtcttattagttttaattaaaccctcaatataaattaataaactcgattaaattatataacttaattctaatttgcatgtacatttatatatgctattttaatttgtatttgttaatttattagtgacttaatctcacaaatattttgtgataataatttgtagatggatgtggagtacgacatgaaagtgaaggatttagtacgaaatctaagacagacattactcggcaactgactatagattcgttcggatacatcttaagtactttatagatttattgtgatctcatgactaggaaaataataatcggttgatctctcaatttcaaatgtttgtttttctcgagactttttttggaagaaaagaagatgccctagcaacctaaaatcgtgtctcagcacagtaccccaccactaaccataatcatcatcatgagaattgaggacttcaatcatcaactctgccaagttttcatttttgcaggtagggttttgtcacatttttatgtgtcgtttttgcgtggttgaccgttgaccatgttcacctattatacccacgtgctatatttgaaagcttggcagcttttttcccagagagatttcattagagatttttgacttttcaacaacagacacctcttttttttctctccggttcttttgagtacgtcgaccctcgtatatatattatggtatttacaatagttatatccatcggaattaaattgagagacaaaaaaaaaacaaaaaataggcacttggtttctttgagtttttacatttgttgtgttgtacaagaaataattcctttttgaggtcctctctagctaggccttttaattgtgtgtagtgtaaacttctttgttaattgtgttatgtaaactttccattataataaattaattaattctaatttaatgtctttttatttaattgttgaatattatattaatttaatgtgtttaatttcttgcccattttggatcgaccaagttggagttttatacttttaattgcaaatttggacatcttactgaattggataatgtcgcatctatctgttcatgtcttatatgagtataattattgataaattatatgatatatatttacttatttaagggtgtgagacttattgtctcaccaaatttataaaaatatatcgaaatatttgaacaaaatcaagtatggtttaatgacgtacgtgagatatatgattgtaacagttgtaggcacatcaatagatccaatcaattttttttataaacaattaataattaaatattgctaaaattggagacaagggaaggcctactaaagattatgtaatctactagtttaaggggcagacatgcactatgtctaatatatatcgccttatctcctcaaacatcatatatatattgcaagaacgaacttattcatatatttaaattcatcaattttgattaattttactataataatcagtttgtttagttgtata

SEQ ID NO: 18782 - DNA, 4234 bp, Cannabis sativa
  modified_base (47)..(53): a, c, t, g, unknown or other
tttatatatgtttattatcgttttgaaagttcatatttaggatgttnnnnnnnatacttgtgagtagatctaagagcctggtaaaataaattccaacactcactactgttcaacctttgttttgcctttacctacacatgtaaacaatatctgtgagtcgatagactccataagagaagcataatcataacataatcataaaccagattataaccaggcgcccatacacccaatcacaattctatcccacgtcccacacatactgagtttagaacgttcgtacgatagtacgattgaccatactatcagcctatacttggtactctaatcgtactaatgtacacccgtcggtattcagtgtaactctatatacattaatactgcccttactaatatgttatctattagatattcataaatatagacgctaaacatgtaagcacttatgcaattattatactagtcttaccttgattctgaaattagatgtgctggtcaacttaagtgaaaactgatgctcaacgatttacatgcccataagtcacatcatacgtaaagttggtaagtgatatgctaaattattttttgggaacttaaactcaaaattaaaagtttttctatcgatagatagcctgtaataccctaaatattgataaaatgtgaaaaagtagggtttggaatatgaaaaatctagttaaccgaaactccaaaacggtttaaccttttcaggggtccaaccaaaaaaactggttcgccgtttttagaaaaatggtgaaccatttttcactacagaacataccaaacttcaaaatctaggtcaaaattacctcaaattacatcaaacattccagaatacctaattaaacatatataataagcataatctaaccaaaaagagtaattataatcccctgaaaataaattcaccattaaagaatcaagtttgagcttgaaagttcaagctttggtctttctcaataaaaacaactaaaaccagcaataaacaatataatcagccaagaaacaactacaaaaaactaacccaaaatactaccaattcgtacaacaacccaacctcggaatttgcatgaaaacctaactcaaaaacttgaaaatttcaatggaaaagggacttaccttgagttggctaacaaagaccttgatttctaggctaaaacctttccaatttcaggttggaaataggaaaaaaaaaaaaaaaacccttaattttccttggttcttcatgggctgacaatgaaagcaaagagatatatagagagagagagagagagagagaaatgtgcttgtttctttgatttttcattaacataagataatgtcaattcaattatctagttcagcttatactttttaatagataattacataattaatatcagcccacttaaaatcaactaataataactggagcaaaatatgaaaaatttaccccttgtttaaacatgaagtaacatacataatttaatagtctaatatcacaaccctaaatgtttttgacattctaaatatttagttatattgtctcgctaaatttaaggtactatactataataaagtttataggtcaaaggtcgcattctactgttaccagacataaaatataaaaaatataaaattttatatataacataattaatacacctaaaatttaaatatatctccataattacaaaattaattattaaaagcctacttctaataataagtcttaattatttgctaattcttaaaataaagttaaacgatcattacattctcactccaaattcaagtgtgaagtgcatatagctattacatttgggaatcaaggaacaattcattatggaattttctatactacaaaaaattgtaaagtacataaagaaagatattagtgtaaggttttctcattttaaaaaagagaaaacaagtaacattgatgggagattgagttcaatcgcttaattgagctcatgtttcggttgtaaacagttcttttttttctttttttttttattggtgcagtaatattttactaatttatcaaaaaaaaaaattacctgagtatagaaatacaagaaaattgaacaaacttaaagaaaaaaaaaaaatatatatcgatagcataaggattcaaattttaaattaaaatatggtgacttggattgctcaagtttattgctaagcttaaggataaaggagagaaaaaaactaatgacgattctatgatttgtgattaattataacaaagttgagtttataagcattcataggatataatattttgtgcattttttcagtgcaagcaataattttggaaaaagtaaattgactatttataagtataacaaaaaaaataaaacttaattcacactagtataggatgttaatacttaatcaagcaatgttaagccttttatgaaaatagaactcatatatcattttaaaagtttagaattttcattcaaaaaaaaaaaaaaaagtttagaattttagttatgcatgtttgtagtttttaaatatttattagttagtttaatgtatagatatatagagcttttatagtaggtgtaatatttaagtgacctattattattatagatatctatgtatcgttgacaaatagctaattttttcttcagtatttttttttattaaaatggaaaaatctatggccatgttctgattaaacaaaaaagcataaataattttttttattacaaataatttatatttgtttctttgtgtatgagatttacgtctgccgtagttgatctgattgctgatttttgattgttttgcactcagatgtgtgggtcaaagttcctacgtttcatcaatcatctctcattatcaaatttttttttagaaatacctatcattttttttttattttttattttttaaatatcaacttcatttaattaagagcattcagaaaacaagatatccctcaaatcgagtcagatatcttgctctaagatgcaaccaccaggaataaatcgagagtgccttgcaatagcatggacaacttaatttgctgatcgttttacaaaacgtaacttaacatccttttaaagagataataacaaacgacaatcctctataataataccaaaagtagaagacacattttggttgcttcttattgcttgcacagataaaagactgtcagactcaagctcaacattattccatgtcttgttctttatccaactgagagcttccttgatccccaaagcttcaaccacttcagcaggatagttgccattgcactggcatgttttgccctctaagaacttgccaaaatgatccctcgccactaatccatagtcgtatgagttgtcttgttggaagagcgccgcatctacattaatcttgaggttgtttgttgcaggtggtgtccatagctcacccccttcatcactattgttaaacgatagtgataaaagagcacttttatcttgagctttcctccaatgttcaagagtaattgaagaagtggccagaacttctttgacagtagaattgcatttgttctagacaactttattttgagctttccacaaagcccaataaggagttgccacacgacagataaagtcaatatcgctggtattctacagcaactcaaaccagtaaccaaacgtggatgaggggtcaaccgtgacaggccaaccaaagacagcccaacgtgctctagcaaagtcgcaagtcagcagagcatgtgttcttgtttctgctggagtatggcaaacaggacactgtgaagaaatttgtacatgtttcatgacaaggttcacaaaggttgggtaagaacttgttatagcacgccacaaaaaattcaagactttgggaggtatcttcaaatgccagaacttacgccaaaaaccaaaattatttggccgtaaaccgactggttttttatgcagtaggtgataggcactttgcacagtaaaattccttttgtgatcccctatccaagaccaacaatcaggtctaccagtgttgctaagtggaatgccaagaattaaatatgcttcttgaggagaaaataagtcacggactacatcagcatcccaacagatcatgtttggttgaaatagggaacttatagtgtgagtgcttagaccaggatgagtagaagagacatatttgttacttgttgatggtagccaaggagtacccagaattctagtatttctaccatcaccaataacccgagcagccccaa

SEQ ID NO: 18783 - DNA, 3262 bp, Cannabis sativa
tcagccaaaagagatttatatttttaattcaagtaacttgaaaatggagcttcatggattgcttacttttataaagatttgtctctttgaaaaatatatgatcaaacttaaaaagccacctttaattttcaagaacgttaagataatgttctcttagttcgtttttctctctccataacaattcctttctttctaaaaccgagggctcaacttagaatcagctcatttcagtatgcaataataataataataataataaaaaaaaagtaatccttgattataacttccagtactgtttttaatacgaaatttatagctggtagtaaaacaccgattctgctatgaagatggaattcgatctcaatagaatataataaattatcatggggtgaaatgtttaattgtcctctttattttttatataactgattagtttgataaaaaagttcatgcatttagcatggtcaaaatttataaaaaagttgtgtaatttaattttccgtaaatcttcttattatctttttctttcactcagggataattttgtagtttgttgacattttgttttgtataaaaactcatcaaattacaaattcgtattggtttgtaaattcaaaagagcatatttgttatttatgaaaacataaagggataaattgagcattttaccaaaacttccattcataccttctgtaaagcataagattaagaggacattataatgaacaaagtcaaagtttgaagatagagatgtttaaattttaaaatagtgagttgtagaggttgataatttcaaactaggtttaggtttagagatattttaaggccatccgaaagtgagccctttgttgcacttgcatagcaatataattcctttaactattataatgataattatttcatgtcgttggctttaagcattgcaatattatagcctatgatcttgtaaaaattattttattttagaccatgttatgttttagtggccgggtcttcagagctttttgtgagtcttacactcatggctgttggcctataattattaggtaaatttcctttttaaggtttaataaaaaaagtgcggttggaatctcttggcttaaaatattaaacactttcgttagtttaatgcataatcaaaagccaaaaataattaaaaaaacaaaatagagaaagaaacaatgctacttccaaaggtggtgtcatcatgattttatttttattcgatattctaccatagaagcaaaggaatatcccatatgatttgtcatttaaatcaatttaaaatcccattgtctttcaaaaaaaaaaaaaaaaaaagaattaaacaaacacaacaaaatattgcttactagggcagtagccaccatggtttgtttttctcttgttctttctaactcattgcttggccaaatttgatatgttttttcttcaagataaggaatcttaataacttatgtctttttcatatgattagtttatgaaaagcatggtagtggactagtagtttttaattcttttttatactttatggctcatttcaatggaagagtctagtagaataattggattgggtgagctaaaacgaaaacaaccaccactctattttcattccttttatgttcctattttgaaggaaaatagcacatggtaatatgtcaaaggctcccaaatatcaaaatattgtaaaaaaattgactcaaactatgactttcaaaatcttgaaggtaaaccatggcaatcttgtgaagctagaagggttcagcatagaccctttaaacgccacctgttatctgatctatgaatttgttgaaaatggctctgtgtattcatggctgcaagaaaatgagaatgaaaaattgaactggaaaacaaggttaagaatcgctgttgatgttgcgaacggcctgcagtacattcacgagcacactaggcctcgagtcgtgcacaaagacatcaagagcaccaacattcttttggatgccaatatgagagccaagatagccaattttgggttagcaaagtcaggctgcaacgccataacaatgcacatagttggaacacaaggctacattgcacctgagtatcttagtgatggaattgtgtccaccaaaatggatgtgtttgcctttggtgtcattttgcttgagctgatctcgggtaaggaggtcattgacgatgaaggcaatgtcttgtgggcgaaggccgctcaaattttggagggaaatgaggaacataaggcgaataaactgtgtggttggatggatgaagctcttcgcgaagaatcatactggatggagagcatgatgagtgttatgtctgttgctgttgcttgcttgcataaagatccatcaaagaggcctagcatggtggatattgtttatgccttatgcaagagtgatgatctattctatgatatctcagatgacactttatctggttcccaaattactgcaagataagtggaaattgtactgatattgtaaacaacaagaattaacataagaatggagaaaaaaaaatcactttttgggcccttttagaaatctttgtaaagcatagtgaaaatcagcagttaaaaatagtttgatatatcatatcaaacttttttcttgtatttgaaatcatgtaaaattatatagttttaaccttactttcaaatctatcttttttttttttaataaatgtccttaaatcattctgtttagtaaataagcttgcagggtcatgttctttttccattattatcatcttaacttattcttttggctcttatcattttaactgaagatatttttcttaagttgggggtattgttcaattataaccttcattctttctctatatatcttccattcttgtggtggagattttctcaataaatattttctatatgtacatatggaacactcttgtatgagtaatattatatatcataattaattaaatatataaatgaagacaataaaattatatacatatataataaaatagaaattactaattaaatattatttaaaataaatagtatatcatacaattaaaatatataaaataatgattaaacatatgtagcatgtcaataaaattatatacatacattaaattttttttattatgctaataaaattatatactattattatacgtaacaaataaaaataaatatcatataagaataattatatatcatacaataaaatagaaatatactgtacaataaaatttatataccaataacccacaacaactcataaaaaat

SEQ ID NO: 18784 - DNA, 6427 bp, Cannabis sativa
  modified_base (241)..(255): a, c, t, g, unknown or other
ttatggctcgaaggaaatggggacaggtttgtgggttcatggttctacggggatggtctgggttcgtggattcgttgtttgatgattgggacggtattcttggttcacagggatgggtgggttcgtgggtttgtggagatctcgtaagtggatagtcggggttgggctttgcaatgacagtagagatctcagatatggttcaaagttgtagatctgatatttgtgtgtgtgtgtgtgtgtnnnnnnnnnnnnnnntgtgtgtgtgtgtgtttgtttgtttgtttgatctaattttgtttaaatttagtttgagttttgtttaatttttttttttctatgtatgatttggatataagcagtaaggtgaagtggtggtgtttgttgtgctgatggtgggtgatggtatatgtgaaagtgaagaaagtgaaaagaaaaattagaaaaaaaaaatgaagaagaagataaggaagagggaagaaaaggaaaaaaaaaaagttagtttttttttaaaaaaaaaaagaatatttttttatttaaattaatttttttaattttttaaataattttttacgtagaccaataaaattgtgtcatgtgtacaccctgtccacatagatgtatatatggatagtttaatatggcacttaacacttaaaatagatagaaactgcaaattgctaacgatttcctaattttgggagttttaccgccaaaatttgagtttcgggggttaagtacaagcaaaataaaagtgttattataatcgtactcttttctgactattaagtggtaactcaaaaatacgtaatagcatatttctttattagcgtctctaatacaaggtctaataatatgtcgccatgtatttttgaattaaaacttaacgcgattattagtgttagatgagatatggttttataccgttagttagttattgtctgttattcattcttgtaacgactttctgttatctcctctcctttcctgtgtgtatataagttgtttctttactctataattacaacactttaaatatcaataaagaaattctttctccaagttctctgtttctctctgttctctttgttctctcgttcaacatggtatcagatgcctgaaatggtcctttcattccaccatgaccgattccagctcaactcttcgaggtacttcctctaattcgtcgccaagaacaactagtatctccttcagtcactcgttatctgttgaacttgatgacaacaactttcttccatggcgtcatcaagtctatgctgccattaaaggccatcgtcttcttaagtttcttgacccaaaatctgttccaccaaagttcctcagcgctactgatgaactcgccaacaatgtatccgaagaattcattgaatacgatattcaagatagtctactggtttcttggctcctctcatcaatgtccaaaaaagatccttacgaggatggttggttgtaacacaacagctgcaatttggtccaatcttgaagaatactactcagctcaaaatcgagccaaaataagccaattcgcactcaactttgcaaaactaaactcaccagctcactcaatgactaccttctcaagatcaagcatcttgttgactcattggcttcaattggtcatgtctctctactcaggatcacatcgaagcaatcttcaatggactccctcgagaatactctgtctttattacctcattgtctaccaggaaagatgtatattcagttgcagaagtcgaatctttattaatggcccaagaagttcgaaatgaaatggctgattctgatcttgacatttctaaacctgaggtaaatcttgcatctcaatctaaatccaccatgcctaaaactgcttctgcctatccacaaccaactacaaacaactatggaagaggtatttctttcaatcctcgtgcaaattaccccatgtttggatcctatcctacacctctatacaacaactatggccttctccccccacctctgtatccccccttttctcagaacatcagaccctctagaaatggctatcgttcctctaatcctggtggaaaaggctctaccaacaccaaacctcagtgccaactttgccacaaattggggcatactatcaccaaatgtttttatagatttgataaatctttcacaggccttgagtgctttcaaaacttcaatggtggatcggccaacttagatgaaatgcaagcaatggttgctactgcagaatctgtcaatgactcgagctggtatccggactcaggggctactcaccatctcactcctgatctctctaatttgtagaacactcaagaattccaaggctcaaactagatctacatgggaaatggctcaggtttgcatatcaaacacactagtttctccactataaattccccttttcattctcaacatctttatttaaacaatcttcttcatgtacctgctatttccaaaaatttactcagtgtcaatcaatttgctaaagataataatgtgttttttgaattccaccctaaccattgttgtgtcaaagatcaggtcaatatgaagattttgttggttgggaatgttgaaaatgggctttacaagttcgatcaacctacagccactcctcactttagtcaaaactctactgatatgtcaaaccagcatcctactcccactacaaatagcaatgattttcaatgttttcattctagttcaaatgtacctttttctaatttttctttgtggcataatcggcttggtcatccagctaaagccactgtcatgtctgtaatggaaaactgtaacatttctcatagcaataaaaatggttttgacctttgtactgcttgttgccttggaaatcaccacaaactttcttatcctacttctcaaactatatatacttctcctcttcaagttctttacactgatctatgggggcctgcccccatagattcttttaatggatataggtactatataagttttgtggatgcatacactaggtacacttggatctatttactaagaactaaggatgaagctcttcccacattcacaaagttcaaaacacaaattgaacttcagttaaatctcaaaataaaagaaatccaatctgattggggaggggagttcagatctttcaccaatctattagaaatcagtagaattatccatcgtgtcatttgccctcactctcatgaacaaaatggggttgtagaaaggaaacataggcacctagttgaaaccgatctaactctattagctcactctagccttcccttaaagttttgggatgaggcttatagagctaccacttacctcatcaataggcttcccactagagtgctaaataatctgacacctcatgaaaagttatttaacaccaaaccagattattcagctctcaagacatttgcatgcctatgttttcccaatctaagaccctataacaaaactaaaatgagttataggccaactccttgcacctttcttggatacagccttacccaaaaaggctataaatgtctatctcctgatggtagagtgtacatgtctcgtgatgtccttctcaatgaaaatgcttttccttacaaaaagcataacaagtcacctgtcaacaacactcctagtatacttttttcccctactgctacccctcctactctctcgacctttactcaacctcaaaacactactgtgtctcattctccctcatcttcacattcttttcttccattatcgagtcatactacagaatcacaatcttcttcctcccccactgttgctcttcaatctcccacttcttcaccttcaatattaccttcctcgtccacttcaaatgctcccactgtcaccaaccaacatcccatgcaaactcgagctaaaagtggtattcacaaaccaagagtgttcattgcctctcttcttcccactacagtgaagaaagcacttgaagatcctaagtggaatgctggtatgaactctgaaaatactgctttaaagaagaataaaacttgggatcttgttcttctaccccctggcagatatcctatcgggtgcaaatggatattcagaattgagagtgcagatggcagttcagttcaatacaaaagccaggtttgttgctaaagatttccatcaacaatgtggatttgatttcaatgaaacctttagccttgttgtcaaaccagaaactattagagtggttttcactcttgctgtcacaaatggctggaaaataaggcaaattgacataaataatgccttttttaaatggagatcttgaagaagaagtctacatgactcaacctcccggttttgttgacccccaattcccaaacaaagtatgcaagttaaagaaagctctctatgacctaaagcaagccccacgggcttggtttgccaaactttctaaagctttactacagtttggttttcagtcatccaaaactgacacttctctcttcatcaaagttactcaaagcattgtcatctacatattagtgtatgttgatgatattatcattgttggtaacaatgatagtcaagtaactaagcttatttcagatatcaactctacttttgcattaaaagatctaggagaacggagctattttcttggtattcaggtgacacatactgaaaatggcatacatttgtcacaaaagaagtatctccaagaccttctttgcagaaccaaatgcaaggtgccaaaaccagctccacccctatgacaagtggtctcaagctatcttagtttggcagtgatcaagtttcggatccctctctctacagatctattgttggggcactacagtatgcaacaataacaagacctgacattaccttttcagtcaacaaagtatcacagttcatgcaatctcctcttgagtctcattggattgctgtaaaaagaatcttacgatatcttgccggttctcttgatcatggaattcatctgaccaaatgcaacagtttttccattcaagctttctgtgacgctgactgggcttctgacccagatgatagacgatctacaagtggttattgtgttctccttggatctaacattgtggcctggaaatcaaagaaacaacagaccatatctcgatcttctattgaggccgaatttcgtagtctggctgctgttgtcacagaaataacttggctccaatccttactttctgaactttgcatatcctcctgccctgttcctaaggtttggtgtgataacctcagtacagtaatgatggctgccaatccaattctccatgctagaaccaagcacatcgaaatagacctctattatgtgcgtgacaaggttcttcaaggccacttacaagtgttacatgtcccagcacaggatcaactcgttgattgccttacaaaggctatttcaagctctagatttccaattctgtgtgacaaactaagtgtggtttgagcttcctcacttagtttgaggggggctgttagatgagatattggttttataccgttagttagttattgtctgttaatcattcctgtaactactttatgttatctcctctccttttttgtgtgtatgtataagttgtttctttactctgtacgtaattgcaacactttgaatatcaataaagaaattctttctctcagttctctgtttctctctgttctctcgttcaacaattagttagtacttagcagctaaaaaaaaattataaatgtaataaaatcataaaataaaatattttttttatcttttttttaattatttaaaataattataaatattaatgagatttggcaagaaattgatcggagtgctcttagctttataaagagatcaattttttcttcttttatcattgtggaatactcacatttaacattcctttcacatgtgagatctctttttaatccgttcacatatgatttgcagcccatgtgatttttttttattttttatttattcaatttttatatatattgtctttatataaaataaagtcaagtgaaggaaaaagaaaaggagaactataattgcaataattcaaaatataatgaatgaagaaaagaataatattatagaatattaattattacatcttatctttacttctagtaaatattcgatccactacaagaaatatagcttttgataatgaaaagtattataattacatttaactatgcgttttattatataaatatatagtaaaattacactataaaattttttacttagtcacaataaaattttgactaagtgtaaaaaaaaattgtgactaattataaattattttttttatattgtgactaaaaggtactaactaaatatattagtcacaaaaattacaatttattgtgattaaatgtatttttatttgttgtgattaaaactaaattagtaataacttgtatctaaaaattatgt

SEQ ID NO: 18785 - DNA, 1735 bp, Cannabis sativa
tggttttgtcatttaattattgttaattatctaaccattagtctgatctgagtttgtgttgtatgattacaacaataaccctaaatctaattataatcatataaagcaaaacaatatataaaacatgatcatgacaggaattaaataaggtagaatcacataaaatatattagatgcaactaaattttgcatcaaattataaaatcaaattaatcgtaattagagatccatctaaactccaacaactataagaaaactagccacacatatatgctttatcatctcaaaatattgtttacaatctaaataataaaaggagaaattaagaagaaagaagaagatattgcttctttgatctctcctttaaagttgtgtttttatgtctctgtagttctccaagagccgaagctctaatgttctttttatagactgaaaatgatgaaagaaatgacttttaaaaattaagttaaatttgaatttcgtatggatgaagtcatgacacctaagacatggcgcaaggacgccacacgagatttcccaaggtttcgacttcgcgcaaattaaaatatgatgtttccatatttggtgctctaacgcctcaatcacaacgctatagtgccaaaagtactttttcagcgttttgcgtgattctcgactcgtttgctccttgattttggcactttgctcaagtatgtacaatttacactaaatttactataattttatcactttaagttcaatactactcactacagaaaatacattaaatctacacaaaacttaaaaaatagacaataattcatctaattaattaaaaaaaaataagtgtacaaatgtgcactcatcattagtgcattgctatatgatacttagtactgtttaatattacgaaatcttaatattagtacaattgtgaatcttatatatttcactttaaattaaagtatttgagattttatattacattacattaattggtaaaatgttgattaggtaccactaatattttttagtaatatttattattttgttatatgttatgacaagctatatatatatatattttttttatatgttgaatacaattttatgttagttccttaatttagttagtttttcacagtttttacatgtaagttgaatgtcaatacgagattggctagatggttacattttatgttaaatttaattttcaatgtattaggagaatcaagatttgaacttgagatttcctcttttgtaagaaagtacgaaactaatagattatgcttatgttaaatttagttaaaaagaaaaaagaataagctagctcaatactatattgattaacatgcacaaaatgtgatgacatttactgatgagttttggtgttgtttttgcaagctaataataaccactaaaatacgaatattttaaacattgtttttgatttgtcgcctaaattatttattattaatattttgtatcaaggctaacaaatgacacacaaatttgttaaaagtttgtcagcattttaatttgtaatataaatcgtctatgcaaatttattgaacatataaacatataaacatataaacatgtataacttaaggtggcattggattgcttttagctaaatatgcctctcaaagtaacctctaatattgtttgtgtgtaaatgagtgcactcttaatgggtattacccatgaatgagtaaaattagaaaaaataaatttttatacttaatttttctat

SEQ ID NO: 18786 - DNA, 4448 bp, Cannabis sativa
gcttgttttatggttgcaatacgtgctttcagcttcttgtcaaatagttatatctgtaagttccaacttctataagttgatgtatggttgttttgtcaaagtataatattgatgcttgcatatgtttcttttgtttctatgtttatttgtatgggtattgaatgggtgattctcttaatttctgatcagtggaagagggaaaagtggcatgctttcttttggccacaagtgcagttgctaagttaagaaattcagtactaaagaaaaaactgatattgcaagtaagtattgattaaaaattacctttcaaagtagtcttaaaaaggattttgatctttatttcacctgaagtctaagtaccattttttgttttcttatgaaaaagctcaaaagttgcgtgtaattctaatttttaaggttctttgcaggtgtttgtttttcttcttgtaatcattattgtcaggtttacaattgaagtaggattatcaaagcaagctcccgattttgattttttaaacattttcccctcatggatgcccaggattgcctttggtcttccggttttgtcatttgtaacagatgtggtgccagtcatttgcttgatgttattagcaatcttcttgtataagactttaagtagtagcatttctgagggactatggaaatatgttatcagggcaactatattaagttatatgctcatagcagttcattgggcttcggaaagtaatctgtgcggtctagcttgggtattcaaaggcattggacgaaatttgattccacaaatggtttatgcattgggattcgcacaattactgttactaatatgttggcagtcttccaaagagggatccctttattcctcaaaaaagttaattactaaagctgtggccttgttatctacatgtagttcgacgatcatcatgctgttgggtaaacaagggcctgtagtttctatagcagccatatttggaggtaaccttttctgtacttgtattatgtaattatttgataggatctgtgttactatataatatgttaagtgctacatccgtggtaaattcaaatgaactagtttgtgaaagtattattacaggctattgcatagtcaagctggaccacaatgctaacaatgaaggcactagaaatgtaaatattgaccctcttagtgtaacacaatggagcctgttagctgtttgcctgtttttctgcactggacactggttagtttattttctttttgtgggttcttttttccctcattttcgccaaataatgctagtctttcgcatcttggttatttatccttttatggtatctaaattctttagatcatcatgctctcataagtcatcctttataatatgtgtatcaggtgtgcttttgatggccttcgatatggtgctgcgtttatcgggtgagtatatctatgcctgcagagtagtcactgtttgcatttgcagtcattaggccctggccatctcccattcttgtgcatggagtcaatttttttgggctgaaaaatggagtcgcttttgttgattagtgattatattattaacaccccaaactccttttactattattttttcctgtttcaggtttgatgacttcattctaattcgacaagctattctccttacaattgaaacatttggcatttctcttatccttccgatttttggacttccatttcttgttggctgtaatcattccacaagtctgactggcgaaggaaagaatgccatatttgcgtcattatcccttgtaagtttatcaactaaaattgttacactcagtatgctttttcctaattacgttggacatgttctcctttaccaaggattcatattaaagacctcagtggtattctattctataatcacgttgaagttaatatgtatgcttggttgttttaggtatatttgttgtacgggctcattatggctactactgtaacagtcactatgatttgcgtcactattcacaggcggcatttgatggtaaagggggtcattttctttttaaatccttggttaagattcattttgtataaattatcaaaaagtgcactcacatgacatatttctctacatgtacatttcatttcaggtatggggattatttgctcccaagtttgtttttgatgtggtgggtcttcttcttacagatatcttaatctgcttggcctcactttactattttggtaagaattgcagacaacaggatcatactactgaaaatttgagtgtatcataatggaaatgcttttaaaaatcttctcacgatatgaattgttataagaaaaatttacatttatagggggctaacttgaggataggtgaagcatgttgaattcatttttggtagaaggaaatataactaaatgattggattcagttttgtggtctaatttgggtatttcaagtagagaaattgtgtaaatttgtatattatggtagtgttgagctcttacatttcaatccacttttccttactaaataagaaagttcaggccggtaaggcccataaaggaattgcctacacatacaaagaatggaggtctcaacctgcacgaggtttctccgatcatggcagaatatcacgagcttgcctctacacgggcgtcattggtcctttgaaataggaaacgtgtgaggcttgcgccatcaatccttgcagtcagtcagagcataagcgaaaagtttggggtcacaatttcaaatagtcgttgagacagctacatttagctaactcaaatgattttcccgccttcctcttgcccaactataaaagggcgggcatgaatctcttttgacttgagcattgaagaattttctgcaggaaaacctccagtgcttttaagcataagtgttcataaaatacatccaatcaaatttgcatgattcaattcaatttgcaaagtgtgaatattcatacttgtgcaaattagattctagattagaaattctaaaatttaattttgtgcagattgacatgtaaaagtaaccgatcagattcaatatacacatatttatgtatatatattttttaaaaaaattacacatacaattaatatttaaaataaatagtaatttaaaattttaatacatatgatacaaatatatttcaaaacttaataatttaaattaaattttttaattattccaatatcaaataaattttataaaattaaaatttaaagttaaacattacctaaactatacttgttataataaaatactaatttttttttcataaactattaaatttaaagtaaatttttttttttaactaaactacattatatatattttttttttctaataacaaattaaacattaaaattaaaatgctatagaaaatacttaagcatttttaccttcatctaacacttttcttctaatatttatgcatttttagtgaaatttatcctaattctatcgaaattttggcagcataacaattttaatcggacgttcctgaaaatttcaaagctgcaaaaaataagaaacaatacgtacactaaacaatacaaaacaaacaaaataacattaacaatacaaaaattatccacacatccgatcgtagtaaaattaatcgcagaatctacttcactacggatgaatatttaagatattcaaattaatttcactaattaaatttttttaaagttttagtgattatatttttctccaataaagatagctacttttgcgctcttcaatcaacactaagaatccaatacctaaaaaataaaaataaaaaattaatattgattaaatttcaaattttataactactattaacttgtgtatatatatatatatatatgtatgaactaaaaatacatatatattaccgataataagaagtctctctcttgaaagacaaccaaaaaaaggagctcgacaaagtttggcaacgactaaaaaagtcaataattatataaaatttcaacaacaatttaaataaaaataaataatctaaacataaaatttttccatgacgatttaataaaaacttaaaggaaaatcaaactaatagctaaataattaacaaaaactattttttaatatcttaatataatcgaaactaaatattttttattgcctaacaacagatatcctaaataatttttgtattaacaacaaataatctaaactaaatatttttcaaaatacctaattctaaaactaaataattaaactaaactaaatatttttattaatacttaaatctaaaataaattaaacaattaatctaaattaaatttaataatatgtattaaataaatatatatgtatatgtatatataaaatatttataaattaattttgataaataattaaatataacctaaaggaggtggttttgccggtggtcacgaggaggacgacaaccgtagttgagaatggctggtggttgtccttcgtcggtggaggatg

SEQ ID NO: 18787 - DNA, 2564 bp, Cannabis sativa
aatttgtttaaataattattttcttaattatagtttattttgtactttttttgttatataaatatttacttcattttctatttaatcattttctctcacgactttactttttctttcttcatttaaattaaaaaaaaaaaaacttacaaacacatttttgttagaaaaaaaaaatattgttatatttgttgtttaagaaattaaaaatcaaaacttttacaaaagccactctactctaatctggtgtgaaagtgtaacataaaaggggatattgtaggatggtccaaataacagaaagaacaaatctgaaaactggataaggaagaagtgagaggagagctagactgttttcttttttctttttcttaatcatataaatataataatgccataatgggttagctacgctaattatgagtaaggccgcgtttggttggaccacttccattccattccattccattattcagtcaaaatttttgtctcacccaattatatgttactcatttaagagaattgtagagactttttaagacctcttccaaatatttttctcatttttttgggtgggagtgggaccagctacttatttcagtgccatacaaatgtaggcatcgtcataaagaagtatgaagttttgtgtatctgcaatgggtcaccaaatcacatttaacgtgtttgtcagtattataaatatgtatgtatggactcggactaggttttttttaatatatatttattttagaaagataatcatatatttttagaattatacaaatacaattaagtgtttttttttcggaacaaaggaaaaaaattcattccaataacactgaacaatacacacggcaaaaaccaaagactctagccttaagacacacaaccgaatctgattacttgctaagctacaaaaactatcaaaaatacaacaattacagttatacaagataaaataacaagcactcgctaccacagctgaacaaacagaaacaatgaagtcttttctagcacaaaccgcaaaacaaagccaatccttaaggcaaataggccaattcatttgacctagacaagaggtaatctctcaaatcaccaacttagagaaatggcatttaaaaaagagatgaaagtgagactcaggttcaagatcacaaatgggacaattagaggactccaccttcaagaatctagcaaggagatcacaagtgagaaggtgttcgttgatagcctgccacaagatgaatcgatgcttcgggacaataagccacataattttgtgataactcaccttttcggcagttataagagatatgtaaaattattttgctttgaacttccccacagaaccagcagccaacaactcttctttgtcaatggtattcctcaatcttaccagtttcttgaagtaccaaatggtatctcctccgggataggtctagaaatcatggttctttaaacacacactatattgatccaatgaacccaaaggcaatcctatttagtggagatagcccagatgtatttgtccattagagcaatattctatttcttccctttcctaataagaccaattcctccatgatttttcggcaagcaaacctagctccaagaagtgaagtgcaacttactcttattcccagacttatcccataagaaatcacgacacaatttgtcaatttcagctgtaactttttgcggaagaataaaaatattcatctaataatttctaatgtccaagagaacagaatggactagtagagctcttctagcaaatgacaagtgatgactagaccaagaccaaccatgaagctttttttgtattttgtccactatttcaccacaatttgaaaaataaaaatgttcatccaataagtgttttttttttacataaactaaaattaattaatttaaggtaggtttggttggatataataaagcaaaatgaaatacaaatgatgcaatttttattttatttttttgtttggttacattttaaagtattggaatgttgttctaataaaatgatctttctatcatttaagtgaaatgactattttttttttaattaatagaagaaaattttaatttaacatgagaaaaaatttaataattcttttataaattttgttcaatttcattcgtattctattctcattctcatttctattcttatgttttaatttctcccaaacaaataccacctaaaaatttagtaaagggaaggtgtccacattatattatagccttgcaaatatataactatacaactttaaaagtttttgtcaatttttttttctaagtttatataaataaaaaaaataataataagtattttttttctctttttttgaacaataattatgtaaagacatcaattcgttcataacaattctactatttttaaaatgattatttttcctacctttaaggtttttttttaattattttttaagatgaaaaatattcaaccagaaaaaagataaaggaaaacttacaaaaatattgaaattttagttaacttttacaaaaatactgtcacacggaaaagttttcaaaaatactgtatt

SEQ ID NO: 18788 - DNA, 2650 bp, Cannabis sativa
tttttttaaacacccaaaccattgttgattaaaaaaacaaactgctgaatctgataacatggttagactaatggattgctgcttaatttggctgatcagttctcattctgcttcattggtacccagcatttgtcttgtaagttctagaattttatatacatacaaaatgtatttatataattatccctttcttctaattttatgttaattatatatataaaatgtataaccctcttgtctcataacattatgacgatcagtttaatatttttgtgctggatatcaacaacactactctgggttttgacaggctttgatttcttccttcacacgtgagtgtacttctactctctatatatacatttaattttttcagaattataattagctatacacaaatttatgtatgtctatgtgtacagccttgcagaagatacatgttatgctttcaaagattttgaattaaacccagaaaagagtagtctaagcacaatgctcccatgcatggattcatcttactctaataaaatgatggcccaaataggctacatagtgcacactttcataactcaggttaattaattgcttaacataattaattatatatttctccattttattttattttattttattttgtattaatatgttggttactttttttttctactttcagttgaattctaaaataccagactactataaattgcttggatttgatggtggagtagcagaaaacgactatttatctggatttgtaactatttgtaaccctttcgatggagctcctaactacagttacatcccacaaagttgcccacaaaataccattccaattggtcacataccacatgtactttagccccaaaatttctttaataatattcattagaacaatatttaattatacaaatgatatttttatacaatatggctttttttaaaaaaaaataaaaataaataataataaagtaaaataaaaaatatgagaaaaaaacaggtaactggttaccttaaggaggaggggtacatctctagttagcctaaactatttttcctatatttttattttttccataaaattattatttattatttttcttttgaaaaaaattgtaaactttgccaaaaaggcctataaaaaatgaaaattttcttatttattttatttattttttttttttttttgattagaaaaaattttcttatttttattagttaattaatatgtgtgtttttttacaggttcttgcaagcttcacttgttatgaaaacgataacgttgaaaggtgcctaagagatggaaaatttgtgagtgaagaaatttacaatatggcttcagcttacagccgatcaactcaagatatactaaacgtatatccagacctgcaaagcctgagtgaatgtaaattagtaaaggataagtttagttatgtcgttttgaacgaatgtgtgccgtttcaagtggcagttcggttgctttggctctccatgttgtcgctttccgtaattatggtcgttttggtcctaatttggttcatcaaagctattcaagacaaggctagatgtttctccttgtgctctctaatccctcgacctcaaccacgacccatcatacacagattttagaaaaataaattatatatataggattttaattttgattagaatttttttttataaataattttttgaataatcaaaatgagaattaaaatgtcaaaattaatagtctatggttgtcgtaagacagaagaagtagagccatgtggagaatatcacaattgtaaaagaaattattaataatgtagctaatgagaatatttctattttttttttggcttaatataaactttcaataagagagcacgaaacaacccaaaggacaaagccttaagtggaaacaagaggttttgcctcctcggaagacaaaaaaccaaaataaaaaaccgaccacgaacaatgaagcaccgtcgcatgaacctagaacctccgtccaccacgaacccataaacatcgttgcacgaaccttagtcaacctgagaaaagagagaaggagagagatcgatgcattcagaaaggaaaaaaagagatcggagtatgaactgtacctaaggttacgttggttgcccgtctgttttcgaaaagaggccaccgacctgggtgttgcacgaagatggaagaggaaggtcgtggcagagagttgggagatcagagatgttcaatcgttcatggaaatcgatagacattcaacatgagaaaagagagaataatagagatagagaggtaaagttgggcgaaagagagagtttggaggaagagagtgaatgtatgaatggaagagataaaatatatcatcctaaataaaatcctatcgggataaaataattagggaaatccttaaaaagggataaagggtttcccctttacctcatttggttccagcaaaacaataaaatgtgaaaatttaatttttccgtgaccaaccaaataagacccttcctccaaagtgtgatagaagacccattaggggcgtgtttggctagtcaataaaaaaataatctttaactttgttgataatgtaatgtttcttttttttagtgctcaaccaaacatggccattgtcactttttatttttaagtataaaaa

SEQ ID NO: 18789 - DNA, 4125 bp, Cannabis sativa
  modified_base (27)..(28): a, c, t, g, unknown or other
actaatcagattgtaaagagttttatnnagggcataaaacccaacaagctccacattgtgcttccctctatatcactttaatcttgtgtttgtgttaatcctaattggagatttttggaatcaaaatggctcacatagatgaatcatcaatagaatgtaggtgtgtttattatatttttgggtgctctaaataaatacttagattttgatttattttctatattattgtagtcactaattataatgctcttaaatggataatttattaacaagttattcttaataaggataatcttagtgtgggtgaggatgatagttatttgtagaataagatgaggaagaagatgataaaattagtttttatttatttattttttatttcatttaggagtagaagaggtaataacataaattcattagagagataaaccatttaactaaataattttgagagcaagtcactccaaattgacctataaaattaggccattttgggaagccacccaaaaagttaaacataaaatagtttcgcagctaaaagagctacaaaacaaagagaaggatggtcatggtggtaacaagtgcaacgcattcttcaccatttctgactttctcttcaccttcttcttccctatctcggccctctctcaggtccattacactcttctttttcattaaaaattcacattctattatcttcccagtgttgttgttgatggcgcattgattatggtggtaggtacgcagttctgggtgctggttttgctggtctttctgttgcctggcatttgctccgagtatgcattcttctttctctctcttatggtgtctctgtggttttgaattttcaaagaaggtttttgttatatatatgcaggagagtgcaaaggacttgaacatacgaatagatatttatgatgaaattgggattgggggaggtgcttctggaatttctggaggactaattcatccttattcccctaaaggtgaaagggtactctttcttttcatttattgaagaaaaaaaaaagaaaacagaggaaaaatgatgttcttatagatgttgatgatgacgttgggtgttatgtcatgtagctaagcttctatggaagggtgctgagtgttggaatgagtgtttaaagcttttgggtgttgctgaagcagcagaagcatcaatggattctggccagttaaactctggaatttcagattttgatcctaaccttcaaggcctcatggttcggagaaggtctcttcctctctctaaatatatttggtacatatatatatatttatataactgcagttatttcaacttttttctgtactctatttcatttttgtaatttgtgaaatgttgtgtttttaagcgtgaagtatgaggttgttctggatgaatggagtgcactagtacatgatggaaaactaactgaataatgcttttactgtttccttaaccttgttcttatatggtatttgagtatatgttgcaaaattaagttaagaaaaggattttttattactttaatcttgttcttattacgctgggtttaaattgtactgagtgttgttttttttataaaaggtgaaaacgattctctacttattggtgaaaaatttcttaatccaggggaatcttgagaccagcagtcagcatgaaaaacatgctattgttaagcgatgtaattatctctgaacttggtatgagcacaagggcttggtgtttgatttttgatgttattgtaatgttggtgcttatttctctgcgccattagaatgctcggagttgtctttccagttgcagaatagaaactcttgagaaggatgctgtccaaaatcttgcacccaatttatgtttacccttgaacaaggctttctacatgcccgaggctgtaaatatccatcctcaacgttatgttcaggtctgaatcataaatccatgtcttagttaaatataacatatttgattttcatgacttgacagtctgatggttatttgctaggcgctttacacggcgtgtaagaatttagcaaaagaattatctgcatccggcgttggtgaaaaatgctacacttgcacaagaaaaatgttaacaaactcactgatttagaaggtaattcagttcctcaatgtttgtcgttgaatgcttcatcaaacagccagtctatttacttacatgttttggaatttagaaagttcattttagctttaaaagttccatgttaattattacttaatgtcttaagtggattctttggttgtttatgttatttactagattgttcttctttttcaatgcatccttctttccccttatcgttaatttgcggtgaatgtaatattaggggaataccaggcagtaataatatgtctaggtgccaaagcagacatgcttcctgagcttgctggaaggattcctctaaggacatgtagaggtgttgttgcgcacctgaagctgtctgatgatattgggtaaaattattttatgctttttaatcatttgatatcaagttatctgatagattgtctttcccctttccattctcttgtttggagcttgcaaagtttcaatctaagcacccaaacttgactgcttggactgcatagagggtgtggtgttaatgattgtacttcccaagtgtttgagatcaattcaagcactcggacttttcttatgtttatcatgttaccacggtttacctccaccttaagtggggctccctaataaacttgggaagaggtcagtctaaacaattgacctttgttgtctccttttcaaaaaaataaaaattcaagcactcgaacttaaaagcttaaaatcttatactgtaacatagatggcatttggtatgtcaatacttccaattcttaagtgtttatttccccaaaaatttcacctttcagagaagagtatccagaggctggcccttccatactttcagatgcttggctagctatccaggggcctcgaagtttgttcatgggctctacatgggaatggaaatcaagaaactcttctccaaatgtctctgcatcagaatcctctcaagccttggatgaacttttgcccaaggcatgtgccatttatccagatttaaataagtggagtttcgctggagctcgggctggtctgagggcaatgccaccactcactgcccacggctcacttccacttctgggttgtgtcgatgacattgtcggtgagagtaagggctgcaaatattggctgtttgcagggcttggtgccaggggattgctgtaccatgcttggcttgggaaactgatggcacaggctgtgcttgcatgtaatgaacaattaatcccatctgaattaacctcatggcgtaagggaactcaataattagttaatgtagttctatatttcaatataaaagttattattattttcagaacaaactttacacttaaaaattttattgagatgaaggtaataaaacccaatatgaagaccagtattattctctttcatcattctaatattatttagtaattgtttgtgccatgttaatatgttaacattacgatggcactttgatcataataagaattatccattacaataaattgttatcaaacgtaagagaagtagaagaaaaggagaagagagaaaaatatgaattaactctggaaatgtattcttgtaaaaaaaaaaataatctgaagtgacatgcttatcaaatgtgtatttttttttttgggccaattaggtttttttgttcatttggactttgtcatgtaccaaatcatgtcttctgaatttttctggcagttaaaaattctccataaactattgagattattggatttaaggatttttgtccaactttattcaattaaactaattcggtgattgttcatgaattaaatcatgctcttcggactttgatatctactaaattatgctcctcgaaattttgacacgtgccaaatcatgcctcctgaatttttatccatgttagctttttcttagtaaaaaacaatctcaatagtttaggggcaatttttaacggtcttcaaagttcagggagcatgatttggtacatgtcaaagttcggagaacaaaaatcctaagggaaattttaataattatgcatttattggac

SEQ ID NO: 18790 - DNA, 5365 bp, Cannabis sativa
  modified_base (4352)..(4357): a, c, t, g, unknown or other
attgtacatatcttaaacggtcttcgattgataaacctgggcgactttgataccaaaattgtaacaccctactagtttaggcatgttatagtgctttcttcaattactgtgtaacctttgctaatcaatgtttaatgaaaacgtaatttaatttaaactttaataaataaacataaactatattacatttataaaatttgggatcccgtgtaaatatttttcatctgtacataatcaaaagatggcgcacaatgacaacaaaaattgtgagccctagctgcgtcaatgatccaacactccaggtcaaactcttgatatgtacaatcttcatccagctctaaactcactttttttcaacaacaactttgcttttacctgcacataacatatcatatgtgagttgaccgactcaataagaaaatcataaaatataatatataatcgacctgcaactaagtgcccatacacctataaataagtcataaaccatgtcaaacatgtaaaactgagcctcaaacattcctgagcatagtatgattgactataataccacatgcactcagttttttagtcgtactagtgttggtagtattaatctatactataagtacaactagccataataccacatgcacttagtactctagcgtactagtgtttgtagcactaattcatacttttagaagtataaccaatcataataccacatgcacttagtactctagcgtactagtattggtagcattagttcatacttcctaaattaccaaacacatatattcacaatatcaagatgtaatcatacatacaccaactatcgttccaactgatatgtcaaacatctgacaaccataaacatgtacatatgtatgtgtgttatactaatcttacctaaattttaaatttaggtatgccagtcaatgtgagtagaaatagctgctagtaattggaggccttgtcacaattccaaaaaaaaactataaatgttgccctaacacttagggggacttcaattcaaaactataaatttttctatcgatagatatcatggaaataccctaattattgagaaaaaacttaatcggggtcccaggaaaactctcaaaaaaagacggtccattttaaaaatggacccttaaattctgtctaaatcggactgtccaaactcaactacctgactttaaaactctcttaactcattcaattctaatccaaaccttacaaaatttttcagggtacctaaaaacttcataatgaacattgttcatgaaggaacctcaatcaaattcttaacagaaattaattaaatggccatcctaaaattgcctaaatcggacaatttgaaacctccctgttcgagtttgaaaatcccataactcatccaattctgagctaaaccttaccaaattttttgcagcacctagaaaaattatgcttaaaatttttcatgaagaaatcttaacccaattcgtaacgtaatttaaattatgacaaaactcaaacttgtataactttgctataaccacccaaaacacttaaaactacttgtaaatagtcctaaataaccttaagaatttttttaaacctccctaaacttactcaatgggtcctacaaaaaaaaagctactgaaaactaatgaaaaccctaaaaaaccataaaaacgagctagggtttacattggattacatggagaagctaggggctgaatactttgatgaatttcagctatgaagagccttgaaaatggtggaaaacactgggtttttctctggttgtggcagccacaaagtagagggagaagagaaggtaaactttgactttttctttcttcctttaaatttgatttttggttttagttttggtttttccttttacttttccttttcctttttgttttctcctcaagcttctggtcaccaataaatggtgagtcacattcctagaaaagcttcaaaataggtcactaatcacttagggcaaaaagactaaaataccctttcttccccgctaagttatctcgtaaccctaggggtaaaatggtctaattttattattacgtttaaccccattattctaagatgtccaataatatttttttgtaaaatactttatacaaatttgtatctatgtgactcaaattaccatccgacccatttctactattaccgggcacaaaatgttaaaatatgaacattcacatatagcatgcatatcacacctctaattcaataaaatttctgaaattgaaaaaaaataattataacacgtattttcataaaaatagggtttataatgcataaaatacatataatcacataatcagattacttaaggctaagtgtctcactaatctcatgtctaagtatatcggtcattacagtttgttgttcaggaagcggagaagaatctgcaattctgaaacatgctttattttcctgctttggcttgattctaatatggcaccaattgagggtatggttagtccttcgttggtgtgtccatggaccaattctaggaattctccttttttatatttgaaaagttatctcaggaggattttgaattaatgatggttactttatggtgcctttagtatgatcgaaacccagtgatgtttggtaattgaagttaagattagatattgttccatatttagcccaatcacctgttggaattcaatgagcatgttcgacagagtcttcagttgggactgtacattcaaaaccaagttggctagcaacctattcggtggatgccaccacctcccgagtcctttgctcttgcgcataatgctttagtggttcctgggaggagctttgtccagttgggtagagtgatgcgggtgtggtttggctggtttggtcatatggtgtattaggtgatttttctattaatatggcagaactacttccaattagactagggttgactcttgcgcatcaattcaggttcagtatttccattattaatagtgattctactgtggttattggttggattaataattctcactcaatttttatttttcaatctatttaagtagatattaatgttttaataattgttgttggtggtggttctagtaatactattccacgatctgtgaatggtattgtacacacactaacaacttctgctacaaatatagaagaatgtgtatggacagatacttgtctacgatttttaaattcttctctaatatcgaatttatcttaatgaattgtatttttattaaaaatatatatagcattattagaatgaattgattgtacaagtcaatatgatttttctttatggataatgaaatacatagatcgaatgtggtaatatatcttcttgcccaacttggtggggtgcacccttgactaaattaatgataatgcttttatgtatttttttttttctctcctttttctttttagttagctagttagctagggctcttaaatgaaagactatttacatatatcccatatatatcttttaatttatgggatgcctttgggcattgtctttcactgtccccacgactatacataaatgacatatctacagccgtaagggaatggcctgcaaaaagtgatgagctctttaaagattcttcagtaaagtttttgttccattttcaaaacgtaacacaactttttaagtagttattttacacgctcaattatatatgtatattatatgtatatcgatcatatttggcaccatttagattcaaaattttaatggagtgtattatatatttatatatatacatataggccctcaaatctcacgtttgaatattggtgttaattagtgtttcttccttttaaaagcagcaattctccctgttcattgtgtttcattcaaaccatgataagcgccctactaattgttgtgtaaatatatatcatttccaagctttaactaatttaagtttaatggcagttatagctagaagtgaaaagatcacgatatagtaataatgatcacacagaatcatgataaactgaaaaaaaaaaaatcataattaatatgaataaagagtgatgattgatttattatttttgtaaaagcaccaaaattgaatatagccaacaataatgtagaacaaaataataaatgtccaacacaattttgtagtagtgctcatttataggaattacacaatgagccatagtacatgataggtcttaggggatttagtggtggttttttgggcttagagtggtagttttgataaaatttgttactgacgttgtttcaagcgacgctataggaggaagaaataaccaacgacatgagcacccactacaaaagtcctacttttggtcacaacaaaatttgtgactaaaagtgaaannnnnntgactaattataaatcataattcctatattgtgactaaaagtaaattaatgacaatttatatctaatactatgtttaatcacaagtaacattagttttcttgtgactaaaagtcacatttagtcacaaaaaaattatactgtgtctaaaaaattgtcattaaaggtagcagttttttgtagtgatcctatatatgaaatcagttattatgaaataaccgtcggttaatataaaataatcgatgccttaaggatcatatggctacgattattattaaataaccaacgttatacgggcttcttataattttgttttcaactttagaattttgtgtaataagataatttttttaatttttattttaaatgtatttttcttcatatgtacaatattttatatttaatatatttaaattaagtatataaaaactaaattaaaaagtaaaataactattcatttacactatttacactgttggcatttggttgaaagtaatgaaatgtaatagaatgaaaaggaaataatttttatttcattcttttgtttgattgcattttaaagtattagctagaatgtcattctaatagaatgtccattccacttccactatttcagtggaatgactattccattttaaaatggaaggaaagatcattccaatgtattatgagaaaatatttaatgattttaaattttattacattccattcctatttttattctcattctcattttctcttatgttttcattcctcctaactaaacgttacctaagtgtttgtatattatctatcttttcattaatattttatattttataatatgtatttgtattttaatatattagtgggtcgtgggtgggtgtatggccgtgggtgtcgtgggtgggtgtgtgatcgtaggcgaggaagagggaaagacagagaaagagggaaagagagagagggaaaattaaatgtgaggagtattttgggtagaattttaaaatagtagaattattttgtataaa

SEQ ID NO: 18791 - DNA, 4376 bp, Cannabis sativa
aggtagggtgttatgctggtttagtgcaatgcaatgaaatttgattgattgttgtgtttgtcatgtcctcttttgaatttatgataacccccaaatcttggagctgaagctgaacagtttccatgtatgtatttggtgttgttgagtaaaagtgtttcaaactgacagttatggttggttaatggttagtgaaagagaaatgtcatggtgaagtgtaatattgttattggttcaattcaatatatatttaagtaaatttaaaaaatatatatttttacattttatgaagaaattcttagttcttaaatcgtatgatatttgatacaaatattctaatttttttagtatccaaataattatagaaaatttaagaacttgtttaagtttaaaaaaccgaacaaactatgaattaatatgaaccactttttttacatttatataatagtcagacaatttttaaattataaccaaccaaaccgattattactcacacctaataattttagtaatatcaagtaaaatatcactagatatttgtaagatgccacttcgtagcggtgagtgcctaatgacaatgctcatattatacttagtaatcatgctattgctgccttttagagacaccatagtgtggggtaatttccctttaataaagaaatttggtacgctttacatatttaattatttaaaataccaatatttttaactattgaaaaataaattactcaacatgaatatagtaacttaactatccttgacaaaaggaattacatacacttcattgactcaatagtcaagagctaacaaaaagagcattttccaaataatagcaaaatattttgtagctgtgaattctagggtgtaattagtagtgtcataatattttcaaactaaaatgtagcaaatttcccctacaaaaaaaggaaaggaattcctcagttccatgctttagaaatgcaaaaatccagtgagatattatacccctcgcctctccgctactctcgctcttgtgccaccgtttatgctacataatcgtattaagcttatcatgctttcttcacctcgaaaattcatttgatcaaacatgtttcttcttttctaatttagcttcagcatgtcgttgtcgcttcttccattccgggattttaccagggaacgcccatcgcaaaaatctctcccatgagtaacaagttaagaacatgagcaaagcccatcccaatagcttatttctcaacccttcaggcaaaggcaccaacttcaagctatcattcaagcctctaaacagatcagaagtgataacaacaaagaatccaacagcagacaagagcgcatacaagaatggcttgttttccgatacactctggttaaagggatgccccatgtagttgacagcaaaggtagcaacctgaagcatcatgttcaccatgtacgaaactgtgttcactaggtttggatggaagttcgagtctggttcaatgcattcttcgggcatgtgtttctctgcctcttgaacagaagatatcaagaaacataggtgtatagcaaactgtcctaacagagagaggaacacgtaaaagcaaaagatattaggatgtggtcgatctgctgaaagggttgggagcggtcgggcatgtgagatgaacagaaaaaaggctgctgtaaatacaccactgatcgtagcctggacatccccgagcttcacaccgtccaaatacatcacactcaatacgtacgctgtagcgaggcaattaaggccaagaattttgaacatctggagggttgttactagagtactacgaccttgtcgaataatgtctgtagttgggcaaaccgatgcatgcttagctgtaaatggcgaagccatggaagcatcgccaagcttgacaatgggggcacggccatctgaatcatcattcagttcttccatcattttcttcagcttttgctgtctctctaatgctgttgtgtggcggttactcatagagttgtttgtagcaactttagattttgaagaaccttctgcttcagaagcaagttttgatttctttactttggcaacctttatgctttcgtctttggatgtttctgaagatggcttttcagtttgagttggaggaactgcattcaacaacgcaactcctacatgcgcctggaaaatgtattgcaaattatattttgtttgaaatagcagagaagttaaatacagcacaattgcaaatgaattcatatatcgaactttaaagggttaatccgtaagcaatcattacctgcttcagagctccaacatcattggttccatccccacacatcaaagttatacggcccacagttttaaatgtggtcatgatgagttctttctgctcaggagcaactcttgcaaatacctgagaaacatacaacaagcaatgtcgaaaatgaaccccatgtcggtgttagttagctagcgcttaacaaaacaaacagcatttacaaaccttcacaaacggaatgactcgtgttacagcaccagtctgttgcaacatttccatgcagtcaccaccaatacagagatcatgagtctctgataaagcttcaacctctttgtcactgatacaaattgtccaaacaatgaaatcaatccaagattttcatagcaatgtatatttctctgatccatcctaatagatggacagagtataggagaatatggaaacatttattgtggtattagagttaccaaacaaaggtattaggtggggagggaaactatgaatttagctacacaaccatttggaatataatgtacaataaaggcctcgtttggtcaagtttttagtttttttatagttagaagtataagataagtagaagttttaattcatttttaccgtttggataactattaagtatttttgaaagtgtttgaatatcatttaagaaagatctttttttttagtaaattgtgaattatacaaattgttttaatttaaaaactgctcttaaaagttcttaagctacaaatcttagcttctcccaagagaaacattttattttttatccaaacactcgtggaaggacttttttaatgctaaaagcaaaaaaaaaaatagcttatagaagctaagccgaacgaggctttacaataggaggaccaaacactcaaataaataaacaattgggggagaaatatggatgcttttggggacctcagggagaaactctgatgtataaaacagtaaaagagtggcgaagagggtgtaactattcttacttataaatctaaaagcgaatttcagcatggtaataaaaatggcaatggcaacaaccaaaacaaaacagtattttacctaaacggcatcctctccacctcatctggagatatccactcatatccttcgccattcactcttcgactgagaatcagtgctggtttcgatacaatatgaacttggctagcaacatggcatgctgttaaggcttgatcaccagtaatcatcacctatgattaattaaattcatatcaagaacagagtgacaactcaataactgtaacaaagctcagatagccaggggctgaaaaatcttggtctagtgtgtaaacaaaatcttcccaatgcttactgatatcagcacaacatttattgcaataatttattaaatcagacacctgatgcaaatgttactctctcaatatttgggttacgacatatgttctagatacaatcgaatatatttcagcatatctgtgtgagtgcataagaaaagatacttaccaagtcatgtgatgagcttttcaattcagacaatacagtggctgaatctgctctaattggacagttaaaaacctgtcaaatgcaaaaatatagcgataaaaatagggagtcagtaattcaaaaacactaggaaatcatttgattgtgtcactaatacttgttttatccataaatacttgaccatcttgtcaataaacagaaggaaaagtaagaataggacaaaagaattaccgcaaaaccagcaaatgtaagaccgctctccactatttccctatccaagcttctagcttcactgaccttcacacgattgagagataaatgaataagagtacagacatattactaagctaagtaaagccgagaaatatttagcaaaatataaagggcaactgtggcagctattttaatctacttaagaatctgccttatcttccagtgtgaggtgcttaacatagttaaaaattaaacaatgcaatggtttaaacagataaattgaaaagggttactatattttcaatgctttcggtaaaatgtcagagaactcttactgtcatgtctggaagggatttgaaagcaagagctagaacacgagatccttgccgagtatactttttgtatgtttcc

SEQ ID NO: 18792 - DNA, 1969 bp, Cannabis sativa
tgtttaattttttgggtttaaaccaaaaattaccgttagatagacgcttttaatatataaagaaatgtacttatttatcatattttaaactatatattaaatagataaatacttttttttactcttttattgttttaattaaattaaagataataggcataaaattaaaataattatttcgtaaaaaaaattctgttatatataataataaaaatttgagggtatatacatctatctagggcaaatccaaatttcgaaccatatttattgttggaagtaaataataattgtaacaataataataattaattatatatatatgactgaccaaaaaagcatctcctgccataacaaggaaggaagaaggtgagggttgaaatccaatccaatgttgaccgtccttagtttgaatttccaaaccattaacttcatcttgatgaagaattgttaagaatgacttatcagtatgagcatggcaaccaatctctaatttgtttaactcatcaggtgatttatatttaattaatctcaacaagaaagtgctcgattccacgtgtgaatcataacacttctcacccaccccataactttcaaacaccattctcttcaccaatttttccaacttcgaaaccctagtcgcataatcaatcatagtttcactacaaaacaaataataaacttatataattaattatatgtttcataaaacaaactatatatatatataatatcaattaattaattattacgtacgtaccaaaagttttcatttcctgtggaaggccacatgagatttgtgaaagtctgaacatgttctaaaattgttgaatttgaaatacctaagctttcatggtttcgaggaatcgaaggatggtttccaacataaccaaagtaaggcttatctgatatatttctcatcttaacatctgttggcaaatcaaaaagctttttagattcacttaagagtgattcatgaagttggtgtgaaacatcctcgtaattcaccacaaaacaaccataatcttctaaggcctcacgaacttccttgcatgtacctaaatacgaggttttcaatttttctactgacaaatcgatagtaggaagctttggtacacccattttttttttttttctttcttttaaatttatgagatttattattatttcataggtttttaatgtgcatttatagggttaattcatttgacttttgtgatcatatttttctaggagaatctaggctaagtgataaaaatatatctttggcgccgtcgcagagaggacatgcatgagaaatcgttgatttcaaatctgttggctattaattaataatccatgtttttatatattaatttgattaattaattatgtttaaggatcaaaaataataatctgcagcgctctaattttcttaatcagtttcgccgcccttcattcatatatgggttgtttttattttgttattttttataagttttgccgtttttcatgatagttttcaattatacttctatgttttgccacgtgtcatgtcatttacgtatttaggacattattatagtttttattttttggtcaggaaaatttaatagattgaaatgactatcttttcttctcttgcagtatatatatgcatgcgccttttataattaaaaaaataatagaaatttattgatgaaattaataaattattacccacccaattaggcgctacattcaacaaatatattatattatcggttgataaacattcaaaatcttcctgacaaatcatgaaaatgaaataatatttttctatccaagaacaaattaaccgcttaatacttattttctctttgtgtgccctcggcattatgatctgtacatatagagattgctaaattaaagggtgcttagtacatatagagattgctaaattaaagggtgcttagtacatatagagattgctaaattaaagggtgcttagtac

SEQ ID NO: 18793 - DNA, 9035 bp, Cannabis sativa
tataaaaggagtgaagtgtcttgtaaagagatcccaattttgatccttacaacttattctcacgaactctcactctttcattccaaaaaaaatacttgaggaatgaactcttaaagaacataacactggagaactctccttaagtattgaaaccaataacaacctaagtggattagcttattaccgatgaaaggtggtgaaccactaaaaaatcctcatgttcatctttgttaatttttttttaataaacctttttactttgattgatgaatacttgtgtttatcttgttcgtttacgatcttcttagatcagttaacgaaaaatcgtgtcaatagctctatttagctaataaactagctaaaagcataaaataagtataagttgtagcttattttttttttctttagcaattatttaaagatttttttctaattaaaagttattttaaaaatattttgatataagttaagagaagatattttatgaataaattataaatattgaatttagaaaataatttttaaacaattcttttaggagaaactatgaattctaacttcaactaaaaatgacttttaaattataaaattcttctaaaagaacatcatccattgtgtgcaatattttttaagccacataagtgatcgttattattattatttatatgcattgaatcatgcaaactaactatatagttgtcatcttttgtttccttgttagcattggtaataacaagcttttattattattattattggtaagagtacatccaaaagtttgtatattgtatatgtaaattttactaggaattagttggaaacatatgaggtcaaaaattcagtggagaatccaataaataataataagtggtctccattatcattattatcgttaatattcaatattattagtaatttactagataattaaacattgttagagtgtttttttttaaaaaagaaaatacacttggcaatatcatatgtggaccttttttgttttaggaaaaaatagtttacaaatgattatattatggtctcttgtgattctttgaaaggaatctttagaataattccataataccaaattatttgacaatataaatataaatatttatatataaatataaatgataggcacattacaaatgggtattacacacatgcattgtgtagtatatatcgattgcttggtgattgacagtctgttctaatttgccaaaaccttaaataattagggttccacataatattctcatcacctttttatttatttattattcatttatccacattgtatttataattacaaagtcaatatctttttgtctttttttctcttaattgagaaaatcgtatacttttatttaaattagtattggttcacactttgacataatctagcctaattaagtaggttgagatctttgtaagtttatccataaaaatatagaaattttatcctctttaaaaaatagaatgttgatctttaaaaaaaaaaacataataataaataaataaataatagaaataaattattatgtttttattctcattaattaattattttttttcacaataccaaataggcaaatactaatctatacttattttaaaaagaaaaaacaaatcaatacattttctcgtaaacacaatactaatcaatacatacatcatacatgtatcttttttatattaaatataactatctaattaacaaaaattgttagtttaacgttttttccattaaaatatttaacacttttaaatcaatcaattgattattttttatggaaaaaaaatatttttaagtatttaaatttaataatttatttatttaaatataacttagataattatttaaaagtatcaacaaaattatatatatatttttttatataaatcttaatttaaatgtaaattgaatgttaattcaattaatcaatcatattttataacaaatttaatagttatattgtttaaaatatatatacttttttacttattttattgtttaataaagctagttaaatatattttcttataaataaattagaaattagattaaattttatatatataaaaatataattaagttgtattaaatttaatttttattctgattatttaaattaataattacatgttagtaataccgtgtatatatatatatatgtatttatatatatatataagctatttgatatcatttcaaaaaaaaaaaaaaaaactaaaaaaaacaaacaatttttatctatttggttggtgtaaaagtttagcatgcaatttaaaacaaatataatacttagttacatacagatactcaatatacaatcatttgaaaagaaaataaaaatggatttactccattaaaaaaaaaaaatttactattaaaaattaaattatatctaataacaatttagtgaatgtatatcatctaagattctgtgtcttattcttattttattttgagattattttaaaaataaacaaaaaataataaaaaattacaaaaatatgattatataaaattttaaatattttttacgattttatttacagaaaatataatcttttcatttttatattgtatttttgttcattttttttttgttattgttttgagattattggatgttatttttatgtaatttgtttgttatattctatgttatttttattaaacactataaaaatatatataaaaaatctttaagcctaaaagtgtaaattttttataaaaatatagtattttatgtaattattcttttttatttttttttctcaatttaattatgttcaaatttacttatcaaattagtccaagttttaaaacacaaaagctgaaagcatgcttacaatgaagtcatgcactgactttaaaataataataatgataataataataataatgaagtaaaaagtagtataaaagtgcctattaattcttaggtaatgtggcatgtagcatatgatataaattttaataaatttaaattaagcaatgttaatatattaatcaaattaaaatgaagcaaaattttgtaactttaaagttatttagcttctttcaactcaaaataatttgtagtataaaaaatatagttcaaacaattgtttatatgccaatatgttttattttatacgtatatgaaatagattgtttaaagtgaattaatttagatgaaaaaaaatattagacaatttttttttttaatttttgtaatatattttaaaaaactatgataaatattttcatataaaaaaattaaaattaaaattatccggatgctaaaattataaataaaattattattcatgttttcgaaaggaggacatgtggtacatccaagtcaaagatagtcaactaaagcccaaatacgagccaaattgaggtaacgagctggatccacacatgagatggattgcaagtccatctagaatatagatcgcttacatcccaatctaaacctctctaattttgggaaggcatcacgcccaagaaagaagacataatcaaaaccctctagatgagttattgggatactactagggggcactttaagagacgttctggaagccaaagctgatgtggcgatcctctgatactgaatcccacaatatcaaggctttgtcccttgcgtcagtgtacaagagtgcgcacacaccaccaaaggaaattgacattttgtctgacgactactactctaacagttacagtaagtagagtcggcacacacattgagagagatgttagagagtctcacattaataatatgttgaaactaaacaccataaatatagactaatcctctcattgcaaattaattttaaaataaaaccacatacatcttaccatacttatctatttctaattcttcaatcatacactttctcattctaacacaactagtaaagtttggtggtcaaaatatctaaattgtattcatctttcaactatggcttatgcgatgaatctctaataataaccccatcttcctattcattacaattcctactacttcatagtgaccttttatgagtcaaggaggtcaaataccaaattgaaaagtgccttttggttcttccaattttttttttagaaaagagaattcagcttttttgcacatactccccaatttttaattacttaaattattttaataaaaattgaattactttagactttaattaaataaattaaaaaaatccctttatctatctcaccgtttatgtgaaggcaggagcaaaggaaatatatatagatatagttaacggacgtattgaccgggtcaatcggcgcgtggggacaagctccgccgttaaaaccacgttagattcttagacaaaatgactattataaccttaattaaaaaacctctgttacataagttgagggctataattggaaaatcaaaaaggaagggacaatctcatagaaagaatataccaaatcaatggcttattctaattcttttccaaaagccattgatttttacagaccattaataaatcccatacacttataatctcatgcaaatttaccaatttgcccctaccatgcttattgaaactggaccgttggatcaaactcaaacattttcttattcatccaacgggagtggaattagtaatttttttcccaatgttttggattttagggttatttatttttggataattaaaaaaaataaagaaaaaggaaattagaggtttaggattatttgtttatttattaattttgttattaaaaaaaaaagaaagaaataattctctctgtattgtcatatagttaagagagaggagagagagagaaatctgatgaaagagcgaaaaaccaccaaacggctataaatggcgttacagagtttctgcgcagagagagagagagcgagatagagggagaacgagacactgagacctaaaacccagaaagggtttgtgtgtaatccccttaagatcgctgtttattcggtttttgccttactggagttttagggctctggttggttttttgagcggttgatctggttcctatgatctcaacattaacccagtttcaaagaagaaagagagttcgaaacgaaggtttattaattgggcattacaataaataaatacacatatattagaattagtgagattggtgttcatcatgtctgatggttattatagttcgaagaagacggacgatatttgcgaggatgtttgtggccaggtactttcattgttgatatagatatcatttttggggtcatgggaagttttttcatttcagttatggttttgggattttattcaattgagttttaatggagtttacgatacttttttttttattattattctctttttattttaattgaaaaaaaaaacgcatcaatacttaaagtttttgatgctcaaagtttttagctttgtaagttttgatatatacggttttgtatatttttactcaacttttcccagattcaaattcttatcattttaagaaacaaattaaggttttctttatatccttacttaaattttgtttgaagggacaatgtgttataaaggtggtattaaaatctgggaatttggttattactaagttaaggtatggatctttgttttccaatcctaagtattttttcttagttttcttctgctgtggttaaaaaaaaacaatatccggaaaagtggattctgctctttagaatattatggtttttatttgaccattatggtattcacacctcttagttctcgttgtcctaatttgttttgtaccatgaaaatgattattgagtgtctcatttccacgagtcatatggttttgaaactcccttgtgtagttcttgttgtattcaattatattgctgttgttctctcccttccccaaatcaaagtaactttttagtttttaatattagaaagttgtatattgagataaccagatatttaatttaagttatggtgttttctgtgcagcagggacctcgagcggcactaaatatgtccagactccggtgcatttttaatggatttgatttgaagacatctattttcatacttgtgcttatcccaacatgtgtttttggtatatatttacatgggcagaaaatatcttattttctaagaccactatgggaatctcctcctaggcctttccatgaaatcccacactactaccatgaaaacatgtcaatggagtctctttgcagacttcatggatggggaattcgggaatctccaaggcgagtctatgatgcggttttattcagtaatgaagtggacatccttacaatcagatggaatgaattgtatccatatgtgacacagtttgttcttcttgagtcaaactcaactttcactggtttgccaaagcctttaattttctctggaaacagggacaaatttaagtttattgagcctcggcttacttatggtatgttggggggaaggtttcatagaggcgaaaacccttttgtggaggaggcatatcagagagtagcattggatcagcttctcagaatagcaggcatagaagaggatgatttacttataatgtctgatgttgatgagattcctagtgctcacacaatcaacctattgaggtggtgtgatgatataccgcctgttcttcatctgcagctgaaaaactacttgtattcgttcgagtttttcttggataacaagagctggcgagcttcagttcacaggtataaaagcaaaaccaaatatgcacactaccgacagacagatattctcttgtctgatgcaggttggcattgtagtttctgcttccgtcgtattagtgaattcatatttaagatgaaagcttacagccattacgatagagtgagattctctcattacttagaccccaaaaggattcaagaagtgatatgcaaaggtgctgatttgtttgacatgttacctgaggaatatacatttaaagatattattggcaagttagggcctattcctagatcctattctggggttcatcttccagctttcttgttgaacaatgctgatagttacagataccttttgcctggtaactgcagaagagagagtggctgagttgagtgttgcctttgtagattggctgaagctgttaaatggaaaatgtagattgacaatgaagaggactatatttgaagggttcacaacgatgatgatgatgatgtataaccgtacaaatatataccttacattccaacagaatcttaggtcatctttagtgcatagtgagaagctggaaaaagaacttgatggggtcttggaatttttaggaagatttattatatattcctcctttttccttggcttgagatttctttcttccagctcggatggggtaataatcaaaatcttcatatttgagggtggtggtgtttttttgagtgagtaagatagcttagcttttcactgctttatcaagctaatgtacccacttcttgttggtatgtgacataaatccccaatatgcatgactagaatgacctttcccaagattttctataatgggaattttgtttttcagacttatttgttagtaagtattattattaatatattctttttacaactttgttgttgattatgtactaaattaaattaaattaccattataattaccttagatattttgtatcacattactgattatggtcatgcactaagactatttcataagaattggagatctcttaattttttgtattcttttagtggaagtagacttagtcaatatgcaattcttatataaaccatttctaagaattgtatgttgattttgagtagctttcaagcatggaaagcaataacatgttgatcatgtaattttttattttttttttgtctaaattagatagtgcctcaatgtgcactttaggatttagtcagaccctccaccaattaatccccattgttttgaaaaaaaagggataagattctccacaattgtttatgtgaataatatttaacaaaattagttggtacattatctggtttgaaatttcatagttcatagtctattggtctactcaatcaatatccatggatcaattttgaattgtcttttggggtgttattgctctctatgaaatttcccaaccaagtaccatgttaggctgtacttggtaaaagttaattgatgatgattcttgaaattgttgtctagtgtaagtaaccccatgctcaatcaatttagggttctcaattcaactattgagacaaaaatggctgagaaccttttttgggcaagagagtgtaaaattcttgcattactttgtttttagactatcaaagaagaaaaaaatggactaggtcattgtagaacaagaaaataagaacactcaattgggattgttgaaagttatggggggtgtcatgactaagagtcattgaagtcttctatgattggagtctaccacttattgctcactctcataattgatatgaagtcaagaatttgacttggtatattttggtaatgttcttagaacatttccaattacaaactataattagaagtttgagatttttggattcaaatatgtaaacatgaaaatttattcttacaaaataatactaagcctaattgtatactaataagattagaaatacgtgtgtattttttaatagttatatactattttttgaattaatttgcttaatttcaatcatacaattatataggaagtgattcacttaaaaatatttacaactaagactaattatatatgagtgtgtaatttgatgagcctcatcctcatgttaagaattacatcatggtaaataaacatttcattaagtattgctccaagtgacattgacaatccataattttcacactaatttctttccatattttatagttattgactaagtcaagcactactcaatatttataaccgttgaaaaaagaagaagaagaaaaatcctctccaatcacaatctacttattggcttgaaattattaataaatgaaaaagccaataagtaatatttaatttcagataaaaccccttaacccaagctaa

SEQ ID NO: 18794 - DNA, 4269 bp, Cannabis sativa
agttcctggtaaaataacttccaacatgaagatgaatttgcatggagctgaggatgatctttataaaagctgaaagaggtcctagtcgatatgatttttgcctcccgagaactcactagggttcatctacaaaaataagggagacaagagatgagacttggacgaggggagaggagaaaaatatgtttaatatgccaaccaagcaaattcaagataaaaagaaggaatttcactataaaatggaattcccaaacccagaagttaaaaatctcaaagagtatttggaatttttttagaaactcatgaattggtgattatgaacacattcaagccaaaagtgatacgaattacagaatcagaaagtttaagcatatgttagtcatagttaaaagccctaatgtaatctactatatgaacagttcaagaacatagattttgcttcaagaaattcataaataaacatgtgtactcaatagatattgcataaagaagagggaaaaacaaattactcactgttcgaagctttttgagctttctcggatagaatttccagtaagatttcttcgaagatttgagaagaaaataggaaatttttttgctctggttttctaagagtaaaaatggctaagaaaattcccaaagagctttcaaccccttttataggcattgaaaggggaaattaattgatttcaaattcgaatattttggtttttccccctaaattgaacgttagtactcattgcaaataatataaacgtcacgcatgagatgtcactcaatagttagtgcatgattcgaggtacaacttttaagaagtattaaatttcctaaacacgaaagagacgttcgatgaagtcatgttggatcaaagtttacaaccagacacgcgtcacccataaagacaacttcctggccaaataagtccacgtgcgaccaagaagatctcgtgtggacttggggaaaaatgttatccaaatttctgcactatgatgtggcatccatctaggtgacatgtgtaacatattttataacatgggcagatgattctactcctagtaggtcatgcagactgttatggtgctcaaagtcacacatggatggtaggatgtctgagaatctaatgaatagacattccaccagctccacttaagcaagtagctcgcatgcactgcccaaggggtgcaagttaactatttctgatataaatcttgtatatctccaagattgcaagtcacggtataatccctatattcattggatagatttgtgtctttagaaaataaaggcaatcagcctaagtttcccattttcttcattgtaattatggaaataaactagtttcctattctatttctctttgatttaggaaaaccaatatcatgtaattaatccctataaatagtggcttcatctcactatttaagaatacaaaaatatttagagagagaacattcaagagagaaatcatgatctaagagtaaattgcttagagatcattgtaagagctttcaagagagaataatttattcttcctcacaagtcaatacaactaaaggggagtaggctataactaactataaggggacgaacctctataaatctagtgtcttctttactttaactatttccttttctattatttatttatttgtcaatcgctttaattaagactgactatcattggttaaaagcaaggtcaacatttcctttttaggagaaaggctgaaaacatattggttgtgcttttttatgagaaacaagtttgatatgcaatagacttaaagtgattcctccttctaggaaggagagtaaaagatgtattaaaatccaaacaatattcaaacttaaacactaaaggtgaaaaccaagttgtaagcaattcccccttctaggaaggagggttgaagacatattgaaattcaagcaatattttcaaccactagtttgaaattttaaaagtaaaatacaagtaagaaattaaatgcaaataaagattgaatacaagcaatatgtgagggcacatagttaagtatactacccccaagtgagctaggaagtttggacatctccaaattcttggtcacttgttttaaacatagcttgtgcggaagacaaaaatgtgaactcttgtgtaaatttcttctattttaatttcatcatgcctgaaggtttacattaagagagagaatttacaaggaattacatacaactttaggggaatgttcagatctagatacccccagcctattggtaataatgacataaatggtctgcattccagatgcaagggatctctgaccccgtccattctcttgagttgaaatgttccatttcccactttatgttgtatctcatagggtccttcccaattaggtcctaagacccccactcccatttctcgcaaagctgggaagattctcctcatggtgagatctttaatgtcaaatgtacgactcttgactttagaattaaagagcttggaaatctttccttggtacatcttgagttgaacttgtgactgttcccagagctctttaattaaatctaatgattccttgatcaaagagtgattgtgggttgggtcataagtttctcgtccgtgagagggaactgtggtttctacaggttttgactgcttcacacccataagtcatcgaatacagtgtgtgccttattaaagttctctccgtggttctgtatgcccaaaggactcgcagaggctcctccagccaatgggctttacaagcttggagtttcttcttcaaacttgtctttaggatcttattcacagcttttacttttccattttcctgtgatcgagccacactagagaagctcttcatgaatttgtactggttacagaagttagtgaagtgatcactatcaaattgctttccgttatttaagacaatctcgtgctgaagtctgaagcagcacacaatgtttttgatgacaaagtctaaggactttttggaggtgactatattcatgggctttgcctctacccatttggttaagtagtcaacaacgattatggtgtacttaactcctccttttccagtgggcagggatcttactaagtcaattccccaaatagcgaagggccatggactgttcatgagggtgatttttgttagtggcgctcgcagaaccttggcatatctttgacactggtcacactttgggagatactctatacaatgcttcttttttgtccgccagaagtaaccttgatagaggatattcttggataggcttggtccagaagtatggtcttcatagaaacctctatggatctagtgtatgatagcgcttatcttggtcccgactacgcaccttaggtatggcacaaataagcccctgtggtaaagcttcccatctagtatcacatatcaaggagtctggtactggacctttcgtgaagtaggtttgtttgctggaagctcccataaatttgggaactggtagatggtccatattcaggagttaaaatgatcagtgttggcatttaccccctgcgtctcgatacttgaagctcctaagtgggccacaggcaccactccatattgaatgatctctatgtctgtggcaagtttttctaccatatccttaaatgaattttggtcctgagggaccccacaaatgttgtagctcttaaacccttgcagcagctctcgtgatattatcacataggcatccatccttccacctttggtctaatattccctaaatatttaattcaccaccagctaggagtcactatgcacttcgatacattaggctccaacttccttagccaatcgtagtcccgttagcatggctttatgttcagcttcattattggaggcaagaaatttaaaacaaagagcactttggagttgatgcccttacgaagagatcaatatgatgcttgctctggccccttttcatttgatgatttgtcaatgtagactttctagataggtaactctgagactcgatcgttcgggaggtcacttaatccagaaaattccaccacaaagtcaactagggattgacctttgatggatacccttggctgatattggatgtcaactagctaagttccattgcgcatttttacagcctgttgaatgcctttggcttttgaaacacttggaaatatactaggagtcatccaatggtggagaaaccagtagcttaccacagacttacagttccagtaatttgggtttagtcaaatatactacacttgatctcgatataaagacaattgattgattgaaatgc

SEQ ID NO: 18795 - DNA, 7928 bp, Cannabis sativa
aatgaaaaggtgcggaaatggaagaaattaagctccaaggagctgggaattacgaactctatgatatctaagcctgcgaggaaggttcttaataatcttaagcaaaaaggtattactatttttcttaataatttggcattgcaatgatagatggactcattatttaatagcacattttatcagaatttgatgaaaggtagctttttggtttattcagagatcattattactatattggtttattcttttaggatacgaggtttatcttgtgggaggttgtgttagggatcttgtgttaaagcggacacccaaggattttgacataataaccactgctgaactaaaagaggttgctactcatttcttccttaacatttgttaattttagtcaattatattgctgaaccatcagaagaaaattaattaaaacctgataagaaaggatagactctaaacgtcctttatggttgggagtaattaaaacatagaaatgggttgtgaatgagaatggaagagaatttatgttgtgcaatgcaatggttagaatggcttccgaaaccttgaaaggcttgaatagtaaatgaaaatggattttttctttcctatttcttttccccaattaagcataaccttagttttccttgtaaatttgaatgtctctgttaagactacagtgtcaaagtaaaacttccaaatcccagatgtcttttctagcacataatatatggtcaatgttgttgactcaatcgacaggtgagacgagcattttcctggtgtgaaatagttgggaaacgatttcctatatgtcatgtgcaccttgatgagaccattatagaggtctgtaaattttatggtcttgtactattttatgttgtaatggtttctattaggtattggcagaaaaataattgaataagcttttaaattctcttcaattaggtttcaagttttagcacatctcgagacagagttggtgaggattcaagtcatgaatctccttttggctgtgatggaaaggattatgcccgttggaagaattgtttgcaacgggacttcactattaacgggttaattatatgacccttatacttagaagtttaattaatattgatcatgatgctctcaccctaactctgttatttattttacttttagtagtgacatgttagtgactgccattttccttgtctcctaatgtatatggctctctctatgtgcaggttaatgtttgatccctatgcaagtatagtgtatgattacttaggaggagttgaagatataagaaaatctaaggtacgctatattattggtagttttggcttttgactatttctgtttaactagctgaatcatacatttattctcgtgtaatctttatgggcataggtgcgaacggtgattcctgcaagcacttctttgcaacaggactgtggtgcgtcagtgcgtcttctatttccagtttcgtttggtttctctttgcaatgattcctactcatgcataactatgaacacactaaaactgccaagctaacatgttttttcaattatatgtagctcgtattcttcgtggaataagaatcgcagcccggttaggatttcgcatttcaagggaaacagctcattctgttaagaatttatctagttcagtgttgagacttgacaaggtgattaaagcttcttttaccatcatatattttctcttcttagtgctttagatattgcatgaaatgtttctaggtgacttatttgcttttttataaattgatgtagcaaaggcttctaatggaagtcaactacatgctagcatatggttctgctgaagcttctttgcgattattatggaaatttggacttttagaattacttctgcccatccaggtattaattagagtttgaatttccttattacctattaatcatggaatggctagtttgatatggactaaaactgcaggcagcttattttgttcgcagtggttttcgaagacgtgacacaagatcgaacatgcttctggtaatatgaatatattcccaatatttagtatctattagcttgctgagggaatttagttttgaatatatgagattgagttttgaccgctggtttaatgttaattcaactgtgttattgttctccttcctcatcctgattagacatagagacaagaacttcactcctgtaatagcattactacaactataatacaatgatatttagtagtattttattattctttgctgaagagaatctcttttcatttttatgcagactctgttttctaacatggataaacttctggcacctgacaagccatgtcatagcagcttatggtaagttttgttgataaatcctttcatactctttttccattatatagagtaaatatataacaagatgattctttgatttactggatcacttgcttttgtgtggtatcttcttgggttctcttttctatgttgcatgaaactgttttggattatatgctctatgctgcctttagttaagataacccaaggggggtcgcaaatagtcaggcatgtggtttgctcctattggagtccttcctgggtacttatatagcgattgctatagttttaacttctaaggtctcctatgttagataccttttttcctgacaattgtttgtattaacttcaatagccatagagttccattgaaactaaacgtttccttagccatagagttccattaaaaactgaaatttaataaatacctccctgaagggtcgggctcatcttggtaaggtggatgtaagtgaaggaatggtgaaaactaaaaatatattcgaccaaatttgagtttggtatttgttttatcaaatgagtattattaaaaatagagggttaatagtttagtttaaaacacaggataccgaaaattgtatatatttccttagttcagtgagctagtaagtcattgaacactgtttctttgactctcattttagacttggaatattgaaagttagaaccaaccaaggaagacttgataataatatgtttatgttttcagggtttcaatcttggcattccacaaagcattatctgaccaacctcggaatcccttggtagttgcagccttcagtcttttgatccacaatggtgggaatatcacagaagcattagaaatagtcagaagaatcaccacaccacacgatgctagcttccccgaattgctggaacctgtaaatttgaatagtcgagctttgacaagcgaggttatggatcttgcaaaaggtgttaaagctgcacttaacgagatgaccgatgagcatgctatctctcatgcaatggcaggctactccaaagcaccattttcagatttggtaagccctttactttctcactctctctctgaatttcttccttggactttgtttcaaagcttaaaagtttcatattaaatctcaaaatgcaggtactgatcccactaggattatatttgagagtgtgtcggatttttgagtgtgtgaaaggcggtggagaacaaggatttgtgtcaaagcaaggtagcaagattcattacgagtcattggctctaggatccttgccagaggttcgacacaattttgcgaggattgtttttgatactgtgttccctatcaagtcatgaccatatttagccgttgatcattcgaagttcaatctagtaaaggaaatgatcaaagttatctgtaggctatgacataacaccatggtcgattcgatccgattggctctaaggggttcatgccatatcaattttgctcaataatctcagaagcataacagagttgtactcaaaagcagcgtggatgcaatatagtgtaaaagattaacgagtccctttagctgttaaaagagttggaacaatttttgttgctcaaatgagtataagctgtaagaaacacattaaataaatgtatcattttgttacaacaccaagactgaaacgtcttgaaccacatttatactaataaaatagggaaaaaaaaaaacacaatcttttttcaatagctcactgccagtggcatcaacaatagtaagttatagatatttggaaaaagaaaaaaactaaataaataaatcactcttgtaataattattcttataagtcatatctttgttgaaccgtgggattttttcctcaattcttggctgaagcagggttggtagtagtagtgacaccacctgttgttggactagtaaacagaacaagaaaaactcgatcaattaaaccaaatataacttgaagaaattcccaaaacacaaatctaaagaaagaaaaaaatgatgggatagtagagaagtaaaaacttacaatccaacaaaaactttaaaggaatcatagatacaccattgagcaccagttaaagttccaatcatagctatacgaacaggaaggccacgagtaaagagaccccacattcctagctgttttatggcctatacaaacacattattaagaacaaaagatgttaatctcgaagagtcttaccttatgagttttgtggtttgtagttaagacttacatcagcagaagtagctcctttggcattgttgagaaaagagaccaagttatcagcagggtgtgaaatgagagcacataatataccagctaaataaccaccagcaaagctaactcccaactgtacttgtttactacactcttctttgggtttggggatcacttgtttgtacaattgctcaactatgttctcataagaggcaaatttcatcattgtatctgccaagtcccaacaatgccaattaattaaaaacaaggtgaagattagaaactatgagacaaaatcttgattaggaaaatcttacaaggaatctgacgtccccaaagtggaagaagccctttatataacctgaaaatatcaaattcatggattaacaaacattattttgtgctattattattgttatcattcaaaatttagatatgtttgtagggaattacttcttaggtagctactgttggggtattttttatttctagctcttaggaaagttattattttcttatataatattatatactttagctataacaacttacctattttcatatttatggagtggaaaataaaatttaaataataagttgcattgttataaaaaagaataaatagcgtttggattgctggtagatgaatgcaaaaatagtcttaattgtttgtcgaatgtctttattgtttttgttaaacgttcagcgaatcgtgttgcgcactttgttgcccggcactctgtttctctagctgatcgtatgttctctattaacagtgttccttcagatttattgtctattcttgcgagcgattgctcggtttaataaagaacacttattcaacaaaaaaaaaacaagaataaataagtaaataaaactaagtacatgtgataattcaatcttatttttggtgctgaaattattcaaaatttctcacaattagtcaagataccatatctactattataactatataactataatgcacgatattatataatgtttaatactctgattaaatataatattattattggtgcaatttaatatcgaatttcacttattttaatttaataaaaattataaaaaaccgctaactaattatataacgtcatgttatagaagtgctaggcattttagtgccacgtaacaataaaaaaaaaaaaaaaatagtgcatctacctaaattttgtacattcatgagcttaatcttattttcgaaaattatttaaaatttctgaaaatcagcaaagatacctaggatatgagttagaaaatggtacctaaatgttttccaatatatatatgattactaaggtacttacccagctaccccttgggtgttgagaagcttggggaggccatcagacaagccacgagcaaaaccaggctgagtttggacacgaaccttgactgcctccattggacatagagccaccccagcaatgaactctgctgatgctgaaccccccaaatagattaatgtcttgtacttggctgtaaactcaggcccagcaaggtctgaatagtacttcttgaagaattcatagaacccatatttgcaagcaccttgaccactgtatcccaccaatgttggggcccaacctctaaacaaccctcttataccttgttccttgagcaatactccaaaccctgagcctaaacttctgtacttcactgggtcaatctaaatatttgattcatacaattaattaattaattaattacccataaatttaaattactaacctaacctttcaaacatttgacttgaccctttattactattattattattattacttccaaagccgccttttgaaaattcaaaagaaaaaaaaatgaaattttcttcataaaactacttgaggagtgggagagttaccttgtctctatcaaaaattgaattcgaaccataattttctttatgagccttgaatcaattgtggagacattaattttgaccaaagctttgtataacactaattcatgttctctttagccatactaagtttgaggggttacatatatagttgtaatttgttagttctgtttttgattctgagagccgcctctgttttattcatttgctcattctctattttctttactctctctctctcccaaccaaaatgcaacctaattatgttagcaattttgaaactaaaacctttgaagataagaataagattaatatggattttgtgttgtgaatctctataatcattggatcatgataaccttgatctaaccattggaaggcaaagtagatcaaatcaaaccaacttaaatcaaaatgcataatattttatatggactcacattattaaacatgtagtatcattattaacatataagaataactatatattatttgaggcatataatagcaccataatgattatgaattattgactcattaaactatagtcaacaattgctagtattaggcacataatgggaaattgggatcatgtggttgttatgataagtggtaaggcttggcatgagagaattgctctccataatctctcttgtccatattacttagttttggatgcttgcaaggtttgatatagtgatttgaagaatcaatactcaatattaaggtatgtttatgatttatataaatactcacttgtagtacatatgggaaaaaaatggacaaaattatattggaattaaatcattaattaataactaaaaaggaagaaagtatatatacttacttgcatgttacacttgacaagatcaagaggagtgacagccatgtgagtagggcctgtgcttaaaatccctcccaacgtgcatgcggcgtaaaacgccggcgtatacatttccaacttcttcttctcctctttcggtgtcggaatcactattctctccttattcctaattggaatactcattccacttttcatagaagaagaagagtagatgaagctgggaatcatcatgccattattattattatggccacagcaattttcttggggagccatcttattaattaataataaaacttcttcttttgttttgaatatgtataataatagtacaaaataaacgtttcttgattacataattacgagctctttctttctttttataggagttttgtgggtcaatagccctgctttgtttctttattgaccactttcatttgttgaacgcgtgaggaagtcagttttacttgtcaactgcatgctcatataaaagatacacaaatcctagacgaaacaaacacatgagataattttaggacaaatattacttgtatatttccctctaattagttactatatattgtatttgaagagttttagtgcatgtttgacatcataactaaaaaactgttttttgtttttaaaaatagagaattgttttttgaaaacaatttagcttgttt

SEQ ID NO: 18796 - DNA, 5294 bp, Cannabis sativa
  modified_base (102)..(103): a, c, t, g, unknown or other
  modified_base (893)..(902): a, c, t, g, unknown or other
aggtacctacgaaagtttcagaaatataatttaggtattattactgtcaaaaattaaacttagatatttatctgtaactgagaattaaatttaaatatttannccgcaaattactcaaaaaaaaaaattactgtaaattttagtgtaaattcacttataggtaacttacgtaatatgcaagagagacgttttgtatttttattttaatcatgaatttaataatatattttgaaatatttatcacttaaataaaatacaatttggcctctcctaatttttcatcttggctccgcccctacacataataatatatatccataataaattaattaattaaaattatttgagttaaaaataattagaaaaaaaaagactctacaatattaatttatttttcttgtgttatcaatagtaaaaattgaagatttaattagtagaaaagttactcatactattaaaacaaaaattgtattaagaaatattaaaaatttgaaatttaatataattttatgacttaattattactaaacaaaatacaaccgcacgcgaagcgcggtttactttctagttatattaatatgaatacaaatctaaaatcaattaaaagttttatttgcaccccataaaataataaatacatctcattattaaaaaaatatagactataataatttttaaaaattactcttaatagttttttttaaaaaaaattcctacattattttatgttaatttcaatacttattttgatttcattttcatagtttttactaacttatgtatatatatatttttttttttctaagaaaattttgtataattttttattttaattttttttgtcataatatttaaatgtaatttatttttatttgataagtatattttttaannnnnnnnnntggaagaaaaaagttaaaaaaattaagtacaactaaaaatataaattttatataaaataaaaattattaaaatagagtgtttgggatgtaagaaaaaatttcttttaaaatataattttgtgtattttaatataattgattttaaaatataaataaaatacaattatattattttttattttttaatataattatattatgcgtgaattaataaatattgaaagtgattttttttgttcttaaaattttgattctcaattaaaaaattaaaaagtgaaaataatttgcctatcttttgcatccccatcttttgacttgatgccttttgatagaatttctcagtttcaaaaaaaaaaaattgattctcaattaaaaaattaaaaagtgaaaataattttatagaatatattttcaaaaaatattttcatttatctaatattataaacaaaaaaataattaaaaaattattaccaaacgccacgtttaattttaataaatgataaatgaaacataaaataaaaatgacattcgataatatatacataattttctaacaacttggacatgataatttgtcatcacctttttatttctgaaaattatgaatatatctagctttgattcacatggaaaatttcagcaattaatccatggaataagtacccaattcatcaactaatacacaatgatcataaaatattcacaatatgctaaaataaaataaaaaagacaagaagcccattccttcaaggagtcacaccatactaccttgtgcatttctttgtctagtctctctggcatagttcttagggtagtagtcatacaaactcttatgattacaaggaattaaaaaatatataagttctgctttctaagcttataatttttctctttctttcaataaaagaacatacaaaaatccatggattcaaaaaccatcaaaatgaatactagaagagaacctcatcatgaagccttctccctcgaccaaagtagctcaaagaggtacgtaccaaccaaccatttttaattgtttttcttaaataaagaatgtgtgttgattttcttttagtgaaggtaaaagatctgacatggcttagtagaaaataccaagtccaactatgatgacttcatggagatatataatattttgtttgttatgagtgtgaagaaattattccatcttgtgatgatcctatgctgtagcattgctctagacactcacttctaccatgtgatcccacactgtcaatgctgtcattgcgcctaaacgagaagtgttcactctgatcagcagtaaaacttccattccttgatccctttgtgttgcttctcgttaaggattccatgttttcttttaggtcaaaagaaatactttcttcacttgattttctactgcttgaagcagaagaagaaacgcgattggatccgctgctgctgctgcttctgctgcgacttgatgatgatcttttgctgcttttgtaacttgaacaaacacttccctcatttgatccagagctgctttttgagcttgatgaagcacttcttgtgtgaggtgatctgtatgactgagagaattgttcaacttgtttaacagtttctttgccatgatcttcgcactcatcttcatattctgagctgtcattgtcttcactttctgaactctgatcaccattctcacgatgatctgaattgttagtctcccgacccttttcattacatgttacctgaggctttgaactcgtttcagtgtccaaaatttcgtaagcttcttcaggaggagtaggaataagagcagggctacactcaacaggtgttgtagaaaggaaacttagagttgttacaacatcactaatgagaggacgagctgatggttcctcttgcaggcacattgcagctactgcaacagcttgattcaagtccttttctgggaatttcccatcaagaagtggatctgccattgctgggaacttcttaggatcgcggaagaagggttgcgcctgctcaaaaacacacatgaatgacataaaatttgtatacctataaaacatgataaataatatgtgaaaacaaaattttcttttcctttcttttttgacatttcgcaaaatgaccttcaatataaggtgtcaagtgtgtttggaagctattttgcaaagaatgtgcaaaagtgactttaaaagatatggttttgtcaaacactgtaaatttagaatagtgaacagagagaatatgaaatggtatagttacccatgaaactagattttgctcatcgtttggtcttgtagtatcaatagctcttcttccagtaatgagctcaagaaaaacaactccaaaactgtatatatcagagtgcagtgtgagctgaccacctctagtatactctggggcagagtagccatatgtacccataaccctagatgatatatgcgtatcaccaccacctccaagattggccaatccaaaatcagaaagcttggggttcaagtcatcatctaacaacacatttgcggattttaaatcacggtatataactggaggattagctttctcatgcaagtactccaaccctgttgctattccataaccaattttaatccttgtaaaccaatctaatactttctgatttggttccctatctgccaaaaccacagaagctgaggtcaatactaattcaaataaactaatcatatgtatgtacacacaaagagaagaaattaaaatactgattctatagcaaaagaagggtaccaagaagatgattgtttaaacatctcccagagacgtattcatacaccaaaagtctttgatctccatcagcacaatacccaataagattgactaaatttggatgatgtatgagacttagagttgaaacttctgatagaaaatccttgttcccttgtactccattcctatcgagttgcttaacagccacaacctatacaaaatgtaattcgttaattttatattgcaaaatgaccttttttttttatataatataattttttttgcaattattaactttataaaaagttgaattattaaaacctgtccggtagcttgaattgtgcccttataaactcttccaaaccctccttcgcctaaaagacattcttgccgaaagttctttgtcgcagttgccaactcacggaatgtaaaattctttgcattgatatatttatcttcttcttctttcttgttctctgttattaacaaaaaaacaattaagcatatatacaagcaaaatattaattaagtccaggccagtattatctaccatatgcatgcatgcaaagattgcgtgcgttgttaattaattaatacaatttaattaggagagagcttaccaggtgatttttcacctctaacttcacgtgattcaccattctcatttctagaattcgatttcttactcctctgggatgtgaaacacggaaaacaactcatttctacgaccccttttattttttctttctcttttaagacacagaaaatatattaatttattaattagtttacaagcaatttagtttttgagttcagaaaatcccattaacgaagggtcccccaaggtgtattgaagggaccccacgggtgggtaaagcttttaggaaccagaatgaggggaagaagaaaatggttaaggagagagaatgagaccattattgttttggtgcaaggaaatgagagagttttccttagagttcgtggagaaaaatgagggagataattgagtggacatttgaggaggtttattgggtaggaatgattggagatcgagaatcaagatggatcaatcaactgatctatatatataaataaaattgggagttccgtaattatggaatggaggagagagaagattaattacaactttgtagtttgttgcatataaataatgtaatagcatatatagggttaaagcaagctatatatggagggtgttcatccaactctatagagcctaaatgcaaagttattttaagcataattttgactcaacacctgtatttcatctctatattaccctactccacccaatttccatttgtcattccataatttattgtatttaattcaatttatcttaaatatgctgtgtaatattaataagtcaaaatttcgtacgctcactctcaaattgggtgggagaacgggtttccagacggccatattattaccaaaacgacataaatttttttctttaggatggagaaagaaaattagatgcaggtccaaattaagtaacctagacacgaaataaaaaaaggaaacttttattagtatactagtaatttactagtatatgccaaaaaaaaatataattgcatacaattagcatacaactttcaaaaatatatattgttctcattaaatgcattaattagc

SEQ ID NO: 18797 - DNA, 5753 bp, Cannabis sativa
  modified_base (27)..(32): a, c, t, g, unknown or other
aaaatagattacattgaaatggagttnnnnnnagggcataaaacctaacaatatatccaaaacccttttgatagccagacacgaactctcattagcttggcagaaaagaagagtgtcgtcggcaaaaagtaagtgagaaataggaggagcccgtctaataagtttgaaaccatgcaactggctcatactctcttcatgaagaagaagtcttgaaaggccttcagaacagatcaagaacaaatataaagaaagagggcagccttgtcttaagcctcttgatggaattagatgacccataacttccctgttgatgagaaaggagaagctgttagttgagatacaagtcataatgagagagacccatcgaggagcaaaccccatctttttcatcacctcttcaatgaatcgccattcgactctatcaaaagctttgcacatatcgagcttgagtgaagcaacgccaaggcgaccagagactttatttttaatggcatgcacaagttcaaaggccacaagaatgttgtctgttatcaatcgattcggcaaaaaggtactttgtgtctccgatatgactattgggagaacttccttgaatcgagccacaagcattttggtaacaagcttggatatggcgttgcatagactaatagggcggaagtctttcattctttgaggctttttaattttggggatgagtgttatgatggttcggtttagtgcagtaggatcggccccatcattaaggattccaagaacagcccgagtaacaagatcaccaactatagaccaattttgctgataaaacatagtggacatgccatcaatacctggactcctatctgaacccattgagtacaaagcttctttgaatttagcccctgtgaaaggcttagtgagattaaggttatgttcatcagaaaccagtgaagggatgcaagccagagtggattcaagagcaaaatcatctatatccgaagctgtgaagatgttctcaaagtaattctgaacaaccgaagcaatatcaactttggagaagaatttttggccagcaccattgagaaggaactttattttattattggacttccgagcattggcttttgcatggaaaaactttgtattacggtccccaaaagcaagccattcaactcgagaacgctgctgccaatagatttcctcttgctcaagaagatcatcaagtatagattcagtttgttgggtctcaataatatggctgggagttggagcaatagcattgttaagttttttgactttttcttggtaatgcttgatttgcttcttcattttaccaaacttttttgaatgccaagcttgaagagaatcggcacacaactgaatattagaacatactgcagtaatagggtccaaattaaacgaacgtacccaattggaggcaatgatttcactacattcaggatcggacagccaaagcttttcaaagcgaaatcgacttttccttctttcattgttgaaagtaacatcctgggagtgaatggttgctgcaatggcccgatgatcgaattggaagaaatccaaatgatgaagttgaggcattagaaaagttctctcccaatggttgttaacgaagcaccaatccaatcgttctttgattgtagcaacattgtgtcggtatttggtccaagtaaaatgatcaccctcataaggaaaatcaaaaagacgacatctgtccaatgcgcttctaaaggcatccatttgagattcattacgaagtgcacccccggatttctcattgttggagagaatttcattgaaatcgccaatgacaagccacagactaagaggagctacatccgcaagcctttgaagcaaagtccaagaggctggcctgttattaacatccggagcaccataaaaacatgataaatgaaagttgaaatgtccttcaaaagtcaagttgcaatcaaagaaagtggggccaaagttaatgagagcaatatcaacatcttccttccataaaagcataatatcaccactaagacccgatcttggagactctaaaccattagtgaaattcagataacgacgaacacgagaaatcgaaagaggagtaagtttagtttccataagaaacaaaacatggtgcaattgaacaagcaatcgtagttgtctaaatgcacccgggttccccaaaccccgtgcattccagcttagaattttcatgatgaatggcggggctgcccagcaacctccgctcgtgattcaaaggagtgactagaatcctcaagatcaaaaactagtaactcaacatcattttctcctgacaatttagaagatgatgatccaggggcattacgacattgctttaggaatttcctcatagataaagaatcatttggccgtttagagggtgagtttggagactgattttctttgtcaatggacattatagcaggcgagtaaatgggacatgctcgggtggttgagagattaatggatgagggcacatgtttggtaatcgagagaggggtgatggctggaggataagtggcataaatgtgactggagagggtggggatgtaaatgtgtgagaggtctgtaatggagtgactgggttgtggtggggcaggagagtgaatcatttgtgttgtagaggaagtggtgatatgagtgggggaggccgaatgtgtaatactgggttgagaggtgcaagagaaaaagggttgggaggttaaagttgtttgagaagtggagtgtacagaggagtgtgagtggaagagtgtactgttagtattattattcagattattgtgtgtagcaagaggatgagtatgagaggaattagtggaagaatggatgaaggtggaaggttaaaaagcagtgttgtggccacgattaaaggaaggctgagaagatgtaaaaggcatggttgggtttcgaagagtaagtgtttgattagaacattcaccttcaaaaacagtggatggttggatttgttctctcaatgataaggctggtaaggaggatgtgagtgaggtacgtgccaatcgggttaacaaaggccaagcattacctttaggaaaatccgatcgataacgatcataattactagttagaagtttggcccctttcatccatggcccatattgaaggtcatcatcatttccattatccatacgctccataaaagcaacacatcgctcaaaagggtggcctaatcgaccacactcaaaacagaactcgggtagtctttcatagcgaaaatctatccaaaactcatccttgattctggggagtttaatcatttggccacacaacaatggcttagaaacacagagtttaacacggatacgaagaaaagtttgaaagtagttaactgtggaaagtttgaaaggaggaacaagatgagggtagttaaccgtggaaagtagttaaaaatctataactgatacagacccaaaaaagggcacctcatattaaattgagaagtattacatatatgatttaattacacaacttcgttacaaacttaaccactcaatcaagttatttgccgtaatattttaattttttactcttaactccttattttattttttagtggcaaaacttttttgtatttattttttttttataaatttaaagtgtcagttgaaatattaccgttaaatactaattagattattactctattaatttcgaagttttacttttacgtatacacaatgatcattcaatcagtatttaagtgagatatttaacagacaatttaaatttaaaagaatttgctaaaaaaaataaatacataaaaataaaaaaataaaaatcaccatcaattactctaataagataagataagataaaaggaagaatagtagtttaccatcatttgttggcttcacccatggggtggaagccttttttcaaaggtggagtggagtggaggcttttatgctttgtaataggggacttatggttccatttggaccaaagccaaaaaaaaaagaatgtgtatattttacattgaaaatatatacttctatatgcaatgatattgttcattgttaaagagagagagaggaggaggagagttcaaaattaacatgccaaaattattgatgggttaattgattaatttcaattttatatttcctcttaaaagaaaatgccaaatttgtaaatactttgaaagggactgaccaaagtgagaaaaaataggttttagtatttttttttacatatatttttttgggtattgcgtgtatgtataagatgatgacatatatagacgacaatgttgttggatccagccgtatgtattgttatatggtaactatttaatattattaatacaagagaagtgttaaggagattctattttaaactttattttgcactctctatataattaaatgacaaatgtttatgtttttaaaatgatttatttgtaccaatcgtattattatcattattattttattataattatgctatgtaaataaaaataatacactaaaattatttatttttaaccagaaaacattaaaaaaaaaatatttttgtaaaaaacaataacgaattaaaaaagtacaaattcatcaaaaatatttagggcagtagatatattaacttgcttaaaattagcttagtgtataccaaataaaatatgagtcaaaataacaattatttaccaatttcaattcattcaaattagtaataaaattatctaaaaataaactgataagttcgatatttcatcggcagcgataaaatttaatggtaaaatactttgtaattacccttccattctatttgaaggtagtttttcattattataagtgaatgcatggttcaagacttgtgacaaaagaataactttaagaaaatatataaaattcgtcatatcattgttttattatatagtgagatattcaaaatatatatcatctttcctatatgatttaaagcatgcatattattgtgtagaaatagaaatatggttttgtttttttttaattaatgttgttgtaacttgggccaaggccacctttgtagtttttattttccaaaatatttattcactagaaaacaatcgactctcaagttataggattagtgaaatctctatatactgcattatagtcataattaactttacacagaaatttccttgtaatcattatcttaatctcaaaaaaaaaaaatgaacatttaccctagacttctggcagtgtgaaagcttatatcaactcattatttaatttttataagattattttttaatgtattgatttataaataaataaatagtttattatatgtatatggcataattataataaaatgataacaatatggtaaagtattaaatacaaataagctaatctacaaatataatatttataattcaattatggaatggagactgcaaaagagattgtattcacactgtaattccataacaaactttttttttttttatttattttcatttctttcctttcatattttcatctatttctactctaaaagtaggtttgatttttcagaccccttcaacattgtttactgctaatatctcggtttgtgactatctctttctgaatctttctggatcttttttcatatttatattctcttacagttgcatgtgtgaatctcaacatctctctctctgttttttttttttttttcaggcatgttttaactctgttttggtgggttaggcttacaaaattctcccacagctttaaaggtcagttttttgaattgta

SEQ ID NO: 18798 - DNA, 4057 bp, Cannabis sativa
caaagaaggaaaagagaggtacattcagatttagtaatagagggttacttagtttggtcttcacatcagtgaagcaaactatgtgtatcactgtttatacttactttatgttctgaacttttaatgattttctttaagtatttcattgttgttaattaacttaatttcatggtgccatatttatagccgagatatcagcatgtgaagcaggtaaaccttgaatttgcacaagatattgaagaaaaacatcttgaactggttaagagcaaggtaaaacacctgaccataaaaaatgatttcgaaagggatcgtgagtttacccttgcctactttcaacaataatttgattgcttgataattgaagtcctaacctttaatattattatttttcatcttctgctgcaattaaggctcttgcattatccttaacttgtttcactgtaatatatgtatagcacaacggattccatataatgcactaaggttttagatttttgctcatagaaaaatgattatgtggtggagttggtaattataattaaatattgttttgtgaaaaatttatcctgcaaattacattgtttttctatcaatgaaattgactcttaagcatctttgcagtgttcaagtacacttcaaaatctggaatctttaaatcttaatggttgccaaaagatttctgataagggaattgaagctataacaagtgtatgtcctaaactgaaagtcttctctatctactggaatgtcaggtacatagatttagccttcttcaaaacaatatgtatactgtagagtaaaccgaacatttccctaaataaatatatgaattgaattccagggtgacagatagtggtataagaagtttggtgaaaaactgcaaacatatcaatgatctaaacttaagtggctgtaaggtatgttattactgctgtccgtcctactttctgcatcttagataatgctttaatttacttagtcacagattcacagttcaaacttcataaaccacagttgcagttgatgaaagatgaacatgcaattgaatttgagctattaaaatttattgttcaagtgccctcattatttaaagaatttaacgtgacaattgcagaatatttcagacaaaagtttgcgatttgttgctgatcatcacccagaaatagagtttttgaatttgaccaggtatttaaaatatttctgacttgatttatattgaaatagattgaaatgttattgataaaacttagaagattccgtttttaagttttcactgtgttcccatacacaagcaaccatgtttcttatgattttcaattgtgaacttgttgcgatcagataatttgacagtgcactttgttgctattaaatttgatttggttgacagtactcatctgatggatgttcctgcatttccttttaaaacgtttcttttcttttcccttttataatgtattccaaacaagtaggaattaatgaatttatatagggtgaatatcaacaagtggcaaagaaaccagtattatactttacagtgctttcatttagcaacttggtggttttaggtgtgtcaagttgacagattctggcttgcagcaaatactgctgagttgctcttctctccaaagtctcaatctttatgccctctctaggtaaaatttaatggagtttttgcattggcttttaagtgttatccttcttgttggggtataatttgctatgtttcaatttctcagtctctcagatgacacttacaagagcatatcgcttctatcccatctcaaatttttggatctatgtggtgcacaggtaagatctcaggcattcctagaatacaactctattgtatttataaactgaagactgatcctggttgatggtttttattttcagaatctctcagatgaaggagtgttctccatagccaagtgtcatagcctcgtctctctcaatttgacttggtaactggaactgccaaccgtctaaactgtatttgatgcaacattcttgaatagtttcataaaaaaaaattacatttttctggtaggtgcatacgtgtcactgacgcaggggtcatagccattgcagagggttgcacctcacttgattttctgaggtaattttcatatcgaagttggtagattttacatgtgggatgcattatattaggttcacttagaagttggtagatttgatttgcatctctctctctctctccctctccagaagaaaaaaaaagttgtttttctgagttgttttggaatgaaacatgagctctcttatatttgttacatactatcaatctggggattctactgatgtgcaagtaaacaaggtgaaaatatttggggttcccttggccaaaatacgtatccattgcagcagtaagaaataggaatagaataagttttttctgtcaagtgagaaaagagcaacacaatttaatgccatgtttgaataatatataatgtttattgactctcttggcaagttagttagtttgttttagagtgtaatgactatcaaatattgcagcttatttggaatagtgggagtgagtgacaagtgcttggaggccttatcaaggtcttgctctgataaacttaccacactggatgtgaatggctgtattgggattaaggtaatttttttctcacacccattttccataaattattattattaaatatattacataaacgacctacttatatatttaaaatataatataatgttttctccacaactccaaaataaataacatatctttttatatatcaattaatttgatcatttttaagatattattttgtgcacacttctaattttacgagcatggaaattgattaatgtgattttctaataattttggttctaatagaataatttttttaagaaaattaaattatttgttcttattatatattaaaaagttgtgattagatttttaaaattggacaaattaatatttataattgagagtactaaatatattttaattttatttaaatagtaaattataaaaggtagaaaacatttttagaaagtatatgaaaagaaagttggaaaatttgttacttatttatatggaaaagaaggcggtgttaaaaggaaaaatctcattttagaccctgtattttgtaaaagttactaattggactatctattttgttaaatgacaaaatgtactttatattttttaaaaaggtaaaaataagattttgagttcaattttcaacaagtttaatttttaatataaccaactttaagacaatttctaacacgagcagttttatcataatatctttaaattagattattattaattttattttgacgaaaaatcagtttaggatcctattgtacaattttaaaaaatacaaagtctattttattatttaataaaatagaaggtttaatttataatttttgtaaaatataaagtttaagatggtatttactccaaaaaaaataaaaataaaatataggtgtacataggagagccctttcataatttgtttttgatatgaattatatttaattttgtagaaacgaagccgaaacgatttacttcagctgttcccacacctgaagtgcttcaaagtacacagctgacatcttgaggcgttggagtttatagattctaagcttcatttcatttcatgcccattcttttcataaaattgaataggaagattttgtatagttttctttattaattaatgttgtattcactatccaatgataaatttaagttttgaagtccatgtctaaggttattgatttgctaattcccggaaaataactgaagtgatttcatacttatcaatgttttactatgggaaatttgattttatatacttaaaaaattaaaaaaatttataattaaatcaaaaacttaaaccctaaaaaaactatgacttttttttttcaaaactctaaaaataccccctcacaattcaccaattctctctctgcatcatcatcatctctctctctctctctctctctctctctctcaaccacctccgacctccatcctccgacctccgaccct

SEQ ID NO: 18799 - DNA, 3124 bp, Cannabis sativa
accacatgatctaaaatcaatggtcaaaaaaagttccctaccggtagggaacttttgctaggtcctaccatagtcccttatgattatacatatatatagaagaattatatacatattatgcaaaaatatatatatatatatatatataattaagttaaaatttcattaataattaataaattattttttaatatataattttaaaaaattattaaaacggtgagaagcacatgtttattccctagttaacaataatatctaataataattaaatgaagcaataaaaaaaaataagataatagaataagaattaaaggattattctatttttatttaaaagaaattgaaaaatagtagatgatcacaatttataatatttactaatttagtaaaaatattaacaactacttaaaatataaatatttaaaataaaaatacaaaaacgaaatcattaattaaattttacttttcaatattataaaaatcgcgtaaggcactatatgattataaagattggacgatcacataaccaacttcatacgatatctatcattttaattatcacaaaacaataaaacattaaatatttcattatcgaaataattagtcatatgaataataacgtctatttatattattacaatttaaagtataaattttacatccacataatttattaaaattaatcatcttatctaaaaatattttatataaaaaattctataactaacattttatataaatctcttatttttagtttttaaaagcaaacaaaatgtaaaaacttttctaaaaagtaattaatttttttttattaaggaaaaaaaatctaaataatcttttaaaattatttatatcatcaagtcacaagactaatttattaaatttagaaattataattttttgtacttattttattataaaaatacatataatttctttcttaatttcacgatttttaatatttgtcaccaatgaccatttttatatatatcttagaaatagcaagcaattaagttgtattaacatgttgaactgttaagaagaaaaaaaaacatgttgaacaaggaagtagtctcatacaatatcttgtcctaaatagatttttcttatttattcatttatagtcaattcaataaataagacaagaggaaagtggaagagagaaagtttagtggagctttgagctttcactgtctcttcactatatattctctcttacaaggctccaacatacataaatttctgtttatagggtcttcttaatacttttcaaataattttttattaaaataaaataatataataattaaaacttgttcaagaagttgatgaaaactaaagtacaattgcttttaggaaaaatgaaattgtcttgtgattttgtaaaatagaactgttaactttcttggatattttttttttgttattaaataaaacaattatataaataaataaattagacttcacagtcattatctatcatacttgaaacattctgagcagaaactcacctaactacattatggactgcaaattacaacttataaaaataaacgaaaaattacagcttaaaaaataattagagagttgattacacaaggaaatataattatcaatattctaacacgcacgagttcctttcagagcattgataaccttctccgaatcactctcaatcaggacaaaagggtgcttcatcacaacagctgattccaccgccagctgacagactgcagcttcaccaatcagtgaatctgtgaagttgagtcttttagttgcagcccacaaaactgtccatgtgtgatccctagccaacgtcgccacgcacatggaacaactaccaaccttgacattacaattgatctcgatccattcttcaggaggaggggaccaaacaggcgacatagctgccaacttcgaggcaaacaagcaagaggcataatttgtgtaacaaaaagagatagaatcaatagagtggttaatgtctactgaggtgttactatgtaccttatcgttgcgggcctttcaaattctatccattacaaatgacacatagaggaacaacttatcaatatccaccccttttaacttcaagttccaaaggaaagatacccagtcccagacctgggctccagactcaaaaactggaataactccccaaggggaagacctccaaatatggtacgcaaaattacaaaaaaggaacagatgctccatagactcttcgccctcaccacaaagcgggcaagagacctcctcaatcctaatcctccgagcaaggagggaacagataggcatggcatcagaaagtatacaccattagagaaacttgtgacgctccataatttttgagttccaaagtttgttccacatagcaggagcaacaacacatggaggggatctctctagagcttgggccaaatagacagactttgctgtaaataaaccactcgtttctttcatccagacccacctatctcttccttggccattgggctttcctcctttaaaaacatctcttgttgtgtccgagtgaaagagggctgagagcttagtgatgtctcagtctcccttattcaatatgataaccaaacaatattaaccacatgaatatttagcaatactttgttcggttaaagtaacaagaagtaaagttttgttatcaaaataaatagtagaaattacacaatatatagaaaaattataagaatttccttttttatggcataaataaataatattatgggatttatatatatattttttttacatgtatatgggtttttatgccatatttttgtaaaaaaagatagaaatatcatatttgtaaataataataaggtctgctggaaaaatcgctagtaccgaaaaagttagtgtcgccgaaaagtcaccgtcaccggaaaaatcactaaaaaaatcactgtcgctggaaaaaattactggaaaagtcaccagaagtagatgtctcaaatagctctatttctaagtatattgatagttaatgtccatttattaaaataataaagcaaatgtccttttttacttttcaatacctaaaatacccttcattatatacaaggtattataaaaataccttagagtaatatgaatataacat

SEQ ID NO: 18800 - DNA, 2389 bp, Cannabis sativa
ctatacatctatttactaatttgccccttctactgtcattattttatttatttacacaatcttttctatttccccttttttttactcatcaacaaagttgaaagtaaaaacagattagaatttaaaaagaacgtacaatgagtaatttcccttaaattaatgttaacaaataaatataaattcaataaacattaaagtattaaacaccattttttagaaaaaaaaatagaaaataaaaatatactcatatgcaaattctataaagttcaacttcaatattcaaacacaatcaaaattatcaattataaattctaaatttcaaattaaacactataaaatataaactttaaatgtaaaaaagtttacctattaaacgtaatttatatattatattatagataattttagtaaaaaatatgtcaatcggtttattcgggttatttgagcgggttagaataatattcaacccgcccaatgtatacattaagcggtttgaatattttgtaaagttattggggttgtgttttttgtcggtttattcggtttgatttagacaatttatttagattgggcggttgttatttttttttgaaccgccttacataccatacttttttttgtttttttttttcatatctaatttttctttagtttagcaaactctttgatttcagtgaaattaaagaaaaagtataatatgacatttcttttaaaaaaaaatctcttaaaataaatgccccagaaatttatcagagaaattctaacaatgtttagtttttcatttaaaaaatatcatgttaacgtgatttgatcctcatatctgattcttgagatttctcatatttgtgagatatctttacgattatcacacggtctggtgtttaattggtaagaattttttgtttttgtttgagctaagaagaaaaatgattactctcaatgtgtatggttaaggtgtgtgttgccatgatcattttttttgttaaaaactaatgacagttaccaaagacatttgtttgtttgaacgagctatcctaaccaaaatatctctctgctatcaaaaaaacatatatgtctcgcaagcacatcgtgtgcaattgagtggaaccatcaaatccttcctccacaccctttcttcgttccccaagtcgacgctgacttgccgagggctcactcatcgaggcattcaatcgccccaactatggagtagttgtgctctaccttgtgtcgagcccaacgtcgatgagcatgtgcaaatggtaccataaattctacattgatcatggttaatttggcagccgtcaatatgtgccattgatttgctgctttgattggctctacctgatcgtgtgtttgtggccgctcttccacccccttagaatcccaaatatctcgtgtcctctttttcaagcctccaaaaagcgtcccagacatcgaattatgcagtagtattctaggtacaattaactctatagttaagaaattttagtaccagtattagaccaatgatctacaactttgattggctctatagctaatttggatcgtgtctatatttagttttgaatgtgtgtgatgaatttttttctttgatttttgttctcgaattatatatttatggctatagacattttttttttttttggtattttgagtgggtgtaaaacataatatttttttcctaatttcaataatgatctttttaaaattattgattgtttcatctttcaatgcccaaatagaggacccagaagaaccattttcccaaagaagaagattgtgtgttgctccacctagagagacccatcaataatgtacgattatatggagtgggctccatgtttgatattactctctattttactcttttgttggtaaagtatgattttgagaaaattgagctcattggaatacaatttgatttcaatttaataagtctacttatataaaattgggaacttagattgagaacagagtaatgagattattttgtatagaatgattctacctaaatataattaattggcatcgaatggagtaattatgataatgtcagggaaatgataaaaagtttgcaattagattgatattcatacgaaagttttgaaaattaattccttagtttttttgtagcagcttggattttcttggttacttctatatactctatgttatatatctctgcttgtaaggggttgaatgagtttatattattgctttcatggagctttcaatgtaaccacatttttttgcatgaattacttgtgaacacaaactgaaaaaagttgttttaaaggtgatttccttacttctaaagataacttgcctcatgtactttttcattttcctcttttaggtggagacaccttataggagtggaagagaagca

SEQ ID NO: 18801 - DNA, 2387 bp, Cannabis sativa
ataaaaattattaaaataagatatctttacaaaaattgaagggtgtaaataaaatttccctcaaaaaattattctcaatttttttataattatttttgaaaaaaatatctggtctgttatttaataattttataaataaaatacctggaattagcagtacttatgatctcggcgcaagtatcgataatgtccgtacatataaccaaatcttggtgattagagttagcttggtacgacctaaagcaagtgaacgccgtgcccagcagacccgaatacacagtcgggtcaacacccacacccacacccaagacccggcgtcgttcccatgtgattgcaaccacctaaacaaatgaaatttgctaacgtactcatatggctgataaaatcttaacctacgcccgttaacaattaacgccaaaatatctctaacatttactctctccagtgactatgagcagcgaagctcttagaacacgcagtagtactgtagatatacatatatatatactgttgtacgaacctgatctttgagtgagagcgccgccctcataagagtcttcgacgggagtgatgataagtcggcgaccgccgttggatcaataaaatccaatcgtttgttgttattagcttccgattcaaggacaccttcttcggcctttgcgaactccatcactttctttttgcaatttttgttttgcttgctaattaaagtggttttgttattttgaataggaaaggtttcttcagatttaggtagagaggaaagaggtgtgattatatgtaatgagggtgcagggagtaatataagctctactgctgccacgctatcaaaatttcagcatgcgaatcacatgtatatctgctattaggataagtggaccactttcagatacattataatttaaattattattaataataatgtaacgtgaattaaatgatttaactctacagtaggattacatataatattagtaaaatagaatattttatcttttccaaacaaaaaatagagtattttatattattaacgtcgaagtttataatttggatgatacatattgtttttagttatatttatctcataaaaattaaaaaacatatcttattttataaagtattataattaattaaaaacatttttttttttttgaagtggcaaatacatgtaatttcaaatatttaaaatttattagccctgtttaagaaaaaaaaaaaagataagtaaataaattaaatgatgaattagatattttccttttcaattcaaaatttttaatttatcctattcctattgggatatattattttttttttcctttcaaaaagttttagtttatcctagtcctattcttaataggattgtaattaaatagcgaaagtaaattataaatagaaagtctatgatctcattacctcacaaaactttttagtgttgaaattcaattaatttggcaaaacgaaaatgtctacttcccctgcttcaatattacaagttcttaatgagaatgaaacaaacaccaataattctacataccacaataacaagatctttgttgggggtcttcctaatgaagttaatgaaacagaccttacagaatattttaacacttttggtaatgttatagagaccaaaataatgtgtgatgtgtcgagtggaaaaagaagaggttttgggtttgtgagttttggtacagaagaaactgtgcaagaggtattgaaaaccacttttcacaacctcaagaacaagcgagtggaggtgaagaaggccattaaagagcaaccccgtgatgttattccacaaaataacacctacaacaataacaatattactatccgcaacggcagcaacagtacaaactactacaacaacaacaacactaattggccttccattactcccagccagtttcctaatcaccctcagcctcactcatatcctcaatcctacccatataggtacccatatccatatccatacccatacccatatccatacccgtatccatacccgtatccatacccatacccacacccatatgatcatggaaactaagtacttgcattgcaaatgtttattattagttatcaaattttagttaacgaacaaatttagtatttttttattttaatttttttaattttcccaagttgagaaagtacttttcatttttgtattgtttcatttatgtacatttattatttatgttaaaatatgggtataattttactcatttatctattataagtgcattttattaatcaaattatctgaagaatacaatagaaacttataaaataatatgagaaattttcagagttgactgatgaatgaaaattttattttttaaatgcttaatgtgtaaaccaaaagaaaactttgtttt

SEQ ID NO: 18802 - DNA, 1731 bp, Cannabis sativa
tttttttttaatttttatatttgaattaattaaaaaaatttaaatgatttttttaacaaaaatagtccattaaacggtacaaagcttaaaaggtccaaaatacaaagaagaacacaaaatcaaacaattagatatatggaaagtcccaattaccaaacacgagactcatctaaaataagcgtcttctttgctagagaataaacaatagtatttactgacttattacaataagacaaagataaactaaggaagaattttagaacatgagatttataagcactataccgaattcattatgacgaacattctgactattgaccgccaccaaacgaaagcaatcaaaaaacgctgcaacattttgaaacccaatcaaaaataaagtgaacgaccgtgaaacaataccattgccttagtaacatgaggctcaaaattatcagtcgaaggaaaagcaacaaaaaaacactacctcatcagaatccaaagcaatcactcccattcccatctttgcaccctcaacacatagcccaacatcaacaaaaagattaacctaacacaatgccaactccctaataatgctaataaaattacatgcacgtgtttcgcacgtgttaatctactagtctatgtaaataaaatacccaacatttttttaattactaaatgcactcaaaatccacaaattacaatgaaatgattgtgccaaaattttagagaaaagataaatttattacaaaaataaataaataacatctcttttgttttccctttgtctgctggccaatggaatcatcaactagactctagaaaagaatgaataataggaaataaataggaacaaaaatgttataacatataccaatttggaaaaggacttccattttagtaacggtctagtcatctttataggacaatgttaatattactttttctatttgtcttttagctgaattggatttccataatatcccacgcctagttcttcaagtacataaatcaaataggaagaagtaaggtaagaccattgatataatgagatggttcccacaataaaccaattttatagtcactatttcactccaatatcttaaaacttgatatgattggcaatgcatgcaacgcaagttgagaatacacttgataatgttgtgcactaaacaaaaagcaagttgagtaagcattgctttcttcatattgggccttcaaattgagtggtaactgattaggacattttagaagttgacttttgaccagaatatgactccatttttaccagcatgacacttcatggaattcataccagaaatttgattggctcttgtgatgtgaagctcaaattcaagtaatagttattgagattccatttatgtcattcttatgaaaatttatatgttcaatagatggtaacaaataataaaaaaaaaaaattaccaatccaaatttaaatggatattcaagtccaaaatccaatataagttacatcaatagactctttgtatacttactcttcttcacttcagcttaaagtctgatatcctaatggatcttgaaacccttctgttctggtgtcactctttcttgccaaagatggcatccatggaaacagtttacccagctccttccctattgtagaaggcctcagctgtttatcattaattccaaactttgctctttcaattgcttccattatatcatctcttgtaacaatttcaccacctgcaaaccccagaagtg

SEQ ID NO: 18803 - DNA, 3290 bp, Cannabis sativa
atgaccgagaggtctaactctatttattaatggtacattcacgcttatttccaaaaaaaaaaaaaaaagaagatcttgaattcgaactctagaaaaaaaaaaaaaattgtttcaaatttctttatataaatatgaaaacagacaagataaatatgtgatttgaggacatattacatcctccttttcgcactttagagaaaaatatataaaatatgtttggaccatacatacatacatttatatatttgtacatatgcattaatataaatatgtgaacgtttgagatggacatttttcatatggccaccttgatgactcaaattcttatcatgatcatgactaataaataaagttgagacatcattattgatttattttggtagaagaagctttaataattcatcataaaagttataacttcctacattctctgctatagtttctaatttagttttttctctcttttttttggttgcggtaaatgcggttaactacaagaatttgttttggtttttaaaaaaacattgttattaggtgttcaacatttttcataggtaacgtcctatcatcggttagaaatattttttaaaagcttatttaattgagttatatacatgatattatagtagttattatagtaatatgacactcaagagatcaccaataactcttttaagcaattctctttaaaaaaatgtgcaaatttataagtgttaatttatgttttcatactaattaaattacagattcttgcattttaacacaattaatatttttagcttctttttttctttttttctttttttacctttgcatttaacactacaacatacttttagcatcatttgttaattagcatcgattttgcattgagattattgataatatatacccgtcatcatcaaatcatcaattttaaactcaaattaaaggagtgatatataatcattatagtgtttatatatagaattattataattgtatatatagaatattaattagtcatatttgatgtgtgtattttattaattttttaagtgaatttataataatctatgtattataggtagtgattttttaaaactataaaaaattaaatttgacattaaaaaataattataaaattatttataaattaatgaagtaatttaattaatgatataagtgtaataaaatgatagggaaatgcttaggtagagtcacgaaaaatgtctctacatacaaacattttttttaatactaataattaattaatctcttttatattatttttatttcatttattttaatattttagtgacccctaataaagaaagttagctaatattcaacattatgtatccttaaaccacatttaccaaaaatatctttaaataacgtgttttacatgcaatttttttttttattgaaacacttctgcaatatttttgttttgatatatactgaaatttagatattaaatactatgattaacacattggacatataaaactaaggttttaaatatatttgattgtacaattaattaatcaaataatactaattttttttttaccacagttcgtgttactctattagtatggctttcaataaatattaacaactttttttttattaggggtcactaaattattcaaaaaaggaaataaaaatagtataaaataatagtttgacacataataaaaaaaaaatgtccgtatgtacatgaaaatattactaaaaattggtgaacattaatgttactaaaaatctcaattttattaaataatacatacagatattttttttcattaaaaatgtcttaagctcattgagatttataaaattggtgaacattaatgttactaaaaatgttagttgtatatactatatgtctatttcttgacatgaatagtatgatttaatttctacaataaaataggttttttctttttctttcgatagaaataataagtttattgattagggaacgaaattctttccattaatgtggttttaagataaggtttttagatcaaacaaatcaaggggtagttggtaatatttaattatttgtatatgttattacaaaaaaaaagaaagaaagaaggtggggagttgttggatcaaggttcgtcttgaagccttcaattcaagctgtactttacccactacattaactacaacattatattattattagttattacatatataccaatttatataaatataattgagcacatataaacaattggtgattgttgtacttatttagcctttttttatttattttttattagaatatgtatatttatatattgaagttactcattgtttcccactaaaataacaatcatatataacatactattatttgggtacgactatatatactttacatagtattcaaaaaatggtataattactagtcccactattatttttcaatgcataataatgataatacaaattcaaaaaaactgaattgtcacaaaaatttcacacaaatcggaaaaacttgattgactaaaagaacaaaagaacacactgagccagaagaaaagggaaaattggtggcataggcttctgttggttgtcgttttgaaaatatttgaaaccaaaccaaacccacttttttggccacgatccaatccatgcttttaaagcatttatctaaagccacttctttcttgaccaaataattagtattgtatacataaatatgtttttattgtgtctatatatttatttatttggccaaactaataaattaaaatgctggataagcaagtgtttacaaataaatgcacacgcacacacaaccaatatagttaagataatctcaacaaaaaaaaaaagggtacaaatattttgttattattcttttttgcatagttgaaaattacaattttatatcaatatttttttttttcctttcaaaatttgctaaaccacatattataaggaaaataaaatataaagtggtataatataaacccaacagacatggataaatccaaggaaaaaacaaaaaataattacctgttacctttttttttttttacaaaaattgaaaaagctgaatccaaaaatgtcaaaagaaaagaaaataattataataataatattcagttattctctcacatccatatttcacctcacttttaaccctatatgggaatagatgctacaaactttacaaagtgtaattttgtactaaaagcaaagtatattaaggtttttctttcaaacttatttaatgttttcacagtaagagttatattcagattcccatgtaatttattgaa

SEQ ID NO: 18804 - DNA, 1440 bp, Cannabis sativa
gaactgtctccttcctcatatcaatatttttattttctttcagaaaatattttatttttgaaatttactgtggaaagaaaaaaaataataaatatattttatttctgtgttgttgaaaaatagaatatttttaatagtgctagtaggttttgtggtggaaattttactatttatcagtggtttttggcatattttctttgtcaaagcttctggtataattcgtttccttcactgactaaagcacttcggatatggtgtgtgtttttcaaaacaatacattagagcttgtaagaaccacatctcaaaactcaattatgactatgtaaatcactgatcatataatactcctatatatttcaatttctcatatattgatgtaagttttattccaatattttgaaatttgaatatgataggataggagcatgattgtaagtaaaagtattggattctttgaacactagattgtgtagtacatatatcttaatggacttggattgattgatacttaagcccaacccacctcagattattggaccaaatttgtacgacatgttagtcctcatctgggcctttctagatggtaatgaattgttcggacttttggaagtacatgctttttttgtcacaacttatttatatatattattattgacatttgttacaaaaaatgtgacttttgaaaattaagtttataaaagttattagaaatatgattaagccatatttttttatgttaattattaaatgattatatttttaaagagtccctttataataaggacatttttaattgtactattgttttatcttaatgcaattaactcaatacttttaaggttttcaaataataataagcctcttttttgtaagaggatggggtattctcatatttgtgtgttctctgattgtttgttgcctggggtattctcgtatttttaataagtatggtattgttatttgttatcaataatatttttcatgtttgaaagtcatcatttcttttatatttttatctcttattgtgagcgagctaataatgctcttgtgcccaacttattttaatctttttacttgtattgattgatggatctatttgggctttgtgctctttttatggaattattccttttgttcataaaaaaaattgatacaaaattaaaaatatttaaataaaaaaaattaattaggatttttgctctctagattttgacacttatcaaaacacgctactgaattttttttactttaagattgttggatttaagtatttttgtccaatttcattaaattttaccaattcgatgattatttatttactaaatcatgctccccaaactttaatatttaccatatcctctgaactttcatccatattagacttatctaactaaaattggacaaaagtgcttaattcaatgatctcaacagttaatggat

SEQ ID NO: 18805 - DNA, 6675 bp, Cannabis sativa
gctaacaaaaataaaatttggaggattttattatgaaaagattaatttatatagttaagtattactaatcataaaatttaagttttcacactaatatttttaataaaaaaaagaaacatgaaacaaaatatatttttaagagtgaatatattatagagaaaaatgactttgcacacgtggaaaacattaaacatggaacttgaacttgtggtaggtgatgatcacttagaataaataaattatcgttgttaattaaggtttaagcttaatagtgttatttaaagctacgtagttaataataatcataattagtatccttgtctggcaaggcttcttcttactccactccactgaagaaaagctttgaaatttgacaacccatgtcagattgattcgctatttgattcgattcaacttcttattctcttcatttctacactcagatcagatctaaccaagaggtatattcttcattctctttcagggttttttttctctacatgtttcatactagtttatgacgttagaagcatgattctttgattattagtagtttaaatcctagattttcttaccctttgaattttggtgaagaaagaaaaatataaggaaaatgattgaaaaaaaagtgtgaaaaacaaacaaataaaccaatttttaagtttgatattggaaaatttggttgaatcgaaggtattttttttttatacatttttttttttaagataattacataaaacacttttctttttgtaatttttttaacatttttaagtttaaatatttttttatatatatttttaagatgttttataaaaacaacacaaaacaaaatcaaatcaataaaaaaaggtaatacacaatcaaaagaaattaacaacaaaataataaaagtacaacataaaaataaaaaataaaaaaaactatattttcaaataagtaaaacataaaaatatcaaaaatcatattttctgtaaataaaatcacaaaaattataaaattatttaaaattccataaaactgtatttttataatattttattatttgtgtgtatttgtgaaataatttttttataccaaatataagagtttattattcattattttctattttttttttcttatattttctctttctttttctttctttactaaaatccaacttccaacgtagccttaaaagtttattagatgatttcatctccttgctttgttgtggtggcataagaaacagaaaatttggttgggtgaagatgtcaatgatgaaggaagcataatacattttatgttggtttgtgttcatagaaaacccaactactacattgaatagctaagctataataattgaagactagattagatgtgttttatttattagctgcattgtaacatataagatgcccatcacttgtttttgttttccaaatcagagatgataagtttggttacttagttagttaattagttgttatcctgagttgttcattggtgtcataattcttgttcctttgtttattggacagctagctatattagtgttagacagacagtcacaccatatgtcagggaacaattatagcggtctaactagattagaaagactaatgagggaaagagaattaaggaaatctatcaattcgaatgaagaagcaaaggacggtagcagacagcgattgttggttgtagcaaataggctgcctttttctgcaattcgaaagggtgaggaacaatggcagcttaagatggatgctgagagttttgtcactgcacttcaaggtaatctgatcatttgaactgatttttttttttgtttcatattgtttgtggagtttgattgactgattgattgataaaaatttcatacacagaatttgatgttagatggattggttgggctgatgtaaatgtgcctgatgagactggaaaaattgcactaaccaaagctttagctgaaaaggttcaaatatctactacttatataatcttgtacttattgctctttacatatggtatacctacttaaaagagattgttcattgactgcagaggtgcattccggtatttcttgatgaggctattgttcatcagtacaacaatggttactgtgagaacatattgtggcctctttttcattatcttgaggatccacaagaaggccttgcaaccaaccataattaccaggcacaattcgatgcatacaagaaggtgaacaaaatgtttgctgatgtagttaatgagcactatgaggagggagatgttgtgtggtgccatgactatcaactaatgcttcttccagaatatctaaaaagacacaactataacatgaaagtaggttggtttctccacacaccctttccttcattagaaatttatagaacactcgcatctcgatccgagctcttaagatctgttcttgctgctgatttggttgggtaagtcaagttgctcactttttgttagatgtatcttatttatgggtggcaaaaccatcttagtgttataatcttgagatcacaaggattttaattggtggattcttgaacttccagtttttatacatatgattattcaacgaattttacgagtacttgtgctcatatacttgggctagaggttacaccaaaaggattagaggaccgaggaaagcttacccgagttgcagtggtataaatttgaaaacctttccttcattctattatagttattttgcaaacctgtaaagttggcattttatatagtacatacatattcatttgcacatggatgtggcttacattgttatgttcatccattattacatgtacttgtttcaattacttcaagctgagtttcttcacttgtgatgcctgcattcttttatttcccatttggatgtggaactacaggttccgactggcatagaccctgaccagtttgttcgagttttggaaattcctcaagtccaggaagacatgaaaaaactgaaagagagtcttgctggccggaaggtagactaactgtaacttttggtttctctgataaacaatatattaagtgttcagctggaataataaagtgttgaaaatacatttctttactcatttaaaggaaagaagagatccttctattctaggctaaagatatctacttataacaattgtttgtctgctaatagttggatatggtatcttttttctttaaaccaattgcatttggcatagaagaaaggttgaaccaactcacaggaatccttagactctatgctatacaaacaatgagttttcacttctaatattgctttactagtttgaatttttatgttgtattatatgagactgagtaatttttatgtttcgccaatgtatttacttgaattttcttttcagaattctggttctctagttacctatcattgttgttaaactttggacagatgatattgggttttgataagcttgacatgatgaaaggaattccacaacagttttcggcttttaaaaaattcctagaggaaaatccaagctggcgcggtaaagtagttctacttcaaatttctgtgccaaccagaactgatgttccggaatgtatattcatgatcaaactatgttcctactccaaatttggctttgcagtgatcataataatacagtcatttttattaatctctttattattgtttaatacagatcaaaagcttccaagccaagttcatgagattgtgggacacattaataggagtattggaactcctgttcctataatccatctggtttgtgtttttttctctgttttgatagctttttaaactttgtaaaggcatcttagttgaaagaaaaatttagtaaaactaagaatcaaaggcctgagttcaggcctttttaagagcaactgaattgattaatatatgtttttgagactacaatttactcaaatgttttctcatattatgtcaagactgccagaaccattttctcttctttttacaggagcaaatgcttgactatcacacaatgtgcactctgaatgctgttgctggtactcgtttttgttctgtaacaaaacagttaatcaatttcgtcttagataaagcaaattgttccaaccctggaaaatttatgatgtttatatgtatgtaaatcgttttgttgtttttcctgtttagatgttgcacttgttattccttgtagagagggaacgaatttggagtgctacaagtttgttgctctccaagaatccaataaaggtgttctcattctgagtaaggtaattcaactttatatttctctttgagtttgccttgtatgttatttttccaatgttaaattcatcattaaagcttttatattataaattttgctatggttggtttctactcaatgcattttcctcatagttcttgttcaggcttgtttattccatttaaatttagtgtgcaggtgcagtaaattcactcggtgctggcgctattttagtaaacccactggatatcacagaagttgctgcttccattggtgatgctttgactatgatagctaaggaaagagaaataagacatcaacataacttcaagcatgtaacatctcattcatctcaacaatgggctgcaacttttgttaggtatgctcatatataatttatctagcatagaatgtattataggattgcaagttttacttttattctaataagaaaaatatttatctgttcataccaactagtttttcttgctgtaatcttgtgtaatttcttctttttcttccaggaaactcaacgaaactattgtggaagctcaacggaggactaggcaatttccacttctacttcctatgaaagaagtggttgatcgctattcggaatccagtaatagattgcttatactggtatgcaactttctcttgctagacaataaataggctggaattttatgatgatccatgaaatggacaaagtgggtaggtgaagtaaaacttataagttgacacagtgtgaatttgtataattttaccttctttctttttttagatggaataacaaatatgctggcttcactaagttatgtattcaacaaagacatttctccttatagttttttcagcatcagattagttttttgaaattcaaataaaattattcattcatctatagaagtattgaaatccctatcttatgtgtaacaacctgttatcattgtatgcacaaagctcataaaactaactactatctatggtcatataaatatcactaaacattctttttacaggggtttcatgccactttaacagaaccaatcggcgcccttgggagaagaggtggtcaaattaaagaaatggagcgtaaactgcatccagacctcaaagaactactgaagaaactatctgaggaccccaaaacaactgtggttgttcttagtggaagtgacagaaatatcctagatcatgtagctctcttctctacttttcttctttctgcattacttgtcttgcaagttatgctcttcactaactttttcttatacagaattttagtgactacaacatgtggctagcagcagaatatgggatgttcttgcgtcatacaggaggggaatggatgactacaatgcctgagaaattaaatacgaaatggaatgagagtgtgaaggtttgtttgtttgtttctacaccaattgatgataaaaactatgttatcctccaatgaattcccaccttttcaccacaaattcttgtttctcattccattatttcagcatgttttcgagtactttactgaaagaacacctcgatcacatttcgagattcgtgagacatcacttgtctggaactacaagtatgcaggtaaccaaccacatattcagtatccttctcttccctcactgttaaaaaaatagtaaaatggtgttggactattagttagtatcatttgaaaagggactatttgaattactagatatccagtttggaaatcttcaagctagggacctgcttcaatatctctgtacgggtccaatctcaaatgcatctgttaatgttgtccgaggtagcagaacagtagaggttcgagctgttggtgttaccaaggtactttgcattttctttagttacaatgtttgtatgtgttgtgattcaatcacacctcaaatcaagtagaaaagcacaatgatcaaacataaacaaaacagtaaaagaaagatcacaccagaaaattacatgatctaatcaatgaatcaatgtgatccatgatctaatccagaagttgatatgctttattgatggacttttaacaccagtagcgagattacaaagatgatacactcactagactagtcttgctcgattactgatgcaactcacatgagataaatcacttctagtgtgatcaatccctttaacaaccctccaagaattacaacagattttgatagttagttggttggttagcttaggtgtcaaggttcataatgtctaaattacaacagtatgaagtagtaaaccgcatgtatgatcatttatgctacccttctcgtgtctcctttatttgttttatatgaaatcacatgtatgtatgttatatgctgcagggtgcgacaattggacgaatattacacgaaatagttcacaacaaatgcatacggtttgattatgtcctatgcattggacattttctctctaaggtaaaaacttgatttcttgtactcat

SEQ ID NO: 18806 - DNA, 5294 bp, Cannabis sativa
ctacttgaagactttgattagtttaagcagactggttgccaagatcaacaacagccgtagggattctgggttgatcttcctctgtagccattgtgcggaatcaatgtacagagagagagagggaagatcggagaagatgatcgagaaacacacagctacaccggagaaagaaatacggcaactggaaggatcgaatgggaaaagcctatctttcccgctcgataccatgtcgagaaatagagaacaactatttgaaaagagaaagagtgaaattcgattaaggaaaaataggggagaggcaagccttttatagcttgtacctcagtaaaaaacagacccaagtagttaggtaaaaactgttttaacagaaaatagaaaataccgaactaaaggctgacaaggcaagaaaactaactgaatgtacagaaatagctaagtgcaaataaaacacaaacaaacattacaaaaggcataatgaactagtaggaaaccagcaacactatactaagtagaactaagaaacttaatagtttcaatctatacacctatcaggatatataaaattgcttggttaagtcctactcttctgtggtaaattagtcatacaattcgtattaaatctggaaatgctaattgctacattgatcatacaaatattctcgtccaatattgaaagctatgcctattttactatagattaatcaacactcatttctcaaattttttattgaaatcataaacatataattgatgatcaggcaattatataagatttaagcataaataaaatagatgcatataagaaattgaggaagaattaaaattacattaaaaccataaagaaatatcaaaccatctccattaacactttaataaaaaaatttagctactcactgttattctaaacaattgataacaattactaattaagaacatgaaaattaaagaagaagaaagaattcgctaaaaaataatgatgatcgtctccggactttttttttgtcaccccaaaagtccttgaaatcaaaagtctaaaagtccttaatttttgttaattacggtttaagagccctaatccttgccaaaaaccattagcaagccgcgacatttgataggctatgccgcggcccatgtctttgaagccccacatcttttgtccaattaaaacaaagcggatcgcggtatgctctatcctatgttgtagcccctgaaggcaatttcagggtagaaattttgaatgccccaatgccttaacatgggattccaatgttgaagcccgccttgatatctttgaaactcgacttctctgcccatttgctgcattttaacgcctggaattggattctcatgccatcacactactccactactttctcagtattttattgttctcaatgtttttgtattttacaattttgttttttggaattttttttttatttgaaaacgatgatgaatgcccgtactttctctcaacaaataataatgttttatttttaaagtcaaaatactttttttttttaattatgttaccaaacactcactattttttataagacgttttcgattgagaacgtggaaaataaataatttgcactacgatacacctcaagtaagagtactttttttttttttgaataatttgcagttgaataaggggcatgtatttttataataacacataataaaattctcactacagcactcacaataaattatacaaattaaataactttaattaaaaaatagagaacagaagcatgagatttaccccaaataacccctacaagagatgatatattttatatattttttttacaacaataaatagtagttgctccacatgtagagcaacactattcattgctctaaacattaaattagttgacaattaaacaagacaaaatgcccatgagaattattcaacatatggaaataaaatatgataaacaactactcttggataaaacattatattaaaacaagacgatagaaaataatattaagacttttacaaaccatgaaaaataaaagtagtagacttaacattactcataattctatttctaaacatcataattcatggaattatttctcttgcatttcaagctcttgaaacctcaaaagcactccagcttgtaatattggcagaagtaataatattctcctaaacaaattaaaaacatacatggaataaaattattagttaggatacaaatataatttatcttatataattagtcagctaaaataagttgattaattcttattcctttggtactattaagagaaaaaaaaatcaaaacttagtacattcttattacctcaattttcaaagctcttgatcaaggaatgaaaggataaaactctcatagaggtaagccacaaagtagcacatgctccaacaaatccaacaagaaaccctatccaaactcccatacgaagccatggcatgtctaaccattctacatcatgatcacttctatcattaatgctttcttgatcaccatcatcatcattgtccccaagacatgatgagtttgttagaggagggccacagagaccaatattattcatgtatgaagaagcattaaagctttgtaattgagtacttgtaggaatttttccagacaattggttactcgaaagatccatgtaagagagaaaagataattgtgctaagcttgttggaattacacctgagaatttgttgtgggacaaatctagtgaatcgagattacttaattttccaatatccgaagggatttccccactcaaattatttcttgatagattaagcacgaccgcttccactagatttgtcaactcgtgaggaattttcccagataatttgttgtatgaaagatcaatcattcttaataatccaagaatatcgatgtactcatgatcagctcctttccacattattaatgcattgaaattatagaacatatattgtttctttgtggaagaaattgatgcaaaaatgagtccaaatgtgtcttggggtttcaccattgaagtgatattatctatacaagatgggatagctccaactaaattattcaaagaaaggtccaatatttgaacaagttgaagatggcatagactcaatggtataactccatagaatttatttgatttgaggcgaagaaattgcaaattttgtaatctttcccctatccatgatggtatatatccttctaaattattctccacaacatcaagaacttgaagttgtgtacaattttgtaaagaaggcaaatatcctgaaaagttgttttgtctcaagattaaaaagcttaggtcatgtaacaagccaatagaccttggaaccactccactaaattgattgttgttcaaattgagaacaaccaatttcttcaaactccactcacaattaggaagacttttttcaaacaccatattattactaaattcaagaacacttgttatcccttgatgatgagtttggttacaaagaaatgaggttaaactaatgagcttatcattatttgagaaatacaagcttatcacattggacaatgaaggtgggataataccatggaattgattagaagaaagatttgcaaaagctaaagggaataaggtttgattgcaaaaccaattaggaatctcatcttgaattcctgagttagaaatgtcgatttcggatatgtatacttgagttttgagccatgtaggaaagtgtggacctaacttacaagatcttaataacaagctttctagttgaaatggaggaatccaagtgggtgtgaaatttaatgttaataaagagttaccagataactcaagatctttcaatttggaattgttttgaaagtggacatcagaaacaaacccaatgaatgagtttgaggacatgtacaatttctcaagatgatggagctcaccaataatattttcacttaaagtaccattaagtttattataagagacatccaaccatttaagattaggaagcattgaaaaattattaggaaaggttcctcttattttgttgtatcccacatccaacatttccaatgaatttttagcacaaccattgagactttctaaaatttgagggagtgttgtgttaagtttgttgaaacccatattcaattccttaagattacaaagatcactgaatgattttggaattccaccttcaaactcgttcgatgacaagtcaatacgttctagaaatctcatattttcgaaagagtttggaaggccaccttgtaattgactctctcttattgtgagattaaccatatttgtactcaaatttagcaaccaaggaaaaattattgaatggtttaatatggtactaaacgaaatatgaaaatctttgagagaatttgaagaatttgcaagggaaagagacaagacatctacttgtggaaatacacaattatcaaagtgtaaacttaataaggaaggagtacttgatttaatggaatgaagccaatttgtagctttgtcatttaaatttgtgttgctcaatcttaagatttttaaagaagggagataagaaagccattcaagattaatcaagatcaatttaccagattggtcaatatcaagatcaagaaactcaagtttggtgagattttgtagctgaggacttttaatagtgtcaatgatgggattatttgcaagactgaggtatttgagtcgacttagagaaccaagaaacttgggaattttatagaagttgttgttactaagatctaaatgagtcaaatgttgcaattcaaccaaagagtgatcatcaatttcagttcccataaaacatggctccataaaaccatcattaatgtctaagcaatcaaagttaagatcaagagagataataacatgatgattattattagttaagttatgatgataatcacacctgattcctctccaattacaacaatctttgttggtggttgtccatgaggaaagaagattgtttgtatcaacaaggcctcctttaatggtgagaagagcttgtctctccttctctatgcacacaccttcacacgtggcaataacaacaaacacaagcaccacaagtttcatcatcatcgtcatcatatatatatatatatatttagagattaatattaattcaaaataagctagtgagatactatatacgtaattacttcatatatagatcaatgcatgtctgcctaattcacatgtccatataaatagacattttgtgaatgtaatcaatttttgagttagacatataacaaacaagtatcaagttgtctagccaaaaaaaaaaaaaaaaa

SEQ ID NO: 18807 - DNA, 3115 bp, Cannabis sativa
atatatacatccatatccacaatattgagtagtagcctctctaaatcaaaatacatatcttgaaaactcatcacctcatcctaatattatatggtacccgtgaatggttaaaatccctgtttaatattttgtccttatatatatatataacatctttatatttatatatatatttattttcttttatagtacgtaccaatattattaacatgagggctagcttccccgaagttgccaaaatactccttggaccacaatcttttaagatcctcctctcctctcatctcatcaggctattagattccttttgctcagaaccatttttctttttaattttaccttttttccaaaccttttttttttaaaaaataaataaaaattcactctataaccaatatttattaattaattagggttttgaggtatagtaaaaaaggggttaaccttttcaatatgtcccactcacacacatacatatatttgctcctaactcatgggaatttttatgagccaaaaaaagacatgagatcaagttaaaaacaaatagttaataataaaaatgaaaactttgttggatagcaaaagaaaaagaaaaagaaaaaggggttatttggtaatttagtaaaagttgaggggtttaattgaaaagaatgaaaaattgccgccgttgttgaaaacgcatatcgtggcgatgtctaaacagatatatcatcgtcttcgtgtaaagaatataaagaatttgctttgttgtcactcttgatattcattggtccaatttattattattactattcattaactctttttacaattttcaaatactttctcactaactttcaactctataatatttgagtttgtttttttgacaattaattaatttctcttagtaactgaaattttttcaccactacctttgaaaaatcccagctagactatatagttttcatcatcatcatcatcatcatcatcatcataatatatattcttatccttttctttctgattacgacatcagcaaatataaatataacacagtaaaaagtatatagactttttactgttcatattatatgtatataattcaacatttgaaatttgttatggtatttggtataattaaaatcatttttctagtataataataataatatatgtaataattagtggtgtggaaataaaagagactaaaaatttggaatacaatatatatgaatatccaaaaaattatcttgtaaatgattgaaaagatgtctagacacaactcaattatgcatcaaaaaagtatcttttttctttggttgtctttccaaacataaattccaattaggacattgcagattatataaaggcaggtgcagggaacacttaaaaaagtgtaattagctaatcatataataattaattaactccaaacaatggcaaaaattaaaaaaaaaaccaccatgagtagggggccctattcatttttcttctaggggtgaagcgttttcgtttttggtatttgaagaatatataaatcaattaaatttgttcttaccgatttttttaaaattataaataatttacattactaaaaatattattcataagtaattaattatatatatggcgcgattaaaaaattaacatgcttgcaacgttgaattatttgaattttatttttaaaatgtgataatgttaagctatacttataaaatactattataacaaaatttaaattataatttctttaatatagaacttaaaccgataaaaataatgtagtgtccgaactaatttccaatatatatgtataatagttcataattttaagtatataccggtagttatatatatatatatgatatgtcatacatgtatgtatgtatgtatggataatgcatatatgatagtggttatagttgttttaagaggaatatttatatatatatatatatgatatatagttaggctgtcattgttgaaagaatgactatacactacttatgtggtgctatgtaatagctgaactgagttcttcccttgttgaaaaaaaagaaaaaaattcttgagctggaatggaataaaaactgtcattcaaagtttgaaatgcaaaaagaggaaatttttcataaatagagaggaaattaatgtagaagaaattaagaataaaaaaactgtctcaatcaataattaatgccaattcgtacatatataaacaaacactaatgttaacttaattatgacacaatttctttaaattatttattatttagaataattttgacagtgtggtttctaatttttatgtgtatggtaattggttaagacttgtctgtcatctaatataaggtaggtgacgttaaaaactaatttaaaacagtgtatttatatatatgtatatatatatatatatatatttcttcaaaatcttaaaaattcaagagagatatagtttattcatagttgttggattaggtcttttgattgtgatattaaaacacttataataacaataataagaagaagaaatattacatcataactctcatatatatataatataaaattaaaattgccatttaattcataccctgatgtgactccaacacataatatatatatatatatatatattgcatgtaactgaaccaaaaccaaactaagctaatagtcccagcaaaggaagaaggccctgctctcttcttctctctctatatctatatatatatatatattgtttgtgtcatcacactatatactgacccaaaagagagaactaaactcttagctaaaaggctaagctaatatacaaaaaaaaaaaccaaccatttttacagctacgatatatattcaggtgtttcttttttctttttaacacccaagagtcaaaatcttcttcttcttcttctccttattattattattattataataaatataaatatagttttttctttttctaatttaattatttactgtgagagttggggcccacttgggaacggtgatgcagcaaggtttgtcctcaagtgatgagaagatacgaataagaaagagagagaaagagaaagagaaagagaggagagagaaagaagagagaggaagaagagagagagagagagatcggaag

SEQ ID NO: 18808 - DNA, 2343 bp, Cannabis sativa
gaaaacctttttccagaagttccctggcaacgagaaaacacaatcacatctgcaccaagcctcattgtactagtcttaaaaccatttccatctgtaacaaagacaatgcaaaatccatcttataatgagaaaaaaaagtgaaaagaagaataacacaatttgccaaagaccagtttctacattgtccaatggtgtttgctaatttgcttttctcagaatatcccaatgacatgcaatgccgcatcttatccggattcatgccaccaccatcatctgcaaaaggaaattaaattaatacttcttagatatcacaagttttaaagataaagaacacagcacaacattacaattacaattacccaaattatgtaataaggaaacaaagtcaaagaagaagttaccttcaattagcaacattctgctcccatctttcttattagtcaccatatcaatatttgcatatgtagcaccgctgcagacctgatattgaaataatttttgtttcagaatactcaatctagggtgtaaggggagtgtattcttgtaaaaagctcagcaaatgtgaaagaaatacctcatccaatgcattatccaatagctcagcaaaagctgcacaaaatcgaaaatataacaaattggtataagaaaataatcaagagtcacatacaaatggcctagttacatgcgcttatactaacctccaagagcccacttgtgactggttgcatttgaatgaagaaactttggatgaaccctgacgtgatccatgccacctacaatacaatacacagtcaaaaatcttataagcaccacgagtgatctgtttttttcttttggatagatttaatcacaccaaacaaacccctttcataggatacaccctactgagtcagtaaacatgtgggaaactttatacttctccaacaactgagagagcacaaaaagctatttttatgccacccagagacaatgcccaacattcaaaagtcaaaactacagcattacataaccacccaaaagaaaaagggaataaacagagtgcaaggtacggaccaatttgcaaaactgttaattagtatgaactcaactcagaaaccatcacatgcatttattcaatgacagtccaaacagataaacaatcattagaatacctaaaaaatttcccaaattggaaaaagtctcacataatgggaaaaaaaattgaaactttatcactgcagtaattgcaagaactcactttttctattttttctcaaaaaactaataaaaaacaagaacaacataaccaagtttgcgaagaaataaagaaaagaaattacctaatggagatgtccagtcactattacagggggagccctcgtaatcccccgctttccagaactgtttacaaccccccttacgcgcaagcttcaaaccaccaccagattgagacggcaacaacaatggttgttgttctggattaaaaaaccccaccggtaaagcattatcgtcctccttctccgccatatcggaatcggagtcggaatctaagttaattaatattggcgaagaagaagaagaagatgggtttggattgagcttgagcttgactggtaaaggttctccgattgattcaatttgttcttctttgacaagaacgggaaactccatgaataaagaattgaagaagaaatcaaataataataataataagaaaaaatcgagaattatgataatttaggacctcttttatagcctggttcgaattaagggcggtttgataattctgtgtggagaggtacacgctaccgttactgtgtactgtatactatctcgacttgcgtgtcaagtcaaacgtttcctttcatatttttttgaccgttcacttgttcgacttaaaaaaaaaaaaaaaaaacccttctaaaataaaatagaaaactcaaaataaataagagtaatttgcagcgaaagcgaaagtatatgtaataataaaatctcaaatatctaattgaaattttaaatttataaaaaaataaatttagaggaattttgccacaaaaaaataaaaaaattaaatatataaaaattaaaacatggaaattttacctcaaatttttcaataaataacctaaataaaagccttttcaaaataataataataaataatttcctcaaaaaaaaaaaaaaaaatgcaacagacagattttttctttttaacaaataattaataagttaatttatagtcttaagagtctttcacatttagtaacttgctattgattattaaggactaaaaatagagtagcttacccactccaatattattgcacattatttgctgtgctggagtggcaacaagtcaaa

SEQ ID NO: 18809 - DNA, 6732 bp, Cannabis sativa
aaaaaaaaaaaaaaatacgaatagcaacattaaaaagagaagtgtaaaaaaaggaaaaaaaaaagaacaaaggaagaccgacattgtgcctttaacacaaggagaatatttgagtgagaggagctccaaccagatccgcagcactgctccgaacaaccgagactctccgattacaagaaagccgtcgattactctagaatagggagatgggggaggagaagaggcacgagatgatgcagaacttgttcggagatcaatccgaggaagaagaagagatcgattccgagcacgagtccaacccccaacccaattacatctctgtaattttttctccctcaagtattttctgctcagcttattggaatcttaagctacctttttcgactacataatttaggtcaacaatcgagttcttcggtctttttgttcgctatggtttggtaattggtatgcatgcattggttttacggtctgggaatcttttttctgataggttagggttttgttaaagtttagtttttcctgaaaatatatatatattctttttcggaacttttttattggtaggtgcctggtatgtaatattacaagtggatgtatagcgatatatgttttaactattaaagttaattagcttgtttgttgtaacatgatcatatctatcttgcattttaacgtatagctctgattacatgattatcccactaagctctttgagtgagggtttgtttttgctataaaactatgctcctgggtctaccgtgtttaagtttattaaggaaattctaggaactcgtctgttaattgttaatttgtggaattgggtttgatatttaattactatctcaccttcggttgtgttgaatttatcatgagctttatattacgacacacacatcattgctaaagaatatatatgtttgcttatgttaaagagaccattccatttcattaataatgaaatttcatccccactttttggtgagacattgtggtgaatgataatcaagtttaagagggatcatacttatattttgatcagtgttttcattttgcttgcaatgaatcaatgctttttgtatgtgtgccccaaaaattttgttcggtgaattactgtgaaataatttcctaaaactagatgacttagtttctctacttagacacattgttgatggttctctctcttaacatttatttttttatacaatttaaggatgaaggagaagggggagtagagcctgaaggtgaaggcgaggtagaggggcaaggggaggtagaaattgaaagtgaaggagagttgcgtgatgcagaacctgatcctggtgaaagtgagggtgaaagagatcaaagttcccaagaggtagagcctggtgtccacagagatgaaagtgaaggtagatatagtgatagtgacgagaaagaagagttaacaagtcggagacgaaatgtgattgaaagtggatcagaagaaaatcactaccctgacaatgaagatgatgaggttgagcaggctcaaagtccagggtaaagcctccctcttctcctctctcattctcagctctcatatgtatactctatattgttgtttgaatttgtttctgcactactatggcaacttttgtattgaggagaagaattgatttaagaattcgatctgcttattgtatacaatttgattaagcagcagccttgtttatggttcgaaaaaactgacttcttgacattagattccctgaagaggagaaggatcagattcacgttgaaaactctgctgctgtccgtaatgtatttggtgattctgatgacgaggaagtagaagagtatgctattcaaaatgccctggatcatgattctagagtgagttttcaatattaggaaacattatgctcatatgatctttatctgtagattctgcctgagtttgggttaggattcagaagatgatataaatgctttttctgcttcagagattgcccatggaagaagaagaagaagaggaagaagaagggagctatgagaaaagtccaagaccagaggatgtagtgcctgatgaagatgctcggtacgagtctgaagaggaaaacattgagacaaagatcaaggagaaaccagttggtcctcctttggaattggagattccattgcgtataccgcctgcgcatcctgaaaaggttccatcttttttagcttgctttgaaatgatatctcagtttattgatgctcttcaagtcttctaatgccaaatttagtggatgtcttctattgttttttcgactcctgcgtatacttgaatgtgatttctttcaatccattgcttgatttgtcatcaataataattgataggtccacatgataaacttcgctcattttaatgatattgaatgagacaagcacagtataatagtcatatactctggctttggagtttaatgaatataggaagactgcaaaataacctttagctatctttttatgtgatggcctggttataaaaggcatactggagaaaaagaaggaagtgttaagacctgcaactgtgctgtggtgggttcaggaaggatgtatcactatcatggacattctgatgcatgaacttttaaatagttttatgtttgcaagatagtccttgactcctcgataacaaaatatgaatacattgcactgttctcgtgatccaaaaatatatactaaatagatccattcatctgtccggcttctgcctgtttaattttgacagtatattaatgaatgcaaccgctgtctttcttagtgattcacagcaataagttcctgcagctacatcaacctttttttttttttgctttctctctctttttattccccttcaaagaaaagagaatgaagcatttgaatatcacaattcctgtgtctatactcctatattgcacttccgtttgataaacaatttaatgccttgttatatccagagtttttactaaagttctcttctgtggtgctgtgtagatgaacatgattaaagtgtctaatatcatgggaattgacccaaaaccatttgatcctaagacatatgtggaggaagacacatttgtcacagatgaatctggatcaaagaaacggatacgcttggagaacaatattgtacgctggcgatctgttaaacatcctgatggctcggtatcggtaagtaactttgttagtagattctctttttggtacagaagttaaattatatggacttcaatcataaatatgtattctgcaggcattattttttaggatttgcttggtaagttcattctttcattttttttttctttgcaaacgatactattagcggatgttttcttcaacattttagaagatcatgaacctaatcactgtttctattttttttcccttttaccaagcaagtcttttacttatcacccgcaggggttaggattcagatatactgaattagggtaggccataaaaattttgtggtcattctattgtctatgtctttgcctttttccctgccatgttcaaccctttcaatacataagttaaacaacaaagctcatggaaaataaaaatacagcttaccatcaagctgtgacattaataggcaattgctgattagtcatatgttatgttgtttgattaatttctaaaacaggaggttcctctctatccctctcaatagaataactgatttaacatgcactctaagaatgtttattagtttccctatatggcattgactcaatgtatgtggattactttttaattgtagcgtgaaagcaatgcacgctttgtgagatggtcagatggcagtttgcagttattacttggtaatgaagtcctagacataaccgtgcaagacgcacagcatgatcaagcgcatctatttgttcgacaccaaaaggtgactttctaaacctatttacctttggaatttaagaattggtatcttgattcataaatattactaaagctaatgctatatcattccatgtttctgtttcctggtgcttttaccagagtcactatacgcttgtgattatgctttgttcaatataactggaggcaatttttttctttccaagtttagggttataaatttttattctcgtggaccagccatcacatctattttaatctcttaccacccatgcaacttttatcccgaaatcctgatcatttaagctgttttggaagctcattgtaatgtccgggacctagatagacttatcgtattgtggataatcaagtagggtttaataaaattgttgacagacaagtatgtttatgttatgtttgtgaaacccagtacctcattggtctgcttccacaaaatttgtttgcttatagtttatttcctttttaaatagttatgatctgtgcttgcagggaatccttcaatcacaaggaaggctattgagaaagatgaggttcataccttcatccttgacatcaaattctcatagattgctaactgctttggttgactcgaggcataaaaaggtttacaaggttaaaaactgtgtcactgatattgatcctgaaagggaaaaggaggagaaggaaaaggtagcttttgctttgttattgtctttgaaggctaacctctttctctgttatttatttatttttaacttgtcctttcaaaccctacactttctgggaagaacaaagaagaaaactctagcatattgctttgaatataatcatgggcctatctctcaacctaaccctcatgggtctttctttcttttccatttttatttatgtactgttttattatactactgtaggctgaaagtcaaactattagagctaatttactccttagtcggaagagggaaaaggtgagtcggaaatatacaccaaatgttgatagaaggcgccaactttcacctgggttcttggaagatgctcttgatgaggtatggttgggttctttttggctctacttattgatttaatctgaggctataagaggttaggcatcctgtaactatctaccaaatttgcttaggatgatgaagcagattattatgactctcgtcgttctcgcaaccgctttgaagaagatctagaagtggaagctcgcgcagagaaacggattttgaatgctaagaaggtcttactaataaagtacattagctctttcatgtacggaaatttgttcacgctattctttactgtctgctcttgaaactttagtcacagggatcgagagatatccctcggaaatcatctgcaccacctgccaaatcttcccgtcatcctgtggatttctctgatagtgagagagaggaatctgaatacgaaactgatggagaagaagatgagaggtctcctccacgtaaaagggttgaggagccggagcaggagtatgaagaagatgaagaagaggaagaagaccacgatgaggcagaaagacatgagctgtcagaggaggaagctgaggtatgtatttttgttgtttagattagcacttgtctatcagctttggttaacatactagcagtggtgctccgattagaatttcaaatacagcttgaatttatttttggatgatctgtgtaagttccaccaaattttgagcactggataaaactggcgaggagtgaaagttcagagggccaaaagcatatactctagttgcttaagcagtaccaatcaagaaatggaaccgtctcttcaaatttcaatattattctttttttttttcgtagttgtcagttgattacattctgataaaactgaacattaaacatcatttaattacttgtatatgcgctaaataattgagatataaaccctaatgacttgtagattttctgcaccctcttggagaatgtagtgatattcttttaatctgtttcttggacattttcctaggagcccaagtacaggggtaaggactctggacacaacctcaaacgcaaaggggttgaatcagatgaggactctcccccaaggaaggcagctgctactcatcgtcgaatggctgttgtttatgatagtgatgaggactaagtactcggtacctgctgttttcaagtgagtgtttctcttcaaccggaattcatccatgttaatatattggtcttcagttggttagagcaagttgaaatatttccaaaggtacataatgttcgatttggaaaaaccaattttatttttactcaaatttcctaaatgtactcgtgactgtaaatattatgaagagaactgtaccttcaagaattcgtttcttcctttttccttttatacatgagtttgatttgggtatgaacttcttttccctttaattattcaaccttttaccatctatatcattttttattgtctaacgttaagctgacaattttgtttagcttagtcatgaacttcttatggttgtttcagcaaaaaggcctggcgataaactggataagaagcattgctatttaaatcaagagaccaaatgcattgtctctggcccttattccttgacaagctttccttgtatttcttctgacattttcaactttacactgatttttagtaatatttcctgtgtttatttaaatagtatgatctatttcaaatgtgcataaatatgtctaacaagaagataaaaatgttatcattagtattattatctgagaaaaatgaattcaatattattaaatagagcaatttacaaaagtattgaattgttttatttatttttatttttataaatatggataacagtaataatgttaccaaagtaat

SEQ ID NO: 18810 - DNA, 1854 bp, Cannabis sativa
tgcatctatcttggttcaaacctgattgcttggcaatctaagaagcagcaaattgtgtcaaggtcttcaactgaggttgaatttcgaagccttgccagcatcacaacggaaatgtcttggattaagttcttgcttgaagaacttcaggtgacattgcagtgcacaccaatagtctagtgtgacaatcttaacattgtgctgctaactgcaaatccaatcttgcatgctcgaaccaaacacatagaattgaacttatactttggaagggaaaaggttcaaaacaagagtctcgatgtaagacatgtgccagatcaaattactgactgtctaaccaagataatattaagctttagatttttcttaatttcttagagacaaattcaatgttgaatgcttttgctacttaactttgaagggggctgttgaaaacaattagttgtaatagttttctgttatttgtacagtttttctaattgttagttgcttttagctttgtctcaacttatgtatatatactctgtaccttgccttgaaaatcaataatacagaactcattttcaatttttcatctattatcttaaccgatgctgctaaactttcaacgtcaaaatatttattgaagttttaattaaataaatgaataataaattcttttgttcattattaggaagatgttgatttgtcctaattaacttctaatacccaactaccatatacgacatcgacatatatgatatatgatgatttaagtgtttctaaggtggtgatttttggaagtgcatcttcaaaaccggccaatccacatgctcaaatctctctcataaccttttatacacacgcatatatatataaatgcatattatatagacacactatttatatatgcttatccaaactcaatacctatccaataattctttggtggctctagtttctttttctaattagttgaaaccacttaaatacccacccccaaaagagagtttagaacaccttttaaaagatcaaaagagagagagagttactaacctgctaataatgttccttatttaatttagaactattatataaatacatatattattattattattatatccttattttgtcaaaaagagaaaggagagagaggtagttcacgtggttccttcatcagccatgttcaagaaatgtacaaaatcaactacaagacaaatattcttgtatcacagactcgtctttttccttaactaaataggtcaaaccacctttttaacatatatttctttcttctcattcccattatataaatatgcatatatatatatatatataaaaaaatacaatactacattttttttagttattaccattaataaaatcgcagccatttgtcattgtatatagtttttgaaacgaaaaccaaactgattatattattatacaaatttgaaccattaaattttggtattagtatacataatatagtgtgtatacgttaacaccacatggattaattatcatactcatataacccagccatgacaatattaagtacggtaatgcgtaccatactcataggttttttttttcttattaaattattgaacctttcttggcttttttaaactaacacgtggttacttcatccaaccatataacgtatctatgcatgtgcacatgaataccccaaaaatcatatatactataaaatattatgcatatttctaactctatatatatatgttgtacgtatctaatggtatattatcaaatatcaacctttgatttctctccctatataaatacattaattatatacatacatatagctggaagagtttcaaccacatacatatatacatatatgatata

SEQ ID NO: 18811 - DNA, 4542 bp, Cannabis sativa
atatttaaaatttcgtgaaactgtatttttgtaatttttttgttgttttgtatatttgtgaaataatctcatgtaatatcttgtgtcaaatttaacccgcttcttagaacatcgaatggagtagtagtagtttttataaattaatatcatctccaatgaatgatatattttagattaaatttagcataaaatataccataaagttacatttagtttaatttttatatttgtgatctaatgcacaaagtataaattagatataaaaatcaataatatcaataatgctaattgaaaatataaaaaataattaattttatttatattattttaatattctataaatataaagtcaatgaatagtattaatgagtgtcaaaaaaataattaaaaaatgtagtatttattgtgggctaaaatttagttcatgttatcttttgtttcaaatttgagacatattttatattactattaaaattaaattttagcaatatattttaaaaaatagcactatatatatagctgttcattggagatattaaaatctagcaaatatattactttttttagtactctattggatatgttcttatattaatcttaatttgtcacattaacaacggaataatatttacttatgtaaaaaaaaatgaaaagaaaaaaaaaagtgaaatgaagatggagggggtgaaaagttaaaaaaggtaaattatataatgttaataataacaaatgaatttatttatggagagatttgaccaaatgaagatgatgaattaagatgaaaaatattgaatgaatagattatcttgtttttggtggcatagctaagaaccaaatctaattgagctgttcgacgcatgatttgtgggtcataattttatgagttgtttgtgtggtggaaaggtgagaatgctccaatttcttaaagtaaagaaaacatgtgaactcatgcaattaccaaaacccacatatattatatatacatttttattcttcttagtacatgtcatttgttgggcattgagaagaaaatcaatattttaattcaatcacattcacattaatttttatttactacacaaatattgattattacatgatgatttatcttattagaaagtcaagcttctcaagggtcaaattgtggaacccaatccatagccatttaattaaatattatatagtgtgtagtaatatatattagttttttttataattttatatgattatcacacccttcaaaacattagggtgatttaatattattacatttatattaattattatattatttatcatggaaagacacattggtataaatgcaacattttcttggctgggttccttgattaattattctaattaattgtggcctacatccatccaggtcctttatttttctttttaaaactatattttatttttaatattcaattaccaatgctagcttgaaaggctacacctgtggacaatttagtcatagtcaggggttcaacaaaattaaatatattttatattaaattttcattttcatgattaaaaaactcaatgtcgtgaatcagatgattcaaagaaaatcatgtgataatttaagcatgttatatttattttattttattttttaatataaatgctctgtgagttggggaatcgaactacttatattatgacacgtgtgatatagtcacacggtgacgtatgattatattaaaatattataattattattgtattaaatccaatttaattttaaacatatagtcaatacttttctccaacaaattgattatgtaacaaggtagcaataaaataaatttccattataaaatattaaaaaaaagaagaagctaattttttgaataattataacattagggtttccatcacttgaagtaaacggctgtcaggcgccatgaattggtctttattaattaacgtaattttgcagtacttatatataattataattataattctaattattatcttaaatattaataatgtgtttatgtacatttgaatatttcattatttttttagtttaatttattatgaagagagtactggatattatatatatttatatgaatccaacttcctcaacataataaaaataggatattaatacatattaatctttttgtatttgtggaggaacattaaaaatgttgtccttgtgtgaaaaataattaaaagaaaataattacacaaaaacagctggaaagaaaatggagggaggggagggggctacttctaaagatatacatgtactttgattaaattgtgatttgatgaataataatggagtattagtatatacatatataaatataaaaataaatagatagtaataaataatacaatttaatttataaatgaaaacaaattaataattagacaaagaaaagtggaaagagatatgcagagaatatatgatatatctactgtagatttgttggcacatgcaaaaactaaacaaaagggatgcattactccacacgatttgccaagcaaaaataataatcccttcgaagacgctcgtactattttcaattattattattattaattaattattagtattattatgtatacattaatataaatatttttttattaaaaaaaaaaaaagagagagagaaagaaaagctttcccccaccaccacttgccaaaatccatcaaaatcagccttaattaatcagatatagaatatattatatataatataagattcccaagtataattaaattatattcttgtataaatatatatacagcacacggggacttgtaccaaaccctcttgtgcgtggttaaggttaaagacttaaaaagaaggggattgatgaactgaactctatataaatctttatctgtacatatatatatgtaagagtcctgaaaccttttgggggtttaaattcataaattaaattaaaaagaatccctaaagattcctcaataaagatttgtatatatatacaatatctatatccattaattatgtatcatcacctttccaatactgtgtgatgcaatcttttttaaacattgattaataatgacattcttttcattgtctctcactttttaatttatttctttattaattaattaatatattaaagatattgatttgtgtcaaaaaaaaaatattgataataagaaataacctctgtaattaacactcattctaacatatcagcattgacgtgtcatatatatttttacatactgtacatgtatgtatatattaattaatatgattatcaaatcttatcttaaagagaaggggaaatttgctaaacttatatagttgatgaattcatttttggggaatttctataatatgtaatattattataatactaccacatattaatatttggcttttaactatttttcgatttttatttatattttgtgttaattttgttggagtttatttaaagtaagttaattgtatgtatttaataataatatattcctttatttaatttaaaattttatatgtattatctttttttttcagattttctatatacatctttacacattttaaactaattaactatattttttaaacatatttttgaatatattaatatatttatgtccatcatataatagcaataaacacattaaatatttttaagggaaataaattaatacgtttaataatcatataaaatttaaaccatatatacttaaccattattaattaaactaattaaacaatttaaaatcaaaattttatcggtacaagaaattaagggaaagaaaaacaatttcacgaaattgatcacatatacatatttattttattttatttatgttattttttgtgaatttattattgtcatgataatttatactaagttatttgttttaatatatggaattgtttatttagcatattggtttgtttataagtattaaacaatatttttgtttatcttttgtatttatattttgttttaattcaaattagttgtgtttatttttttaggtatgctgattttatttataaataaactattttgttaattaatttaatataaattttaattttattattttcttatacattttagtaatttaaactttattgcttacattttttattctaaatttttagttcaaacaagttgcattttttataatatatatatactaatttttttttgtttattttctattttaaacaattagctttcatgtatagatatgaaatcaactattttatttatttcatcctcacaaaaaaaaaatatatatatatattttgtttacttcatatatttttagttttaacattgtttatcattttttgtttagactttattgtttatttttatgtgctgcatgtaatattaaaattattattgtgttatatataatttttataaataatttattgtttatgcttattgaatcggtataccttctagttttttattaaaaaacaaaaattattaattttttcgttaaacgatgatctaaatctttgttgatgtatattttagtgacgttatactttt

SEQ ID NO: 18812 - DNA, 3606 bp, Cannabis sativa
accccacagttccctttgcaccacatggaaagtctggcttgctgaattccaaatgttgttttttgtatgatccaggttaaggcaatatatatcaagaatctaccaaaggatattactcaagattctttaagaaaatcatttgagcatcacgggaagatcactaaagtggttctcccacctgcaaaaccaggtcaggagaagagcagatatggttttgtacattttgcagagagatcaagtgctatgaaggcattgaagaacactgagaaatatgaaattgacggtgagtctaggctcgttatctatcaagctgattaattttaatttacattttaggtaagcaatctcaaatcgatcctttctgcttgtaggtcaagttttggactgttctcttgcaaagccacaagcagatcagaggtcttccggagcatcaaattctcaaaattcagccctgcttccaacttacccgccccatatgggctatggcatggttggtggtggttatggttctgtaggagcagctggaggttttggtgtaggttttgctcaagtaagatgctgctttttttcaatctctctgtaaatttagacaagacctataccagaaaagaaaaaacaaggcctacaaaactgttcgtgcctgattaggtgataacaatctgttgcagccacttatctacggtggtggaccgacacctgctggagctatgatgccaatgcttttgcctgatggccgaattggatatgttctgtaagaggcttcacctttatttatataatttggtatatagtacaagtttagttgaatcctaccctaatgccaagttcaatcattttgccaataggcaacagcctagcttgcaaccacatcaccctccaatgcaatcacgaggtggtaggggcaaccatggtgggagctcgagtggtggaaggcgggggagcagcgagaacaatggtggtcacagccgctatcacccatattaaagcacagtcatgatgatttttttttttggtgtggttttaacctctttatttgttttgtagccaatgtagttaatttaagctgttaacaggttttacattattataattattgtgtcaatcagacaccggtattcagttacaagtttagtaccgaatataagaacttaaaaaagataggagatcaatccaatccatacccaaatattaaaatcaacgataaaaatcacttttttttatttatcatcaaatagtcctggaaacctagaaaaaagccaatcacagaaatataaattaaaggaaaattatgtggagagcatcattatcattagttgttctaataacacatttaacaacattccagtagtcctagcaatcgggtatttgcttgcccttaatactatcttgagatcttgttaaaactcaaaagtagggtccaagctattaggtatttgcatgtcctttattttctcccaattaaagtgctagtcttccttctgctttgatttgaagaactaacctagtagtctaactttgaccatttaccttgcattgtgctgcatcattcttgtaatgggaaatcactgcatctagaaacaagtacacttatcagaaggaaaaaaaaaatgtactcatcgacctaaaaagtcacagtattcttactgatatgaaagatatgaacatcaaaaaaggcagcatcatataaaatcaagttaggcatacttgagtcaataagcattgttcagctgaagcttgtgaagtcctttggtggttcgatccaaatattctcgaaagggttttgctctccccaatcgtaacattgcttacgggggtagtatctacaatcattgagagagtacaagatgcagcgccttccatagaaccgaactttagagaagtagacgctgtttctcaatataccaaggagatcgtttctagaatgggacgataagaaactcacgaaaagtgtcataccttggagattttgcatctcctcccaaaccatgtcagctcgatcaagcttaaaaacaatgggattttcactagaacaagtataaataactaataagttcccgttatgctcagccataaacttgcctttccaccaatttttggcaaaaaagttctctgggcatttggggggaggaacagcaagaacgttccaagtgcgttccatgggatcaaaaacccctagccagccggtgaggctcagacaataaaagagtccattgcagaaaacaagcttattccaaatgctactgacaaagggcaaccgattttgatagttaacagtaacccacttcgttgctccagcgtggcaagtactaatagcaacaatcgtgggactgatgtgcttgactgtgaaaagtatgcagctggaggatgttggtgcacatgagaatgccacaatctgataagtcaactcaaatttcggtagttttatcacctttcgagtgaaagggttaaagaagaaaacacggtgcgatcttggcctgtatagtaacagccaaccatctttggtgtaacagaccctagatccattcaactcaggtaactcaagggaatgagtcttgcgctttgatggatcataaaactcatacaagttcccaaattttggaaagtacataagccacggtgattgattaaccaccctcacagatatggcagttgaatgccaaaacttgcataccatagaggcgcggatattgtcaactagagtcaactgggacaaaatgagttgcaaaatttccatcggtagctcggaccaagtctgtagttccaatgtctcattcttctccttggttctttttctttcattatctgtgatcgtttcatctaacctatgcaccagagaatcagggtaagttcaaacatccagcactcaaacaagaaccattaatgaactgaaaacgccaccatgaactaaaacttgagtatcaaaatgtaaaatataaacagaatttgcaacaattaaacattaatcttatgcatcaacactatattttaccctcaattaaaatctgtttgcatataaaaccaaatctccaaccccatcatcttcttatctacatattgtactgtgcatactgatttaatgctcaaaaagatagtaccccttgtgataatctaaattcttgaaatcatcaagtatgaaaaagaaaaacatttatcaaataagcaccccctttgaattcagacttttactccaaaactcacaacatttagtacaaaattgtaggattcaaccaatcttgtacagaaagaacacaatttgatcattccaaccacatagtctcgcaaatcctaaaaaaccttaaaaccaattcttacccaaatacaaaatactcataaaatattgggaattgactccaattttccatgggttcaaaagcaaaactcataagaagtaaacacatttgctttaaattcacaaacaatgactgacccaaatcctaaaacactcaatttcaaaccaaatctacaaccaagtaaacattttatttctaaataaagagagaaaaataataatgaaaatatgaaaatggaattgcgagactattttgcctagaaaaaaaaaataaaaataaaaaaaagaagtaagagagcagagaaagagagagagca

SEQ ID NO: 18813 - DNA, 3899 bp, Cannabis sativa
aagtgttgatttttgccatgttttagttcttggtagtccttattatgcaatattcaaagcttcacatgttcacacaaaaaaaaaaaaaaaagaataagtaatttaatcaaagaaaagaatgaataaaagtagtttagttttaacaaacatgtgacatgatagtgttagctagtaatagtatacatggaaaatcttatatcaagtgatatcattgttatgattcaaagaatagttttggcaaaagtataataattaaaaggaatagtttgacaagcatataaaagagtagaaactgttgtattctgtgatcaaatgaagaaacgaatgttgttatatagtatgctttctcatgagttgacagaaagtagggctagtattagtattaaagctatatgttcctactccatctcaagtaatcactaaaaccaacttcttttgctttgaaaacccttttgtttttttcctctatttaattatttatagccttttaacaattagttgtgtgtacatataacaaattagaaaagaaagtgtttaggctaaacaaacctaaatatgttgaggtttgacactaaaactattccaatcacactgcaaatataatgtcatatataaattatctacaatgtcctattaaattaatgtttcaaaaaaaatattagtgggacacttaaaccatggcaaaaaaattatttggcttttaatatttaaataatgtctatataataaaaatgttatatttatatacggtaaaacattattttgaaccttctgttttataaaaattattgattggaccatttgttttattaaatgacaaaaaatcctatatttttctaaaatggtacaaatagatacatgaattgattttttttatcaaaataaaacttaacaataactcaatctaaaagtgttatgacaaaactaattatattttctgcatctgtctgtgttaggaattgttttcaagttggttacattaaaaaaaaaaattgtcgaaaattaagttcaagaccctatttatattatattgagaaataaatagtctattttttcatttaataaaatagatgatctaattaataatttttacaaaatacagagtctaaaatagtatttacccttatatattataaagtgaaataatgaataaataatataataataaagaatacactttttagtgtaatttttaatgttgtggttgaaaaaaaaataatttattgcaaaattatactcttttagtgttggtttaacatcaatttttagttttaccattggagataagatacccttagcttcacttcacttaacattccatgattttctaatcttttggtatgtctaagatgtgacttatgaggctagatatattagataaggtcataataagagtactatcatcatactaacatatttgtatatagagaataaagaaccattttattacacattgaagaacccaacaacaaaaggactagctaattagctcttccatgttgcttcaaccatatctctccttaatttatttataggcggactacgcttgtgtctagagtccacttagttcaagggttcaaaaaaaaaaattcttttaaaagtatatatttatttacatattttaaaaattagcactatttttacaaataaagacttaaaaatatttttattcctgtgactcactaaatttcaagattgactgtgcataagcaatatctttttctaatctctcattcttctaaatgttctctcaacacttgtatctcaactccttttttctttttccagtttaaagctgcattattcaaaaatataaaatagatcctttgtttactaagaccatgatagagctaggggattagaggggtggtggccatggcttcctttaattttcttttatattctcataaaaattctttgatagtcacctacagagggagcacttattctagttttgatataaaatttatgtatgtgaccatctatgttatatctatgttttagttataattattcttagagatttaggaggttgtcaatattacattataatgtataccctcatattataaaattgatatcaaaactacttaaagtgctgaaaagtgcatggcaatacactagtgataggtaagaatttccatttatgtttattttaaacaaataaatatgtatgtagtataaatttatagagtgattttacaatgaactctcttaaaaagtatattgatgtaccttctatctgtttcggtatttaagaaaaaaatttaatttaatttttttcattgtcgtgtacgttatagttatttaagacattctgcgaaaatttgataaatttagaataatttacaatataaagcacagtgttcaaataatctactttatacacgtataaaataaaaaaaatcacgtgtgtaacagactgtttgaagtaaatttcattcttggcgtgttaaatttttctaaatttcttaatattttactgaatgtcttaaataactacaaagtacacgacaatggaaaaaaaaaattctcaatattttttttaaataccgaaacaaatatggatgcatgaatacaccctttcaagagagtgcattaatttccaaatttatattctcttaaaattttaaaaatagtagtgactctaaaaccttccacctttttttttatggagtttccccttttattatgtacaaaaaccgaagaggaagaaaatttgacttgcttttttctattattatcaataataaaaaaaatcattaaatgaaaattatgtgtacacttctagaccaatgatctaataatctcattgctctaactaagtttgaagcatttccacacattttgtaacaaaaatgtttcaaaactgtcaatccattttaagagaatggttccccactttttacgaaaatcattattgataattttagtatcactaaaaacttgttctgtttacctatttaacaaccggtctctaacattctcttgcctagccttaagaccgtgacaacattaccatgttgtgagtaaaatcaaattcttttaagttggtctaatcggtccggtctggcaaggccaaacttgataacaggaccttggccacaataacattttaattaaaaaaaaaaactaacagagtgataccaacaacagaaaatatggtatcagcaactacaaaacttggcttcatttttctcatttcgtttttggttctgatcccaaccctgctagcccatataggcggttacgacgaggaatggcagaaacgagctgaagaatcaaagaaagctgcccttgaagcctatgaacctaacccagaacaagttactgaaaatttgaactatgaagttaacaagttagtgttatgttatgttttaaaagtgttatgttatgtttttaaagtgttatgttaaggtgtttttgtgtgaatgaattggcaggttgacagaggggtccaacagtacaagaagggaattgaagaagtactttggtccttgtttggctacaaaccccatcgacaggtgctggcgttgcaagaagcattgggccaataaccgaaaacgcttggctaaatgtgttcttggttttggtaggaaaaccacaggaggtaagagggggtcatactacattgtcactgacccctcagacaatgatgttcagagtccaaaacccgggactcttcgccacgctgtgatccaaaagaagccgttgtggatctttttcgcgcgcagcatgatcatcaggctgtctcaagagcttctaataacgagtgacaagaccatagacggtcgtggagccaatgtacacattgcttatggggctggaattacaattcaattcgctcaaaatgtgatcatccatgggcttcggatacatgacattgtgtcaagtaatgg

SEQ ID NO: 18814 - DNA, 7469 bp, Cannabis sativa
aatgtgatcatcctcatagtctaaattaacaccctcaaccttgttagacttagtaaacccaaaccttataactcttgtctattctattccttggtaaatgctcctttatcataataatgtccatatgctccatgttacgatatttaagacaaggacaaagaaccaatttaggatttttggcatacttctgacaaaagtccaaaaaatggtcaacaccttcactatactccgcttgataaatttatatgtgtagtaaataattagttaaattaattaaattaattaaattaattactacacatatatatattttattgaattttatgtattttagtgaaatttatcataattcgatctagcaaaatttcgacagcataacggatgtaattggacattcccgaaaattaaaaacatgaaaaaaaactaataaacacataaaacaatataataataacaaaataatattaacaatacaaaattatccacccatccgaccgcagtacatgaattcgtagaacctacatcactatggatgaatatttaagatattcaaactctactaacatgcatattccacccatccaaccgtagtacaattaatcacagaacctacttcactacgcatgaatatctaacatattcaaactccactaaacaaagaattataaagttttacagattatacatttctccaataaagatagctacaattgcgcaatctttaatcaacacaaagaacttgaaacctataaaatatttaaaatattaaattaaaagcttactcaaacaacatcacactaatacctaaacataattgaaataaacaatcgaaaatactttaatttttctaatatttttaaatattgaataaaaaagtttgaatagattaccaagtctagtatagcgtctcaagtttttttaaacggtatcaccacaaataaacacctacacaaaattaactatgcacaatgtaaaatgttatcaaatcaagctaattaaaattaaacttataataaacattttttccctaactatactaaacttataacataaccttaatacttatatgtagatttctacaattatatatttttactaataacaataaataattttatctaaactaaattaaaaaaattaatttatttttacaatagcaaaagctataaataaatcttttacctaaactaaatttttttttattttaaaaaatatttgttaatttttttttacattttaaattttttacaataaaaactagcatgaaaactcataaattttatttgaaccacatcaaatttttatagtacattaacaactaattttaaatttaacacattaaatatatatattcaactaacttttttttttttatatttctaacaaaaaaaatatatgtatctaaatatatatttaactatatatatatattcaattttataataaataataataaataaaaatatatatagataaataaataaataattatatgtaaaaaataaatatatataccaatcgtacgtgtgcgtgatttgagatggagttggaggcccgactgacctttgtagttgtggttgcgtgcgtctccgacggtgagagaagcggagatgtgtgggttgggttgaagtgtgttgggttcaaatgtgcggtcgcaggttgagttcggttgtggttgcgtgaggaccggttgacttttttgtgggttcgagtggggataggctggccggtggttgtgggtttgagtggggttaagccagccgtcaaagatgaattttctggttgtgggattaagcgcagctgctatatgtgtgtaatatgggcctttacccgacgatttaaaactatcaggtataatcccgtatatatatatatatattttcattcttcctaaaaaatgtcgcctaattttttaggcatagttataaaccatcgagaatattaatttttcctaacggttttaaatagttgcttaatttttttaacgagaatccccgaaaaatatcatttttgggaccgtcgcggattcattattttgtagttgtgaaaaaaaaagacgcactggagaacttatcctgggagcaatcttgcatatcccattatgtcggtgcaatccataagaccatgtctcaatactctagggaagagtggggaagcatctgaggtgtccctccaattgacttgtgcgggcagttatttcgctcctctatctgagtgtgtctccttttctttctccctgcttatcaatatatttatattgttatgttattattatttttatgttcttaacccctccctttgttttcctatcttcttcttgatggttgttgcatctcaagatgtgcttgcacagggcggagccttcagttcttcctccaactacaagacgcttttgggcgacttggaacctgtcaagataaatagagaccattttttctactctagtggactcccagacggcccatattcagtcattagaaggtgagctcaatgtggccaaggatgatcaaaggaatgtggcaaaggatctcgccaccaacagaaacctcaacgtagatttctcgttggagctgatcggggtcataggagagagagatgatgcgcttgcacaactactgaagaaaagaaggaggttttacgccagctcgggaatgcttgcaaatgtaagaagaagctttagagccaggtagctaggctccaatctcgcattcgggagttggggggagataagggagacccgccaggggtctgctactcatgacaacgagatcgtggatcaagccctttacaatgtgtggcgtgtaaaccccaatacagactttagcttttttggtcctgaaaccgtttaataggcgactgaatggaaggcttattttgatcaatctggcgaaggtttctctttatcttcttaattagttttattcgttcaaaactccttaggcatgttagggcgggttcctttattttacgatattgaataactgtatcaggcctatttactatgatttctccttctcccccctctttctttttttttttagactttatggggttttagcgacctaggacttttaagagagtgttagtcccctggactcattctaccttttcgttggctgctcctaccatatcctttgcttgtttattgttgaactctattagttgtgcttcatttgatgtttcatttttgataagggagcattcaagcaccctgtaatgtgctttttgttttccacctcttgttattatgatgattctgtgaactgaatcgaccttttgcatgtgtttattgtttatttccctacacacattttttgggttgtagtactttgatgagcgcattttttgtgtgcccttattgatgggaagagagaaaagcacagaaaatatgaaaaatatgataagtatgaacagcgtcattcctcggaccatagaggaagcacataaaggaaaaggaaagaagacatgattctgactaatataattgtaaagaaagaataaagcttttatatgcttcatatatgagattttttaggaccttattgttgttcaaaattgttaaggtgagttgtagtatctggccactctctgctggtacacggctaccttcatttgagactcctccctattttcctccaccaagtccaagctctctgctaatgcctcctcattccttactttctctaacttctagaccttgggatagtttatctgcatctcgacggggagtacagcctcgcacccaaaagccaaagagaatggggttttgtcgatcgtagtgcgggggtggttctataagcccacaacatatttaggagctcctcgacccatgcccttttgagtttttccagcttggtcttgaggttcttcttaatcacttcattggtgccttccacctggccattggtctgggggtgcaccacagtttctctttgtattcccctctcttcgcaatatgctcctagtaagtctctgaacggagtaccattatcaatgatgattttataaggaactccaaaccggtaaataataaacttgttgacgaaggtgactactagcttggcagttatgtgaactagtggttctgcctctcacttggtgtagtagtcaactgccacaatttcatacctcgcccctgctctactcgctggcagtgctcctactagatctatccctcacattgcaaagggccagagacttgtcaggctggcggatgccgaattggcatgtttgtggcacttatcgcactgtttggagaactccatggcatctttctctagggatggccaataatatccttactttagaattttgcgagacatagattgcccccttgcgtgatttccacattcttcctcatgtatggcagacaggacttgtcgtatttctccctagtcaatgcatcacaggagggggttgagaatcccctcttgtataacaatccattgaccattacgtaatgggtttccttatacactatcctcctagattctcttttgtctcctggtaacttatcttcatggatgtatttgaggtattgagccttccgagagtcctcgccagtcagctcacacactgctcctcctaattggttagtttttcgaggtactccacgggtatagattttaaggtgtcgatttcctttatggatgccaactttggcaatgcattggcgttggtattgttatcttttggtatcttctccacaatgtaatgctgcagccactccaagtaacttttcactttagccaaatgtgccatcatcttattccccttggcctagtgttctcccatgacgtggaataccaccagttgggaatcactaaagatatcaagcttggcaattttcaactcatttgccaaacacaagccagctaacaaagctttgtatttggcttcattaatggaatcttcgaacctgaatcgtaccgcacagtacttcttctgcccctaggtgtggttatcaccactcctgctttggctcctccgtcattcgatgccccatctacatgtaacttccacctttcctccctgtcttgagcgctttcgtccaatactccttgacatccttcttcgtcaggtcgataagtgaattcagccataaagtcgacaagtatttatccattgatcactgtctacggtacataagaaatgtcaaatttgttgagtttgattgtccacttcaaaaggcatcccaaagtgtgggcttgtgtaagacttggcataggggttgttggtcaacacaactatggggtgggcatgaaagtatggatttagtttcttggaggccatcacgagtgcataaaccaacttcttcattttagggtactgagtctcgatgtctaccaatcttttacttacataataaactagttattgatgccttccttcccccttttactaaggctatagtgagtgcgtgccttgacacactctaatagagaaacaacttttctcctttttctaggttttccaacagcggcggcttccctaaattttccttgagtttcttgaaggcctcttctcaatcctcactctagaaaaattgtttgtttcctcttaacacgttaaaaattggtagacatttctctatcaatcgcgagataaacatattaaggctaccaccctccccatgagacactacacttccttccaattctttggtgagtccatatctatccaggcttgtattttgtctaggttcacctttatccccctttcatggaccataaagcccaaaaatttacctgacgacaccccaaagatgcattttgtgggtttgagcttcatcctatacttcctcagggtggtgaagtttcatctaaatctttgatcaaatctcctactttcttagtcttcactagcatatcatcaacatgtacctccatattatgcccgatctagtcggcaaacatcttgttgacgaatttctaatatgtggccccatcagttttgagtccaaacgacatgaattgatagcagtaaagccctctatctatgatgaaggatgtgtgttccttgttgactgcgctcatggggatctggttgtataccgagtaagcatccatgaaatagcaactcatgcctcactgtggcatccaccacctgatcttttcgagggagcgggaagctgtctttcaggcatgctttattcaagttagtgaagtctacacaaactctccattttctatttggctttgagactatgatggggttcgatacctagattaggtaaaaggcttgttggatgaattggaataggtcaagcttgtccacttcttcttttagagctatgtaccttacagagtagagggcccaccattatttccttacaggtttttcctaagggtctacgctcaaatggtaagacataaatatgggacttagtcccactatatctttatgccccaagttaaagacatcaaccatctctttgaggtattgtcttaactcatgtttgagggcttcgtagagtcctcttccaatcttgaacaccttcagcgagtgtttcgatatcattaattcttcaattttttaatcgagttctccatggacttcctcctccaccctagggtccaagtctgcgtctaccctttgtagggagtattcttgctacgcacggccattactatggatgcgcggggctttgtggcaatcttaaggggcgtgttgtaacactcccttgcctctttctgctctctttttactgtcgcgactccaccaagagttgggaacttgatgtctaggtgataagttgacatgaagaccttcaagcggtagagcgatggccttccaagtaccacattgaaggctattaggcattccaccaagatgaacgtggccattaccattacctacagtggttgttctcccatagtgagcaagagtgtaatcatccctaagggatggatcgaatccctggtgaacccgtatatgggtgtcgtgcattgcttcaaatccttcaaacttaaccccatttgttctagtgcactttggcagaggatattgactaaacttccattgtctacaaacacccagcggactcttgcgttgccgactgtatttccaatacaagtggatcattgtgaggaaagcggtccctcacacatttttctcaatgaatgtcacagagtaaatctcctctttagagttcttcaggggcctttgttctatgctcatgatcattaggggttgtctcgcctcccttgtgtatctgttcgttcccttacgggtgtctcctcctactcttggtcctccaaagattgttctaatgtcccttaatacctctagggcctcgtttggggttctctgccttcgatcttcttgacaaactcctcgggctgcctatctaccctatgatatcctcccaggtatcccctttgtattaagtcctcaatttccattttaagatgagagcattcttctgtagtgtgcccgatatctctatggaatttgtagaacttattagg

SEQ ID NO: 18815 - DNA, 4921 bp, Cannabis sativa
ttagagaaattataactaagattttcttatatgagtgatatgtacattgttgttttggtatacactcgacctgttttctaaaaatttagaatagtttatagtgtcaaaaacacaaggttgaaacattcaaatgcacaaatgcaaaaaagaaacaagcatgtgtgcaactggatgtgaactatcttgttgcaaaaagaaacaagcacgtgtgtgactggatcattgaactatgttttcgatatcataaattattcagaatttttcaaaaaggatgaatttttttttaaaaaagtggtgtccctactataattttgtcatatatatttgtttgttaatgtgcatgagtttgaggtgaataaagttagtctttagttgaattgagtgatgctatgatatgatatattcttgatgtgaatttaggttggtttgcactgcattgtacaatgatggtgatggtgagcgtaaatatcttccccagttcttcaaattcatcgttgctaatcctttgtcagttaggactaaggtatttgttcaaatctaatttccttttttgttgatattactctccttttttttgtctgtgaatgaatgtagttagtgaatttgatgttatgttgtttaatttctgttttctgcaggtccgtgttgttaaggtatgacaaagttgatcaattgttcttctggttgtaagttttatcaattcttttatgagcaattttaacaattataggagcactctataggtgtagtagctgaaatggtcaggctcatatggtctccgagtttcgagaccctctttcgatacctactttggaattgtttaggcggggagttgctctagaggtagctcgctcaaatggttggttggacatgtggtttgaagttcgagtccaaagtgggtaccaatatagaaattgctatagctttttttgttctagatgaggaatcagaacttttttggggtagctaaaatggttaggctcataaggtctccgagattgaccccctcttggatacctacattgcaattgttatagtatattggtctccaaatattgtaatagtttagcaagaagttgcgctagccactagtcttcttagtatagtgagttaaaaccacccaagaagcacctaagaggtagctcaaatggttggacatgtggtctgaaattcgagttcaaagtcggtacctatatagaaattgctatagttgttttgtcctagatgaggaatcgagtttttagcatatatttgatacattttgcctatatttgtattttctttttacttcattgctgtaagaaatgtttttttctgtgtcaaattatttcttatacaagtgataatcgaattaatctcgtaggaagctacatttttggaagcttgtattgaaaaccatacaaaatcaaaccttttcatggatcaagttgagtttgaaccagctccgaattggactgccaaaatactaatggcagacgagcaccccattgagagtaattctcaagcaaggtcagtcagtgtattttgaattcgggtattatttatgattcaatatactttcttccctttggttgacgaatttaatgatttttttcagcgaaataattaagacaccagttcttgtcaaatctggaggaggaatctataactatctttatcagttaaaacagtcatctactgattctgcacagattaaagttgagggaagtaatgttcttggtaagcttcagataacatggcgaactaatctgggcgaacctggtcgactacaaacccagcaaattttgggcagcgtaagtgttttgctcccattttagaggaacatacatttcttttttcagaaaatcttaataattggggtgaaagtaaaaactgaaaaaccgaaaccgatcaggctgtaaccgaatttttggtttcacgtcgtcaccgaatttggttgtcggtttcggttacggttttttgaaaaaagaaaattggctaaaccaccaaaaactgaaaaacatacagtcagtttcgaacggttataatttctcaacggtcagttacagttttcataaaataacaaccgcaactgaccagtcgattataaaattggtaaaaacctaccgaatatcactcctacttaatactttatgtcatgtagtgtgataatataagtaactaaaagacattgtttaggttgaagataacaacccaaggataaggaatagtttcttttacttgtgggtgggaaaaaaatcatggggttttctcaattttaatagataatgttaagctattgatccaattcagttcttgaaagaattagagaataggtattttattgacatcaaagaaagaattacaaagtttcaaacttttcgagacagtttagtatttccctagagtaatcttttcctcaataatcacacaaaattccacaccactctattcttagcgcaatgccataatttccacttgcatgaaaatcaaaatcaaagtttacttattttgtttgttcatatactctttctgtaggctataacacacaaggagatcgaattccaagttgtcgaagttccatctgttgtcatcttggaaagaccctttttggtaaattttcttttactcgatgaaactcgaagttagtctatggagaaatataatgttcgaactgagctaaaaattacttgttgcagctacatttgcatctgactaaccaaacagataaagaacttgggccatttgaagtttggctatcacaagatggtttggacgccgatcgagtcattgtgtttaacggtcttcaaaaagtggtaagcttttatctttgtagaaagttttcatcataaggaattttccatatcgagttttattgatctcaatcctatacaacaggttttaccgagacttaaaccgcttgcttcttcaactttttctctggtatgaaaccatgatcaacttcattattttgatttttgttttccaatacatttatcaattaacttttcagtttctgttttgtttttcagaacctcattgctactaaactcggagttcagaaaattactgggattacattattcgacgcaatagaaaagaaatcttatgaccctttacaagacttagaggtcacttttctgtgttcaatgaccattcattccattacactgaaatttcatcttataacaaatctgattacctttcttgattcattgcagatttttgtcgatttggactaattttcgagtagattcatctgcctcggcctgcatagttggcgctcgggactgagctatcaatggagccaaatattttcttgctttgctgcttgcttatgagctttgatgagtataaatctattccctacactcaactcaaattctgtgtttttttcaatcattttcaattagaagggtaatttggtcattttttcatgtccattactttagagctaatacatagttttataataactgattaaattaaacaagcttgtaaattattattatataaaatagtttttttttttttttcttttacaatcttgtaaacatttatttactttattagtattatttctcctatttaaaatgctttatttcaacataacttaatcaatctttcttaactttatattgcttcaaataaggaaaatgtatctattatttcttatgctttgcttaaacttttatttatttattatataaacataaatcaatctatcttaaccttttttttaatggaaaatctatcttaactttataatgcttcaaataaggaaaatgtatctattgtttcttatgctttgcttaaagttcaatgaaaaagttaaaacttttttttattttaccaatttgaatttttatattagcaaaatagtccttgaatttataacttgtagataactaaaactaaaagatttaaattgtgtatatattattcaacttagataaatgttaaaaaataacaatagtgcttagtacttatttcggtgttatactaattaattgaatattggatcttatatcatttaaaaaaataatttttaaaaaacatcactaactaatcgtaaaactttaattataaatggtgttgaatgcttttcaatttaatattttgccaagtggccaactttccaaaatttcaaaggggaatttgatctattgatttatttaaaaaaaaaagaaataagacaaagccattctttcattcatgatggataatggaatttatacaacaagttaaaagaaacaaaagaagaagaaataaaattaaaagaaaaaaaaaatacatagaagggattgaagctttttttgtgtttataataaaaaaaatagctcaaaaccttctatgcattaacaaaaacagataaagaaagtgaaaaaacaaatcaatgaggttatttatattttttccttcttgattagtagtagtaagagtatctaagcttgtgaaccccaagtagcccaattggcttcactgccgacacgtggcatagcctgaacccttgattgagaatcaaccttgaaattggccccacacatgactccttcactatcaattctaggcaatgctttcatcttctttgttgggtgctcaaagcttgtcaaaccatgtttactgtgaaacatacaccctgcaataatcaccaccaccaacaacaacaacaaccattaatcctatttattatgactcaaaatgattatgaaaatgacaccccaccaatctatatttacacattacacacactattattggctttttatgaaagaaaatttgtttgagcttgagaggtatcttatcattacatggaactattattggtatcttttgatttaataaaaaatatgagaaactgctaattaattatagtgccaaattggtatggggttgaataccttaaaatatcaaatagcaatattgttacattatacaactt

SEQ ID NO: 18816 - DNA, 5743 bp, Cannabis sativa
  modified_base (663)..(669): a, c, t, g, unknown or other
aaaaaaaaaaaaaacagaatttgaatcatagtaaaaacttacaaacattgtaatttttcacttaattagttttttttttttctttaatgcttgtttaagaaagaatttccaatcatccatttgaaattgttttctttcaatgttttgaatttggcaagaaaaattgaaagtaatatagatatgaatattagcttgggtggttgtcttgtctaagcatattaagagaattttttttaatgttatcatttgacatcttgataatattatcctcacttgttttctaggctttaaagttttgacttttgagtggggaaattctaattggtttattaatgaggttatgttttgttggtggaggaaaagaaactatactttttctttagatttgtataaatatgtgagaaaagtgaatcaaaataaaaaagggttgatttgataccttttattgtttagatttgaaaaaactatgtaagaaaagtgaatcaaaatagaaaagttaattttgataaatttgagtggtgactaatataagaaaattttatgatgcacgtgtaatataataatttatgtaattttaaagggaatatttcataaatatatacaaataacaaaaaaaaaattataaaaatatagttgtctaaaattttaaatatttttataatnnnnnnnattttatttacaaaaaatacaatctttttataccttttatgttaatataaattatgtgatagacttaagtagaaagtgtagaaagtgtaagtatattagataacctactcacaaaagtaagtatattttaatgatatataatataaaagtatttttaattaatagatattaaaaatagataagttaaaaaatacctctttttttatttattaatcaaaaatattcttatattatattttattaaaatataccaatttttttaagtgggttgtctaatatatcttcatttacattaatttaaaaggtataatgaggacatcatctataaaattgggtatatcttaaaggatataaaaatgaaggtaaaaattagaacaaataaaataaagttggtatataatgtaatttctaccctcaacttattcccaattctttcagtaatttgggcccaaaatcattataaagggctgactctaaggcccaaaatcaaatttagaggaatgagccccatgtagtcattctcatcactctcgagtctccattgttttcaaattgtggagcttggattctaggaagccagttctgcaaaggtatgcaaaaaaatctctacttttttttttgaatgataagaatgaaagtggtttgatttagatagagatcacacaagtaagcagaaaaattctcaatttcaatgggaaatgcaacaattcaaaatcaatgtttggattctaaaaaaagataagatagaacttgaaatgttggttttcatttgattacaagtgttcttcgttagtctcctgattttttttggaattgggttcttgcagagtgtttcttcacttaggattaggaaagaatgttaatttggaattttgagtgtttttccatgttcttattttatttattcggaattaatataacccatttggaagaacactaggctgattagaccaatacttagaaagaaaattagggtgtttaagaagtggttgttttcttcatctattttttttggcatatagtcctgaaggtgtgtttctattgcaattgggttcttgcagaatccttacatatctactgtgactcaaatttaattcatggttttaatttcgacccaatttcaattgattctttacttgatttgggcatttttttttatcaactgtaatgcttggatttcagtagaagataacaacttgaattttgggcttttttttgatttgaagtgtgtttttttgttagtctcctgattttttttttgcaattggtgtttttgcagaatccttacatatctactgtgactcaaatttagctaatggttttcatttcaacccaatttcaattgattctttacttgatttgggcattttttttaatcaactgtaatgcttggatttcagtaaaagataacaacttgaattctgggctttcttttgatttaaagtgttttttgttggtctcctgattgttttttgcaattggggtttttgcagaatctttagattcttggacattgttcatggctttaatttcaaccacccccacatacccatttccatcatcatcgaggttaaattgtcgactgcctacaatactcgccgctcaatttcaagaatccacacccaaacctgaacccgatcccaaacccgaatcactacctctaccttcttttaaaagctccataaccactcagccaagccgaggtagaatactgaatattgataagcttaaagagcaggaagctaaggagaggaaggaggaggtgaacaggaagatagcttcgaggaaagccatttcggtgatactgagaagggaggcaactaaggcggttatagagaagaagagtggccctaaacaatccaagagacttcttcccagaactgtacttgagtcccttcatgagagaatttctgctttgcgttgggaatcagctcttaaggttttcattctcttttcatcttttttagtttttatccatgaagattttagtttctcttagatgatgagtttgctgattttgttaattttatggatatagtctgtgaaagtaggattcttggtctgtcatggctactttatatataattttagttttgggtaagattttttttgtgcataatattaagagaagtttatggagcataacaatatgttggcaaataataaaagtttgaaacaatggcaaaccaatatcactggtttgaaacggtttttctttatttttggacaatgagtttcgatgtattgggggtattcctatttacagaagctttagtaatacggatcatcatgactcttgaagtcatgtgcagtgccaataccataccaaatacgacgagtagcaggatcttgagctaagctttggctaactctttgaaattgtaattgccataatgccacctttatagcgtttgttttgttttaaaaactttgtaatgcctttacaacatccattctcatttccattacaaaactgagaaacatcctaataccatttctagtacattctattggtggcgtttggtttagggtaataaaatagtaatggtaatggattgtaataagaatagttgtgcaaatatgagattgagtagtgtattaataaaaatatccttactttaagttattttggtgatagaatagtataagttgaggttgaaagagtacataggtgtagaatcatatgaatggtataatggtgattacattgtaaatatattacaattttttcataaccaaaccaaacaatagaattgtaatggtaattccaatacgattacgattttgccaaaccaaacatgacttaactttaccattaccattctcattacattacgcagagccaaaacacttaagctccttaacaataacaatgttttgctgccctctaatgattactgaatgtaatgttgggtctaggtgtttgaactactacgccagcagctatggtataagccaaactctagtgtgtacatcaagctgattgtcatgcttgggaaatgcaagcaacccgaaaaggcccatgaactctttcaagctatgattgatgaaggttgttctgtcaaccatgaatcctatactgctcttttatctgcatatagcaggagcggtcgctttgatgaagcgttttccctcttggagcagatgaagaatactcgagagtttcaacctgatgtccaaacttattcagttctaatcaaatcatgccttaatgtttatgcctatgataaagttgaggctcttctttctgatatggcagctcaagggatcaaaccgaatattgttacatacaataccctcattgacgcctatgggaaagcaagaaagtaagttgtcaacgtattcttctcattatgagttatctaatcccattaataactatgatcttagatgttgtttcccgttaaagatatgcagagatggaatctatactagtcgagatgcttcaagaagaggaatgcgaacctgatgtttggacaatgaattcaacgctgagagcctttggtggaagcaagcaagtagaaatgatggaaaagtgttacgaaaagtttcagaaagctgggatcgaaccaaacattaaaaccttcaacatcctcttggattcttatggcaaagccggaaagtatgagaaaatgagtgctgtgatggagtacatgcaaaaataccattactcatggacaatagttacatataatgtggttatagatgcatttgggagagctggggatctaaaacaaatggagtacttatttaggctaatgcgttcagagaggatcaaaccgagttgtgtcacgctatgttccctcgtgagggcttatgctcaagagggcaaggctgaaaagattggtagtgttttgcgctacatcgaaaattcagatgtaacattggatacaattttcttcaactccttagtcgatgcttatggcaagttgggatgttttaaagagatgaaggaggtgttgacaatgatggagcagaaaggatgtaagcctgataaggtaacatacaaaaccatgatcaaagcttattcgttgaatggaatgagtagtcaagcggcggagcttcgtggctttatcgtgtcagcagaaggaagaaaactaactataatgcaaaaggagaaacctgacttttgattttgaagaaatttcaggttattgtatatcccttaaagctctgtacattatcatttcatatagtagtttcattctttcatgtaaatactcttgaagggttatgattcatttagtacaaatagggaaattttctgtgttttatgtaccttaaaatgtcatgtgtgctttatatgagatacccaataatcaatatgacttttatttgttattaatactctgaggagaaacagaataaactgtcgagttagaatagtgttcttattgatgaattgaataaaggaggtaattacaaagtaaattaggacagtataagtatgtgtatatcttataatcctctacaagttcattgagctggttcaaatttgtaagagggtgtaatacaataccactaagttataactatgacaataactaattaaattcaacatttgaactgacatatatccctccaaagataacacaataatattggtttacatgaaaataaaattataggaaattttacaatgctactctttaaagggagaccacttatcattttagcatgtgggaaattttttcacacattgtaaaattttgagaaattaaaaaaaatttaagactgaaaaaaaagtttaaataatctattttacacgcatataaaataaaaagactctcgtgtgcaacaaattgcttgaattttgattttagttatgaatttatcaaaattttataagatattttaaataattacaacaaaattaaactaaaaaattcttcaaaatgcaaggagccgtaaattataattgaatagaaaataaaggatatttcttggggtaagttgaaaaataccacttctattaagcaattgatcaagtttatctctaattttatatttaattgaaatatatctctttttatatgtattatacctaaaataccctgacataagagagtcacat

SEQ ID NO: 18817 - DNA, 6148 bp, Cannabis sativa
ccataatcttcattccttaaatgtctacttcaataagaattagccaattagtcactttctcttttatgctttgtgctttctgatttcattgggattcatcttttttcttagcacaaggaccttctcttatgtaaatcctctacttgggttacaacagatttcaagtgctttaacataatataatatttactaccatggaagaagttctgaccatattgtctcatttcaggggtgttcacagaacttatacaacaaatgcaagttaaaggtgtacaggtaagctttcatttaccctcagtcaatttaatcgacaatatcaattttaatatatgctttgcataattatactctctcagttatttcaatgttaattgaacccatatgtttaccttttcagtttttatttttcaatgaaaacctgtttaatgcaatgcacatcactccacttatttaattacctattgtgaaatcttaattatattctctatctataacacattttcatttttttcacaagtaggcttaggtttgacaatatgagagtccaaaagaaatttacaattccataattcattttgctgttaaacttctatataatgtaattaatcagtatcagattatattctagtatgacccataaatgttaatttatctttcacagtatgcaatgttttccaagggttgtaatgcttattactctatatttctcatgttctatttatattcatatgtttgtcccatgtatatgtatagtgtttttattattatctttctttaatcaatgtatctagcaactttgtagttaccaacttcagttgatcaaagaaagttggctctataaattagaagttctgttgagaactaaaatgtacactgtagaacttttttcctcctgagtaacaaaatggttcagttcttgttgttgttgctgttgtttatgtggatttctcattgttgttacacttgcatggcaaaatatgatgtcttggcatgtttttgcaggttgaggagttatattcattggacttcgattctctaaaagatctgtggtgagctgcttttctagttctttgaattttttttttttttaaattataagcagatatagttgtccatattctcatggtaaacaatgccccacgtatatgctatttatagtaccacctatgttttttctcccttgtggatttacaggcctgtatatgggttgattttcttattcaaatggcgtccaggggaatatgattaccgacgtgttattgaagatccaaaccccaacctgtttttcgcaagccaggtaagttgcctcgacaattggcttgctgtattgaagaagtatgtactaagcttcgttttatctacattgtcttgtcttcatggtgtcattttaggttatcaataatgcttgtgcaacccaggcaatattgtccatactgttgaactgttctgatattgacattggccccgaactatcgaaattaaaagatttcacaaagacttttcctcctgaactcaaaggtttggccataaataacagtgaaaccatacgtctggcgcataatagctttgctcgacctgagcctttcattcccgaggagcagaaggcagcggaaaaagacgatgatgtgttccatttcataagctatttgcctgtcgatggcgtgctgtatgagcttgatggattgaaggagggacccattagtcttggacagtgctcgggtggcaaggattggttgcaaaagttgcaaccggtgatccaggaacgcattgagaaatactcccagagtgagattagattcaatttaatggcagttatcaagaacagaaaagagacttatactattgagctgaaggagctgcagaggaggagggagggtattttgcagcagttgaacgcagcacgggtggaaagaccgatagacgttagcaaatttgaacttctgaacaaatctctttcagaagtaaattcagggattgaggctgctactgacaagattgtgatggaggaggagaagttcaagaattggagaaccgaaaatattcgaaggaaacacaactacataccgtttttgttcaactttctcaagattcttgctgagaagaagcagttgaaaccacttattgagaaagcaaagcacaaggctggaggtactagcactaggtaataaaggcatagattgttaattgtattggttatctttttgaaaaagaggtttgtgggtttttttttcttttctttttttcttctttctcacttactaaggcatatattgagtgaattaaaggtgttaactgtactggtttatctgttcttgtaagagtttcatggatcttttaacataccaggcaataaatattgagtgaacttgaggtgatatactttaatcttctttgtttgcattctttagccaatacctaggaataggcatggttctcgaattcggtgtcgatagtcagattaatttggaccgttcggttacgatttcagaaaaaatgcaggtttgtgggtgtgtgagagagatagaggggaatatggtatatcaataaattgataaatttatacaccaaaatagattctttttcttacaatcaaagagtgtcaaatgaattatttattcatatcaaccaaaggaaaaaaaaaaactcttaaagagtgtggccccatatgaatatcctcctaatcccatagattattataaaaacttcattgcaatatctgcataattcaaaataagatataataagcttttagttttgtcagagaatctcaatgaattagaagcttaaaggagaaaacaaaataccatatatgtctccttctctcttgtaacccaagcattgtattttgctctgatgctaatttccaattccttttcatggccagatttatcccattctgatcttgatatttccaaatcaaacaaaaaaaatttgagcaagactaggagggacaaggcaacaaacaaaacccaccaaagagattgtacaaatacaatgatgttggtttacaagagatttgtgctataggatgctttacctttgttagagtagcaattttttgtggctaggaagccctcgccatccgccaataaataacggtatgcactctcgccaccccaatcttttgatggtttttcttcaactttgactatctttaccaaagcctggtaaatacaaagtaaaatcagctaaacatactttaaaacttgcaggtaactagcagactttttagaaaagaatggctataagaacttaagtaatgactataaattggaattcaatcagcacccagcagaaaggcaacatttgaatactaaaagaagttaacattgagtaccatggagttgcacaatatatttatgagagagtgcctactgcagatgcagcaagctagatactcaagatgagtgtcaaatacctgttttctcaaagttattatacatataaagaaaaaaaaaaaagcattaccttttctagtttcatttcccaatatgaattcaaaagcttcaataagcataaaactctacagttccccctatagatcgtatcatcacatatgaacaggacacaaaacagttcaatttctgcaatttcaaaattgtgttgtaatgataggcaaggacttccctgatctctattttactttgcataaagaaagaaaactgcatcattggaaaaagcaaaatttgtctaacagaaagaaaaatagtatagtaagcagttcaaactacggcattatattccgagataagcatagagaactaacatttcaagaagttgctgcttcatcacagtaattccttgctccacatttgatatggaacaaggaaaaataacagtaagattttcatgctgatggagtagcaggaactatactgaaccagtagcctccatccagtcctgagagagagttaaaattaattgttggtttttcatctcatgagtgaaatccagctacatccaggagattttcgtatgcccttttcaatcatcatcgttctcactctctcagcatcatcccacttattcattgctgcatatatacttgccaaaagcacataagtttctgtattctcaggctctatttcgaacagatgtatggctgcaatcttggctaatacttcatcaccatgaaccttacaagatgccaacaaagaactccatatctttgcatcagaggcattcccgtttctcttaatgaaagtgtatgcctttccaagtagcccagcccttccaagaagatcaatgatgcaagcatagtgctcattcaacggtttgatgcgataaacccgagtcatgagctcaaaatatcgacacccatcttcaactaggcctgcaaaactacatgcattaagcactcctatgaatgtaacctggtttggtgttatgtcatccttttgcatctttgagaaaagttgcaaagctcttttggcttttccatggtcaccgagggcggtgatcaatgcagtgtaggagacgacatctttttcgttcattctattaaattctttcactgcctcatccaagttaccacattttgagtgcaaatggatcaaggcattggacacataaagtgatctacctaaaaagtatttttacaaaaaacaagatatcaaaaccacaattttagaacataaaacaaatcaacaaagatgacaaaacaataacaatagtacaacaatagagagaaaaaacctacaacaacacccttggtccacatggttaactaaggtggctgccgtatcagtatccacaagttgtgtacaagctgagatagctcccaccattgccacttcattgattatcacattttgttttctcatttccttatacatgtcaatggcttcctttgcataaccattctgagcatagcaagctaccattgctgcccaagaagatgcatcatgctttggtatctcatcgaaaactcttcgagcttccataacattaccacacttaccataccctgcaaccattgctacccaagtgattaaattcttctcctccatttcatcatacaactctttcgcagcttccatatcaccacaattcgcataccctgcaaccatagtagtccaagatacaacatttcgccgccccatgttacaaaacaacagcctagcctcctccatcatacacttcttagtataaccacaaatcatggctgtccaagcaatcacatctctatcaaccatcctatcgaaaacatctctagcctccctaacaaacccacatttcgcatacatgtcaagaagcgcagtctgcacaactttgttccccaaaaaaccagtttgtacaaccttggcattgatttctctaccttccaatattgctggaaagcgagcacaagcattgagcaccgaagagaaagtaaacccggatggtgaaacgccctttcgttgcatttgagcatacaaaacaaaagattccttgaacttatcaagtaccacattgtaacgtattagagagctccaaataaactcatttctacagttgggtatttcatcaaacaggttgagggcataacgtagagtgtcagcagtaacagcaggaggggattggagaagaagcagctgagagagtaatcgaggcagtaaaagatggtaactgagaggatgatgatgagagtgagtagtggagaatttgagtagtagagtgtgagtttgtttcaagtggagaagagtgcgtaagtaatgattatggtggtgaagtgatgatgataataagtggcacagttgctggggaacactagaaccagagcatggaaacttcattgaccatgaagatgaagaatgagacaaggtcttttggttatgagaaagaaatgacttttgactttgactggttgtcttttcctatgtaagaagagtttcttcaatggattcttttttcacttgctaagcaatattgagtgaatataaggtggtacttcaattctttttgtgtttttatttttttaaaaaataataataaaataataaaatagtaactttattgaaatttagcccaaagtagagtagggcttgaaaatttgtcggagcattgtgttcaaaaatgctataatcagataaatatggcgagtgtctagctacatagtaaagtactcagtttgttaaatttttatatattttgtaatgaaaatgtaaag

SEQ ID NO: 18818 - DNA, 5095 bp, Cannabis sativa
cccctcgctacaatgtgggtccgcctatggctacatacatgttactattaatgtatttgacaaatacttgtctctaaatttttaaattttccgtaatatttgcttttcagttaataaatcctcctttgaagaaaaatataataaaagactcatatttatatacaaattaaaatatataaaacaagaaaaaattaagatgtttacaaaagaaaaaaaaaacctaagtgtatcaaatggttacattttaatacctaattcctttttagaatggaattggtatttagttaaagtttgactatgagtcatctacttttatttttcatgaaggttgaaagtacaaatgtccaccattgtcattgtaagacgtcacattcttaaaatctagattattaattaatagttagttaggtcaattgtttaacactttcctcacatttggcttaattaattataataattacacatagtttatatattaactttttacaaacgtgtttggttagaagatcattattgcagttgatcaccaacttcgtatttatgttataagaagctatacttgtaagctacgtacgcattgtgttttcataattttgctttcacactatatatataatgtgtttctatatatagttagggcatacttagtaagaaaataaaatgttttacatgtcacattttattaaagcaaatttattataggtgtgaatctataataataataataatttttgctttttaaattttaacatgtatacactgataatttttttggccgttaaaattcattctaaattattaagattattagatttaaagacttttattcaattttatttaattttactaatttattgattgttcatatattaaattatactcctcaaactttgatatctaccaaatattctttcttaaacttttacatatatcaattttattacaccctactattaagcttacccattttattcatttaaaacatcaatttttataaactcactccgcttaatttaccaaataaatcctatttataaactcaaattttatatttttcagtgtttaatatataaaataataaaagttagatgatcttcttgtgagttgccactatccaattttttctataaatagattatatatgttcatcgtatgtataactatttcttttttttcttttatcttttttagattaagtactaccttccacaacaaaatttccaatcttccacacagaaaaggatcgtcacgagaactaaattttgtccggtaaacaacggaactccggcccgtggtttagtaaaagagagggaaaattttatcttcatcaagaataatatcatttataatatataaattaaatctataattgtaaaagatatataaattatatatttatataatgcatatataatgcactacatagcatcaacaaagaaaaaaaaatgtcgagaaacatgtatgtgttagatgtttagagtaaatagaaagtaagagtatagattagggtgtagttatgaaagtaatttttcaaaattaaatcaaaaaattaaaaattggtataatgagcttcttgtacaaagataataatgtaattaaaatgtatttgacaaaaataatgtatttataaaaatgagggttaaatataactcgagccatattcaccaaatcacttgtgcctgtgcatctagtgacttctaattaagtcttattcattgtttgttacaatgaatttatgagaggttatttattagaagaggtaaagagttttgcatttagggaaagagagaaaatcccatcaaaaagtcgttagtatatagatagataaaaccaagaagaaggtacttacttaagaattgatgacaccctttgaaaaatgtgtgtgcctagctacattacatgactattttgactaaagtagagttttaatttcaaccatcttagacttttggtttggttgggacaaatgggctctacctacccacttcaaaattagagtacatcttactttttaccaatcctcatcttcaattaaatttatacagttctaactaattggtacatagtaataaattaataactccttaaatttatcacttaattgagactcaatttgtcactcaatggaatttgttttgtgtcttatattttcttgagctattatgatatactacatatgaaaattagtaaataattaatagtttaattattaattattaataataggtcttattattataaacatacatttgtgttataatttttcaattacggaatgttaataaatctatatgtgctataaatgtaatatataaaatttaatatttttatgtttttattttcggtaagagtgaaaactcactgaattttgaggttatgttcgtaactttttaatttcttaggaaataaattaaggtcaatttaataatttttccctaaaattaccataattcttttatagttatctttacatagatttatgtagataaacctcaattaaggaaaaaaggataaacctttctctcctattatctctctctctctgcatttaacctaaaccaagagggaaattagatattctcttccattttcttgatgaaattgaaggttttgaagctgctaagttaagggaaggttgtagaaaacttaagataaccattttctttaaatttcctctttatttttgttaaattagaggagctgattaattgcatgttttaaggtttcaattcatttagaattgatggaagtttgcaactgctcaagtttgggttgcctgtttatagccagttttagttacctcattttttatgttttcttaatatttagggtattgccatcttatttatcgataggaagattttagattatgaatttaagatttgaaaagtgttttagcgagacacttatcagtttaccgttaatgtgacttaggcctctgatcgtcgagcaattttttcattcaggatgaccgacacacttaattttgaaattcaagtaagattagtattcagaggcacatatgcacatattttagatatacatactttatgataacatttacctagtatactaaagataacagtatagatgtacatttagttgcatttagatactgatatctagtgatactagaagatattggatagtatatattcctaactagattaacatatcaaaaataacagtatcgtatacatagatttgccctggaatattgacaaataaacattaggcaatgtagaaaaaagtacatattaatgctaccaacactagtacgactaaagtattgtgtgcagtttggtattatagttaattgtactcatttaagaatgttcgagccccaattattcctgttggatgtgtgtagcagtaattgggtgtattgacacctaattataagtcagatatatgttatatgttttatgcttttcttattgagtctatcaactcacatttatgtttctatgtatagttaaagggaaggctaaaactgagcatccgtgagtgatgagcttggtgaagattgtacatctagacgattatacatgtagggttgcaatcttcatcgagacagcacatgcttagttttggttgtcgctaggcgatacttttcatattatgtattttatgtatgttttgaaaatagatttcgaaatctcaaattgtgaatattttgtaattatgatatatgtttagtaaagttttatttattatgaaaattttattaactgtttttctatattaaaatcctttaattagcaaatgttaacacactaattaagaaatcaccgttatgtgccttagttagtaagccgttacaactattcatctctatttttttttaactttcatcaatttttgacagtagattcatagcatacaatatcataatttgtcaaaatcttgttcgtcactatgagaggaataatgttcgaccaaattgtatgattaagctagacttacagatagcttatgatgaagttgaatgaggattcattgatgagatgcttgaagcgtttcaattcctggaatcaatttagaagattattatgagttgtgtttcaaccctgatgtttactcatcttcttaatggttcaactcatggttactttgcatcaaagcgggggttaaaacaaggcgatcacgtgtctccacttttgtttttacttggtgtggaatatctgtcaagaattatgaagaagattagattgaagtaagatttttattttcatgagagatgtaaagagcaccaaacttaatcacttttactttgcaaatgatgttctcttgaatggtgatttcagatcaatctacctcatctttcaaggtttgaaactcttctctcaaacttctcatttatttcctactaagccaaatttgctgtttattatattgtgggatgggggaccatgacgtccaaacaattgttgatgtttctagtttcagtcacaacaatatgccttttcgatactttggtattccaatttgtgccaaacgcatttcgtttgtttactgtgaaatcttactagagaaaatgactcaaaaaatctgtgtttggagcactagaaatatttcctatgctggtagactagcccattagtttagtgttaatttctgtacactctaattggtctcaaatcatagttttaacaagaaaaattttaaagtgagtaaatgccatttgtagagccttcctttgaaattgttctaatgtttttcaaggctcagaggtagttgcatgggacaaaacttgccccccaaaaaagcaaggtggtttgagctttcgtcaaattctctgttatatataacacaatagtgttggagaagtatgtgtgggctattacttttaaacaagataatctttggattaaatgggttcacaatgtatactcacataatacttattagaatttgctacacatttctacacaatttagtctagaattctcatgcattatactgcttgcaacaagctatggcggacaatatttttccacgaattatgagagcagcaacagcaaaagaagcatgggacacgctgtaggaggagttccaaggaaccgtcaaggtacgcacagttagactacaaaag

SEQ ID NO: 18819 - DNA, 3171 bp, Cannabis sativa
atcagatactccttgtaagaggtattgaggtaccaaccaccagacactcatgggaacggttgcacccggagaatcaactagactgtagtcttgagcagttttgagccttttgatctcaacgagagctgcaataaccatggagagaacagataaaaacataccagttcctattctctgtagcattgttataccagatggtctaccggtaaaagctcttgcaactggaacaataacacggtcataaatggggatgaagaaaaaaatggcaagagaaacgatggattgtagtgaagcaggtggtatgtcaaatcctggcactatggttctctgcattgtagccccttgcttggtgaagaaggtaggcacctgtgcaaatacgatgccatacaccaagcatgttccccatattggaacaagtcgaagcacagcctttgcttcttcaacatcaacgacacttgatgcttttccatcttggatcaagccatctggtgttagcaatgctttgttaagaaacctaacaaatccatgagagaatagttgatcagatagacaagtaattttagattaaaataaaattgtgtaaataaaaaaaaaaacaaggtaaggtagcagatactttggcagttaaaataaaggaaaggaattcattcagctagatatcaagtaaaagagcacaaagcaactattatattgcatagtcaacaaagttcaaacgttaaggtgtaaggtgactcagcatattatataggtattcatgcatctacaacatcaaaatggtttaggaacccaaatatacagcatcaaaataaattaggaacccaaaaaaaatgatatgtgcatcattgaattaatcaccaataacaagatctataacattagtaataacgtagataatcttaagaaatttgattttattggagatttctactttatattaaaaattttaagagcaccggttcacaaagaaaatccaaaaggcacgggaatgagctttcatattaattaatgatgctttagtatcacctttttcttttcacttgacataaatcagaaaacaaattctcttacttgaattgttcatagctttggtgatgcaagttttcctgaaaatcctctttagcaacttctggtaagggggatgttcgacggtttgagaatgctgctataaacaccctaccaatacgaaaaaatggatttttctcatccctcattacagcatacctatatgttttagttccaagcaaaaatacaaacagcccaagaaccattgcaatacaggggattccaaaccccaaagcccaactgatgttttcttgtatatagcttacaatcaatactgtagctaatgaacccccacatataccaaaataccaccagttaaagaatgagcttctggctttgcactcctgtggatcttgtccatcaaactgatcagctccaaaggcctgaacacagggcttgtgtccactctgcgcaattgctactagatacagtgagaaaaagaataggattaattggatctgagaaggcaaacatggcaacgttttgttggtttggcagccagaagcaccagcggtaggcagtatggcagagagagacagcaaacctagaccctgagattgatttttaaattaataaccaaagcataaatagtatttggcacctatttgtatatgtaatgcttaaactacaagcataattaattttggacatgcaagagaagatagaagcagaaaagaagaggtgaaagtctgaacaaagtatattccgagttttcaaatgtcctgaaagtcaaagtttaaagaataaaaagataacaaaatcagatcaaataatcagtccaattgtgatcaaacaataacactaaaaaataagagaactccaatacagaaatgaggtattaaaaaaacacttaaaccaactatatttgattagataaagtgtagtttaatgaatattgtctaaagtatggacaaccaatcagcttatttagtaattggtctcataaatgagtttgcatccactagagcttcttcttgatgctttatttgcaaaaatctttagaagtaacccgttatttttcacaaaaaatttagaagtaattaattttcagaactaaccataacccatagactctgttttggactgcttgtacatgattcttttttcctctagctttcatgaaattttcatttcaaactttagacttgctcaatcttctgggagaaatttaagtccaaacttacataaatatgagaaatgctaaatagactctctttatacacacacacatatatataaagtttctctaaagacaattcccctcctttctcttcagatgaaaacaaaacccaacctattcttattcatactcgtgaattctacgctccaaaagaaaatatttaaacaaattggaaaaatttatgaactggagatcacaataactcattttcagtttattaggtcgtctactacactaaaataaaacacctaattttattataataactaaataaataaaaggtaaaaaattttaacaaaccataatatagagcaagttggcaacaataatggtgcggtagcggccaagaaaagaatcggccacaaaagctccaaacaagggaagcaacgaggacactccggcccatgcattgacattagcggccgccaaagccgttgactgtcccagaggtccggtcaaatagcttatgaggttggattcaatcccatagtaagcgaatctctcagctacctccacacctatgataaatccggccgacctccaaccgcctgaagtaaatctgagaacgggagtgcctttgtggtcgacgacgccgtctacagtgtcgtttagcagaggggtttcttcgtcggcggtggaggagcttgttgagacatccatagtctttggtaggaacactccaactcacacttgtgacccaacccaacctgtaccaaaaacaagcaaacgatttcctattcaaccataaccaagaattctacggataccaaaatagcaatcctatcctatacataatgattaccacatatatcaatcttttcagtgtgggttggattggatgggagaaaaggaagaaaaaaattaaagagaggacttcaaagcttcttccgaatctgattccacaagcagttgatggatcaatcaatttt

SEQ ID NO: 18820 - DNA, 3692 bp, Cannabis sativa
aaattccagttatgatttaagctagaaaacaaagttgtattagtgaattcgtgatcatacgtgcacactacaatgaagttatactaatgtttatataataaaagaagaatgtaaaagcctataaaagaatgagtgactggtactaattaagctcctctcgtcaccattacatggacgtaggttgtccctgcagcaatgagcattccattaacttctccagtaataactccatcagtattggccaggccatccaaagaatgattgaaaatagaaagctcaaaattctcacttgagccatccttactaatagtgttacaaaatttaaatatcaggtatgctccctacaagacaatccaacacaagaaaaaattgtataaacaatcaagtataatatataaatagtacatgtacaaagatgaaacatatgacgatcaaaattatacctcatacactaagattgagcctgtgtagagcttcaaaatgggattattaacaccaccaagtgctgccataaccaacacactacttggcgccacttccatctctgccgaaaatgatcttatccttcctatgatgtcctacacatacatgcatatgaccaaataagaaatcagacaaaattaaaggaacccttataagtactattatggtctatttttatgttcttaattattaaatttactgaaagatcacaatgcctacttctccttctgtaacgatgatagtatgccgagaagaactccccacaattcctgacaccacaacaaccaaaattattaatacgtgcatagatattataaccttaatttgaacaaacatttatagtaactaatcaaaaaataatatatccctgaaatgaatgtcgactttcagagttcataactactatgaactatcttctatcccagagcaagacccaagaattaataaaattttattacaaagaatagaagatgaaaatagttagaaaagtaccctcttctgatttttggggtcctgtatccgaaggaatattcacatgtggcgattgcagattattaacccagaattgatgcatcatgtttcgaaattcatagggagacatcataggttgttgattaggtgacaaaatattagttagtccaggagatattgattccaaaaagaagtttggataattctttataggcgatataccagcaagaggcaaatgaagcggcatatttcctacatatatatataaaaaaagacttttgtacatcagagcagaattaactcgactcatacgtatagattttttccaagaatcatcaccaagaccaagcagaatattatataaataacttatttctctttgttacaataaaatctcatatcttaattatataacaaagatgtatataaattaagcaaatgaacaatcaattaccagagcaagaaaatcaagatttgaatgaatacatgcagtttttattatcactacactaatgccaaattgctatacaatacaaagtacattatatgaaaaagttagaaattaagtacctaattgtgatatttgcatattactcgcataggcatacccttctgggggtcctgttaattgcacattcaagtttgaattcttgtggcgtggtggtaattccctagaagaagaagaagaagaagaagaagaagatagttgcagttccgtactaggttgttcttgttgtactggtaattccatattaggttgttcttgcggttttcttctcttgaaaaagtcttcaacaatggaagacaaatcaccagttcctctccgatcagtaaagttggattgtgcctcctccccatcatcatcacttctatttagatccatgtttttactttgaaaagcttattgtaaataatcttttccaaagcaaaagaaagaaaagctatcttcgttgattcagtaccgaactctagcttcaagaaaattttgactgttttcaaaacaacgtgatgatatgaatttggtgtctgttacgtacacaaatgtgtatatatatagtaattaagaagtcggtcatgtactgtttaaagattcaagaagtattgaatcttgttactatttaacccattccactaatcatgactatatagtgtaaaattttcaagaatctttctccgccaaaatgcactatttcaagagtaattcaactacttgtaagattctatatacaactactagttgaagtgaaatactaatttaaacctgagtacaattctctagtcatttttaatgtttaatgaaataataaaataattattaacatgttaaaactaattatttgatgtgacaaattaattattattttttttaacaataaatatattaaaattttaattttcaaaaataacaaaataggtaataaattatttgcatcaataagtaatctcgatatggtaaaaaaaaaaaaaattaagtaagttgtgcaatttcacaaaaatattcaacaactcttttattctattagcaatcactttaataattactttaactaacacatttcataaagaataaaaaaataggccgcaagtttcccatcacaaaagagttctttgggattgagaacctcatgtactagttagtgaaataatactaatagaccatatgattatgccctactaactgttatccccgtatatattggagcttaatataagtaataagataattatgagtaaatagttagcgaaaacaataatgactaaattatatatgtcttgccagctggcatgtgtgaaagttctctcaatgtttcgttcgttttctgcgtttgtcgatcatctggtttgttgcgatttctctgtttcgttttctgtgattgtcgatcgactggttttgttgtgatttctctggtttcctgtgtttgtcgattggttttgctacgtttgtcgactggttccgatcgtgacaggtttgttgagactgggttgttttctttttctgtttgtttgtgatttcactggtggatgttttcaaagcttttgatcgttttggtttctgcgtttgtgactgactgttgcggctggtttcttcgcgtgtttggttttggtgtgactgtttttattatttttctggttgttgcgttttttctggtggctctccttcaaggttgcgattgatttcttctgcatttgtgactggattgatgcgcctggattggtgcgattggttttttctgcatatgtgactggattgttttcacagtttcgatcgtcgttttctgcgtttgtggctggagtgttgtgtcgggttcgtctctgtttttcagtttgttgtgttttctttagtggaacatggcgtcaagtagtcaagccatggaggacatggagcagagttatgggaatatagaattggaggatgaggagagttttgggattgagatcgatgatgatgttgaggagacgactctagtggatgatcggtcgtgcctggtggggagatttttgaatgctcgatcgctagactttgaagctatgaagcatacattggctgggttgtggaagcccgggaagagtctttttgtcaaggagttgggtccaaatttgttcttattttagttttaccatgaaattgatattaggagagtcataaatggtagtccttggactttcaataggcttcctttgattttcagcagggtaccgaggggtggtgatccgaaagcagtcagtctaaataaatt

SEQ ID NO: 18821 - DNA, 3627 bp, Cannabis sativa
gggttagggagtttgtgtttcgatattggtaattgtttaagatgataaatatgttttttcttcttttttttttttttttttgagtggagcagctaatagctatttaactgcagataaatcaaacctttttaaaccagaggttgtatcttgcaatgaagcttttaggtcatctctcttgggattaaaggaagagtacattggcaataagagaatgaagctagtcgaaacttcccagcctgaaaattgtgaagtcaatgctaatgccaatattcagagttgttatgacgaactggtgaaaccctcttgtggagctattgacttgatcggtacatttgatgatcacccaaggtgcactgataagtcggatgatcagtgcataagcatctctgagtatcctccacagctggaactttctttgaaaggaatttgtccaaggaactcgaatagccaaggtactggtgaaaggccaaaactcaaccattctaatgcctctgcattttcatggtgcgttctctatcacttttagacgccttatgatttgcttagttagcttaattgaggttcaagagagcctcaccttccttccattgttatgttctcaatactttatcagaggaacaagaatttggtattttcttttgtgtgccatttaattataaaaaagctttttaagaatttaccacagaagaatctgtataattaagcttggaaggtttccttgtctctgatgaattgtatggaagaaaggcctaagtggaactgtaagagtactgaattatatatacatatatatctataaaaaatgagggaattcgtggtatgtttcctgaatatgtaatcattgtatcccttctgcaggtatagtaatagcaatacactgcaacccctttttcccactcttcccaacactgaaattaccccaaaggagggtccaaagaaatctcctgagttaattttcactccatcgtttagctccaccggttcttctccacagcatgctgccacaaggagcggtagtcactacaatttgccggcttcggttgctgggcaatccgggcataccactgtgtccttccccagtcctcaacttggaatgagtccagttaagggtctaaagtatgaaaattctggaggcaaccagttattaccatccttttatacacaatcaagtgtatcctctacgtggggtcccatttcggaaagccagcgagagaagtctccatttgcagcaaatacctcaagtcaacactcggaacaaggttaccaactttctgaagaagcaactcataaatcttctgatcaaaccaagcaagagaagaaagagtttgatcttgtggaggaagtgaagcctagctcttttgctgctgctgatcagagccatggtggtagtttttgcaatggagtgggagatcaaattagtagtgctgaacatggcagctcttgtggtagaaacgatggaaacaccaattcttcttccggggctgatgagaaaaccaccacttctcgtggtctgaacgacaatggacattttgtttatgaaagttttagagggatggatttgcatcgcatgagtcagagagaagcagctctaaccaaatttcgaatgaaacgtaaagatcgttgctttgagaaaaaggtactaatactactactactactacgtagtacataccattgtttttaattgtcattatcagtgttcattagttcactgttgtgctattgaaaattttcaaatgatcactgttataactctaaagatcaaaacgtagggactcaagctttagcaaaacgttacctctgaatgaggtttcattacattatttataggcattagtttcaagagtacaagagtgaataacagaaactgttaaagagttataacagaaaactaactctgaacaaataacagaaaactaactctaagtaactgcctaaactaactgttgactatcaatcacaaactaagtcatctctgtaaagggtcgagattggaacctaacattggctcattcttttacacaggttcgatatcagagcaggaaaagactggcagaacagaggccccgggtgaaaggacaatttgttcgtcaaggacaaactgaccctccaattggtaatagtacgtgaagatcaattgctctcgtttgctttatgacacaatagcgttgaagttgacgtagggttcttgtgctctcaaagcaatcggtaactataggactaggagtaggatgtagagtgacgagaatgactatcaaagatggttgtaaccttgcaaatcactttcggaattgctagttggtttggctgtgttttacgatgttgtttttttttttttttatatagtttggcttgaaaaggtttaaaggttgtgtcataactacttagtaactgaatttagatgactgatcttagatttatttgattggtggattatttgtatttataggccttgtttagtaccagatactagtaattactgtaatgctacatatataatgtatgataatatattatatatcagttcataattcatagctacatatttaatgctacgtgtacatgagatgtactcatatatgtacatgctgtcatcagatcatcgtgcttaactttatcatggaaagaaatatataccgaaagtagaaacagaaaggagcaaagcaaatgcatgcaaatgcaacgtgtgcttttataaccagagaaacactttcatatgacacgtgggatctgactaggcatgaccccacaagtgtccagaaacgtgtaaaagccaaaatagagaggggcctttgtagtaacagtcgatcgagatgagcatttggaggtattaggagtcaaataaggggtcttatacttttgtcggcaaagcccgggcccggccaactccattaccatttcctttcccaatgactgataaaacgtgggactcaattaattttaaaatgaatgattaatgaactttacatatataaatatataatttacataatagttttatttgattttatataacagattaaagttgcagtaccgaaaaggtttgggagacaaggctcggggataacgcgctgaaactaattaaatgttcccaatgacatataatacctagtcttggatcatgggcgtagtgcaattcaatttgaaaatcttatatattatggaatgagaaatactaaaaagtattagtggtcacaaatacttcgttatatattgactggtctaatttaatattctgtcttatataatttaatataataatttgtctcatataatttaatataataatttttaaaatatatctaacaacaggtttaatattctgtctcatataatttaatataataatttttaaaatatatctaacaacaggtatccactaacaatgctcttaactaatatttaaattataatgtaaactcgtgagtctattaaattgttaacggggggcgtggaaattaaaacaaaaacaaaaagaaaaggaagtagggttattcacatcgattaaaggaatctcccacttgaaaagtggactaatatataagcacacttaagtttaaaaagtatttcaagaatacttaaccccaaagcaaatttgtttggcaataaattgagaataaataaata

SEQ ID NO: 18822 - DNA, 8660 bp, Cannabis sativa
atattcacctccccaatccgattggagagtcttgattttggcatcaaattttctttctacaaacttttggaagttgagaaatgtgtttttaacatcagattttaatttgagaggaaatatccaagtgaagttgctatagtcatctatgaagtgcacatagtatcgatatccttctttagatagtatgggtgagggaccccatacatcggtgtgtatttgttcaattgttgagtgagatttagtgtgtgaggtgttgtaatgtttgtattttgatttacctatgtgacatgtattgcagaatggtgtagaatttttgaaagagactttttcattaaccaacatgtattttagtacattaatattgggatgaccaagatgcatgtgctacacattggcatccgaattgaaactagactaggcaaacaaagacagacacctacgggattgactcgatttatctactaactgtggaggtttggcagtatttctactcttggagaaaacaataaaacttgaactagtgttgacagggacatttgatgatgatgatgcagtgagtttcatttgatatagcccattgttaaaagcactccccgatgcacctcctccttcgtgattagatccttcacaacacaaaaatcagcataaaattccacatactctttgttatctttggttagctaagatattgacaagagatttttagagatttcaggtacacaaagtatatcattcagcactaaatagccagttgtgttatggatcttacttgagccagatctagtcacggccaagggaaattcattaccaacaagtagttgtagagtacctttcatgtcagtttggtactgtatgttggatggttcagaggtggtgtgattggtggcaccactgtcaatgtaccaagagttgtcgacatgagcgtctgtgctagtgaaataggcttgttgatcattgtttgagtgactgctgttggtgttttgggaagccgatggttgactggaactaggagcttgaaatgagatgtcaaaccggtgataacacttagaagctatatgctcaggtctgctgtaaagttggcatatctgtctgctgttgttggatcgacctctgccttgtccacggcctctaaagttgtaagagtagccaccagagggttgatttgggatgtgtccatgatttccaatgttgagagatctgcgcatctgtgtggccaagtgggcagcaggcatggaggagtctcttggagttgatttgagttgttcaagatggatttcttgactctgcagcatgtattccacctcttgaagagtgacttgatcatgccttgaggttaggttcacaacaacagcttcatattcatgaccaagtcctcccaaaatgtataagataagatcatcatttcaaagtaattgccttgcagcagataaaccatcagctatatttttcattttcaaaatataatcatgtatagtaagactgccctttttcagagactgcaactgaaatctcagctgcaatattctagccttagagctagtagtgtagagacgttcaagagtgacccacaggtcacacgaggtaagacaactcatcacatgtccaaacatggattcagagatagagtcgagaagccagctgagtttggactgatctatgcacctccacatggcagtatggactgatctatgcgcctccacatggcgtatccaaggttgagttgacgagactcgccaggtttcgagcctccgactgtattatccacaaattgaggtggacatggtttggttcccagcacatatccttcgagttcatgtgcacgaagtgcgggaagagcctgtgatctccagtaggggtaatttgttccttcgagtttaatggtaagaaaggccagactttggaaaggtgaagatggtatggctggagcaggggaaatgactggtgtgttgacaggctcggcagtgggcgcagcatcagctggatttgaagttgaagacatttcgactgtggtagggttatccatagataggacagtgaatttctcactctgataccaagctaaattgaaggaaataacagaggaaataaaggacttataatactctgtatattgctggtttaatgaccctttttattgcactaaatacaataggaaaagttcccttttatatacaattggaatatactagaagctatcttcctattggttgatacaataacaaaattatattctctatggcccacacaatgatatgaagattgagggaatcaattttccaatgattgataacggtaaagaatcagcctagtcagcatccttgatttcatcttctaattgggctgactttggacctttcatttcagcaataagtgtagtactacatctatttatcagatgatttattttattattacaaaaaattaataagatcgcaattaatattaattggttagtttatgatagatatatatatctagactgatagttagtattagcttaaggattatatatataggttaagaacatattagctagtaaatgtaaatttcaagataaaattcataaggttagggtgattatacttgcacctcatcattgaaatattattaaactaatttaatttatcttttcaaaaagttatttctttacactttttcaattttttttacgttattaattttatgtattttattttgttttgtttttacaatattatagaaaataatgaatattttaatttattaaagcatgtaaattttaatataatttttttgtcaaatatttaaaatatatattttattctttacgtaatatttttcttgtatttttcttttttttttttttttttttttgaaaggagttacattaaacaacactaaataggattaggcaaatcaagcaagatagcttgatgagcacaagggggagtcaccccaatccacatggcactagctttgtgaaccaaagcataattggctaatacatgagcaactttattggcctcaggaaatacaaaggagataccaatcacacaatcatgagacaacaaacctctaatttgatctagcaagcaatcaacatctcggcagccatcttcctttttttggattagtttaatagcttccaaacagtccgattcaatgctaaacctcggtatacgcctctgcattccagcttgtatccccctcaaaatagccaagagctcaaggtgtaaaggagactgctccctgggcaaaaccgtggccgaggcatagagaacttggccactctcatcgcgcattacacatcccaaaccagaacagccaacaccactcttcacaccagcatctacgttcactgtcaccacaccagaactcggcactttccagcagctgtgttcccgtcttgcagcatcatttctgctgcctttttcaccttaaaaatcagcaagaaacttgtggctccactccaccatttcaaccggttgtggtacaaaaccaccatgaacaaccgcattccgactattccacatattccaagtaataacaagaaacaattcaaacttttccttactcagaacagtacctagccgcattaaaaaagcaagcacatcctcacttccttggcgtttgatttcttgatggaaatcacaaagtttccaacaaattctactcatcttgcagtcccatagagcatggaataaagttccaggcagctgttgagagcatctcatacaccgatcactattggaaacatgacgttgggataaaatggcataagtgggcagccaagcatgagccaatttccacacgaacaccttaatttttggtggaattttcaaccgccacagtttccgccaccattggacagcaaggtgatcatctgattgttgccgttcttgtttcaaatcacttgccattcgataaccactcttgacggagtactcaccatttttagtgtaatgccataggattttgtcttccgtatcccaccctgtatttggaagtgtaagaatcatttctgcatcctcttgattaaacacagctttaatgaaatcttcatcccaagtaccatcccccaatttcaaatctaccaccctaagttgctctggtaagggcggcttatcatatatcttgaaggtgaccggcctaggcagccatggatcctccaaaatgcgaatgttactcccatcgccaaccctccatctataaccctttaggattaattttttgccccatactaaacttcgccaaacaaatgaagcatgtgtgccacatttagcctccaaaaccgaactattaggaaaatacgaagctttaaggacacgactacaaagagcgttaggataccgaatacagcgccatatttgctttgccaacaacgcttgattgaacattcccaaatctcgaaaacccattcctcctttgtccttaggcttgcataattgttcccatttacaccaatgaatcttcttatctttttcagaggacccccaccaaaaccgtgcagccatcctatgaagattagatattgtccctttagttagcctgaaacaactcattgtgtaagtcggtatcgcttgaacaatcgcctttataagaacttccttacccgccatagagaacatagatgctttccaccccttcatctttgcccacaccttattcttaatcatatcactcagctcttttttatttctgcccacaaaagagggaagacccaagtatttcccatgagaaataacctgtcgaacccccaaaaaatcagccaactgacttcgctcgtcctcatcaacattcttgccaaaacaaatctcagacttactataattaacaagttggcccgaagcaatcatatagtgatctagcaagtccttgaaccgttgacaaccatcccttgtagcatcaaagaaaaccaagctatcatccgcgaagaacaaatgcgaaataaagaggtcatttcttccaaaccgaataccttggatccttccctgaccttcctcggcctggattaagctagagaaagcctcagcacaatacagaaacaggaatggagataaaggatctccttggcgtaatccccgttcaggtctcactctcccccttacttctccattaagaagaaacgaaaagctgactgaagtaacacatttcataattttttccacccaatgtctgtggtaccccaaccgaatcatcatcatctctaagaatcgccattccacccgatcatatgcttttgccatatccagtttaagcgccaacttccttccattttgaaaccgatttttcctcatacaatgcaaaccttcatacccaataatagcgttatcatggatcaatcttcctttaacaaaagcactttgtgagtctgaaatcaccccatccaacgaaactcgtaaccgattagctaagcatttggaaattatcttatagataacattgcaaagactaattggtctaaactccgctactcgttcaggtttatcaacttttggaatcatggcaataatagtatcattgagacaactaaaatcagccccttcattaagacaccgaaggcacatcataacaatctcatccttaagagtattccagaatttatgataaaaaagtgccggcaatccatcagcccccggcgcttttgtcgggttcatttctttgacagcacgcacaatgtcctcctcctcaaattcggctaacaatagatcattcatctcattggtaactttcggctgtactgctgccaacacaagagaagtactatcatcattaaccggagcagcttgaaagagagaagaaaagtattcctccaccacttgcacaaccaaggtaatatcactttgccacacccccatattatccaacaaaccctttatttcattctttttcttcctcctagacgccttatgatgaaaatatttcgtgttagagtccccccattttaaccataaggctctactcctttgtcgccaatattgctcatctttttctaaagccccattcaattgtttttccacagttttgacctcagtccatgtacccaactcctgccgagatgacaattccgcaagagtttttttaagcttcccaatcttctcattcagcaacatcttttttttcttattccattctttcaaagttctcccaagttgaagtgttttccttctaaaacccctagaatggcctccaaaagtaccatcatgccattcattaaggactatgtctttacactcatcatcatcacaccatgcttcctcaaaatgaaatctagttttccttttggtctgcccacatcgttcacgctccacagctataggtaaatcaactaatagcggcctatgatccgattcccaccaatccaaaactcgaatatccgctccctcaaaacaactcaaccattcctcattgcataaacccctatctaatctttccataacttgattagattcatgctcattacaccaagtaagttccgatttcaccgagcaaaaatctatcaatccacaatcatcaatgacttccttaaaatcttccatcgccgtagcacttctcgtccttccacctattttctcagcaagactaacaatttcattaaaatcaccaatacataaccacgcaccatgtattccagccttgagattccgtaaaagctcccacgagaacttcctctggcttgcctccggatgtccatagaaacaagttaacgtccagggcaaaaaatccttccccgcaacttccacaagaatatgaccaggagagcttgaatcaatccgaatattaatatcatccttccataacaataataacccaccactaagaccaattctatcaacagaccaaaatttctctcctacccccaagaccgaacaaagtctttccgcttgaactctagttaatttactctccgctaaaaagataatactcgggtcatgatcccgaatgtgggattggagagcacgtaatgtccaaggattcccaattccttggacattccaacttaagagtttcattgtgttcggcggccttgcatagcaagactcgccgcttcaatttcagaatcatgagatgagaaatcaatttctgtagaaatactcacctctggagatgtaatagtagtgtctcgtgccgcattggttggctctgtagctgttccaaatacaaaagtgccatcctgggagcctcccgccaccataaaaccatgaatcccttccaccatttgctctgaagaagagtgccccatctcggccttttctctattaacatggcgtgcccgattcttgatagaaattttcctcctctgtccatgagagacacccttccttcctttatgtgcttcggtaacgagagaagggaataatgggactttgtcatccaaattcgaagttgaagggcaactaagaatttctttgcctttatttttctttccattcccctcattagaatcagtcactacaaacccagcacccccttttctttttttctgatccccttcgccctcatcctcacttccattcccccttacttctgtacgagatgcagaaggatatatttcatttgacacttcacctccagctgttcgagcataagtggttgggccactgttagtcatatgtgtgttactttttaaaccttgggcctccaaagcatcacatggcactaatgggcaatcaattgggcctaatgaagtatccggcccagttgtgttttgtccatcattcaaatttccaacttctttcccaccaaaggcgggagcaacaaccccactaactctccccacctcactcccctgttcgtgagacaccatcaccgtacccctggtccggccgatttccgcctgaatggcggtggcagctgccttctcattcaaaccataatccaccccactgttctttccagcttcagatatcatcttaatggcattttgtttatgagcaacaatgcaattaggtgttgggtgttcatctttgagccaatatccatatttcagtaccttttgtccttccccaatgtcctccatagctggtaactccttgcaatcagcctgttcatgtccccaaaatccacaattaaaacataacattggcaaccgttcaaatttcaactggacccaactcttagacgtccctgcagggacaaatcgtcccacaaacacacttttgttaaggggaaagccgatcttcactctaacataaccattcataaacgcctgttgcggatcactccacttaatttccagaacatcaccagcgagttgtgccaatcgtttgacattattcagtgtaaaagacttaagaacaaagcccttcattttcacccaacaaactaccctgttcaatcccgcatcttgccatcgatcagacaatggccattcttccagcagcaaaattcccccattgaacaaccatggctgtttgtcaagaattaaccgggcatcctccttcgagtcaaaggaaatgcggacataagtagccatatgtgcttcctcaataactttaaccctccattccccaatattcttccacatccttgagaaaatagaatggaaaagcttaccgttcattggtttcctggatatcacttttcccacaaccgtcttctccaagaaaacctttgcctcctcctcatttacttcccagtcctcttcagtttccaccgccagttggcttgccatattcaca

SEQ ID NO: 18823 - DNA, 5172 bp, Cannabis sativa
ctttccaaatatccaaaccatttaggaaattacaattcagtccaatcgtccccttcctatgtagtcagtctcatcctctacaaatcaagtacttagccattttcactcccatacggcccaatctaaggtacaattttacaatacaaccgaagctatcgatttttctttcttctcttcatacttcatccatatatataataatttttgcttcaactctattcactttaattaagagttatattgatttaatccgcagaaaatcgaagtaactctaatctctgcatttatattgtaaagagtctagagattggaattgcgaatccattattgaaagctcgggaaaaatcaatcaaaaaatgcatatgatggaaatttcatttcccactcgaattcaagtcaacctctctttttctccatgcccacctcgctactggcactcacatggaagacccacgactagaacgaaactactagtgaaaatggagtcttcttctgtagtttcatcaccaacttctttttctgcttctgggtattttaatcaaacagttggtgggcaatcgccatcaaagagtttggataagattcccaacacaaaaaggagaagggtcttctttttagacgtaaacccattgtgctatgccggaagcaccccaagtttgcgctcttttggccattgggtatctttgttcttcaatgaagtcagtttaaacgaccctgttattgccgtcgttgatggagaaggagggagcgaacaccgcagaaggttgttaccttcctataaagcacacagatggaagtttctgagaaatccttcaaagggtcacgtcggacgatcacatcaaatcatatcggattttctttctaaatgcaatgtgcctttagtaagaataggaggccatgaggctgatgatgttgtggctactcttgtggaccaagttttacaaaagggacacaaggtggtgattgcctctcctgataaagatttcaagcaattgctttcagaagatgttcagattgttatgcctttggtggaattaaaaaggtggtctttttacaccttgaaacattacatgtctcagtacaactgtgatccttgttctgatttgagcctcaggtgcatgttgggtgatgaggttgatggtgttcctggaatccaacatgtggttcctgagtttgggagaaaaactgctcttaaacttttgaaaaaacatggttctttggagaatttacttaacacggctgctgtgagaactgtagggaagcagtatgcacaagatgctcttaccaaatatgctgattatttgagaaggaattatcaagttcttgctcttaggaaggatgttaatgtgcaacttcaagatgagtggttggtcaagagagatagtaaaaatgattctgcatctttgtctggcttcttcaatatgttagaagaaactaagaatcttggtagacatactatttcaaatgcctaagattgcctttaagtttcctatattcatctgtttatttaccacttggtgtttatagtgcatactttcatttcatacataaaagaaatagaaaatagaaacaaagtattgtatgatacaccatatatgtgtgcatgacagcctccttctatgagcatatacacacttatattatttattagtacttcatcatttctttgagcatctgctccataaagcctgttgtcttttgaaacttggaacagattttcctatgaaaattttagtatatatctatggaaacattttaggatggtatgtgttgttttttcagtccttaataaaacgatatctaaaacttatgacatggcaagtgaaacaagtgggatcatgacacatcgtcaagactttaactaggagttagttaagttagttgttttagttttctgttacttttgtaaaggcttaaccgactgtggttgcctatttaaaacttcatttttcatttcactagtaatacaagaaaacatagagagaggagagtgagctttgtacggtgaggaggaaaattcatggagttatgaagaactagaggtgagaaactaagggaagcaaggatcgagcttcagggtgtttctaagggttgaagcttctgattaaggctcaaacaagggaagcgtttcatcatacttgatcactaaatactgtactcttaaacagattgtaatcttgccaattgtcataatgaaagactaatcctaagggagttcaaaggggattaggctcttcataattgtgaaggaagttcgaacctctgtaatcttgattgtgttctttaattctgtcatttacatttctgcatttttgaattattgatttctggtttgattattatgttttatgcttgctgaggttgttgaaacacaacagtatgctattcgaacgttttccaatttccaccacacttgatctcaagatctctctgttctcagtgtctgtcatcctgtcaactccattttccatattagccttatacgatatgaacgattcaagtggacaaacacttgttttgactttatttccaacttttgcaaaccccaaatggaacaagtttctctcctaaaagcaggcctattttgctttacaagctactgttgcaatttcaaaaccttaatggcacataaggaaaggaacccattgattttataagcttaatacggatgcaacggaaagttcaaaagcaaataagctatttcaaatgttgatatccagaatctagcaacagtatacttgaagaactctgataaaaatggattagacatcttaatatgcctttattgaaagaagtaaaagtttacacattgtgttagctaagcatacaagttctgtccaaaaactgcaaagttaaccagcccagcctccttttcacaactaaaaagagacgaaccataaacaaatttgatgtcatagaggcaaccaccttgtcgcctaactcaatattttcttcatttacacaagtaaaaggtactaaaaagaaaaagaaaaggagagctctcattctcttattttatttttcctgtggatctagaaagtagttacttaaaaccactgtggaccagagtaggtacaagacaacttcttggtcttgagggtcaccttgatttaaattcacattccagtatccttcttttgatattttctgtctgtttgtagtttcttcttggggcacctgtataacttatgcacatgtaaactttcaaagatcaaactgcatattaactctttctactgttctttgactcaacacctgtttctggtgcaactccttcaaaacattggctgctagttccatttctccttcatgggcaatcccttccactagaatagtgtaagttgtttcattaggcacataccctttctcgatcattgcctcaaaaacctcaaaagacaaatctgttctcccagatttgcaaagtccaaccaaaagggcattgagattttcagtgtcacgcctataattgttttcctccattatgctaaaaatctccattgcctcgtacagcttaccttccatacacaaccctctaatcaaagatgaataggtgtaagagtctggtgtaaatccatacttggttgtttcatacaaaagatgaaatgctgcacgagtattccctttcctacacaagctcgaaatcacggccttgtagaactcgtgagtggaagttttttgtttattgccaaggctctgaataatagagaatgcctcttgcaccattcccacattacagagctcagcaattgcattatatgtaccatcattaggattgcatctcctataaatcatttgatctaaacacctaaccacaagatcaaccttcttctttctacaaagagaagcaattatgggattgtagctagctgcagtgggcttgaaccgtgcccttgtcatttcatcaattacatcaaaagcatgtcgagtcctgccatgaatagcaagtgaggcaataagtatattgtaagtaacaacagaaggagatcgctcctcaccatccatctcagaaagaagcatataagcctcatcccatcgaccctccaagcacagattcctcaacacaatgttataactcacaacattaggattaaatcccttgagaggcaaatcccttaagaaattgatagcctcatcagtcctaccttccttgcataacccagttagcagaacattgtagctaaccaaattaggctgcccacctttggcaattatctcatccaacagcttcatggcttcattcactcctctttccttataagcagcctcaagcaaggaagaatatgtaaaagcatttggaaccaaccctttctttatcagcttatccaaaagctgcaaacactgattcaagttaccacacatacaaagccctctaataagagaattataagtcattgtattggttggatagccatattcctccatattctcaaccagttgcaaagcatgaccaatattaccttttttacacaaactactaaccaagaaagtgtatgaagaggcatcaggtattatacccgaagcaaccatcatttccatcacgctcactgcttttcttaacttatttaccttgcagagatcatatataagctgagttgcttgagctgcatctggtttttggccattttctatcatagtctcaaagtagagaaaagcatcattgagcctgagttccttactactatggtcattcttgcccgacctccaattgggcattgtgaaaacagtgtcctttggagaaatggtgatctgggttgatgccaaaactctggaaaatccgttgttggttgaaaaagtaggcaaatttgggacatgggaaaagaagttacagctctttctactagtttcagatgatgggtgtgcgataggagagaatgaatttaaaagggtggccatagatatgaaataataaacaaataaatgattataacaagcaaaatcagtagttgaaaccaagcaagttataactcaaacttgttcttttgcaaataagcaagcaaacagtaattgttataactattaactattgagtcaatctaacatctaagtttgattttaatatacaatgaaaaatacacggaaacaaaatggagtacagagatagagagaactaaatggaattcaactaagaattttactaagcaagaaaaaagaagcaagccatacaatgggttc

SEQ ID NO: 18824 - DNA, 4064 bp, Cannabis sativa
aacaagttataagagtttgataacgaaactctattaagtgcgagagttgtacaattcaacatctacataaccacaattggcgaaaaagaaaaaaaaaatcaacataaccacaatcaccaaagtaaatatttgagcaatcaaagtgtgtcattttaagcagtcaaataggtcatgaattatcaactgcccatgtactagcctaagtgaacaatcactaccacccacaggccacatctaggaacaataaactttctcgaagctgataagcagtgatattgtaagttatagaaatgagaacttttagaaaggtaaagttatatttataatctacaaataattgtcaactcatacaaaggtaaagctatatttataatctgcaaaaggcaagtctgtataaaagaaaacccccaatttgatatgagtcactgaatgttactttgcacctaacaacagaagagtaagaaagaaatcaagctttggagaaacctatgaaactcacttggccactaacacacacgatttccccttccttatgcttcccctgaagactttgaagaaaaggcttaaatgtgaaacgtgtaccgcgaaagaatttcttcaaatgcaaatatattgtcttgttttctttaagatctctaccatcagtttcattctcaaaatttgagtcactgtttccaatctcacaactcacgataacctcaagaaatgaaaaagaagaactagctctgattcctctgcatgagaaagagatatcgcaatcaatattatagcatcaataatttactttaaagtatgcaatatatttaagtaagaaacttgactcatccaaattgtttcatcacaatctcacctcatccaaatgtcaaaggaaaaaagacctaaaatatctgaaaaaccaaggcacaactatacccagatgcttacaaagatcaaaaaatcaggaactttcttcataagaaataataacaataatatattacaacgatgacgacaccaccaaacacacagagtaaaaaattaccaactgcttttgagagataaatcatggattaccagttcttcgtaagatcatgaatggctagaacatttggaaaccttgttaccttgaagataagatttttcccataaaaatcaagtattgtccatcttcaattccaagctgagcatttcttaaatcagcatatgttcgaggaaaatggtgtagcaatttccgcagctacatagaaataagaatgaccaatacaaagtcaatccttctttcaaataatgctaagataaaatttggttgcctttcacgtaacatcttatgaaacaaaccgtgtgaaaaccagagtcttccagcttatgacagtgcctcttttttaatccaggtatgcaattaatagtttgatcaagaagtggctcggttgacgctacatcaatttgtgagtcaaaccaaataaattcctctacagcgactggttgattcaatatttcctcagtgaccaatgtaatgggctgaggagatgaaggtagcatataagaactaggttctcttggtaattctgtttgcacacttgtttcagtcgaatccagagtgtcccgcatttcatggagactattctgtgtctgctcttcgcctatagactcagaaaggaactcttcataaccttctgttgctagaatgtttctcatgttgcagaaatctgtggtcccattatacaagatcactggaggggaactacccactataatagatggaaatttcttacatactaatgagacatcaaaatcccttccatctttataatcatgaatatcatcataacccatcataactgatacctaataatagcaatagtatgattaatggaagaaagatgcagtcttataaaccagaaaacatcaactaagacaccaaatgataaagttttcacaagaaaacagcagttaaagaagaataaaattgaaataaaaagataatcctgcaatctccaagatcagagcaaaaagtaacagcatgccaggtataacctgtacatatatttcaaaacgtacaaaataggcatacaactacatgcataagttctgtaagtcagataaaacttgttagatagataaatgggagccacaagattatatgtaacaaactgatattctcatgtgcctaccttgtcaagaacctttggacgactacatgtactcgacaaaccataaccatcaacttcatctaacaccttttcagccagcttatgtcttgatctagaatatgatctcgatagtttggaaaacagaaaattactgaacctgcaaaaaataaaaacatcatacaagtaccaacaacgtcaaatctataaaccattacaagcataaaaaaaaaataatatagtttcagtaacatcaacaacaacaacaacaacaacaagaaaaaaaattaaaaagtacctcatatttcttcccaaagcattcaagtatcctttcctagtctcagataggactgcacctctcaattgtctcacactgaaacactggaaatgtataattacattcagtatcacctaactcattccccaaagattaaaactttcaaatttattgtcaccaaactcatttaaggattaatattacaactttacaagcacggtataagaattcaactggtgtggattctactattgcattctgacaaccttatgcaactagatacaaagggaagttcaaaatcaatcaacgctgcataaaatattttaaactgctaaacgacaaacaaatcaggatatagcatgtatctactactcttctttctttctttttctgaaagccatatatttattactctgttaaaacgaaatatctcaatagaaaaaaaagatccttttatgttggatgatagagaaattattacttatacaaaaggacataaagatacaaacttcattcataccatgccacatggatacataaaaaagactaccaatgccatgtgcaacaaacgccctacttgaacagaacatgcctgaataacatagacctccaacctgcaaaaccatagtgcacactaattacaatgttgaggaaaaaatccacgggcagacaatgtcccaacgactataattggaatagacaaataaacacatcttacaagttaagctacaaatagaaaaagaacatagtcaaaggctaaaaattacatcaacgtctttcaaaaagaaaaaaaattgtactccacataagtttatattatgccttgataagtctgctatataaaaattttattcttctgcctttatttcaatggatatatatttcgatattgggtgtttccagttgaaccctataatatttggggaaagaaattttcatataataactccgtgagtaagattaacttctaatatattacagcataaaagaaaatgaaattaaggaagaagtaagctgttttaccatcaatctaactaactcaacttctagttcaaatttcaagtatataagtactcctatatcatatgctttttctcaccggtgcgaagagaaatgaaagaatcaaacacaactaaagatgatatcaaactggtgcacaaattcaaactcaaataactagcatttcggttttgttcatctttcatgttttgaaagttgtaatggtaaaatcgtaccttttcgaaagatactctgttaatttccgcttctaccacacattttctcgggaaacaaacgccgaaacctctatccagagagtaaaccggaactcagactaagaagttgaaagttgaaactgcctctaacgtttatttactttggttcctaatcgtattcgtacgtatgtatggcttcgtgagcttgagtaaatatccttcctttcctctttttctcaagacaaaatcattgaaaatttctttacggaaaaaaaaaaaacaaaaaaaaaccaaaaaaaaccattcaaaattttaaaaggctaactagtaattttttttcgggttatttgcacctccttaagtggtcaggtttttgcaactaacccccaactctaaaatttttgcagtaaaactccctaaactcaagttctgttagcagttagcctt

SEQ ID NO: 18825 - DNA, 3199 bp, Cannabis sativa
tctgttctatctttaatctcaactctgcagaaatgaacacattttcccttttttttcggacaccaaatctcgaaaaaaccaacataagcagtcataccaagcctaactgaaaataataacaaaacaaaataataactgaaccaggtatgaagggctgaatattattgttttggttgttgttcttctgcttcatacaaaatcccatgtaagaatatcacaagacaactaaagcttctttactagaactcttttggaagctaattgctgtatagtattgacattgattatgaccatatctgattctttgggaaagtcactctaacacacctgcttattcctctcttcattttcatggtgtccatccataaccaatctttggctcatactcatacttaatgatagcacatttaattaatttcattcaaaaatatcttcaaccttttatataccatttattctatggtgttgtatagtatggatttgaagattgtagttgaaaccagcttaattaattatcttatacaaaataatatattttcttcacttactcatctatatagtatgactttacggaccattttcccttaggaagagaacaaggaaagttccaagctttctctatctgtatgtatcaaaacatgttgtcatatttagattatttatgcaatgaataccaaacaaataaaattgtagtgttaattcccatttccaatgcagaggactataacattcataatgaggtgttggaggcttcttcaattcaattgtttataaagtttttaattctatatatgtgtgtggtgtgtgtgtcttaacatcacactagcaattttattatgaatatgaaagcataaatactgtgtttgtttattgttcaacttaattatcttgagatacaatttctagtcctaaataaatagatttggtagttaggtttggtctagtgcctaagtgttatatcaaactcaaccttaccaccatcaccattaataaacctctgtggcttaaactccataagataggacctttggatcccaacccatcttagccatgaagttaatattcccattcttgggcaccaaatgtctacccacaacaacagcctcactcacaaagtgagccctcccacaatcacagctttcaaataactcatcttctgcaaatcctccttttcaatttcaatattctccttctttacccttagccttacaacctccttaatctcataataaatcttctaaagaatttggggatgtttgacaaaattagccatgatccattgcaaacttttcttcattaatcatttttgtaatttgctcatgttgtcttaattttgcattagagtgaaagaaaaccataatcatacacaaaaaattaatttcaagataatcttcacacatgatattttatatttttcccaaagaagtaaatgactaaacaaaaccataacatagttaaaaatgaaatgagacaagccaaaatcgtagagatccaaatctcaatttaaaaccaagcttatacaagtctttcagacaaaatctgcaattaaataaaacttaacttacccaatcacatcaagaaatgaaattaaactagttcgaaagactaaaatgagtattcctataacaaaagatcattcctcatttgcgatagttcccttctcgctgacatagataccatccagaaatttcctgatatccttgttcttcacatggcatttctgtcaagggaaaaaaataaatcaaaatctcagttcctttctatgttattttaacaaaatacacataaaagagagatagcatacctggttaatgagagcgcaagatcttgagacaagttcaatatcattaccatccaaaacaagctcatccttaaccttctcagatcggaggattgtcactccatcaagcatatccacctttctcacctgattatcaaacaaaaatggataaattttaggaaaccaacacaagtagtcatatgatatgctgcaattatcattattattattaacattgtaacatacaacttacaacaatggaaatggaccatatgcataagacattgtaactaaacacaaattttgcatgctctgccaaacacaaacaatcaaaactttacaccacacatatgtatgaaagttacagacacaacctagcatttctaacattggttcattatttcatatactctaaaacagaaatggaaaaaagaaaatcagcccataaatcaattcttagcaaaaagaaaaggaaaaacacatttttcatgctctgccaagcacaaacaatcaaaaaatccacactacactacacaaatacagatatatgaaagtagtcatatgaaagtgctcaaacaattttacgtgctcttccaaacacaacaatcaaaaatttacacttcacacagatataagaaagttacagaaacaaccgagcatttctaaattttgttcattatttcatctaatctatgggaaaatgaaaaccaacccattaatcagttcttaaccaaaaaatgacctttttcatgatctgccaagcacaaacaatcaaaaatctacatcacaaaaacacacacacacatatatgaaagttacagaaataacctagcattgtctaatcaatctaacaacagaaaaaaagaaaaaaaagatgacctttttctcgcccaaaaagttacggatctcaatagacttgttggagttggtgatggaagcgttgataggaaaatgagcatatacgaaacgcatcttgtagcggtaacctttggtgacaccagtgatgagattctcaacgtggcttagagcagtacggatggcggcgctggtcttgcgggtaccgaaccacgactcaatcttaagcttacgttttccttcttcatcggtgatgagctcgaaatcgaggttgagatgcttgaagttacggacaagtttgcctcgaggtccctcaacttcgatgatcttagcgtggaccttgatctggatcccctcagggatgtccatggtctccgaggaaaggattgtcttcatctctactctctactctttctctctctttctctctctctctgctacgatgaaggcagccttaaaccctaaccctagcagagccatcatataaactcactcactatcccaaattcagttcaatatgggcctggcctttacttgaaccagttttgggcttttgggctttct

SEQ ID NO: 18826 - DNA, 4963 bp, Cannabis sativa
agggcataaaacccaacagaagaagatgcacaacaagctactttgcggtacttattatagtgatttgtccaaataatttataacatatctttgtttcaataattatttagctattcatcctaaaattgacttatctatttaagtactagcttctttatttttagctccatgagtgaacttgttagggctgagcataaaatccaaaaaactaaaaaaattgttcaaaccgatgtactgaacaccaccgaaaccaaaaattaaaaaaattgccaacagtttaaattgccattggatggtcaattttttttcgataacaaggtgaccaaataaaccaaaactgaccatttctttttatatatatttgctttttatattatgtatcacataataatatatatatttaaagttatatatattttgtacaacaaattaaatatgttactcttttaataattttaaagaaatagactattctctctctaattaactttttctaatataaattaaatatatactcttgctattctctttgccattttttttctctatcttaatcttacaactcacaataaattaaaataatatcttacttcttcaaaaatttcaaaaatcatctctattattagatatccactctccgccatgactcaatcttagtaaatatgtctctttcaatattcatcatctttcttcatacaaaatcaaattcatttctcacacatttttttctatttttacagaacataaattagaggagattcaagagaaaaaattgacaacaaataaaaaaaacctttattttatagattaaaaaaaatataaagttcgattttaggttgtttgaaccgaccaaatcgcggtttacatcgattggttctaagaaagtttctggattagtcggtcagttttcagattgcaccaatctaaaccgaaaatcaaaatttcgattttaatatgaaaaaaaaaaaccgaccaaatcgatcgatactcagtcttaaaacttatcattacatatttccaattacttatgctgataatagagttaaaacttttatttggcagattttataaagctttgatgtgttatgtggtttgtggtaaaaaaaaattcaaatttggtacacaagttatatatttttaggtgttgtttgggtaaataaatcagaggtaagttatttatttttattattttaagtgtaaaattatttaagatgaatatgactaaattattctaattttgtgacaacactaaaaagcttcaaattaggaaggcttgattaaagccctgtggcctgtgggagcccacgatcaaaattatttatatcattttatcatcacgggcctttatttctaagacacgccctttctattatgggcctgaccatttaactccttcacaaagaagcacaagaatgttgcaccaacaatcataataataatagaatttccaactttcctttttttttttttttttaccgtgggacagaatttttaaaaaattactgtatgtactgtgttaagtttttacggttgttctacagttgttttttagttattccactgttgttttaattgttttgttttgttattttactgttgttttagtttttgtaaaaaaatctgtgtaacagaaaaattgtaaacttttaccaaaaatccaatatttttgtaaaaatcccttttttgtgtgtgtttttttcataaatatgagaaatttgaaagaagtttacttttatataacataaataaataatacaaaaagatataatattaaaaaataattaaagtttaaaatatgagaaactggaaaaaaaaaaaaaaaaaaaaaagaaagacaaataaatttagtaaaacttctaataataagtatcgccgaaaaagtcaccaaaaaagataaagttgtcaagaaagtcactatcgctgaaaaagtcatcgaaaaagtctccagaaaagtcactatcgtcggaaaagtaactggaagtagagtagatatctcagatataaattaaaatagaattgtttctacaatattgtaaataaaaacaaataatacaaaataacttaaaacaagttataattaaagtagaaccggttccataacataataaataaaaacaaaagtacaaaataactcaaactagttataatgaaaatagaaccagttctataatggtattataatgaataaaaataaataatacgaaataactcaaactatttataataaaatagaaccggttctataacataatgaatacaaacaaataacactattaacttaaaccagttataatcaaaaaaaaaaaaaaaaagagaaaatcaattcctaaaacactcaaaactagttccacaacaaatgagtaaaaatgaataacacataataccttgaaaatcgattatattaaaaaaaaaaaaaataggattcaattccaaaaatactgagacataaatctaaacaaaagaagttccattacaaaataagtaaaaaataaataaataacactcagtaactcaaaatataagataaagattccagttatatttatcaactagttaaaaatctgagataaagagactagttccgtaaagtaaccaagattaaaacttacatacaaaaatcagttaaataaaataaataaattaaaatatggttccttaaattaactaaatcaaaaattggttcatgaaataactaaattaaatacgagttccttgaatcaattaaattaaaaaccagtttttgaaataaataattcaagaactattttctaaaatgacttgaataaaaaactagctgcgacataaattaaaatagaactgatttcacaagaaaacgaataaaaacaaataacagacaataacttagaccggttataattaaagaaaaaaatataaaccataccacatcataaaaactagtacgcttcctaagagaaccctttgaaacctaccgtttaattaaatcaaaaaccaattaagaaacaacacaattaaaatacaacacggactttgtaacttactagcaaacatatagtttgggtcagtctgacaaaaataaaatactataaaaaatattaaaaatcgattaaaattaataaaaaaaaattacatacaaacaagaggaaattagttctaaaatattaaaacattaattaaaatagatctggttccacaataaaataaataatacacaataactcaaaaaactagttataataaaaaaaaataagagaaaatcaatttgaaaaacactgagatataaattaaaaatagaactctgacataactggttataattacattgcaaaataattacaaacatttaatcaatagtcaattatgtgagtcactaacgtaaaatttaattcaccatgaaaccgatgtttaattattggtaaaaaaaaaataaataaatgcaagcatacatacaaaacaaaaaacaaaaaatcacagtcaaataaaaaggaacccaaaatcaacaatccaaaacataaaatttgtgttaaaatctacaaaattaaacaacataaaaaaccaaatacaacctcaccgatgaaagtgcccacaaaggatccaaaacataggaattgaaagcaaagaaaccactcctcgatcagaaaatataatcgttatagcgcatatgtgttttaaaacacacaaaaaaaagtagtcataaaaaagtaaaattgaaagagatggtaaaattaccagaaagcgatagacattaaaattcaaaattgaaacaaccaaaagtttagttagtcttaataatggattttttactcaatttatataacaaataatttaaagagaacctaataggcaactaccattaaaatttatatgtagaactcaattatcatagaatcaattcatataagcacaaagttctgaatgtgacattttattaaacacattaagggcttcattttgattccatttctttttcttattttccattatgttccaaacttaaaatcagtgtatattttctaaaactgacagagaactataaaaatgagaaagacaagaaatttaaaagtgaacattgaacatatgatcaacaagttatggaacccatactcaacatcctaaatcctccaatttcttttggtgtgtaaaaagaagatcgcaggaaaaaagaaaaagaggagtaccaaactattttatacaaatacaaaaaaatatattttgtagtagaatgaatgaatggtgggttttaaagtaaaagagatatgaagatgattgaattaacattctttctcaaatgaaaaataaaaaaattgttaaaaactagaagtgaaaataaaaataaatataaatatatatgcacatatatgtatcattttatttacgatatatatatatatatctcagaggagatagatgccttgaaattcgaacaaaaaaaggcgttgcgctcaaagaagttttgcttgggtctactaaacttgtggctaacggagcgcttgggtcgacagtcgaaggatggtgggtgttgatcggcgacgggacatactatcaaaggcaacatagattgaagaaagtattttgggttcgtagatggagggagagatctggtaagaatagtgtattgtgggttcatagtaaaaaatatgagactacaaaaatagatcataagaatatggcatagtgtgttgtgggttgatggtgtattgtcaaattttcataatataataactataataagaattgtccaaagtagaaatgtatttatataaatttttaattgataaaactctttatatatatatatctatgttaattttaaatttatataaattaggaaataaattcgcgttgcgtatattgataatttaaaatattatataagtaaaatagaacatataacctaattctatatgttggataaattcccatactattgtcccataaataaagttacaaggaaaataaattagacctctttataaagcctcaa

SEQ ID NO: 18827 - DNA, 6074 bp, Cannabis sativa
  modified_base (3725)..(3730): a, c, t, g, unknown or other
tctataagatattattccaacagctagtctgaaaaaaaataaattctgaatatatcatttgttgaaatgaaattgtatgtaatgaataaatttggtgttgcttagtctgaactaacaatcttccaagtattccaaaacacgatataaagactaatccatgtcatgatgatcttcatatctgcttcaaatcaaaaatagcaaggtggaaattccagagggctccaaagaagaagaagatgatgagtaagaaaaagaaagtgatcctacttctgatagtggtatgatttcttctaaataagctttagaagtttcattagtggtcatcttaggccatctctaaccgacatgtaaaatgacaaaaataatatggtttcgtactaaatataattcaacaagacttcatacctaaaacaaattattagagcataataattcaacatgccatgtcatcaggagaattatatatatatagatggtcttttggttagacttgacattatcctaaaacaaattattagagcataattgctacttaaaatacttttttattttatctattaagggaaatgtaagaattaagaacaaagacccaatacagaatagatgagattcaactcaaaagtgattaactgattatacaatgaagatgaaaaccattcacttagtcactaaaagaaaagattcagacaacaaaataaagtaaatgtctttttaaccaaaccaatgtaggaaggtgttactactagtactgggcactctgtgtctgtacagtagagaaggtcttactactactgttgggagttttggactcgacattgaagaagtcctgaagagcaatcatcttaatggtgttggtcttcaagctcttgatcgcctctgcagttgccaaagctccagcgatggttgttattacgggaaccttgtaagctagagccattctcctcagctgtcgtccatcgatctgatctagtgcatcacctgagcttgtgatcaccattaactggatttgcccattggataccatatcgccagcatgtggtcgaccctcgtgcaacttcagaactcgttccactgggatgcctgataattcaaggacatgagctgttcctgaagttgaaacaatcttaaatccaagcccttggaaggcctttgcaatcttttcaagatgaggtttggtcaagtcatttaagctcaggaaaactgtgccagatagcggtggcttctgtccagctgcaatttgagccttggcaaatgcaatgggaaactcgtaatcaatacccatcacctcaccagtgctacgcatctcgggccctagtaatacatcacaaccttgaaacttctcgaatggaagaacggcttcctttaccgacatgtgagcagggattacctcttcagtgaaatttaagtcgtaaagagactttccagacataacaagtgaagcatatttagccaatggatgtccaatcgccttggacacaaaaggaactgtacgagaagcacgaggattcgcctcaagtaagaacacatctccagacactgtaatggcatattgacagttcatgaggccacacacattaagtctcttagccaattgtatagtccatgtcctgattgtctccaagcaagaagatgggatggtttttgtcggaagtgagcatgcggagtcaccagaatgaaccccagcctgctcaatgtgctccattattccgccaatgacaacatttccataagagtcagcaagtgcatcaacatcaatctcaatggcatctgacaaatacttgtcaataagcacgggaagttcggggtcaacctttacagcattttcaaggtaggtcgcaagtttttcgtcattatagacaatttccatagcccgaccacccaaaacatatgaaggacggacaacaactggatacccaatctccgctgcaatagcaagagcatcagcttcgcttttggcaattcctcctttcggctgttcaacttttaattccttgagaattgcattaaacctttctctgtcctctgctgcatctattgaatccggtgtggtaccccaaatgcgtacattcccatcaccactagcacatttaagcttatgctcatctaggtacttctgaattggtagagccagctttaggggtgtttgacccccaaactgcacaatgatgccatcgggacgttccaaatcaataatgtttagcacatcttcaacagtcagtggttcaaaatacagacgatcactcgtgtcataatctgtagatactgtttcgggatttgaattcatcataattgtctcataacctgctttctgaaaaggatgaaagaacaagcaaaacatttacaaaatcagatagaaccaaaaatcataaggaataaacaaatataatcgaaaaaagagcacaaacctgaagagcaaaggatgtgtggcaacagcaatagtcaaattcaatcccctgaccaattcgattcggtccaccaccaagaatcaaaaccttcttgctttgggtgggagatgattcacactcaaaatcatatgaagaatacatgtaaggagtatcagcctcaaactcagcagcacaagtatccacacgcttgtatgctggagcaacacctagagatagcctagtttgtcgtacttctgtctcagtcgacttggtggcaaaagcaatctgtttatcactgaaacctcttcttttcacttcatagaaatcatcttgcgttagatctgacaagcttcgagccaaaaggaactgttctacatctaccagctccttaagctgggtgagaaaccatttgtcaatgtaactcagttcatgaatgtcatctatcttcattcccttcttcatggcagcatatacagcatgaattcgatctgggttaggaacacgtaagctatacttcaactggtccaagtcccaatcaagttcctttatcttaccacagccccatccagagtgaccacattccaaagacctcactgctttctggaaggattcttggaatgttcggcctagtgccattgattcaccaacagatttcatttgtgtcgtcagtattggctgtgaaccaggaaacttttcaaatgcaaatcgagggatctgcatgatgaacattggagaaaaataagtaaaagaaagaataacattatgtatattgacaatttcagtcccgccatgcagaaaagaccaattcaaatttgatagatgcccgtgaaaatcaaaataaacctgacatttatggtatttgataaaaacatatttttttgttaaattattgataagacacagcacatagcttataaactaatgcgcaattttcttacgagacatcaaaagctatgatctattccagagtaccacgacatcaactaaatcatcagattcagttatttgtttgtgttttcttctatatttattattcgatgttaaatcatattgccacctttgaaaactactaaaaccatgggcgctaactaaagctgaaccgccgaaggctttaaaaagaattaataaatacaactgaaaaaaagaagaaaagatattacttgataataagaagaaaaacaagataaaagccttagagaagtggtaaacctcctttactcttgagaaaaaaagaagaaaaacagatttgtgcatatcattgaacaacaaataaataaatgtgtgagtgactctattaccaacaataattttaacctctgatatatacatatatatatatannnnnngagagagagagagagagagttagacagacattcaaagcagagaatttgttttctctttaaaagcattaacaaaatgaaattttgctcaaagtttcaatgcaaaaaatgaggttaaccccagcactaaacagtctaacttaaaaataagaactacctatcaccatcccctacaaacttacaagtttaattatgccactctactataaaacgaaaaaggcaatcattgtcatagacaaaacacaaggcatttaaatttaataaagtagcaactgcagcaccaggacaatacaagtttcagtcaatagccaatttacacataaacctatttcaatatctgctgttgtctcaacagaagagcactaagcaccctcaatatttagaacaaacacatatacattatataattacatttatcatccacaaagtaccacaaccaaatagaccctattgaaagttgaaactgtttaccttagcagcaaagtgaaaattagttcagcaaaagagtttgaatatatgagtaaatgtgaattaaataatgtacatacagcacacacatatgtataaaaataagaagaaactatacttgcctttgtcaccacataatctatggaaggctcaaaactggcaggtgtcttccttgtaatgtcatttggaatttgatccaatgaataaccaactgataacttagcagccatcttagcaataggaaaaccagtagccttagaagccaaagctgaagagcgagacactcgcgggttcatctcaatcaccatcacctcgccatcgattggattaacagcaaactgcacattagaaccaccacattcaactccaatttcccgaattatcgctacggagtagtctctcaacctctggtactccttatcagtcaaagtttgagctggagcaacagtaatagaatccccagtatgaactcccattggatcaatattctcaatagaacaaatgataaccacattgtcagccaagtctctcataacctcaagctcatattccttccaacccaacaaagatttctcaaccaaaacttgagtagtcaaactagcattaagccctgccttacaaatagtctcaaattcctctctattgtaagcaatcccaccaccagtaccacccaatgtaaaagcaggcctaatgatcaaaggaaactcaccaatctcattagcaatttcaaagcaatcatcaagagttgttgcaatccctgaaggtggagtctttatgccaatgttcttcattgcctccttaaacaactccctatcctcagctttcttaatggcttcaagcttagctccaattaactcaaccccatatttttcaagagcaccactctcagctaaagccacagccaagttcagagctgtttggccacccatagtgggcaacaatgcatcaggtctctccttttcaagaacttgttccaccaattccggagtcatcggagtaatgtaagtccgatcagcaaggtcaggatcagtcataatggtagccggatttgaattaatcaaaatcacttcataaccctcttcctttaaagccttacaagcttgagtacccgagtaatcgaactcacaagcttgcccaatcacaatgggtccagcccccaatatcaaaatcttcttcaagtccgttcttttcccaactttggaaggtggcgcctccgttgccaccttctcactcctcaccaagttgactctttgagtcttgttctccagtcgagcaaattgagtaatcggaccccatggacgaagcttcaaagcagcagtagaagaagaggccctttcttggtcctgggagcttagtggagccaaacaacaatcgaaaggtgttggctttagaggaatagagggaagaggagaaaagggtcgatgattttgaagagacataattgcagtgattcattgtacaatggctcattctctatctatctcttatatcttctctgagtgtaaatataacagaaaaggctttgaggtttgaggtttgaggtttgaggtttgagctaaaaaatcaaagagaatattattgatttgaggtggagagttaaggttaatggtggaaatggtacttaggtactactgctactgctactactactacagagtacagagtgttgttttttgattttgagtaaagtaatagtatagtactactcaaactccaaacaacactagtgtgttaaagattactagggtttttctttcattatttcgttttgttttgttacgttaggccgttggccctccttattttttaggcccagcccgaattgttgtggtggaagtccttaaggaaagggaaattcataaatatgggaattaagggt

SEQ ID NO: 18828 - DNA, 2516 bp, Cannabis sativa
ctccattagccacgctgacatcctcaaccttccctattaggcttccccattcacgacacttcacacatacatgcaagcggcacatttttaatcgagacccaaaaggaagcatggtcaaaagttattttaaatacctctcctagctccataggtttcacgagacataataatttattctcaaatgtttaaggtccaccaccaaaaacacactgtcaatcctctttgcatctaaaaaggaatcggaagacattcttcgcacttaattcctcaacctaaaatcgatgattaatcttctaaatactctttatagagttctcaagcccttctcaactagctaacttaggaccaatgaacttccccaccaaacacacctccaatctccttctcccatcttcaagactatccttattcagttttgaccacatgaccattagtttcatccagttgccgcacttctgtcaattcgatcactaattccaaatttgtatttggctacaactcctaatcactctcgccaataggccaaaattgcacaatccgaacacatccaagccaaacttgctccctaactcaccaccgcctacaatcctgcccacaccaccacaacacgctgccacacagcaatcaaccagtcaactcccactaactagaagccaaacaacccccaccaatactttatttttttttttagtaatataaaataaataactaaatatattttagtacaaataaattcattaaagagttttttcattaaagttcataacaacttttagttgcaacttcttcgtaaattcttcaataagctgatttttaactatttgccaaacactttcatagcacaacttttttaaaaattatcttttagcttttctaaaagctgtgccaaatgggcctttgatatgaaacttttttcaagctttatgactcgaagcttctcaaaaccaacgatgattttgagtagtatgaccgtgcgactaccattttagttgattggttgcaaataatgaatcacaaatcacaaatattcttcattccctaaaatgtaaagtaagaactactatttaagagttagtttaatactagtacccttaaaattatttaactctttcttatatatgtttttgtgtacactgaaagcttgagattgttatggaaacccctttactatattacaattcactcccacgctccctttaaagccaaatctttttctcacacacaaaaaatagatattcataaaattacaaaattttgacactaaaccactctaagacttggccatcaaaaatctcattttcacacaattaataattacccaaaattcaatactttataaatataaaaataaaataaatttgaatcaaactctaacaatcttcacctcactcaaattcttaaacttacaactcaaacccagccatcaattaatcaaagtcaacatgcattgagttcttactcttgttgaattttttcaacacattctccaaaaaaaaaaaaaaaaaaagaaatgaagaaagaaagatcgaggtcaatgataaataaattatatgtttgcaccaaataatcaaaataagagtctgtgcacatatagtcaactcgacatgctatctccctttgtactcttagcactactataaaaataggttttaattctaatttttaagggaattttatctcgatttttgttaaaataaaaatcaagatatatgacagtaggataaaagctcttataaagagtgggataaaaaaaatactttgaatcgcagtaagagacctatttttatcctagttaaaaactaagattaaatgtcaaaaaataaaataaaaaaatatataaaaaataatcagagatcttaatccataattttacaattttttgtaaatatacagagaccatccagaaaccaaaaacatagtcgaaaaccaccttcagcaaccacgaattaccgtcgaagaccacgaacaatgacgaggcaaaaaggttcctcgaccatgaactctatccactgggaaaggtaaagaacccataaacattgcggttgacgaacctccacaaacctccgtccacctaagaaaagatagaaggagagagatctacactgtacgaaagagattatgttttcggtgaaaagaaatgagatttgataaggaaaaaaatacctagatgtttcctcatttggtttcccgtcgccggaagaaggccactagattgggtgcttcacgaagataggagaggatggctggagtgttatttaattcgagaagaataaagagagagttgcgcaaaagagagagaaattgttagagaaagtgatgaaatcctaaaggttggagtgtcattcaatgcgataaacggtcttagttaaacccttttatcccattttttagcaaaaaacctagacaaaaggtaactaagattcatttggctcccataaggtttttatcccactttaagggagaaaaacgattcttaactaacaagccaaacaagtcctttgatatacataagttat

SEQ ID NO: 18829 - DNA, 4766 bp, Cannabis sativa
  modified_base (2460)..(2494): a, c, t, g, unknown or other
tttacaaccacacaccacacatctatttctgtagaaccatacaatctacaaatggactcagttgattcattgaaattaaataactgccacccacctgaccttattaattgttataaaaaaatgctggcaatactgataatgatttaatcgattgcattaaaagtaaaggattatgccaattgtagcataccaatattccggtaaagatgctgaagtggatccattggcacctttcaatcgggagatttcatggcattggaaggtgtcacatcacacatcagtacaggcaacagccctttaatcgaactgtctcacattttattttattagaactgtttcaagtatttcatcaaacatattgcatcttcttggttcttttatccattaagttctctaaagaaaatatgttttgtttagtcacaagattgcagcatagcatgaccatcagtggtggacaaaattaacatattattgaaacattgagagagggaaaggagaaggcaaccctacttttaattaaggatacaaacttctggttgctaaagaacagtatactctctataagatgcatttataagctcttgcacacttacatacataagcacatgcagatctgtagtaaggtatgactgtctacatttcatgtaccctatattggttcatgccacataacccatgctgtttaaagtttagccaagatcaggaacaatgaagaactcatcatcgtcgacaggcatctcgagtctaggcttcttgaagggagcactggatttggtaggtctatatgagttgaaattgcttgactgtggtactactggaagttgaggaacttctgctggtgccaaggtttcctgaggtagtggctcgccaaaaaagcctgattctgatagccagtccagttctccaaactcgatcggctctttctgctgtaagaacaaatttcaagtttagtaatagaacatggatgaatgaagaaatgaagaagtgtgaatggtgtcatataaaaatgttcatcatcttagaatagaatagaagacttattcagaaccactagacccaacaaagcaaaaaccgcaaaaggattatagtcagtctagtctccaaacttacttcaaaagtaataattaatggtaatgggaaacctagtacttgaaattacaaaaaaattgaaaattgttcgcgtacctttctgtctgtttcgaaaatgttgttcatcagaaaacaaacattagatcctcatatttcagaaggatgacaattagattccaatttcatatatatgatgttataacagactaaagtaggtttctatcatcatcacactagatttctaagcatggtaatcatgtcaatacataccttttatattggtaaggaagcaactcatgctccctccaacaacaagacattaaagtttctaattctaaaggttacttgaattttcagctataaaatgaactccatatttgctttagtagtagctagtctctcatgtgcctgagttcccatacaagatccttgtcccgtatcaagtgtgaaccacaaacaaaatactatgacatttgcaacaaaggctgatgaaataagaatcactgtgctatttcttaccttgtcagaagattcaaaatctgaaaagtgtagcaagtcatcaacagaccaagatgaaccgatgctttgtgctggcatttttgttgaaacttgttcagggttccgatttggtggctctgtgtaggtcgtcttggtgtccttgttacaactggaattcaaggccactcgtattcctgttgccaaaaggcgctggtgatttgaagccagactattagctgaatgaatagattcatcacaatcctgacaaaagagagctctgtcttccacacagaaaatgaaagctgctttatcctgttcagtattaaacaaataaacataaataattagaacaaccttaatagtttgttaagaatatgttttctgtaaaatataagagcgaataagtattctagtttgttccaaatctgtcaagagacttattaaggatcttaatccttatcaatttccacaataactccttcatcttcaacaatattgtaataatcttgatgtgagaaaattaatctccctcatagaagctagtgaactctatctctatactagacaaaggcagataccagatagatactcattaagcaacctcaataaagattcttaattcactgaaaaaaaaaaaaagatattacaagattcttgtatatttgtgttatttgatctgatctatcttgtatgacatcatatgaaacaagagaacccaactttttattcctactgagctacagctcctgagtgataacataccacaacattaaaaacccaacaataataatagtaaaaaaaaaacaaacataatttcataaacatctcaaagataatattaatattttatttctcaaataataataataatannnnnnnnnnnnnnnnnnnnnnnnnnnnnnnnnnnaataatcataataataataatatgtgaatatataagggaataaaatagaaagaaaggtggaaaaacaaattacttggcatatgtcacatttaggaagcttggtggagaggcactgcagaagaagcctctggtgtttgctggctagtttgttggctgcatgaacttcaacgtcacacttggcgcatagagctgcttcgtctgcgcaacaaatcactgtagcaggagctttctcacacacgtcgcactggatcttcatcttccttcaaatattttcagttcaacctgtctgtttgtttcccgagaaacccactttctactttcctcctaggttctcgatagattcaaagaaacgacaaatacccataagccaattcagagaaatgaggaagagaacccgataaagataggagatttttttttcttctactttttttaggcactgaattgagattagatattaaggaggtgaataacccagagaatatatgccactggttaagatacccttcaaacaaaacttatttggctaaaatcaagaccagaacaaccaaaagaagggtgtaaaggaacaagaggcaggggatgaaagaagtttgaaaaagagaaaattatgggtagagaaatgaagaggcttttattaattattattgtgggaagtgtgagaagatatgagaggagagatgatgatgaagaagaagaagaagagagaattaggttgagtggctggagagtagagtgagttgagttgaagataagaattagggtgtagccaaatcaaaagaacgcaaatggtgaaactcaccaaggtgtgtggggtctccaatggcctctcactctctcacgttctatggctgtgtttgagccactgtgactgtgggtggagcttgtggccaccaatttttcagacttcgttatttattttatttttatgggaaaattgagattttttttaacagctgggagagcctgacatgagagctgacaaatcaaatttgtataactgtctcgtaataaactgaacttttgactttgtttgctgttgggaccaaataacattttatccaagcctttgatttgggtcaaactagtgctaacgtagctgctagataaacgagagatgcagaatatcctatgtcatcctaaaggttttcttttttcctgttattctttgttttttttaaaaaaaaaaaataaataaataaaatcaatagataagcaaaatatccaaaggaatctttttttttttaataaaagtgtgccagatagaaaatgtttacaccttaggatcattacaaagtaagttagcggagatgaaagtggctagtaaacaattatattgctagtagatacaagttcattttgtcacattattagctataaaattacatgatttattaatattaaaaaaacaactaacaaaagataaagatccaattacaaaaagaagagtaattctcaaggacccaacgagattcctttccattgagagtattaataaccacctagaatcactcttcataataataaacttacaatctttgactttagttgcttccaatgccaatctgcaagcagccgctttcccacacaaagcatcagaaaactctaaccgagtcgtttgaatccaaaccacctcgccaagatagtttcttgctaccactacagtacacatgctatccaaacctacgttaacaccacaatttagtttgagccaatcctaggggaagaagtgattttcaccaagctcggagcaggactaaggaaaatggaagcataatgatttgcataagagttatgaatagagtcaatacattgtttcacattgtctagcttattattgtgtaccttatcgctctggacccgacagataatatccacaacaatcaaagcataaagaaaaacttcatctgcattaatgacaaatattccacaatcataagaattagtttgtcgagatatagtaattgtcttaacattgaacctagtaaataaaaaatcaacccatttgctttgggacttttgttccgaaaataacttcaaggttgtaataccactagctaacaatgagtccaatttggccaacttaaaaagtataattttataaaaaaaattaaaccacaaattaatcaccaaaacaaaaatataactaaccacaggttttaccatgtcctccccaatagatttaccattgtcaagtaaataatcccaaatctctgttgggattttataccccaaataaaacccatttcaatataatcttatttgttatcaa

SEQ ID NO: 18830 - DNA, 4332 bp, Cannabis sativa
atcttagacaactcgattacaagtaattttttttagctcattattcttgaattacaagtggctcttttgactctaatttctgaatcggtttttaaatttttagtagctctttttggctacatatatcactgaatcacaggtgattcttttaactttactttttggatagattttttgaacttttggtggctatttttaccttactattttttaatcacaaatatatatatattttacttttggctctactttttggataatttttggaattggtagcttttttttttgctctacttttctttggatcagttttttttttttttttttatcaaattagattttttttttcttttcgctttgatatatgttaaaatttgtaaaatatattatagattctatctcaaaatcaattaactctcataccatattaaaattataaaatgcacacaatagttcatgaatgttagatattatatttacttcccactaataaatttataaagaatttaaattgccaagtaatagtcttacatttacactttccattttgtaataaaataaaaatctaattggttgccaaagtaggaaaggtatgtggtgatgacaattgacaattgttactttattcccaaacagggaaaatgtagttgtgatatttttagtgctgttgatatttgtttgtttattcaaaataggaaaagtgacatgtgaacaaattatagcataaatgtcataaaacatgcatagtggattttcttccaactaactgatatagttttctatcagaattcagaagtgcataattatgagcaacaatattgccattgtgcaccacatgagtcaaatatgaaaaagaaaaaaaaaacaatagagtgaataaacaacttttaaaacccagtaagccatttaaaaaaaaaatacacattaagtagtaaaaaaaataactgtataagccccaagtcgaaacaaaagtcctccttttgagtcaaaaatccgggaggtgtaaacttttaaaacccagtaggcctgcactcagagtcataaaaaaacctttagatttttttttttttttttttgaaagaaaggatgtatcacattacattaaatcagttgttacagtactaataaatctaggacaagcatctgtccacaaatcgaccccaacagaactagtaacagattttgttagtgtgtgggccacactattcgcaacacgcggaatggcacaacaagaaccaccaccaacagcagctaagaaataataaaaaacctttagattttagtaggccatacaaaaaaaaaaccctttatttaaacaaaaatataatatttttaaaatcaatcaaaaaaatatgtatacgtttaatattgaaatatttttaaacctttagaataagtgggtcctaggctgggtctgccagcacttaggattctcccaacccaggaccaaaacaaatatatatttttttgtgatttttaaaatactacatatttaacgtaataaaaaaaacaaagaaaataaaaaaagaggtcttgcaagctgaactcttaatcaactcctatagttgtatattgaagaagaatgaggcaagtttgggtttatccctataatagactccacacagaaacgaatagtgaagcatagtataaatgaagcaagtaaaatgaaaagaagagatatgtaagatgctaagaaacaaagtataaatgtaataatctatgacaccaccgagataccatcaatgtggttgtgatattttttacaaaaatgctaaaaattaagttaacgtttacaaaaatactgttacacataaatctttcaaaaatactatttttttaataaaacaatcatagaagaataaagcaaaataattaaaaataacagttaaaacttaatacaatacatagtatttttttaaaaaaattacctcacaatatattagtatagtataatttacatggtaattttaatcttgctagttgctacatatttattattgttgttattaatgttacaactttttatattatcttcacagataataaactataaaatgcatcagaaaaaactaacattgacaatataatcacacttaacatatattataaaccattaatcaattcattagtatattacaattgcatgctaaacttaatcttactacatgtttattgttacttgatattagttttcaagatactgaacatattgttaaagtagttagttaattgataataacatgccttaaaattttaatatatttagttgtcttcataacttagatgtttacaattagaagctaaaatcccttaaaaaaataattatttttaaaaaaggcagcccaaaacaatataaattatgtattaaattaactcacaaaatttttgtaatttaattgtaaataaagtcttgagatgttttgttaagcgatttgtaaatatggttgcacattgtctagcacgatcctctattgttgaggctgatcgtatttttagtagtcactctttgcctactgtaattacattcttagttttgaattatttggtttgattgagatataaattttcttaaaaaaaataccagctaacaatgcacactaaaaaaggagagtgattattttcattttggtatagtctctaccgtatatggtataaattaattgctatagttatttatgtaatattttctaaatattatgtatatcattgaaatttctcctatttttttattggtgttggtctacaacagtttgtgggcttggaccaaaatgcagcagcctaattgtccatttgaatgaaacaaaacaaacaaaaaagaaaaagaaagagagctgattgttgtgagagcagaggaaaaagaaagaaaaagaaggagaaagtggattttggcactaaaactggaacatcaacatactctattctatatattttctcatgttcttaagagataaaataattacaatgctcaaaagagtatcacccagctgatataggccacctttagccttccatttgaagagcactgtccctgtgagtttgttcgatttatgaaattcaagaaacacatcattgttagttattaattggaagacactaataagattctttttcaaggaggggacataaagaacataatgtaaatgtaatgactgtgtgtttgagagggaagggtgtgtagaatgaccaatattagaaatgactaatttcttaccattgcctacagacatggtttcagtgcctgtgcatggggtagcagcatcaagattttgtgttcccatggcaacatggtttgtggctctagtatacacatattaggacttatcatcaccaatttcaggtatcatagttgtgagaagagcctgaggatcaaagagaatatcagattcagtcaagtgagcttgaggggtaaaattaccatatttcagagttacccaagtcttgtcaaagcggtagtgacatgcagctgttgtgtgccctgttcgaaggcaaacttgacagagtaggcgagctctagttctacggccaaaggaatgagttcggtcattatcagtggcattccctcgatcacctccatgaccataagaacgagatttcgcatttcttgattgctgaaatgcaagattcccttgaagcttgagggacagataccgagttgtgatgttcaatacgagttttatgagaaagaaggagggcttgaacttcttcaaatgacagcagatcactgtgagatgttattccagagataacagggtcaaactccggccgaacctaggccattgagcgattgcaagatggagccttgatcattgactggggaccctacgatcagtagtgcatcagcaatcgactgtgctttatcaacatagttagatattaagagattgaatttttgaaggttggagaattggcctttgagttggaggagatgagcttttgtttgactggagaacttctgctcaagtgacgccaaacagagtatgaggtgggaaaggtggccatcgaatcaagaacatgttaagacatggacgatcgcagccatgaggtgggaaagtgatttaaaaaagaggtaaaaataatagatttttttttaaaaaaaaaggtaaaaataaaatagaacaatataaaaagggtataaaatctaatttcctctcattttttgtggtgcagttttcgctattttttaatgaaataaataaataaactaagtaccaactaacaactcttctcagcagaatcaagatttcaaaagtttgatcgttttaatcatcatttgtggaatacaatataacgtaaaacaataacaaagcgaacactaaattcacatcaagatca

SEQ ID NO: 18831 - DNA, 6589 bp, Cannabis sativa
aagagccattcattccgtgggtgtgaggacccaatggaggcttcaagcggggatgttacatttgctgatgctccattatctatcatagtttgggccactattttgttggctatctgtacttccatgactaatggatcattgtgcgggaagcgaacattgacatcatcttctttagtgaatgttttagtgggttcccttactcgtggcatttttggcttcctttcttctatgaccaggaccacttctatttgttcgtgctgtaaagtttgggcatacctttctcaagcttttcctgaatatccagctatatgtgggcccccaatgatgacttgtaaatgcccgtccactggtggaggcagtaacaggtcttggttattgtccatttgggcgaccctttgactctagttagcattgacatatttttgcacatgcgggttattttttcttatcaagaattcaatttgccgcttcagattttgttgcatttattagtgtcatgggcataatctccatgaaaacgacaaaatttggacatatcccgtttatttatgtcctttttcatgggagcaggtttcttgtacagaaataccgacggagtggccatgtagatggtctccacgtcgtcagtcagcacttagaaaacaatgaacttggaaggattctctctacgggtctgtttggctttgcctacgaactttctctttttcccattgcattggttgtcgttgttaatagatcttttgccgcctggattgaactactagggtactgggggttttgggcagatgttccaactgaaggagcctgtggttggcccggtctaggctcgacatctacccgttgaatggcttcttcaagcttgatgaaactatctgctcggtcgaggaaatcactcattgagtctatgggaccacttttcttgatgtctttctgtagctctccaagaatctcgatgccccggagtatggcagctagctttccttctttagttaaccgtgctacttttgtggcctctgtcatgaatctgcttatgtaagctcggagaggctctcctgttctttgcttcacttcgaccagctcttctaaatgcagtgggagttggagagaagaagagaattgtgcatgaaactctaaggagaaggctttccaagagttgaaccttcttagtgtcaacttgaaataccattgctgtgcggcttctgaaagtgtggcagggaaaactctccaacgcacatctcctcgtaccccatgcaagtcaatttgcatttcaaaatacttgagatgcgataagggatcttctttccctaggtacatcttccaggtcggcgtattgaacttgaggggtagctctagaacattgatctccggtgtgcccggtccaactcgagatcattgagcttttgaccggccaggccttgcaacatatttttcagttcatccaactgtgcttccacggatggatgaacctgtttggcctcttgactgatcagtgccacatcaagatctctttgagctggatcttggatgtggatactaggccgagtggctggttgaacatattgttcgtctaaacttctccctctattcagatcatccttgagatcatgagctgtccccagtctgttaaatactggaacaccaggttgtctcaacatctatctagttggtttggctgatcactcacttggccagaactgctagtctgggcaaagttattgggtataaccccacctgatgagttgccagttgccagataataaggtcaaggtctggccgcctaccacttggcccataggttgaacctgtgactggagattggacggctaacctttcagagtctgggcagtatgcccagcatgaattttgttcgagctacccagtggaatgctggacgcaggttgctagttagcaacttggtaggcccaccgtatcagtacggtggcctgtcttgttcggtcgtcgatggttgcctgttgagccttccacatttccatctctctatccctccattcgacaaattggcaccttttctcttcgaatgcaaggttcactgcagcacagagctccaccttatcatgatgaaaggtattagtatgactttgcatgagcctaagagcattacagaagttctggatctcagtgtcatctccaatggttgtctgaacatttgttgttaaaggcattccagtactgcagcaccgtgtgtgattccaggcaaaggatatgtcacaccttgacccgcggtcggtggttgcgtgtttggttgttcaggattgacgactagtgggacccgtgcattccctagagtctgcagtgcaggatacgccaccaacggatccacctgatcaaccacgcctctgcgagtttgtagcaccatagtgtttctggtcaaacttaaagcaaagagcaaactttgattgttgttctcaatgaaagcaccaaaatgttaacctcgcttttagccaacgacaatgagtcaaatagtaagtgatagaaaatataattaaagtgaagtatgaactaataagcaataaagaacacaaggttttagagagtttctaccccgttagtttggtatggcctactcccttgatttgtattaactcaagaacaaagaatacagtgtgtcctctcttgaagctctcacaatgaactctctgagtatgctctcttagatttcgcttaagcaattctttcgacccctttaccagtgagaatagatcactattcatatggctaagtgcttgagggaaggttttccttttgcttacaatgtctatagttggtaagaacatatattacatatttcgtatacacggattgtgggatttggacagcttgtcatatctctgtgataccgtcgcagacttatagggattgcgtttgtgcttcacgatgcaagtcttgaaattgctaagtgttgatatgctgctcggattgtctactactcggttgggagacattatccgtgctagtgtatgctaatcttcgttcggaacatctcttcatccaaatgtagagaataaggtccatatgtcaccaacatatgccgtcacgtcatagtgcaaaaaataggataataccttgtaagtgaaatggattaatttcacctacttaaaacaccaaaattaataggatatatagaatttaataacttatattaataatgagacaatatatatatatatatatatatatatattttttcaaaaaaagcacaatgaaaactctaaacaaataatttttgttgttggccactttatttttcaaaattgttttattaccatacattttacttctgctaaataaaattgctttttttttttttttttttttttaaagaaaaagaactttattaacatagatataaactaaccgggttcagtactctcataaaaaatttcttctgaaaaagaagttgaagctttagcaaatccatgacatacactattagtggaacaataaataaaattctaaagccatgcccgaacaaacaattaagagttacaacataaatatttaaatttaaattcttgttgttaataaatatctaaatttaattttaattaatatttaaccgttaaatgcctaccgaagtcctataattataatttaattattattattgctgaaaattaaatttaaatatttatttacaacaaaaatttaaaattaagtatttacagcacaaattactcaataattaattatttacaatcttaaccacagttcgagccttaataaaatgttaaggtgatcacaaacaaccaaaccaaatccatactagtgagtctcacctaataaggcactatccacatttatatggacttatgatccatatttagttattctttcattacaaaaattttacctcttaaagaatttttaatacattaatagaaataatgtgctcaaagatactaaggtttcggttccaccaaatacaaaaaataatgcacaaactctttttaggttttggtcgttcatattttttttcgcttttatttgtatatttttttaattttcctttaaaaaatttctttcgtcactgcttttcttttccttacttgtaggtatttcagctctctctttccaaacaaaaattgacacttaaaaagataaaagatatcacattgaaattaaaaataacataaatgaaaactaggtacaggcaattcctctactgttgatatagctgtgtaccttcctcagtcacatgagtgaaagaaaatatcaaatgaaatcaacaccttgtcctttttttatcttcttattttctatttttctctttctctttcacctgtcatcttgtgtacagttacttaacttcttacactcttcataaatgttgtacagaagggtttatcgtgttcccaacaatacccccttctcttgacttttcaacagtactgtccttgtgatatttctgttatttaaattattaatggagaactataaatatatgcaatgctacattttcgattatctaatgacactcctcatatttgtcaaaacaaattaaatgttcttttctcagatcatcttttactgtattctttccatttttatgtcattgtaagacgatctattggtttcatttagccaaaagtacaatgaaaaattgctattttcaaatttaatcttcctctctattatatgtgcttactaaaccgcatttcgaaattcaatatgagccattgttatgttataaaaacaaaagcgccatacaaatcataaaaaagaagaaaaagagtgtgggaaaccaacctttatttctccgtttttggaagtgactttgaatgagatcaactcatttttggataatttgagcgttactaatttagacctattttcctgtttcagtgaatatgctaattgttagggttttatgacagtctaacttcttacctttattaactataagtggaattacgaaacattagaccccactacttgttaggataatatttaggggtagtcaggactttctttatttttatacacaacacgtaggtgtgtgaatatattatagtaaacctgtatcatacacatccatcaatattatacttattgtgatatagcatgtcaatgtagtcgtacttttagtcaagtataatattattccgaataatactggattgctgtatgctatgataggagaaaaagattaagataagtctatgtaatattatttagaaaaacatttgtacatgttatattatttaaaattatttctcaatttcttaaaaattcccaacatagttaaatataattcttaaatattttgttacatacatgtatgaaagcagtgatggactcaaaaaattttctttgtggaggcttttaattattaaaaaatatttatacttatattataatcactcttattagatttatttaattttgtaggatttttctactattttagtctataattatcaaattaaaaaaatttaattaaattttttgaaaagaaatattattgttattcacattaacacaagtgggtgtgtccctgcatgaatgtttttttttattttaattattattcttttattcgtagtaagtgcctatttggacaaaatttttaacactgtaagttattttaaattttttataaatttatagatcgatataaataagtacaatgtacacaattataaaaaagaaaataaattaaaaagttctctttatatgccgaaacaaataaaaaatttactaaaattactcttttaaaggttataactttttaatttaagtaaatcttttgaaaacatatagtatatacacccccttttattgatcttatatttatttccgcatgcagaataatttgttcattaatttttttcatgatcttatgtgttacagataggactaccaataaatttcagaaaaattatgaacagtttgtggtgtccaaagttaaattcaaacaattgtttattaccatatgataagaaaaaatagtcaagcgtgttcaattaaatatttaaattttatttttaacactgtaaattattcaataaaaatttaaaatttataggtgaccctaaataactaaagcgtatataaccattaaaacaaactggactaaaaaattctcatagataccaaactagataggagatctaacgaatgccacataataaatgtaattttttttaattataattttgcaattaatcattaatgatatatttaaatacagactttttaattataatattgtcattaattattttttaaatatttaatttatgaataattattaatgttgttttatttttttttttgtttttatctatattttaaatgttattgtgcgcacaatagtaagtatagtttgtagcaaatataacatcaatttatattcttgtagcaaattatgcaccatgctctaccaaaaaaagttacttttagtaataattttttagtcacatcatatttttttgactaaacgtaacttctcgttacaataaaaaattacttgactaaaacacatttagtcactagaaattgtaatttttgtgactaatacattttgccacagacattttactcacaacataagaatgatgatttataa

SEQ ID NO: 18832 - DNA, 3845 bp, Cannabis sativa
attttatgacttggaccaatcaagactgtcacgtggtcatttacttgacactaaacagccaactacctacaaaagtttcaaaaaatataatttatgtattattactgtaaaaaaatcaaacttatgtatttatttgcaaccgagagttaaacttaagtatttggaacgaaactcgcttaacatttacaattgttacacatataatcttaataaaaaaattagtgtgacgacctatttcttcagcttatttagtacgtggttcaataatttgttgtcatgcatttttgagttgatatttaatgattaaagtaacaaaattataatataaaatccctaatttttttaattaaaaatatatgtgtaataattataaatattaaataaatttcgtcgtaaatattcttatattctattatattttattagtgtgaaaataaaattccccaaaaggaatatactagagaaagatttaccaaaatgtttttgaaaaaaagaaataacagaagcatgctgtgctggattacacacagtgattttcagctactacttcttgagcctcccgccattgctgccctgtccacagtgtcttttcattctcatcactctgcaaaccatcacccataaccagtctcttcatctcctttgttccctctcattctcattccctctctctctctgttttcatctccattctctttttttaaaactgaaaccaaaaaaaagaaccgaactttaagccatgaacaacacctacggcaaacaaaagcttgtagtggaagtggtcggagctcacaacctcatgccaaaagacggcgaagggtcatcttctccgtttgtggaagttgagttcgagaatcaaaggttaagaacacaagtgaaatacaaagacttaaaccccatttggaatgagaagctggtttttcatgttaatgatgttaatgatcttccgtacagaactatagaagttaatgtctttaacgagagaagatcgagtaacagtagaaattttctgggtaaagttcgagtttctggttcgagtattggttgtaaagaaggtgaagaggttgttcagcttcatacacttgataaaagaagtctcttttctcatgttagaggtgaaattagcttaaagctttacgtttcgagtagtgaagaagaagaagatgttgttgttaataaagttgtctccaatgggttttctaagaagaacaagaaaatgcagctgggacagaatcagaactcgttaatggcgactcagcagagaaatcttgtacaagaaactaagccaactcaacaactgggtcagaagcatttggatcccaatatgggtgagatgaagcctgttgttataacaactggtccttctccacctcctgtcatggccggcgccggcgccggtgctggaacgggtgggatgagtttgtactcaaatgggtcgaatgagttttctttgaaagagactcggcctcaactcggtggtgaatcgcttcagaaagacaaaactagctcaacctatgacttggtcgaacaagttcagtatctttatgttagagttgtgaaagctagggagatttccatgtttggtggagctgatttggtggctgaagttaagcttggaaattacagaggaattgctaagagaataagctcttctaacaatgttgaatggaatcaagtctttgccttttcgaaagattgtgttcagtcatcaatggctgagatttttgttaaggagagtaataaagatgagttcttgggtcgtgtttggttcgatttaaacgaggttcctaaaagggttcctcctgatagtcagttagctccacagtggtatagaatggaggataagaaaggtgataagagcaaagctggtgaagttatggtttccatttggtttggtactcaagctgatgaggcttttgcagaagcttggcattcaaagtctgcaaatgttaattttgatgggctttgttcgattaagtcaaaggtttacttgtctccaaagctttggtatttaagggtttcaattcttgaagctcaagacattcttcctggtgataaaggttcgagcttgatgaggtttcccgagctttatgtgaaaatacaagtgggaaatcaagttttgaggacaagggttgctcagcctagtccaactcgaagcctttctaatccttattggtgtgaagagatgatgtttgttgttgctgagccttttgaagactacattttcatttctgttgaggatcgggttggtcccgggagagaagaggttgttggaagagccattcttcctttgatggcaatcgaaaaacgaaacaatgagaagcctgttgtgtcaaggtggtttaacctcgacaatgggcatttcaacagctcttctgaggcgaaaatggtgtctagattcgggtctagaatccatcttcgggtttcgcttgatggaggttaccatgttcttgatgaagctactatttactgcagtgatgttagaccaactgagaagaatctatggaagcctcacattggagtactcgaaatggggattttgggcgccacggggcttatgccggttaagctcaaagaagggaaaggtggctctactgatgcttattgtgttgctaagtatggtcagaaatgggttaggactagaactgtggttgatagtttatcacccaagtggaatgagcagtatacttgggaggtttttgatccttgcactgtgatcacaattggggtttttgacaatgccaaaattgacaagaacatgtctaacaaccctagtgttcgggattcacgaattgggaaagttaggattcgattgtcaacacttgagactgatagagtttacactcattcttaccctcttttgatgctccacactaatggggttaagaaaatgggagaagttcatttggctgtgagattctcttgtactaatatgactaatatgttgaatttgtacacattgcctttgttgcctaagatgcattatgtgaatcctttgagtgtgaatcagttggagagtttaaggtaccaagctttgaatgtagtggcgtcgcggttgagcagggccgagccaccacttggccgggaagtggttgaatacatgcttgatcatgattctcacatgtggagcatgaggagaagcaaagccaacttctttcgcctaatgaatgtcgtgtctggtctcgttgacatggctcgtggggccgaggcaatgaggaattggcaaaagcctgtgtattcagctctctttgttgctgtgtttctcatgttggtgacatttcctgagcttattatcccaactgtgttattctacatggcctttattggcctgtggaggtatcggtcaaggccacgccaccctcctcatatggacattcgtttgtctcatgctgagagtgtttaccccgatgaactcgatgaagagtttgattctttcccaactagccgaagtgctgatcttgttaggatgaggtatgataggttgaggagtgtggcgggaaggattcaaaccgtcgttggagacatggcttcacaaggcgaacggttccaagcgctgatcagctggagagacccgagggcgagcttcttgtttgtgatcttttgcttgattgcagctgttggtctgtatgctgtgccaatcagagttgtggttgctttgtggggtttgtatgtgcttaggccgccgaggttcaggagcaagctgccttctcgcgctttgagtttcttcagaagattgccatcaagggcagatagcttgttgtagaaatcttgttatggggtgtttttagatttggtaaaaggatatgattagattaaggaaagggaaagacttttggttctgtttt

SEQ ID NO: 18833 - DNA, 6090 bp, Cannabis sativa
tgattgtctttgcagggaaggctactataataaccataggtgggcttgttgctggtgcagtggtgggttcagcagttgaaaattggttgcaggtagatattgttccttttctgggtctgcattctcctgctgccgtagtgagcgaagttatacttttatctcaattcttagtgtcactgtatttgaggtagagctaaaagaagacagtgatagtaactcaattgtgaaatctgtaattatgcatttccatgatcatacccaaggccttttttttctcccctattaggatgtgtatcattgcatattgtacaaaagcaaattttaagttaacagaatcatttggaaatatctcccagaataatagacatgtaaaagctagaacattctgttttgcttttggtatgtaagatatctgctcttctttaagaaaatgttgctcaaatcagtattgaacaatgaaacattacatgcaacacttaaaaagaggcttcaaaggtaactgggccatttttgtttttgttagtattgtcaattcacaccatggctttgcagtgtgagaatgatatccaatggcccatcaggagctgaatatgaccaaagactgtctgtattctattttctttacatacagtagtctgcagcaatactagtcatttctttttcacttgtcaggaattattgcccctctgctctgcttctatcaaggccagaatataataatctttgtggttagataatattaaatcaagtcattaattataattatctaccagaaccaaaccccatttgccctttttctgattacatcataaaaataagactttgtgtttaaaaagaaaaaaataaataaataacagttaggaattcgtggttacaacactccaaaagattacaaagcttgaataaaatgtgtctcagcgagctgctttgacacatttgtatatacaaatcaacaagacaatccaagaacccaattcattctctctaatatttcatctgactactgttttgctcaactttagtagtgtcttctatatatgacatgttcccagtcttctcagagttttcattgtcattcactagatcattgtacatgttctgagatgccttggagaattcgattaaggactcgaaaactgtacaaaacccggtttgaaacccgttcaatgtcatcctttgagtttccaacatgagattgtggtgtttttccttctctacatctaaccttcttctcaacatgtctagctgatctttcttctcggtcaagtattcattccggttttcagcatctgattcattgttttcggtaagtttcaattcgagaaacctcccctctgtcttctgaaatgcaagaactcttctgtcaagttctttagctaaactatcaacttttcttttctgtagctgttcttgacattgctgatcaaaaagagccttcacatctttagcaaagcttttcaatgcaaaggccactgatttatctggcaatttctctatggaggctaaccagtcatggcatatcatgagcaatggcggcccattgaccctgcaggacactgctgatcccttgcttctagagtagaattcaacttcagggactatgaacttggttagccaaccatgaagagcttcaacgtatgctttctgggccgaaacatattccacaaagcacgcacgccagttattaagctcaaccttgagctgaaccgttgctgcctggtgagattcgttactgaatttcccaaatgcagaacaagtgaaagttttcacttcaatcagaatcttattctgggtttcatgtgattccaacaatagtttccatgttcgagttaatctgcacaaagataacacaaaatgttaaaccaaggaaacaacaaaccctttaaaataacttgactgttcttggtatcccattccactttccataccctttcaacagttcaacaatctgaggcagcaattcttcatctcttagtttctcgatctttatcgagattgattcagcgctcctaatagcaaccaagatcctggcatacaaatctttcactgtagctctagttttatccatagttagctcatcatctcctctaacatccagatttcttaagcgcgaacactttttctcatacagtttccttgtgctatcaccagcctattggacatcgaaaaagcatatcacatgagttttaaggaacacaccacaaatggtcttaagggaaacagttttaggaagtgacaaaatgtaccttcacttcttcatagagctttttctcccaagcatatattcttcctagtgtaagtgaatggcttccggcagccattcctccataatcatcgaaaagatcattcctaaactctgtccaagatgaactacttttggaggttgatactactagactcttacatgatgaaggcttagacgaaatggatcggtgacgtgcagactgaattagttttgttgagttttctgtattgaataaaacaattcaagaatcattttaagcacaccaatatagttatgaaacatttgaaagtaaatgcataatatgaaccaataaatatgaagtgaatatcagacctgtcatgacaaaaagcaggagattggccaaaatttctcagctagaaattacacagaaaaattgcaagtggaataaaaagtgaacttttgtaatgaagcctatgaagaacctggtcaaacatggaattgttgtgtatgtatgtgtatgtgactagaggttaaaccaagtctggaagttgtttttggaaatgttaaaagttaaggaaataaatagaaaatcccatctaaaatcttcaccacactgaatgaagttcagcttagaaattgttctgcaactaataaaatactcaaacacagccaagtgattaatctttgaaaaaataaagacccacctttgatttcttccaaaccagactgcatttgatccacattagcctctaacatcctagaaacatctatcagagattgataagccttctgaaaatagtcctcaatatccttcaaagcttccaaaagctcccttccttctactggtgtgtcaatgacagttaacccctttggctccacctggttcaaattggtagtaccttcatctatcttggtaacttcattgactactgttgttgttccattctcaactctcttttcctcattatcttcatctgcagcagtagcagcagcagccacagcaaccttgttttcttcctcctccagttcaggaatcccttcctcttccctcaccactctcaaaacttcatcatctaagttatggcggtagccgtttataacctctggtctgttcacattgtcaaatggattaaagaaatcccacccaaaatctctttgtggtgatggcattgaaggtggtggcatttgcatgtagaagtacccacatggctgatgatgttgttctcttatcacttctctctcttgttcttgttcttggtcttcttcttcatcttcatcttcttcttcttcttgctcttcagagtctgaagaagatgttgaggaagcacatgaaccacagtcaacagtttgacaggttgactcagatggcatttgttgaaggaacatagggttggttataacattctggttttcacatggtgaagaagaagaggaacaaggtggtgggaaggtaatgaggaaaggtgcagaaggagaagaatggcaagccacaaagaggtttatagatgctgaaactgcataaagagactgagtatacctccaatgagcttgagcaagagcatgtcttttatccacagctaactttatcttctgttttctttctctacaaatggatactacttcttcttcttcctctagcttagaagcaacacaacccatctctaaagttttgatttttctaactttttttcacagaataactgaaaaggtgggatcttttttattttttattaaggagaaagaaagaaaaaaaaaatgggattatgagaggaatctatatattcctccctggaaaaaaggaggtggggttctgcccaaatgtggaaatggtttttctgatctgagaagtactagagcaaaatatgtgtcatctcatctcatcttctcttttggtgagtatgaagtaagaaaggtttttcaccagaaaaatagctcgtggggacctaaaccccatttaatctgattaaagagagctttgctatagcagaaacataaaaagatttcctttttttgctactaaaccatctcactgttttgttaaacacatgagagagaaagagagagagagaagatgacagagtaaaagactaaagaccaggtagaaccataggtgggtaagaaggtaggggctcgagaaagagagagaagaagagagtgttcttcttgtgtttgggtaataatatgtgttaaatttttcatttttaacttaaacacagtttaaagctattatttttcattttcttcaccatgaaaggaagaaaaaaatgaaaacttgtgcttgttggttaataaaaaaggagtcaaactaaggtaaaaggatggtcaccattgcagaaaaaccagagaagtttttgtcttgtccctaaaaaaccttttatatcttttctcttcttttatattcttaatagtaattattgttattattaacaacttctaataatgagagtataattgtgcttcttactataaaatcaagttagttaagtatgagtttatttaagaaactttgaaaaagtcagaactgtcaattttatcatcagtaaagacaaatatatccctcataagatttggttattattttacaagaacactagattttttttttatttttttgaattataaacacaattactacactagatttgatttgatttaacattgaaagaaaaagaaggttcttttgggttcatttatgtttcaggtgggtaccatttttttttttacctttgaattctttgtttagagttcacgtgagcacttaaaatagtttgataatatattaagcattatttattagccctgaaaaaacaaaaagaaaaataaaactattgtgttttaaaaggactagccacataagtaacaaggtttaaattcaactttctaaagtacaaagtactctacttttactcatgtataaggttaaggttaggtaatgtgatgttaaaagaactaaaatacccccataaaaagtaaatagctacttaaagttgtaaatttataaatgttataaatttaatatttatttttagcaacataaatacttaatatttataaaattttaattttctttcagctttatcaatacaaattctattttaaatttattaaaagaatatttgaaagtaattgacactgcataaaaaaaactaaaatacctcccataaaatttaagataaatagcagtataagtactcaaaattttaagtttgtaagcggtataaattcaatatttatttttagcagcataagtactgaatgtttgtaaaattttaatttttctccagtttcgtcagtacaaactccattttaaatttattaaaagaacatttagaagtaattaatattacatgtttttgtctagacccaataatttagaatctaggtcttatatgtacgctctttaagacaataacagagtgacgaaattaaagaaaaactacaattttataactattgggtatatatactgctaaaaataaataataagttaatatcgtttacaaatttaaaactttgaataattatgctgctatttatcttaaaatttaacaaagaataacaattaataaactattttttgtgatttaggccatctccaatagcacactaaaaactcatatatagtgtattttttcttataaaatattccaatggaactctaaaacttatcctattttgatgagagtctatagtgtctcattaataataatggaatattgtagaccattatattaatttttttgtgtaataataaaaaatatagctttttagtgtaattttttgtgttataattagaattaaaataaataaataaataataataataataataccaaaatagtacttttttagtatagacttaacactaaatttgaatttcctta

SEQ ID NO: 18834 - DNA, 14846 bp, Cannabis sativa
gacatgaagataagtttgtagataaaacaacaaatatgaataacaaaaagtggtcatttgtgcccacaaaacacttagcttccacctcaatatttgcctggcattcccataatgcacgatacaccttctcctgatgatcaccataacaatgcccataataaggtttcacaacgactcctctcttagataaagcatgattcgtaggaatccaagactagcaaattttttaaacaaaatgttttacctttgacggaagctttaatttacataaaaatttctaccagtgttccatatattgagtattagattgtgttacctcctcctgaatatcagctgccactctataccctcttgatagaatactctttatgtttgctataatgccacctaattttatcctccaaatcccaaccttcacttaagattttaaggatgatctctgtatcttcctcattaatcacatctcgaacgaagtcatcatcataagtcccattctcctttaaattgatagcattgagttgatccagaattggtggtcaatcataaattttaaaactcagtggttgtggcacccatctgttggtttttacagttcatatcaaagtcgcaggggaagcatctttagttttataaaactattttagattgaatctgacatgaaccataatcccaagatctcatcaaaattacagagattaaatctaaactacaagaataaggattttatctcttgaagcctattagaggatccttgtatcttttcgtatatccaatccaattataaatataaacttgttgaagatttcataccacaatattctaaatcaacctcaacactcaggataaaagtgagcttataagattgataagatgaatttcttttcgcactcaactcgtgagacactataacctgatatgggagaaaatgccaaacctttagagagagagagttcaactcttttaggattttaggattgagaaatatatcgtatattttttaattttttaaagattgtatttgtttctcataatacgtattatctatatatatatatcatatatatattaaaactttttttaatccattataaaataatagataatattattttaaatttgacattcaaaataatataatataactgaataacagaatcagggtatacctttatttttttatattatcctttaattttaaatacattatcttataacatatttaattcaaataattaaaagataattattattttattttaatttattttaaataattaaataatcaaaacaaaactattttgcctttatatgtcacctacacgtgtaagccatagcaccacacgtgcgggtcatattttaaagctcaaaattaatttctcaaatttgtcttaaataagatttattatttattttgcaataaataataattgattgattctcattagtctcttatttcacttgtgtttaacgagttttttgaaaatcaataatttaaatgtaagagccaaagaataataattcagaaataaaagaaataagaacactcaagatttttacgtgattggggcattaactagccttagttcatgattcaatattattaaagtaggttagaaaagccgtaggaattacaagaaggtatgagtactctctctttttcctaggcaagttgagtaaaaaaattctaacccttttcatgcaggatccgttgagtatttatagtgtatagaggtcatactagttactcgttttccctataatggggagtttacaaattatacattaactttgggcttatttggtgaagcccgatccatgaggtgcctagcgtatgttgacatggaggccacatcacgatgctggttgtaaaaaatgtgtcctatctttgtgggaattaatgaaagattaattacttgattgccagttaccatctttccttatttagaaagatatgatcttttgtccaagattattagaaggaaatccctgatcttatgcgatctaatagtaaataggaaactacactgggcttttgaatacacgctaaaggtttcttttggctacgcaattttatttcttccgaaagctaaccatgctagatgggatcttgcctggatgagttgcttattcttcattcggaaggactgatgatttatggatccaacccagttatctcaattgggctcattggttggccttaggtatttaatctaaatttactaagggaattccacgtgtcccaagttacaaaaatggataatatttacccccaaccttccaaaactttgagggttgcggaggcttgctccatactgcacggatggacatgtggaggctaaaggtgaagcctttaagaatttcaaattaacttcaaaggtggttgacaactttcctttttttgaattaaggtgatacatggtattgcttcattggtttgtgggattaacgttcatcgaggaagcacttagagcagagttattagactggcggtggattatttcagtgcgagtctcgaggggaatatcatcatgcagatttccttgactccatatactgcattaaatttttgattgatggcattcccaaaccattggatttgttttgcgtattctggaacttgatcttggcctttgactttgggaaggtgcaaatcaccctttttgagtataaatactttgacataccattgtttatcatttttactcaaatttcaaaccacattcgaacttgcagagaataatcgacaacaaaccgaaaaattctggagcaatacatcaattttttgctcccaagaagttatggaatggttggtgaatttatcaaaccaactacttacttcccctgttaatgaggtcggaaacaatatgcatcacaagttgtttgaaatagtacttgctattattgtattgaaattattcacgtgggcaacatgatcagtagtagcatcatattgcgagacatgtggaattttaaatccttgaggaaattatgagtttaggatatcagggtggaatggtcccgtttcttcatccgagtcatccctagtagttttccatactctccatcctagtattttctaaacttttcttctaattgtattactcgcaaccgaatgggatccaaaggatgttgatctgtgttttgattgagttggttacgcaaattgggtgcactgcgatttaaatgttcacgtaggtctgactgccttcgatttaatcgttcatggaggtcaagttcacaaagtctctaatcgtaattactcatagatctagtccttgagtaactttcagattggtatctacgcgagttactcatactttttgattagtaaaataatgttgtgacctattcccatctcgtgtttgcctatgagtcccagttgacctactgggcctgtgagatcttgactcccctatacttgaactagctcaacataagtcatctcgcattggccttcttctccgaaagagattcgacacacgtcccctacctatgtatgtatgtgtattttctctgtctgtgcaagaaggcctttatggatgactcgggggtcgacctgacccaggttgatttacaggatttctcccatcatgacgagggatttcttggctccctggtcatgactgccttgcatttgcattcatgtgagatgattctagtatatcaggttgttcattcccctagtttgtaaatccatgggaaattattggaacatcacgttgatgctcttgatttcttgtgttgcttgcattgggttggttttctctatccattgggatatcccttgtattcgcatgttggtcttcctgtgtatttatgggattcccttgaacattttcttgcctcctggacctggaaccttggggtcttccccgtggtcaccttacatatggatcaggttgagtttgaggagtgtttgcctatgcagccttggctgccgcaacctcttgttccaacttagcatttcttcgatttgattcatctaggcattatcgaagttgcctattttctaattccactagtgggacatatctggtgggatcataggcgtcttcactttgcctctctgggatttgttcaccagttggattgaagtttctaccgtttctcccaatatgatgggtttcaattgtgttggttctttgtgatccctggggttcttttccagggccatgggtagtctcctctagatggttttcttcgtttcgaggggtattattttccatagatataggtttgtaattgtgtttaaaaggagggtattttctgagttttttattacaaaggctctcaacgaaagtaccaaaccgttaacgtagatttttgttaaccaaaatataattttacgtaataaatatactacagagttgatgatgacgataaatgaacaccagatatttttacatgattttatagttaaaatctacatactccacgaatccatcttattatgaatgataatctagatacagagtacaaattctcttaatcaatctaatagatagctttttttctcaaatttgtcgttctttttaccctagattctgcccctatttttaggtgtacagggtggcatttattttctttgggatctaatcattcacaactgctcatgagatgagaacattcctcacatttcatttctatgcatataggataatatttaataactacccaactgttcctttatctttatctttctccttaaacggttctgctaactatgaaggttgtctctcgctaagtacgagttgtccttctttaccgtccttgtagaaaaaaatgctaagtatagatagacttctcctcgcaatactcttttactttgatggtattaacgaggtgattatttctacgtataaatggcgagatggatgaatgtagttattatctccatatacacatatgtggatcatttagttgcaggctcttatttccaagtatgtgggtcaatgagctgcaagctctttactatctcttcttgaacacttttgatatgcactctgtctatcccgagatgtacttataatctagtcaatctttaacgggttattcttatctcgcatttgcttatgtgacatcaagtttgaatatttttatcaaccataatttattgaaaccgtaatttatccaaattgtagcaaaaatattggcaaaattttatttcctctatacggaatcattctggttacagatgatattttatctttcttttgtttggccttcgttgttcccaatctcatcatccaaattggatacttcttgagaatcttgattctggatgtagggtccggtggggacctatccaagttgttataagagaggactcgcccgtatccttgctatcttagttagtatggatatttatctgcttgacatatttccctattactctttcagaatgtaccatggcgaagggcgaccatcatgaagaggttgcagtagatgaggaagaatttgctacaagatcaagcctcaaaacacgtggaagtataagcacaagactatattttatcggcttgagaggtactctaaatctttggtttgtctggctagctccgtgatgcacaccaacaactttcaggattactagttttatacctcaggtttcccactgaagagggttcgaactctcactttagatttcaacactacaagtaagtgtagttgttgatccccttttccttatttttttcttttttcccttccatattcgaaatttgaccaagtttatctctttttgttcttttagacaccatacctcatccggttaagactcctttcttggaggtcaggagaattttgtaccagagtttttcacctgaagacttgcaggtgggaaaactcgtcttttcaatcaaccttaggaaggttagcttacttgctccccaccagagcatatattcctttcatgtcaaggactcactctaagaccttcacggcgattcttctgagcttaagcaaacaattgttgaaatcgttgctcatgaggcgctgaaagccatcaagaaggaccaagagtggctagctaattgaaactagagtcatatagcaactttaagtgaagaagaagaactctatatcctctttgagactgtagtccagaacgagggtactccaagagaaagtacatctgaagaggtaaaacacccttctacttagttcgtgttctgcacttggagaacttaaatcattttgacctgggtggatttgacccacattttcggaacttagatcactataatacccagttgctcaatatattgatatggtagatgaaagaatcctaaccacttcattcagtctacacaaacctttaggattgattcttttcttgagatgaagtatctaggattcttccaatatgagacttttttaggcaggaaagacgtttccctgtttgctagtggaaatcctaagtataatagaattaatgatttggaccatacttgagcttttcctttaaattttattgcatgtttttttgttgcttccgtgatactaatgtttgtgtttctttttgtagaaaatttattggtagaatttaaatgaaagaatgtctaagaatttaccgaattggatagcacagaacaagaccttgacattttttgaaagattgtcattaagcttcttaattacaactaatcacagaaataaagtttgatttgatctaatcaacagaagaccaacttaaaatgatatattaaacaaacctaaacacgagacctatcacaaaaattagtgacctttctcttaagttcaccagttacagacaacacatccttgaaattaacctcaacaaaacctctcaaaagagcaaagtcatcaaataatttattttgagaacaaataatttcaacaaccttgtatgtcaaagattcaatatcaggagaaaccttctctcccgaagaataaccaacattaatggtaaacttaactggggcacaatcagcaattaaaagatccttaaagaaaccatccagggaaaactacttaaactcttcagaagtaaggctcaagttcttcacttgtacctataaaaaataacaacaaaaataaattaataaaaagataaaattaacaacaaattaagcttaaaacaactataatacaactacaagcaaactaaatacttaccattttaagagacaaatcaacaagcttcattgttagatcatgcaaaggtggcataccaagaccaggatactcaccactgctccaatttaaaattcttggaatacgagaatgtacacgtttactaaaatctcgtatcttattcacacaacattcataaaaccacacttgaaaatccaagggcaactcaaatgtctataccaacttgataagcttttcactttcatgtcattttcttcttaataccatgagcaacattacccttaaaagagggaaatgtcaactcaaaaaattgtctaccctaacaatactcatcccatctcccactattaataatgtcaatttctaccctactaatctttttttcccttgtgttactaagaagaaagcaatgaataaaatagaacacatcaaccttcaaacccaaagcatcatcatttccccatacacaacctgaaataacatcctcaaacacatttttgagtgatttgtttaacaccccaaaaacatgtgtcaataatatagcttgaattctaggaaaaatccattttgtttcaatcccccatacaatccaaacccgaaatcaatgcaaactctttgacactaaattaaacacaacgacctcaaatattagcccaaaattccttaacatttgactactgcacctctcttaatagaattccatgaaaaatttgtgggtagaatttaaatgaaggaatgtataagaatttattgaattgggtagcactgaacaaaatcttagcatttgctgaaacaatgtcattaagcttcttaattactccgtaactacaactagatacaactttagacttgtaatgatcagacacagagaatttgcattctcattcttgaaatcaaatcaaaaagtgtcatgatcagaggaaaatgtcaaaacaaatctatatagcaacgagaataaaactattaacaaactattaaaaaatcacaaaatattaaatcaataacatatgtcacaaaaggggctaataccaacgataagcataaaaatacataaaaaaaaatagataacaaaaaaatgaccaatatgaattgatttatataaaacaataaacaaaaaattagaaataaatacccaaaaaaacaagttaatttcatggagggaaatactttcagccatcaaaactgagaaaataacactacaaaatatcaaaacaactaaacaatctgaaccctagaataaagtcaaaagaatatacacaacctaaaatagaaataaaattttaaagttgcggcaaaacaaaaatgaaaccaaaaagaaacctttggacttccatctacttggttttttccattcttaattttaaggaggaaaatattttcagccacattactcttcaatttcttcttaacaggtcaacgatcacgtttagtcgtagacaaagcaaaatctaaatcatcatcttcaacaatgggacatttgcctttagctttgttggcaagagatttaatacctatttttgaatattttttcaacaatagtgatggagaagatgaagaccaagtaatatccatatatatatatatataaaacagttcaaagaagaaaaaaatgggagaacatgtgggcaattgatggaggaaggaagttggacatgatggaggagatcaatttttttggatcaaaagagagttttgatcgtgggatataatttcaaacagaaaccgagattgaaaatagaaatgaaagctaaaaatgaaaagaaaaaaaattagaaaaagagagaaaaaattggttgagtgtcaaacttgtcaaatgatatcatgcatgcaaagagcgtgtctaagtgatatttttgtaaataaaagaatattaaaggtaaaaaaagttgctcaaattgtgtgagggtatattaataataaaagtaccaatttatattttacatgtaacaatttcttttcttttttttttttttttgaaagatgtatattcataacgaacaactacacaagtttaggcaagtccgccttaacaaagacagacgcacaagagggataatctcccatccacaacttattacactttgaagaaattgccgatttcgcaagagaatgagcagctttatttctttggcgcccaatgtgatgcacggctaggcagtttgagaatgatggggagtctttaatctcttcaagtagcgcactccaatctgttttcacctggctgctgcccttcaagaagttagccgcccgaacgcaatctgtttggatgataaaagggacagccgctgtgtgaatagccaattgaatacccatccgcaaggccaggacttcagcaagctccaccgagtaagagccctgctgctgctgaatttcagttgctataacatcgcccgaggtgttcctgattagagctcccagccctattgatggatcagtgctatttaagctagcatcactgttgatgcaaaagctatttgcaggaggtccttcccagccgataagagatatctcctgaggtgtgctgctatgatctttcaggggtatattattcatgataaaatcgatttccaattgagcccatttgatccatatctcaccaggaggaagctgaatgttgagatgtttcttgtttcttctgttccaaattaaccaggacattactataaaaaaaaggaaatcttcttttgatacctattcctgaatatggatgagcaaatccagtgtgttgtttttgctttttttgaggattggccaaatcaaaaatcgcctccaaatgttttatgcaaaggaacaaaaccatagactgtgattgattgtctctactttcactccacaccagcagcaaaccagattgatattcatgccccgatgccttaaaatcacattaacagggagccactcattgcacactctccatatgaagtttctgatcttaggggggcctctattttccatattcctttccaccaattcttcgttaactctgtctccgagggacctgctttcatttcatctttagaagcctctttacagccgctgctcactgtatagtttccattcggtgtgaagtgccatataaggtcatcatttttgcttgttgagcaaggagctattccaaggatcattggaatgtcatccgagtgaaagcaatattcaactattgttgttttccacgagccatcagcattctttaagtagtctagggtggtcccttgaggcactgttgccttggagcgcaatgtaaaggttgagggacggggaatccatttatcttcattaattcgtatgcctcttcctgaaatgatcctccaccgaacccctttttctatgattttcctgccccatatgatgcttctccacataaaggatccataacctcctattttagcctccaagaagcttgagttggtgtagtagcaagcttttagcacccttgcaagcattgattgggggttatttatgattttccacccttgtttagccaataaggcctggttgaacttctccaaatctttgaatcccattctcccttcatccttcggtttgcacagttttttccattttccccaatgtattttgctttttgagtccgaagacccccaccaaaatctggccatcatggcatggatgtccttgattagctccttaggaagacggaagcaactcattacgtaggttggaatggcttgaattatagcttttaaaagcacctctcttcctgcttgagaaaataaactagctttccacccttggagtttggttcttattatagtccgaatttcttcaaacacctctttctttcgtttcacgattgatgctggcatacccaaatattttgtatgacactccacaagtttaacctccagcacagccgcaagtgaaagcccggtctcgtatgtaatctttttccccacacaaagctctgatttctcaagatttattctttggccagagagctttgaatagttatccaatatagctttcagatgaagacactcggaaggggtgccgtctatgaatatgaagctgtcatccgcaaagaaaaggtgagataacttgattttgtcttgaccaaatatgatgccatggatcctatccgctctttcagcctcttggataaggcaagagaggcctttcaagcaaagaagaaacatgtaaggcgagagggggtctccctgacgaaggccacggctgggttgaatttgaccactcacttctccattaataagtattgagaatgaaggcgaagtaatgcagttcataaccttgtccacccaccgtttgtcataacccaaacaaatcatcattgcttcaaggaatctccaatccaccctgtcatatgctttggacatgtctagtttgagtgctatttttttcgattgccgaacctgccttttttcatacagtgaaggctttcaaaacccaatattgcattatcttgaatgaggcagccccaaataaatgcactttgattttctgatatgacttcctttaggctatccttcatcctattggcaaggcatttggcgatgatcttgtagctcacattgcaaaggcttatgggttgtactctccaacttgtttcgattgtttagttttcggtatgaggcagagaagagtcttatttatctgtctgcagtctccattgttgttgaggacttccaagcatacccgagtaacatcctctcctatgacttcccaatggttttcataaaaaatccgagacattccatccactccaggggcttttagtgcattaatttgggacagtgcaacctgtatatcctttgctgtgaactctgttagcagaatgtcattttgatttctgctaagtctgaaaggaacaaatctttgcaagttggcgatcgtagcatctccatgggctggtgcttcgaacaattcttggaagtggtcacaaatggttcgttcgatgtcctccttagtgctcatccattgcagatttttatcaaagagaccttttattcggtttttctttcgcctagaggttgctttttggtgaaagtatctagtgtttcgatctccatggttttaccaaatggctctacttctttgtttccaaaaaagttcctccttctctaggtgtccattaagatctctttccctttctttaagcttagcaaatccttggcttgtatggtcccgagaacaactttccacttctttttgcagttcttttattttagcttggtttgatttcctttgaattgtattccattgatccaataaagtgccacaagtgtgaattctttcatccagggctgctgccgagcctatattagttgcctctttccaagtgtcttccactatttgatagcactctttcttatccgcccaagccttttcataatgaaatctatgtccccaccgttgttgagtctgagtatcactaggcatggtattaaaagttactagtaatgggctatgatccgaacaccacctgctaaggtgtttaactttagcaattgcatagatcttccaccagctgttattcaccattaccccggtctaacctttcgaaaaccatgttggctgccctgccattacaccaagtaaacttgctgccttcataatctatttcctgtaatgcacacatatcgattgcatggttaaaattcttcataagatacccgggctttccaccaccaccaagcttctcatggtgccctctaatttcattaaagtctcccccacagagccaaggaccaatgttatttccagcaagccgcctaagaagtttccatgaatgtttcctttgagaaggatcggggtccccataaaaacccgtaaaatgccaagaaaggtcctcatccatattgatccaagcatcaatatggtaagcattaaaagaattcaattgaacagtaaaaaggagtcttccataagagagctaaccccccacttttgcctttagcatccacacagaagcagccctcaaaccttagctgaatgcgaattgattccatataggagctttttgaacgagtttcagaaagaaaaacaagaccaggattataatctttcacatgagtggccaatgctgtcactgtccaagggttgccaagcccttggacattccaaaatagggaattcattgttctcggcgaccctgctctgcagagtttgccgcttctgtattctcttcaaaggttgaatcctttgtcatacaaacttcccctgtgaatgtgttgtcccgatatcccgattccatctttccacttatctggtgctttcctgcctccccattgccctggttctttgttggacgatttcctttctttgtgacaaacttccttcttttttcctgtgtccctttctgttgattattgcagccttcgtcgaagcttattggcacctcaaagagagtgttatccagtcccttgatacaacattctgtctccattgttcttgctttacaagtcctaccccccatttgattcatggttgtctcattggtgatatcttcgcccaatcttttacgtattccattacccatttgatccttttgcatagctgtagttgctgcctcattcatctcattcagcacaataggagatggaataaaattggtggtcagattggtattattagtatgtaacatattatgtttataattattaatgttagaattaatactattgataccttttggtggattgttgattaaaattgcatcccttttctctttgattctcttatctgccatttgaggagggcaaaggttgttcttttcatgaatttcttcatgataggattgagttggttcattgctgattttggtttcaatccttcccgtcgagtcgactttgagccaagaaccataagttgacctctctatcccatcctcttggatcccagtagctcgacgttcattgcattggcgcatctcatggccaattcttccacaattaaaacacatatatggaagtctatcatattggaattgaagccaaattcgtcgtccttcatgtgggaagaggtaacctggaaagattttggattgaatggagttccaaattttaaatttgaagaatccattaatagcaattctcttgacttccgctccttgaatatcaagaatctcccctgccattcctaccaacctggccatatttgatttggttattgctttaattgggaggttaagaacacgacctgtagtggtgtatgagcagagagtcgcttcccaatcctccggcatgcccttcattctttccaaaatcaagaagcccgcattcagcacccatggagtttttcccagtattctttccaatgtagagttcgaattatatgacaggaccaagaagatggttgtcgcagtggttttcttgatttttagattccattcggtgtcccccaaattccagagtctacacaatatgttctttagcaaagaacggctaaacggtttctttgtgcatagccttccaataaggcaagatttgccaatgtcttcttccccttcctcattgatttcccatccttctacatcaataaccttcaattggctaatgcgagagagcaatttctctatttgatccatgctttctgagcacatcctttgattaggctcttccgaagagagcatgggagttcaccagtcgcagatgggaatcgccttcgccgagagagagaatcgccttaacaatttcttttttttttttgaggctgtttactattatattctgaggctaaaaatcataataataata

SEQ ID NO: 18835 - DNA, 3358 bp, Cannabis sativa
gctgaccttcaccatacactctcccatagtgtggctaactagcccctatctcaccagaatttgtaacccctctaggagggccagtcagtcaagtccccacaataacagatcattttgtgcaagcacagttcgaccaattcaaggacatgattcaaggcatagctggtctgaagcctttagatcttgaactcgatcagtcaaggggatcaccattctctacatacattaatgccttgcccttgtccaagtttaaggtgccggtatggaagatgtatacagggcgagaagacctattggctcacatcaaatacttcgagatgaaactcaacctacacctaggtggtttcaccatgtccaatcaccatacataaaaatatggaaattattttcttctacaagtccactatattacaataatattatgacaaattttggggggcaaaagttaccccttatgaaaatccaaggagattttttgtttggttgtggaaaaaggagccaaaaggctcgaaatccttgcaccatgcctaatgacctcaacctacacctaggtggtttcaccatgtccagtcaccttaacctacgcctaggtggttgcgttatgtccaatcacctcgacctacacttaggtggagaaaccaccgtgactcgtcatgtttggctccatctcgacatgacaccacgtcggccaaatcacctcccccatggttgaggtcctcatggccaaaccacggcgtcaaaataactctctcatggttgaggtcctcatggttgaaccacattttccaatcaccttgacttcctcccggcatcatcaaatcgaatccacgctgaggtgctccgttatacaaagatgtatcacctcaccaacaagatatgaccaacgtgacatgaccaacgtaccaaattggcatgaccaacctttcgagctaggcactttcacgcttggcatgtgccatcaaaaaatatctccccgagttatcattcattaaatatatatattttttgaaatattattttatattttaaacttaacccagtcataattaaaaaagatgtatgttgggtgaaaggacattaaaacataccatgtaaatctatataaaggggtgacatacgattcattttcatgagctcccactctctcattcccaaaactcacttgaggattgaactcttggagaacataactctggagaactctcctcaagcattgagatcactaatacttcaagtggactagcctattatcactaaaagggagtgaactactataaaattttgttgtttatcattatcaaattcattccacaaaccggtttattttttatcgatattcacttgtgcatctcgctcgtttacgatcttcctagatccgttaaggaaaatcgcatcaacacaaactattttcttaaataaggcattctagaaataacaaaaattaaatcaatattgtccaaattaaataatcttcactactcctcaattattgtcactccaattaatattaaaactttttattttatttttcaaagtattatcacattcataaccatcacattattcctacattaaattccatctttattgttaagtattgaatgttagaagaaatattattccttacattgaagtctattttcatgtatttattaaaatttctagttaatagggtcttttcatcatccccttcattgtcaaaactagctaattttatcatacattttaaaaacaaattttttttttctttcccttgcactgatttcagcttttctttttgtctgattgtttggtttagtggccggactgaagatcaagtaccatggttactatctttaaaaatatttaagttataaacaaatacaaagagaactaacatacaaagaaataataactgaaaatgatctatcctttacacaacaaacaaaagttcttcaaaaatattcaaaatgcaaagtaaaaagaggtcaaaacctagatgtggaattaaaatcttgttgcatcagaatacgatgaatctggactcaagctaagttagattctttatttggtttgaccatttaagtattaaatctctagctagaaaatcatagtgaaagccacaaatcaagtagagaatatttgataaatatatcaataaacaaattttaaaaaatcagactttaattaccataattaataattttattttaaaccaataccataaataaatattataataacgtaaatcattaattaaatgaatataatttattaaaatattcaaatccagcaacgcattctagaaatactattgaaaaatattttgtctaactaaaattacaaaaccaagattttacatatattttaataaaaaaaaaaaaggaatttaaatctcatttgttggattttattttatcgactgagtttattatttatgtctataatgtacacatggagagcaagaagtaaataaataaaataaaatttttgaagttgtggcaatggcaacggtggtgtaggtgagaagagaagggttattaatataaagagcattattattagatatcagtgttgtctagtattttttcgacatgtcgcgttgcgattggctagcgatattctctaaaagctattatattaaattatatgggacccgactaataacgatattcacacgtaaaaaagtgttaacactattggtgccatttactatttattataaatgcaatctagttggtgtggcctcaaaaatgtggaatacattatctttccattaaatgattaaagccaacggtgcctttggaaggacacaactttaatttaattaacataagagtaggaagaagagtaagactttttgggttgtcgaatgaggtaaggtaaccctcccttatccctttatctatctatatcatactcatactactcatactcggaccaacaaattcaaatgcaacttttcttttcttttctttttcaacaacttctaatatcaaagttatattataaataccattattgggaccccttacaaccaaagcctagcattctttttaaataatataatattaaacttgtgaacattaaacaacttctctttaccaatcttttaatggcttagtattattattcttattttcctttttctttggaaaaagtttgtaaagaaatagttacaactctcgaatcattgtacaaagtggtcaattggtcagtgaattgtcatgtccccacaagatcatgtagttatattagttgcagatacgctcatttttgacaataaatactaattttttaagtgaataatgtacttgtaattaaaattagctagctaggttagggaaggtttataaattaggggtcaattaaacaaatg

SEQ ID NO: 18836 - DNA, 4320 bp, Cannabis sativa
caaaagtatattttgattacataacttaagagattcttttagatagaacggcttagtatctagatgggacgccagcacaagacactatattgaactttgtttattactcatctaagagaaattttgtttatgtaacatgtttcgtattaaggctagaagttcttagtaggattttctgtacaaacactactactacttgaaaacaaaatactgtatatttatatgtgagattgagcaattaaaactagtttcacctttagatttttcttttttttgctaagtgattggtttatttcacctttggatttttttttttgaaaaatgattagtttatttagatagaaaagtagagactctttgacttcataacttaaaaattttaaaaacagttttttaaaaattgagttttaaaaaactagaaaacaaaaaaacatcaaaatgttgttttcaattttaaaaaataatttttttgtctaacatattatatcacatactcggatcctagactcggaaccaaacccgaacacggacctaaatccgaataggttcatgtcatggtataatctaaacatagttttaaaaaatttgtaccaaacactattaaattttaaaattacaaaaaattattttctattctcacttttgaaaacacaattttaaaaactaaaaactgataacacaatcaaacaagccatcaaattcacaagggtacagagtcatatttcctactattttccgttctattgaacaagtcaaagactggttcctttgcttatgacactgcagattttatgaacttaaacaagagcactggttcctattatcaaatgtttagctagaatccataacaatataattctggtcagaatttcttaagtatctttcattaacctcaagaggttccttcaagaccatttcttgtacatttgatacttgcagaaatagtggataaattgatttatcatccgcggtaaacgaaaccgtattttccaaatcttttcctcaatttagacttaacaagaactcaacctcgactgagtttacacatgaaggattttagctctcatatctctacttagacttgttttgtagcaaaaaagaatagtttgatgtcctaacttgagattccttgccttagaacggcaagagtataatgtgtaccaagatgagacaccaggacaagacactaaaattgaactttgtttatatgtcaattttttcttttctatgatgtttctaactttgtttcgggaccccaagagagaaacttttgtctatgtttgctctatattttaacttacaagattttttattggaaaatattaggagggttaaaagtagttttctgttatgttatatatttaccaagttctcggtttgttttagacagtaaacttgactacccttcaaatggtatagtttgattgtaaaccttttcatacattgaactctggtttactctattcatagtaatattatgattgtaacatagggaaaaaaaaagaaaagaataaaaacccttcaaattttccttttttactttgagcaaatacaactaatttccaagtgattaacaaacataattctattagactacaagttgattacattgaaattgcacatcccaaaagattactttgtccatctttggcacactgcatcataaacttctaatagaccatttaaccgattatactctgctatttaatcaatagagcaaaacccaaaagttcaatataaaaagtgtatatatataaatatttatatgaagacctccaatgagtaatgtgatcctaagttccacattgtcactttcttaattactgttgcggagggcagaaggtgatgacataacgagtagctctacacttattaaggctagtagaatcatcaaaagcataactataagcctttggacaaatagccttaaaaagatgagcaaagagtgttggcttgcaagtgtttggattggcatagtttccagtacagcagtacttagctgattgcatagccaagcaagcactcttacaccccacaacccttccaccactcctcacttccaaagcagaagggcaacaaacattcaaatccacttcacaagacgccactccacatccaacgccaccccctacaggcttcatcgaaacaggcaagttaaagccatccacaaggctgacatcatagaaatgaagtggtgaagatgaagaaccaagtgtcatttcaaccaccgtggcaggcggctccccaccactgcctcggcaatgcaattggtttgcacagtcaccagttatgcatgatcctttcccattgttgtcaaagttgcaaccctgcctaccccatatcctcccagaccatttctctgggacatcaagtactacttcctcaccacttcctaagtgaaagcctccatctttcggggtgggctgccccgcactgccaagcacaccaggccatatattctcattgcagttgtttactagaatcaattgtgccccatctgtaaaccacaagtaaatacaattaatgaatggttagatcaaataaaaaaaaactcatagaagagttgtactgagaaaagaaactaacctgaaatgctcagagagattaacagaagaaaagggaagagaattgagtaagttgacattattgtatcttattttcagacttgattgaatattaatgctgcatacttagtgatttcaaacacaactacaagccttttaagcaaatataattactattgagagtagccaaaagatgtattagattttgttattattattattattagtatccgtttctttatagtgatgtgataatttttacttttactttcatgacaaagggcatatatgctttccttctagtgcaggctttctttatatgagagcactaattaaacttcaatagaatcaatctttgaaaaaggactagaagataacaatattaaactgtaggtttgtccataaaaaggaaactaaagttactaaaaatcttttctgatatgaataaaagtggatatgcatatacaaataattatttgagtattgttgcaagtgggaagaaataggagtaggaggagtgagatgaaagaaataatgtgattagaaacatgactttgtacctggaagtcatggtgtctagattaaagatattcttgtggattagatttagtacaaactcattggagcttcacctggtaattttatgtgtatatatatttttttaattaatatctttttaatataatggagcgtaagtggtttaggaatattaatgattctagtttggctttaactgtctataaagttataagagtaatctagcttcataattgtacaagataaagttatttcagcaaacataatttttgtttgggtccctttgacacttagactcgactcgactggataattttagtaaaaattggtaactaatccagttaataccagttttggattatttatttcatttagctgtgttggattatggataagaaaaagagcattgttatagggtaccaagatgcttagcacttctacgacatgacgtcttataattggttagtgattgtttataatctttattaaattaaaataagtgagaccggatattaaattgtaccaacaacgacaataatcctcgtaagggtactacacacaatgagtactctttataatctatgctgacatttttttatttttatttttaattttgtaaatatatttatttttaaaaggaatttaaatggaagaatgaaaacattatttatagatttattatcaaaattttattgattaaaattaatgaaaatgtaatattaagttataaactatcaaaattttaaaatgatattatttaaaaataaatacttttattataataaatataatatagtatcatagtatatttctttaaattattgcaaatattgtatcaaaatattaataaaataatatttgtattaaattaataagatatttaggttaaactattagttaacataaatatttgtttattttttattatgttaaaacaagatacattatttatttaattgttatatatgtattatatattatatatgatatattgatatttttttataaataattattatttaattttgtaattcaagtttttattatgttaaatttatgttataatttaataaataataaataattggctcaagggaaggtgctactgagccgatttgggctgaggcatagttggctcctccagatccgggttaggcttagcaacgtcttgagcatgctcttcttccaccatgtcagaagatacatcagcttctgcgaa

SEQ ID NO: 18837 - DNA, 5994 bp, Cannabis sativa
aataatgtgatttaggggcctgtaaatcgttgaatagctttttcactcaagttgactgggacatctgaatttggaaacgatgtaagaattgtataatgttatgaatatgtatttacatatttagcgtgcatgtttacgaaggttgttagagtacattgatgtcgatatcagtatacatagagttgtactggataccaataaatgtttgtttggttcaagtatgaaatcgatgctataacatcagtacgactagagtatgactagagtaccgagtataggttgatattatggtagatagtactgtcgtatgaacatttaggactcagtaccatgttggacacggggatagggttatagttgggtgtatgggcacctaattatattcaggttatatttatgattatgattatgcttttcttactgagtctatcaactcacagattttgtttgcatttgtaggtaagggcaaggctaaggttgagtagctgtgagagcgagcagatcaagattatacatgtcggggttgttaggcttggagcgcacgatctatgggacagctggtcatattttatatagtcgctaggcaacaacttttgtattaagtactttgaatctattgtaaatattatatatcttatttattttttgtatttataagtatttaaacaaagttttaattactcacaattttcaataaattcgttgattagcaacgacactaccccaaaaatcacaataacatgcctaaactagttaatataaaataacgataacacgcctaaactagtagcgtgttacattcactcacaaaaatccctaaccacaaaactctccctgtctctctcaacgacactacccccatggccaatcgagatctcaatggccaccatgacgtccaccctgatgacttctagatgccaatggtcccttgaagcaaaacccagatcatgatggacaccccaagggcctacccggtacccatacctcaaagacaccccataccctgacgtccaccttaatgaccactccaaacctgagatctcactcacgatagcgactcaagatctctctttgttctctcgcaggtattgctctctctctccctctccttctcttcttttccctttgagtttttttgcaggttcatcacgatcggggactaagatgaaggataacaattttattgctttattttttttttatttttctttaataattttttttgtttgtatatattttggtttattagatttttatatttgtgtttgttatccgccttttgcaagagtgacatgtgcacacaagttatagaaggtaaagtgtcattaagccgcctaagtcacgtactttgcggtccaggaagataacgacattaaccttgtgggatgggtctccgtaaggtaaaccttcctgagtgcgagccacgagagaggtgtccatgagctaacgattctctacattctgtaagacttgagcctttacaaccgcgaggaatatggatcttcatctaagatgcgctagtccagagtacgcctttgacttgtggaagttcagcccgcgcataccaggctacgggccactgactaggcttttttcatgtacaatgtcagagtatatctcccacaccatgctaccatgcaaagaatgtgtgtaattgtgtactgcactaagcaatccaacggctacgaataagagaaatttatataaggatggccctggagtgacacgcatccaaagccccgctagtataaccagtacaatttgacatcgataaagatcacatggaaaacatgcccctaccaatccaacggtgggtgttcatccctatgaagatccatccaaggtagcccatgtaagggggttggcctataaatactctaaagaaagcataaggtggaacttcgatcggtccttcagaccttcaccttgagattagattcatccttcatcaagaaaacacatttctacatccccactattaactcttgaatatccctactaagcttcctcttctttaagaggaacacggtggaagggagtagaagtcaattgtcttgtatttgtataaacaatcaccgaccaaagagctaaatgatatggactcgtggactaaggatagtgaaagcctaaaccatgtaaaaatcttttgtatgtcactatattatttataccttcattgctttcttaagctgtaaaatttttcaattgccgaaaaactcggtaaacatttttgtactttcattgagagctaaagaaagagatatgtacggcggttacctacatgagactttcgagaagaaggtccatgtaagagaagaaggaagacctcctaatcactggtcgagggccggttgaaagccaaaagtgtgcagagtcgaggtggtgcccagaaaaagatttgatgccttcacttgcctaagaaaggtggtccaaacaaacgtgtgtggccttaaaacacccactgcaccgatatccaccctcaaaagctcagatttcgccaaccaacttttggggggcaagactagctgtcgatatcctcaggtttaactcccccactgcatcgccatgcataaacagagcagtgcaagatgcgctagggctagacagagaagctatgacccaatgtagttacgatgacatactcaggaagggtcatcacatgcaacgactttattaagctagaaactgcagcactagtgccggtgcgagggccagatttttcttccgacaactacttctcctgcgtttttgcaaggtggtaaagttactcaaaaatagatcatgcgatggcggccgctgagaggagatcgtgaataccatcgacatttgctgggctaccaatgaggcctagttatggtaccattagtagaggtcgggaactttggcccaaattctctcaatgccattcttgtcgcctggagtagttgcgcccccagagttacgtaaaaaaagagcaacctaagctattgaaaaccacatagggagtctttgagacatgcttaccttgctgggagaccgagtccttgctccaaagactctcaaatgccccgcgctttgacggaggtgacacactgcccaggagatccttcggtgtaagcatgcacctactagagccttccagtattcgagggatgcatgcagacttcatgttcgcccgtcaaaaattgttgggtgtgacgatacgtctccaaccctccttctcggattggaaggactgcttgaaggttatcgaactctctgtgatgctttccttttgaacttttcaagcgatgtctaagcttgaaattttatacaacttcagcctcccttcccgaaagctaaagcatgttccataaaaattcaacatgactctcgcgtgaacgttgtttctcgtgcaatagataccacttgggtacgatacgtcttcaatcctcctttctggaatggaaggactgcttgaactttgtcctactctgtatgatgctttcctttgatcttttcaagcaaagtgtaagcttgaatttttataccacttcagcattccttcttagaagctgaagcttgttcaataaaaattcaacatgactctcgcatgcacgttgttttttgtgcaagaaagattacttaggggacgatacgttttcaaccctccttcccaaattggaaggattgcttgaagtctaccctacactttgtgatgatttccctttgatctttttaagagaagtctaggcttgaatttttatacaactttagccttccttcctagaagtcgaagcttgtttcataaaaattcaacatgactctcgcgtgcacgttgtttctcgtgcaagaaagatcacttgggatacgatacttcttcaaccctccttcccggattggaatgactgcttgaagtctatcctactctctatgatgctttccctttgatcttttcaagcaatgtctaagcctaaatttatatacaacttcagccttccttccacagaagtcaaagcttgttccttaaaaattcaatatgaatctcgcgtgcacgatgttttttgtgcaagatacatcactggcggtacaatacgtcttcaaccctccttcccagattggaaagactacttgaagtctatcctaatctttgtgatgctttccctttgatctttgctagcaaagtcttaagcttgaatttttatacaactttagcattccttcctggaagtcgaagcttgtttcataaaaattcaacatgactctcgtgggaacgttgttttttgtgcaagaagaatcactgggggtatgatatgtcttcagccctccttcccagataggaaagactgcttaaagtctatcctactctctgtgatgctttccctttggtcttttcaagcgaagtctaagattgaatttttatacaactttagccttccttccaagaagccgaagcttgttccataaaaattcaacattactctcccgtgcacgttattttttgtgcaggaaagatcactgggggtataatatgtcttcaaccctcctttccggattggaaggactgcttgaaatctatcctactctctgtgatgctttcccattgatcttttcaagcaaagtctaagctttaatttttatacaactttagccttccttctcggaagctgaagcttatttgataaaaattcaacatgactcttacatacacgtcctttttcgtgcaggaaagattactgggggtacaatatgtcttctaccctccttcctagattggaaggactacgtgaagtctatcctactctttgtgattcttcccctttgatcgtttcaagcaaagtctatgcttgattttttatacaactctagccttccttctcgaaagtcgaagcttgtcccataagaattcaatgtgattctcacaaacccaacaatactttacccttcagtgtttacaaccaaatttaatgttcgaactctttgcgcacttttagcctttctcagtgagagcggaaagtttgctgccacggggctcaacatgattttcccttacacatatccctacctaaggaagattggttgcacagggatgcaagcccagctttccctctgggaaaccaatagcttcccatgccatgagaagcctagaatctcccatacggggtttatgccatgaagaaattgttgagatatacaacctggttctcgcccagaaccccatgttttcccttcccagagacctgacaattgttgtgcacttttgagaaactacactggaaggacaatatacttcttaaagtaaggtaaagctacgctgaactctcctcctcagaaatagagacacaagttagactctaaggaaatgatcgagaatttgagtgaaaaattccatgctcatttaaggggtatgatatatttgactgctgaaagctataacatcttacgtctgttttccaatgtcattccgcccaaaagtatacacgcaacaaaaaatgggaaatggttttaaccaaagtctcctcgagagaaatacgctaaggttcttccctcaagagctaaactcaagactaaacccagagatatgaagcacattcagccaaatcttttttgaaaaggaaaagacacgcttgaatctcttcttaaacatctccatgggattcatgtaagcttatcccatcaagttgcgcaataggcttgaatgaaaggctgacaaggaccaaagtaaggaaaacatctaggtctaaggcagttgcgaacatcactctcgggactcgaccttgtgaaggaattagaccttgaagaggatgtaagaaattgtgaaggacctattttgtggagagaggccatcttctggccaaacaaacaactttctgggtggcgaaccaaaaagcatcttatcaccaagaaagaatgggtcaaatagaaaaacaattcccgaatttaccaggagataatcaggactaaaggaaaagggttgaaacactggctgttggaaccaggtacttcattaacgaaaccagcccctagacagtctac

SEQ ID NO: 18838 - DNA, 3877 bp, Cannabis sativa
gacctaatacgacgttccaaatgagccctaagcaattcaaatattcacatttgttctggtgacaaagtaagagaaaatagtaagattcagctcaaagtgtgaagcccctcaaaatatccaactggcgattccctatttgcacaagatgcattctcaagccaatatcaaaaattctaaccttgtggtgtcgaactagagtctggaacttaacaattcccttcacacaggataaagtagatacagcttgtcttctaaccaagtggccacgaacatgtgcttgcagcactataaggcccttaagagatcgaaattcccgacgagccttcaaatcatcaaggtggcataagtaaagtagaatacaaaggactaaaaattcaaccggtcaaaaaatacaatgcatgtgaaagtaaataatctaagaaaccctctctttatgaaggttccaaattagacttttcttttagcacatgcataagttacataaggtgaaaaagccaagtttcacaatcaaccaatccaattagtacttctaatcgaaaagctgaattgatctattcacaacccatcattagagcataaagtagtattcaatgaaagaaaaacaaacaaaaacaaggcaaagtagcagcaataacaatattagtcacttgctgcttcagatcaaaagaagtgttcaatctccacttttgcagaaaaagtggagattcactttccaacaaaaaacaccaaaccagcaacagatttcagctataagtttcttagtgaaaatgcagtccatgaataggtggcagtgagattcactttccaactcacacacagggcaaaggtcagaggtaataggcattctgtctgttatactactggtattctcagtagtgagattaaaaaagtggtcaagtatagggtgcctggttctaattgtaatagctcaaaaaaaaaaggtgatagttatgtaattaacattgttgagggctggtgaggttttgtgagatgttgcttttgcttcagtctcttgttttgttctgttctatttttggataaaaattattccttttgttcaaaaaaataaaataaggaaaggtacattttgaggggaaaacaattacttcattaaagttaatgaagagagaaaattctgtaaattacactaagcatagtaacagaaaattaccgcatgacctctaaaagcaacctgtgcctttgtcgcagcttgctttacctctaaaagcaacctgtgcctttgtcgcagcttgctttagcctgattttctcagcatcttcaggggactcagagcaatttgcagcttctgtagagccatcttcttttgcactcattgtgatggcttcatcattttgtaatttggcagaagcttcaatttctgagcccagttcattactagcaatgggtccaaccagtacagatgatataattggagcatccacatttacatccgggacaggcaacttagaagaaaccaactgttcccctttatttgaagatttctttgcacaagaattatagaaaccaatcagaaagtcaagagtttttccttaatagttaaaccctataaatcaactcaagcaaaggcatgtgtaagtagtttttttatattgaggggaaggaaaatttgaacttgggacctccctaagctatgcctataacccccaaagccgcatgtatgtttacaatgtaagttcatataaatgtagataaacatgagaattaaagctctaaaaatcaacccagctccctttttagctctatttctttacgatcaaacctatatgcagttacatatgtcatttaatgaacccagagtatcagctatagaaatacggcatgttcagcttttgtccttgacagtcttattcttctataatgtagcatatttagagtaccaaataacaacgtaacggtttaaagaatataaatttcaagttttaacttaccagtacctctctcccttttgaaaggttagactttgatgatttctttccaagaagcaagttcttaagccattttgttggagttttccccatagcatgaacctaaaactgagtccccaaatggccaatacccaaaactaaaatcagataaacaacctgcttccaacacaaagtgaccacattcgaaattacaatagataaacaaaagctatatatagacataaagaagaaaatgaatgaacaatatacctgtttatgtgaataaatgcaaaagcaaagtgtcctttttcatatatacggaaatgcagcctctagaatggattcaaaacccataacatctgaaacccaaaacccataacagatttcatcaaaataacaaacggttatgagaaaaaatgaagattgaagcaaaagatctgcttcgattagaacccaatgtggactaagttacaaataaataagtaatgaaatgaagttcaaaactcaaagatagtggaaaatgaaacgaagtagatccaaacagggacaagcaagaaatagaagagtcaaatttgacgaacttgcagaatggggagtcaataatcaaagccggcctctagtggaagtgtggtaaagagacaaaaacatattatacagaaaaaaaaaataaaataaataaaaacatagataccatcaacgaggaggcggagaagactgtgacctgtgtgaagtaactccttttgtttttctctctctcttttttttttctttattatggattaagctgcggtcttctactgaaaactgactatcgttaaagcacctgaataaattttagtctagaaaaggaatctttgtatttattgatgtgacctccaacttttattattttatattttatgtatggcaaattatgtaaaacttcactaatattttgaggtattcaacacctcaaatgatgtgagcctttagatttatcaaaggaaaaaaaaaagtaattttttgaaattcaatgataaatctatacctatgaaaagtaagggaatagcttattgactccatagagttagttagtagttagattagttgggcacgtgttagttagagttagctacactttctgttatactgttgtaacaactctttccttactttcttctcttgtatgtaagagctctgctctataaatattgtactgagatattcattcatttcttaatgagaataatacactttcatataagaattctctcaactaatatggtatcagattgatattacgcttccgtcatcttcttctcctttctcgatcacttcaagatcgaaatttctttctctgcaacaatgacgaaacaccacaccaggagctcttctaacactactacaaaaagagctttttgcttcggtttttaagtgacatataaaatatttgcttcagttgatataaccgacactataaccgtagacgcaaatactaatttttttgcattgattttttgcttcggttataaactgaagcaaaaagaaaaggtttaaccagtgcactgacgctaattattttttgcttcggttattaactgaagcaaaaacatttaaaaaaaataaaaaaaaaaaatctgaaaccaaataattccaaccaaaaataaatacaatatcacatcaatcctttaataaaaaaataatacaatataagacaaacaatataaatatttgtttatacaccaaaaaataaaaatttacatttgaaattttaaatccaaaactcaaataataaaaatatatctcaaattatacaaaaatatatatttatatatatacatatatatatgaaaagtatgagtgatatctcccaaaacatgaaaaaataaataaaaaaaaaagacaaaaaacaagcttaatttaaaaataaatctgatgaaaacaaaattaattttaaaataaacctaaaaaaa

SEQ ID NO: 18839 - DNA, 5469 bp, Cannabis sativa
caattgtaattggatatccaactttttgtaattagattggattggatcggttcggttcaattggattggattggatgatgcccacccctagtgtctaatacactcctacgtgtcaatattgctattggtgcaattaagtatcaaatctcaaataatttaatataataacttgtaaagagtatcgctaataaattataaaacaacacatttaaaaattactatgcagcgttgatcaataaccatacttaaaaataataattaattttcaaaacaacactttttttgtcagtacaaaataacatttattgaccacaaatattatgacttttcgttcgaaaaggagagtgaaaattcattaattggtatacatcgaaaaaataaaataaaaatggaattgaggggaagtgtgatggagagaaaaatgagaggtttatgtctagggaaataggtttcacacatttcaatttacgaattgaaatccttttgctgtctcacaaaacttcacctaacacttcaatttctaaaatctacctctctcaaatatgattcttgtattgaccaatttcctacactggtgcaagcttccattctttcaaatttctttattattaacttctctttcattcattctaatttatttatctatcaatgaaaatgatttggtgagagtaatttaaaacacacttttgagtttgaataaactaatataaccatgtgattttatataggatgattctagtctgagaacactgaaaatgtgaagaaaacatgataatccttttttgtcttaataaatagatattaataaaaagtagtaagtaattagttgggtatttttggaccattaatatggattttagttgtaattattattaaatggagcaccaatccaccacagtaaatgcactttcctacacaataatacatgacctttgttattaaagctcttagttgtcctaagaggaaattgcattgtcaatcggccaaaacgttgacacaagataaagtaggcttattattaataatctgcaataggatcactctctcatagtgtgaacactacaaagtgaattagttagaataactcgcattgggatcactctctagaagtgtcaagaggatattctttctcataattttctttcaactttgttttcccaaatcaaattgggtgaaattacagtttggttggccacatgagaagtgtataatagttttatgtaatcatctggtttaattgcatcatagataattcctgaagcaattatataatttatgaagtatcatttaatcacttaccattggttgtaaacaatagaagagatgaagaacgagatgaatctcttgccttatgttataattttcaagtcttattataaagcactaaaaaaaatgttaagcagaaaataagaaaaatgagaagaggaattgcatgatccctcgtccttcaaaatacacccatcaagggtggctttcctcttcttgtattattacaatagtatcaaattatcaatatgacttgagccccatttatccagaaactataaactaatctctgcaattcatgggcttaggaagtaagcaatttagtactaaagagataagagatatcagttgtaaaaattcttcagaaccctatgaacttattacctcatggttttcagaaaatgtatacgcatgcaatggaagttagaatagtggtcagcagtattgacacagcgtttacggcattgttgtcaagaaaattaagacctgaaatcttcttcactgttggtcctggttttccaacaacctaaaatcatagccaaaaaacaaaacttcaagaaaaagtgtgcttgtttaaaaaaaataaaataaaaaaggaataattatttgaacttgcttcttaaattcttgtttctagtttggttaccatccattacttcagttctaatggcggtaaagaccaaaatatatgatatgacataccttattacgaacagtgcagaatccactgaattgcagtgttgctcccagtagagaatcaatcaaactaccagttaatccagctaaagccgaaaggggtatcgccagtagctgctttataactatattatatgagcatttagcagtgaaaaatccaaaggcaacaaacgttaccccaactacagcccctgcagctgcagcagctaggagtccagctttagtcaccccgccatttgtacccttgcgaacaggctagaagccatggaaaaaccaagttaaacatgtaagttttctacttgcactttatcccaatccaaggataaactaaattcaaaactactcttagaagagtaatattgagttcaaaaaagaaaaaagagagagaaaaaataatacacaatggttttggaaatgcatatgggattaatcagaacttgaaacagacaccaaaggcagactgttagaatttaactggaatttgtagtgtgtccaaaaatcaattaaacagagccattcgattggaatacaagcattttcaaatataggttgtgcttataatgatcaagaggagcctcgtgttgacttacctaacaatgtttcagagtggtagaattgtctgggtttaacgggagaacatactattaagaattcttctactaataataatgatacaataatcaagaggaatagcatttaagcttcaaaaccaaatagcagtagcaaaaaaagggagtggcaatggcaaataaggtagttggttgccaaaatcatatgcatgaattcaaaaaacgaaaaaaaaacttggacaagaagggaaaattggaccttgaaggtagtgatcaatataggttgatcatcactaagtactccaagctcagaagaccaagtatctccattgcagcacgcatagtgaccaatcaccccaccaatcaacgatgtaaccagagtcgaactctttgagtccaagcacttgtcctcccactgagtcactctccagataatcagtaccaatatggtagaaataccgctattggaaagaacttgaacccttccaaaaaaaaaacagaaacccaattcaataatgaactagcaagaaacaaggcttgaggaactgaaatacgttgattaccaatttctttggccgccatccttgaaatcagcatccacgcgacgctttttctcttctccaactttagttagcttagaggaagtgaaaaagaaaaccagtatcaatgccccgtacctttgaaagatcaatgaagaaagaaacagtgaaaaccaactataacatgtaagattatggatacataaaaagaaaagaataggattgaaaatgtgcatatatatatatatatttatatatatacctgtatccaacagcgaagtgaatggtcataacgagaaagcccgtaagagctccggataggttgagggactttctccggtaagctctgacggcgattaaagaagagattaaaactgcaattaagggttgaatcatgcctctttccatttttttttcctcccgaaatactcaacaagcccagtcaatggtgaaacagtacgattctggcagatatgaagaatagtctacttattgatagcaattattatataggaactttggaactaaactaaacctgtttgtttgtcttctaactgaatttcccaaccaataagaaatttaacccaattgctagaaacccaagaaagacttaccttctaaaactgaaagaagggatattatattgatttggttcctagtacagcggattatccatggtgactgaagggaaagtgaaaatctaagtttaaatttttcatgtttatgattatttaccttattactaaatactaatactaacttcacttctatatatacatgatttgtcacatgtgcaaccccataccccttcaatattgccagaaaaagtttataatgaaatgctaataaataaatttaccacattaactcatactccaaaacaatattaaacttgttaatcaccaattcgccatatcattcagcatcccttttaatattgagcgtaattttttatttcttttcaatgatatataataataaaattaattgagttgcacttgataataatgataataaaactatcactactgatgttgcaccatgaaaaaacaaagataaacagtcaccttaccagcaatatgtttgagataaaaaaaacagtaagaaaaggcatcccatgaatcaaatctaaatctggtactttaaatgaaacgcagacagacagacgatcagtctgaatagctctttgcaatattggccaattctgtcactgcctcaagcaatactaatctagtataatgttttttcttcagcatgtatctaattcgatggcatgaccccacaaaaaaaaaaaaaaacaaccaagttcacttaaaaaaaccagccaagattaggaccagcagatcaaaagcctatagactcatttcctaggaaacaacacacacattccgccagaaatcacgggcgaaatgcaatagtgaaccaaattttccagatacaaaatttgagggctttgttgcaacaatttacacatgcttaacatcaaattacctcagaaaataaaagaaattataatatcacaaaggagaggcagaaagtctatgaaatcttcatctccccctacctctcccccttcccctccccctccctctccctcttcccctaccccttctattgccttcatgctccatcccaccaccccagttgtcatcttttctatagctgaacatgctcatttttatatcttcagcctccgcatttggaaaaccgcttcctacctgataaagttgcaactgaacaatgttaggcctacaattattattgtgttattcgtaataattactcaagaggcaaggatgctgacattagagtcttccaaatcaaattggtgttgaagctgccatgcaagttcctcatcatgactcaaatgttgatgcccgggccctattagaggttttgtgcttgccccagcttttctcttttcccattcatcaagagtgaatgttgaaggctcttctcgtctctccttccccttaaaccttctacctttataatgctggtcgttttggttattcaatttctggaggagtttttgtgcagctgcttgattttggactggaacatattcaaccgctgcagaaatatgaaattaaaataaacaaacaaaacatatataaaatattaataaagcaagcaaaagtcgcaacttctcttctaagatgaagaagaatccatgtacagcctttgtatccactgttagttcatggatatttagagagtagaatttggactccttgtcatacaatgacaacatcagatcagttttatataactgctttgaaagccataaactcatctcatacaaatcatattatgctacataccaggacaaaatttacagctaaattccccgagttaagataaagcatataatcacagaggtttgaagttgcaccttc

SEQ ID NO: 18840 - DNA, 6403 bp, Cannabis sativa
aaaaaaaaaaaaaaaatcaaggttccaaaactttgactttcatattgttatgcaaacgataagatgtgaattatcgttttatgaaattattgataccatattggtcttacacctattttttatagccgacattaatttaattcaagagatacatttaattcattaataaatatattattgttattattattattatcttacaatcagtaaggcaattgttatgattcaattatagaacataaatcaaaacaaaaagacatttaaaaagaaaaaaaaaatactaaaattaatattttccccaacaactatctttttcttatctttttttattgatgtggatcattcaaattagactcttcaaaaatattctttcttgtttgtttgcaatgaatttatcatggcaaaattatcttttttatttgaaataacattcaaatttaatttaacatttttctttttttttttggaatattaatacatccaaattcacaacccagctagccttatcatcagtcatcacattatgccccgacggttaaccaaagttagcttcatctggtgggcccccaatgtcttgggcctggccggtaaagaagtggtccatttattatctcattgctctaaaatgtcaaaatctcaataaatgctctcattttttttttctttgaaaaagactcatgatttttaattactgttatattttattggtgaaatactgttatctcattctcacccgcgttatttttggctttcttctaatggaaaatgagctgtcggctcagataacccaggcttttaagttcctaactatgtatcggctcggctgccattggtaattggttgtgtgatgtggtcccctaaaactaagccaaagtaggtcccgccgaactcttcattgctcatcccattattactacggctcacacgtgaacataacgctctcgtgcacacttggcgtgatattattggttggagaccaattggatagaggtttcccacatgggaaatcgaaattagtggagctggaagcctgtgacatgggaccatcttctactccgaatctctcttagtttagcattatcctcctcaatttcaatccatttcacatttgatgcgattgtcttactccaaattattttaccttttctattttttctttctttctttctttcctcttagctattcgaaaattaatggtttttactttttactctcttttatttcgaagaatttgttggtgaagaaaaagaaaagaaagtgttaatttgctcaaattaagcatagtgaggtaatgtaatgtttaattttagatataactgtaatcataaaaaaaaaaaacatttcgaggttgttatattataaaatttagtacgaaataatattactgtgctttctagttttaaaagagtaaattaataaattacatgcacgatatatactaagaaagctagctactacaactagtttctgttaattaagataattttttaaactgaaacctagtcgttatctaatcatagaaatatttttggaacttcagaagcccaagagtaacttttaaaagcccaacagggtctaattctaaagatcctatactgtgtaatgtaacacaagattttccctacggtttgaaactgtgatattaccttgaataccacctttggattttgccagttaaagactaaaaaagaaaaagagcaagaaaacaaaacaaaacaaaatgaaatgacataaaaggagcatggatggaccatgacagagacttggtgttgaagaagacacagcaaatttgtgcagaggtagctcaaagcaaatccaaatggagggaccaaatgccccaatgaagaggaggaatttaagagagtagtagtgaattgatgagtttatatttatatatatatattgataatgattttggttggttttttggcgcgcgtacaatgcatgtactctattttgtcacattcaatgggttttatagctcaacaaccataaaacaaaggccaagaaaactcttacatataatgcaattcattgaaggggtcccatgtcccctttcgttaccaaggacgtcacttacacttaaccaacaacgtttctagaacttccaactcactgtatatatacatacatataacataacataatcctagatttcccaagctggcttcttagcctcatcaatcatgattttgactcccacgtgtatgggacactctacccattatcacttcactatttttcttctttttttttatgtgactttttctataattgaccactactaattctcttttaataagttgtcccaattcaattccactacatatttccttttgggttttggccataacgactatgttggtcatcacactttacaaatgatctttaatgctttttaaacttcatttcaaatattattaacataacaaatttggtacgaagctgtgataattgtgagtttaattagtttctcttaaacacatggcctaactgcagtcaattattgatttttccaattgttgggcttctagatctttttattgtttcaggcttactcccacgcacaactagttctataatcaatctatatcttttggttgttctatataagcaagtgttacaaaaattgtaagaaattaaaacaatctagacaagtaatattattcttataagtaatattggcaggtacattccaatccaataacatatgcaatcatctacaaaacaaaagtctaaactcttttcatttttaaacagttaaacaaaagtgtaaaacttataagtaacttccactgcacgagcatttaatactagaatttgataacttcggcatctttatctaaaatatcagataaataaataaattatcttctccttaaaactatcttttttcacttgttatatatatttagaaagcacaatattaatgtcatatgacatatgatagttataacttgatagttcacattatcatcatcataataaattataattaaccacgggtatatgattgagttatgatccacatagaggaaagaccactggaaaaataaggacatagaggactaggttttagtcattacgaggtgcttgaaaacaaatgtcaggtctttaatgaaattcgagatttgggaataacaaaacttgtatcaagaacaagattaatttcctccaatatttcaggtggcaaatcataaaatcttgccatgatctacattaaccatacatagactttcatatattaaaatgttgcttaactaggacatatgatatgatgatattcaacttgtttaactattactttttagaccaatttctaatctccattgagttgtaaaattgtcctaaaacctaaaatcacaccaagaactagactaagtttcaaactcttgaaagacatgtaatgaaatatgaatattttggatactaataaggtaatgatatagtctaaatatagtataaaaaagtgtaacatttttaaattaggttccacttttaatcatacaattcaaattttaagggggcatgaaatttttaattttcaactcccgttataagttaacgtggtataatttttttaaatgaaaaaatcttcataagattgttctagtaatagaaagtttgttgtctctcaaaatttttttctcggatagctaacttgtccatctgaaagaagtctcgtggaatgataatccggaagggtgttgttcattctgggtgtagtcttcaggaaagatactcctcctccggaaaggagttccggatagctagttgttcctcctggaaaggagctccaaatagtcaactccaactatctaatttcctatccgggaagtcccttcagcatacgcttcgatcctctctattttggaagctcgtccggaagcgctttgtcttatgttgacatggagattctgttttgaggagttgttaagtttgttaagtcgtaactaacttaacagttacagccaccaaattaggatctttatcccgagcctatatataccaccaacacttattagttcaaggtgtgattcatcataagagtttcaagaggtaatttcaaagagagagattgagaggtagagagatagagatatacagaaaaaagagatattagatttgggttttgtatgaaaattcttctatagatgaagaagattcttgggtaagagtgtgagagtaaacaatttgagagaatccaatagagaatcagtctcgactgtattgtaccctattcttgctcaatcaataaagaggatttcggtggtgttacgaaactggagtggagccatagatcacatcgatatattggacttaaaccagtatatatcttagtgttatttttattatttaatcgcttagacaactctattcatccctattttctctgattactatttgcgtttcattaatcttgtcgttgctaaactgtttggtgattgaaattttagttattttgattatgcactttagtcatatttttcacacaaatcaaagcttggtaatcgaccaagaatgcataatcaagattatttccactgcaattcttaaagaaacagttaatgtcatcaatggagagattcgaattggagaagtttgatagaattgaggactttgcgctatgaagagaaagtttaaaagggatcctagtgcatcaaaaggtctctaaagtccttggtgatgagaagttattggctgaaaagaaacgagaagaaaaatcagaaatggaggagatggaatattacacgatcatcatgtatttgtcaaataatgttcgaagaaaacttgtaatactctaagatttaataatcggattagtaaccctaactagattaaatatgtattaatgtggaattatatcagtatataatttaatatgtgaaattattctagtttattgcactttaagaccccgttggtatgtgaggagcattttcgtaattttgatccgagaagggtaaaatcgtaattttatggtatatcgttcttatggactatattattatatagtatgtttattctatctttctgcaggtattttctgataagtcggcgcggtacagtcacaatcaggtattttgtgctgaactaggttcggggcccaaaatacatttttgagatttgtttatggaatttttgggggtttctagggcccttacatagccatggctgggttcgccgcagtgtgggcaatctggaaggtgccgccgtggctacggccttgcttgccgcggcgatgccctattttcctcaagaattttcggtttcttatttttgccataaaacttttcactcaggactccattttggatgttcttgcgttggaaagctcattttgagctctaaatgttaatctgtaaatggaatgctaattatgtgtttatatgaaattgaatttgggattatccctatatgtaaaatcttaggaatgtgtgattaggattacaggctcttgctcaggaacactcgtggatttagaatctccacatacttgcaatattaggtaagacaataaactagcacgtagagttaagcacggtggcgcccatgtatgctatttgtgtatgctatgtaagaaaccgagattagggttattaccctaaacttagcgcttaagtggtctagggttattaccctagtatttaaataattttgaatgcaatatgatatggtgtatatgttgatataaagaattatgcatgtaaggcataattaggttagactcggtaatcagaatcgagataaactattctaaggccttaatgtgattaaatgtgtgagcgtaacacataggtctatgttaaatagacgatacatacgggggcatcaaatcttatgtgatttctgactatattgcatattgttatttatactgtcttgttggacttggctcacgggtgctctattgtgcaagaaatggtaaatctgttactgatcaaccatgagttcaagggattggcggtgtattgtacatgttcgggctatactagaccacgagggttgggtctaccataagaaatattttgtattccagcttttgccacctacgtcggcgtgtaaaataacttgtaatattttgtaaaagtttttacgggatcccagaacaaatgtaatcttttggaatgtttgtaaaggtaattaattacaagttatagttttactctctatttgtttgaaagtttaaatttttcgctcttatggcatgtttactaataagtaatgggaatcaatggtgaggtaatcatacccttatatttgtttacttacataattaaaattaggaaaatgagaacctgattaaataagagagagaaaagaaaaggagaacttcccccaccaattttataaggaatgccattaagggtaatggatttttattatttttattttatttttt

SEQ ID NO: 18841 - DNA, 3734 bp, Cannabis sativa
tcgaaaccaattgatcaactatcaagaaataacttccaacgagcacaaacgatgagattccacatcgagccatccgcaatccaatgccattaaacaggacttttctatctgcagggtgaatccccgtccatctctcaaacctactcccgggtcgtttccatttgagaaactttctttccaaggagacaaactgcgaaaagcattacactaaatagtaaaatagaaggccaatagaagtttagatagaaagtaagaataatagttttgtaaaggttgggagtaccttaggtactacagtacataaggaccgggacttggcagtgtcgaaacaatgtgaagcagcagcagcaactgaaccagataatccagctgcaaaggtaacagctaaaggagatagtggaatgtcttcatccatactgagaaaccataaaaagcccactttaacagaagaccaacatattaaaattggcacagctaacgactatagtacacaacaacatccataacatatacaagagcagtgcataaacacacgcgtttgaaaagccactgtgtaattggaattatgtataatttgaagtaattacgagattttgcatgtttgttcaaccagagtaattacacgataaccatgtaagtggaggtaattgaaaggtctcaattacactttctaattcttatgactcgcatgagataattaatagtattaaattatgtaattactaactcatttgccaaacaggaaaataaaaattcatatgcaattactacttgacatccaaacacacattgtattttaaaatagagtgtaattacactacctagtaattatatagttgttgcttacaaacacatcctataagtttttatcaaagcttttgaaaagcatgtaaatcaatttcagttgtaacaacaaaagcaatatagatcactttgtaagtggctattatcaatcaattgtaaaatttgtagcaaaaaggtaacaaacattgagaagagaacctgggtactggattcattccaattgccttccaatccaccattgcttggtgtaggaattcccaagccgtaaagaagacgccaccataaatagaatcccgaactagacctggccttagacctctcaataatgaactccatccttccaaagatataatatcaggtagtctcctaacattggtgactgatggtggactcccagacccggtcatcatccaaggataggcttgcaaagcacccgtcatgtttgtatgtttgtttctcagtgttgataagaggtcaacagaataatttaatgcctttctgtctggagtatatccacgtagtagtttttcgataagtggtgtaacaactcgtttttttctcatagaggagtagtttgaaggaggagaagctgaagcaacctgtgcacgaagtttcacaagctcaaaaggagtgcttatgactgattcggctactccagctaccattccagccctaaaggcctcggataaagataaataattgtattgtcgaccatctgaaaagtaatattgacaacatcagaaaagtgttacaaagccgtttcattaagaataccagttcttgttttgttggtaaaacaatcaattattaatagggggtatgtggtatattgctttaggaaataaataacagaaaaagcaataaaaacctttgaaataagcagccatgatttcataggttccaaaacgagctccgacgcctaaacttcttcccaatgctaaccagccaaaaccattatacaaacctgcaagcattcatcacagaacaaaatattgtttgaacattttcatctgaattttatattataaatagatatataccgaaattaatataacagtaaaactaataggacgcagaagcacttgcgaccaaggtatccaccatacaatgacatgcctcatagttaacttaaaaatcgtgccattgtgctcatcaactttaaacatttagaaaaagtgcattgaagcatggataaaaacaagatatagcaagcatgatcatcacaaaactgaaacagcaattattgatatttaatataatttggtcttcgtattatctcacaaatcatagctcatattgcaatttttccaccttttaatgttaccgaagtaatttggaaggaaaaataaatatatgaattttatggggaaacatataactcatattaacaacttcaagaatatgcatcctcacaagcctacaaaccattcaaacttactaatataactcacattgaagactttcacctttcacaggataattaagtattgtcaatggtaattggggaaacaaaaaataaaaaaaaatgcaaggattttatggggaataacctgaatagccagataaatatttgactctgtctaaagccttagtggtcgtcaatggtttgccagaactagagccgacctgttgttcaacatttaaacttacaaattaagtttgaaatagataactttatggttcttttcaagaaaataaaaaatagaatcagtgattattgaatggtgaacaataaataggtaggattaataacaaaagttggacaaccgacctgaataatgactttggcagtatcaagagggtaagttagagcattgcctaatgtcactgaccctgcagcagcaattgcatggatagcaaagatttgattcctcaatagttcatccatctgaaaattaaccatttatgccttcacacttagaagtgcatgcctgtaacataagaaagaaaacacccgagaagtttaataagatgttagctatgtggtctgtacatgttaaagtattaatagctgcaatagcattcaaacccaatgactgcatagatacaaaatatgttattttagtttttaagactggacaatgcaactgcgtgctagcatacaaagcaagttataaatctcagccccaagaaacaagaaatctaaaatttcataaatctctctgaggcattttaacaaacaaataatgttcttaacagaaagaaagaccaggacacattgtattcaatgagaggtgagaaaacaccggaaaaataaaaagaaaaacttcaaatgtccgagcacattccactatcgaagccatttcagaaactagttcaatgcaatcacacaatagactcctcctctaaagttcctcaaaatcaatccaacacctacaatggcatcactcctaccaactgaagatcaacctctacccacaatttaaatcactcaaaaatctcaatcttgtgattatacttctcaaatggcatcagaaatttccaaataaaagaatcaaagcatagcaaaattctcccaaaatcatagttgttcttcagtaaagccaaaccaccattaccactaatgaatacaacaattcagcaacaatttaagcaaaaaaatatatcaccctcatcaatcttctgtcaacctaatttaatttgtttgagctctctcagattttcatcaacacagactagaaatactaaaaaaatcccactccactaccaaagaggcatgaattatacagagtccaatcaagtaagaaacagcattagttcagagaactgcatacattacaaattcacactttagtttcaatgagttatttcaacaaacacttagaaggcattaggtgtatattcacataaaattcaagcaatgatcctaacaaacagacatagatggttacgtacagagaaatggtagttgattcagcttacgtagataa

SEQ ID NO: 18842 - DNA, 5110 bp, Cannabis sativa
catgccactgtgcatgctacaaacatatttctatgaatgtcacccacaagttcaagactgatgtatgtaacacgcaaatatggctggccgcttacgcatggtcaaagatggaatgtgatagacatttacaggtgcttcaacagacggatcctgtcatcgctgcttatgtcaagagtataggattggaaaagtgggctcgtccttattattcaagcgacaggtacaacataatgtcaaacaacgctactgaaagcctcaacaaactgacataagaattctagaaatatccaataactactctagttgagttcataaggttcacactgttaaattggttcgctgaatgtctcaaaaaggcaattaagtgcgctacccctttggcaactcattttgaggaagatttggtaaagcaacacgaggatggtagatttagaagcatcctacgtaacgatgcacaattgttcaatgttggaaaaggttctgagggttctgactgtgagaaaagtggtgatgtgaacttagtccagagaacatgcacatgcggaatgttccaactgttaaaaattcctcgtccccatgcatgtgtcgcggtgcttagttagaatgtcagcctgtatgctttgtcctccccctattacacaaaagaggcgtggaagaatacttacgatgcaacaattagtcttgtcggtgaggaggatgattgcgtacttctagaacacatgcaggccatgagagtcggggtaccagtggagaagaaacccgtaggtcatccaacgaagaccaatacaggaagaatatggagtaaccgatatccatctaacggtcaaaaagtcgtggaacctcgctattgctcaaattgtggcaccttaggctacaacaaagctacatacaaggccagggtttgagcatcgtttttgtattttaattgcatgcattagtagtatggtttatgaaatctattttgtagttttttctttacgggtatgtttttataacatcttgcgatatatatatcgattgcattatcgacatggaaagaatatgaatcattttttagatttgtaacagggaaatattttgcgatattgtgcgacatgttgcaattttagacgtgatatattggaacataataattttgtgataatatcgacatgtggcgacatttcacgattaacattgcgacatacagaaacataaatagttttatttgaacataattattttgtgataatatcgacatattgtgatatttaacgatatattttccgacatagagaaacatataaatagttttttttttgtcttttaatttgtgatatcgtgcgacatgctgcgattttaggcacaacatattacaacataataattttgtgatgataacgacatgttgcgacatttcatgattaacatcgtgatatacaaaagcataaatagtttattggaacataactatttcatgatgatatcggcatattgcgacatttgacgatatgtttttaacatagaaaacataaatggatttttttgtcttttgaaaattttgcgatattttgcgacaaaaggtgacattttgtgatatgtttcacgacatttatcaattttaaaattttacacatgagtaaagatgaaactagtgaaatattttacacatgagtaaagacaaaataagtgaacatatgtaaagactaaacaaactttaatactagccaataaataatcatatcaatttaaaagtctttactgtatcggtgagactcgcaatacgggcacaatgatccatgcttgactgcgtctcctcctaagcatgtgtgaaatggcatctatatgatgcatgaaaatgagaccatcaaattaaactaaaggacaaatcttgcatcaaatacatcatatcacaatctacatcgcgagatgtcgtgaatcaagtcgcagttcattgcaacttaaatcactatatgtcgctacatgttgtgaaagtactatactaaccacaagctgaggacagtatatgtcgcaaaatatcgcaaaaagtcgcaaacatattgataaatagataacgtgaaacaaaaaataatcagaatatggacaacatttttgtcacgacattcgataaaaataacagagaacacaaaataataaaaacattataaaagaggacaataattaaatacttacaccatcgtccaaccaatcccccatcaacaataactttgtgaagaacttcacatcaccgacgccagtgtgcacattcctaggacaggtattgggaatgtctttaatcaaccacatctttagcgtacgtaccattctatggtctgctggtctttttagatctacgttctctggaagaactcgcctcttcttcttttcctcagtgtagtctttcaagtaggagtaggacattgccctgtgatccgtatcagcaatggctgtaataattgcttctgttggagtagacggtgtctcattattatctggttcctaatcttctgggaacacatcttcattatcgctctccacaggtcggaaatcttccattgcttgggttggctgtggctccccctccttcagattcaacattgccatcaaaatgtccatcttagccaagagagtctccttcagatctttctgactctccataagatctttctgactctccgtaaggaaccgccttattttgataaggctactcagtaacttcgtctgtgagaatatgatggcagcctactgggcctctagtctatccaacctctttaccaggtcattatccaaaaatgtataggttggagcacacggagtggctggtgtagatggctcatttacttttggagctggtggtggtggaactaagtttgccttagtcacgacctcattaatggtcttcgcttgaccttgaaacacaaactcttgtgtacggtccccctccaccgtttgatcgttgtccctctcaaaacaaagaagagctttaccctcattaattgacttgaaatattcctttttactgggtcggggaaacaaacacttctttacgactaagtggaaaacaaaaaaaaaaataaacataaattgaaaatggtcgaaaatgtcacaaacataatcgcgacatgtcgcaaaatcatatatagcatgaaattggaaaataacgcaaaatatcacaaactgtcatgatacacgtcacgcattaaaagtaagcataaatatgattattgcaaaagatattgcaaaatatcgcgaaacaagtcgcaaatcggaaactaattttgcaaatatagcatacatctagtaaccgtaaatgaagtcgtggtacgccgcgaataactaataattttacttttaaactagtattaacaaaaaaaaattgcaaaacagaaaagaaacacacccgagtgttgaacaatagtgcaatatcggttgcctttacatcttatttctgttggccctccggagttttcctgtttaccattcttgggaacctggtcccactgtattgagcatacttcttgcccattttctctatggcttcatatgcccagtactaaaagacaggtacatagccacttatagtgtactttgcctcatgagcaaccttcttccctttcttcttgtcaacattatccttgtaatattgcatattcttatttaatgtatgcatcaacttacgaaaatcacgctcgccccacagatacttgaagaagaattcaagatcgttaacaaactttaacatgtcaggccaaacttggacattgccctcttttgatactaatacaccttcaatgaaagcgatcagtccaagcttgtaggcatcatcttttacttcgcacctctcaagttggagcaacattgaatccaactgcacacaactcttcccttcaaaatacgtccaaactagatggtcgttggagttggcttctatttcctcctctgtaagggcactacccataggtaagctggtaattagtccaaactctatccatccgaatctcatatcatttttgcctatatgaaaccaaacctcatcttccttttcactatctactttcatcttccgtaagaggaggctgtggaaccaagcgccagagaaagtcaactatctagcttcccagaagtgtccgaaagggctagccttaatcatatcaatcaacttaagctttgtaaacttggcattgatatctctaaacctatttgtaccccgataggtaagatgtcctgtgaaatgttgggaaactagaagtttaagttcaggaaccatctacaaaattataagaaattttattaaaaatcaataaaatgaatattgtaacatgaatcacaaataagtcgtgaatcatcgcaaaatagaatcgcagatacgtagcccagtgttctgcgatacttcacgaaatgaacgcgacataatttgcgatacagctaaatacgtataacgacaatatcaacatgggatatttcctgcaatgtcgcaaaccatattgcaacacatcatgaaactatcgctaaacaactaacatttcaaaatgcacatccgaccaaaacgaactcgcaaataagtcgcaccatgttgtgaaaacatcgcgaatagaaagaactaacataacatttcgaaaagaaattgaacaatgtcgcgacatgtcgataattgacgaaaaagccaaaactcgagtaggcgtcaatgaaattcaaacgaaaaaacacaaaaattgaacctaaactaaacaaatttccttacaatgaagcacaaacaacaaaaaattcaattaaaataataaaaaaaaagtttagacaaatatctttttttgtaatttcagatgtgtgtttggggtttcgcaatttccctttcgaatttggtttaacgatatcatctgggtctggacttcgtgtttcgtcagaggtggtggttttgttgggctcgctaggtttcatcggaggtggtagtagttttggtgacaattgggttggtgtgtgtgggtttggggagttagagaaagagagagaaacgagagaatgagtgttagagggagaatgggagtttcaaatgaggagggtattattgagactaaaagttatttggatataaaatttttatactatttagggtagaatataaaaacactttatc

SEQ ID NO: 18843 - DNA, 4386 bp, Cannabis sativa
catccacttagatttttggtttatgctttagagattttatgggagaatcagtaattttaaggtgtttattgggcagtacaatctgtgatagtttatatgtctgagcagtacaatcagtaattccttgtgaaacattttgtgcttcaaaaagattgtagggttcaacagacactccagaattaaattcaatcttgttaagtgggtttagtagatcatacatctacggaacttgagatctatattttgaagcatgtgtgaggtttttttttcactacttttggcaactcaatatttatagattcatacgtagaaagcttaatgttttgagtgttggaataagttaatcatgtcattacatatcttgtaaataagttatatccaagataaccatacttctctattggttatgccttccacatatttttgcatggttcaaattattcttatgtgttgtcattttttctattggttttaaaagctaattccattttaataaccacactttttttttcatacatggctacagattaatatttatgtgttgcagggggtggacactcgcactctaatgatcaccatgaaggtcacgaccatgatgatcattctggacactcacatgcacattcactagcagatctttctgtggggctgtccatcctgggttggtattcatatactttgcacttcaagtttattttgtacatatttgattttctctttgcatttggagatctgcataatcagatgcacatgttaaagcactaccatgattctgggtctctagtttgaataaagattctgacatactaattaggttttgctacttgtttttcatttgataataaatgaaaactccaaactcaagaagacaataaaacagtagccaaacagtaggaaattgatactgattgtagtagaaaatctaattacaagctattggagcccttaggcccttttgatgcaaagagtgaacacacaatgcattgcatagtcctccaattctccttagtatcctatatatactattgtgttccctcccaaacactacgtataaagacccatatacccttttatttaatctcttgtatcctattctactaacttggggtttatcagcatttctgtgctttgaccggttgatataaccaagcaacctagccaaaggaaattcacttttggatattttagattgtacctacgcaacgtgtaataaattctatctgatagatttactctttgctgattagttgggtaagcttgtaaagaaagttaagggctttggtgtgtatacaataactttattgtttcctctctgctgacatctaccagtcccccactgagtaaattcataaatgccctctgctgttttattaaatgataacttctccatgccattcttttttcattatgttgcctgcacttcttctcattgtgttgattttcttttttttgctttttaccaagtatttatttatttggacacagtgcattaattcttttcttttgaattggttataccagctggaattgtactttttcttctagtagagaagttagtgaggtatgttgaagataattctggaggagctaatacatggggtcacactcaccaccaccatcacaagaaaagtaagaaattgaaggatgatgatgaatctgctgatgacatccagtcaaagtcatccactggaaatgataaaatagcactggaaaaatcatctgaagtttcagatgaattactgcacgattcattaaaggaagatgctcaaaatggatctcatattaggaaggtgagctacttgaaacttgtattcaagttagatgataacatctagataatggcatgctgtcattatcttgcttctatggtcatgccctgtcttgtgtttagtggactacttatgaaaacttgtgaggtgtagacttgaaactgtaggttgggccagtttatgccatggacatagtctaggactctaggagaagtaactgatggtataaaaagatgaagctaaattaacgtactgcacatatgactttaggtctaatgtttttgatgcaaactttaaagaccatatgcaaatgcttctttttcagcacttaggcatcaaaattttaaagatctctgaatcgattagtcacatatggtttgctcctggcgttggagttccttttggatatcctacagagcaatctattgtttcatggtcccttgaagggtcaagcagggaacctagtttaaaataagaaaataaaagcgagaacattcttcgtactgcatcttcctcttttatgatcattttgatcatcagacatttggaacctctagcttccctggattaaaaagttaaatgaaaaataattacaaaatgctggcccaacatgcagactgtcatgctacgcccagtatgttaggacttgttttatgttctgaggctcttgagctatcctagtgtatatatatgttcgagaaaaaaattgacatatttatcattttataagcttattaattaaaatggaatattagtaataggcttaacatgaatggaataagtggatttcatatcatacctttattgatgttgagacattgttgcgagctgcagaggcgcactactgttgatggtgaggatgataaacaagatgtagatgctgctaaagtctcatctgctgatattaaaactccaaaagaagaagatgttcaagcaccaagcaatcttgtcttcggttatctgaatctcttctctgatggtgttgtatgtgtcgctttcaagtatttttgtctttaaaataatattttcctttgttaaattgtgttatgctggttggtttatgtagtttggattggaagatgtttcatgtactcaattacatgcttaattgttgttgcagcacaattttactgatggagtagctttaggaagtgcgttcttgctttatggttcagttggtggatggtctagaactctcttcttgcttgctcatgagattcctcaagaggttggcaactctcactttatttatttttctttcatgtacttgtaaattttaatttgattatattgctttggaaaaccaactacaacatgacaaaatgatttttcattcctttcatattttctaattgtattcttctggtctcgtgtataccattttctttgtatccaaaaatgaaagtactgtggttcggttggttaatttttcttgattaagaaatttaatattgaatcggttgtgagtagagcggggatgagggagagagagttattcatcgtgcgtctaattttgtcgaatgcaggttggagattttggtatcttagtaaggtccggttttagtgtatccaaagcactatttttcaactttctttcagccctagttgcactagcaggaacagcactggtattttttccattaaccgagtctttcccttgatttaaaatccttctacaatcatcgaaaagaaaacttaaaaaaaattcataatttttggtgtgtaggctctgctgtggggacaagatccaggacagtcatctttgatcgaggtgaagtctccatttgataattctttggtttcgttttccaccattcaaagtaatttaacattatttttcttttctttccgaattcgatgtgcagggatttacagccggtggattcatctacattgcggtggccggggtgcttgcagagatgaatagcagtagcaagcccaccctgaaaactataatagggcatttgacctcattgatacttggcatgggggttgctctttgtatttctcttatagaatgaaatgtaaatttgtaatgaatatttttgtactttatttttttttcttttttagcaaaaaagtcttaacattatatttttattttattagtagtcagaagtttctgaacggtggactcttcactaacttatcaactaaatacaatctgattgtttttagtgatgaatataataataaaaatatgatagaagaaattttgaaaaagaaaatagaaataaaaataaattcgaagatgtagcattgtctcttttccaccgctgtttatttattcaattcttttacttatatgtgtggaaaattataactaataatgtgaatttaatcaattaaatttaaataatcatatacaattagtaatgaacaaattaacataataattggagaaaatagaagaaccagataataatttaaagtagtaaaataataaaatcaagatatatactagtttaaattcgatagattaatgtgatttatgactctatttcaattttgaaacgctaccatattttacttattgattgagtaagaataagtacaatacaattgagattgattctccgatggatttttactttgcattattcattttcacaaataa

SEQ ID NO: 18844 - DNA, 6196 bp, Cannabis sativa
  modified_base (3560)..(3564): a, c, t, g, unknown or other
tataaagtgctgtagtgtagcatattgtacagcttgaaccttatatgatgatcattcacttataatgatttatttaacttagaatagtatatcatgtgtagttataattttgggaaaatcttacaaagtgatttccggtgggttattaaattttaatacataaatggatggtactgtgacattaattaatgtataacttgatgagtgcataatactgaatccatgaaaggggtacggaaagcacttatgggtgatgcaaggaatgttcaaatccaacggagggtgtggctatgtgaaaaagccagacttcttattgtcatctactattcctcatcatattattgatcctcacaatccaactgtaaagatgattctaaaggtatgtccgtacctacatctcacactactaatactcaatcttaccaaataaagtttcattgtcattaatattacctaacataaacaggtaaaggtttatatgggtgaagggtggcattcagattttcgacacactcacttcgatcaatattctccacctgacttctttgcaagggtatatacatatgatatggccttctctctctctgttttccattatttgtataattatttgtataaggaagaattatgtatatatatatatataatttattaaatgggcaggtgggaatagctggagtgccaattgaccggtcaaaaatgatgcaaactaaagcagttgaggatgaatgggctccagtttgggaccacgaattcgaattctcactgagtgttccagaattagctgtgcttagagtggaagtccaagaatatgacacttcaggcaacaacgactttggaggtcaagcagcctttcctgttctagagctcaaatctgggattcgagctgttcctttgtacaacaaaaagggtgacatgtataaaaacgttagacttcttatcaagttcgaagcaatattattaaactagtaatgtactgcgcccacctaccttatatatatgtagataccttttataactatttgtacattacgtatgactgtgacctataatatttattgtgtaaataataaatatgcactattgtacctcctctaattaattaaacgtataagtgcttgacgtcgtaccctaacaaattagaaggaacactatattctgattaaaatttgcattgtatttaatggtaccatcataaattttaggagttttttcatatttacacttcaaaatagttttttttttttttttgcatttttacgtaattttacataaaaattcttattgcaactagtgctgcaacttaaatttgcaacaaaaaatcgtatagaaacccttattgcaactagcactgcaaccactttagaaacccaaaccgtaaaatttttaaaaaaatcataaaaatagtatataggataatttctctaaattttaatacaataccaattaaattatttaatggacaaaaaatgatacgtattattttatgttatagttaatatttaaatatggtctgaggtcagagtttagaattggggccggtgtttgggtataggggtaagtggctaggattggggctagggtcaagactgggatccagggccacggttcgaatctgagatccagggacgaggtttgggttcaaggcccgggtgaggtctgagataaaggctgaggtccaggctctgagtcaaaggctaggaaggtcttaaatccagggcttgggttagagtctaggtctggagctagggtggggtctatagtcataggtcgggggactagggtctggggctgggttggggtctggggtcgaggtttgggagttgggtttgggttgggtttatggtatgaatagttttacgcaccttattaatacaagccatgacaactacaaaaagcctaattagcgctgctcaacatgtctatgtaaaatggttgaccgacacaataaataggcagaggttttttactgatcagtgggtaactgaagcaaaaaggttctaattagtgtcagttgtatctccaatgctaaaagaagaactgaggaaaaaaaagtgaaagttttagaaaatttatttacttttttcttcggttgggatggtcgctaaatttcttttgcttcagttggaaaccgacagtaaataattggtgagtgtttccactgaagcaaaatgctttaatttttgctaacctcccttttgacaatgaaactcatcattttgatgtcttcaaaaaaacttagtattgtattttttatctgtatttccaaaaagagggacacatgtacttccaagattcaaattcaattaataaaggcccggtttataagtccaatcaagttaatggaccaaatttactaactcgagtcatcagggttccagaaagacatcttgcccagtagataaaaagaatccagagaagagatcatccagatacacctattagtgatgcttccggaaaggtaattaattagcctctagatgtcaagatttatttagtgctaattcaatactgaatcccaccacattaagactttttttttccaaaattaactttagaaattaagcattccatttaaggaaatatggtgtttgtcaaatagttattgaatcaaatttattacacgtagattctacctatcatcaagcagattccatgtaagctaataacaatagcctcacgaactgtgtctcaccaaattggcccatattaatatatatatattatttgtatttaccccatcatgatcatgtttacataaaaatcctagcctataaatataatgataatccttcacgcaaagggttcgtaattcattatttacaagcagaggttgaaaatagggtttacaaacacttgggtaatattcaaagacttttttagacaaataatattgactcgtgtactagagttcgttaatacttgaaccacgtaaaaattctcgtctaaatctctatattttatttattttccttaggattactatattttatatcgggtttctaaaagttctcggtaaatatgttggtgcttttattgagagttgaagaaaatttgatacgattgtatattacaacaatggtagccaccaataccactgtcactaaacctactgctcgtggtggagacgcaaccatggacgatgttgatctgcctcctactacatacgtcaggacgggtgttgctggggatggagaaacctcaaaagtgggcagtcgtccggcctagaagaatcattagtgggataaagaagtttttgataatcctattgaagaggatgataagaaaaaccacgaagatgatcctgaggaatatggtaattgtaatgaccgtatacttaaatatgaattagacagacttagcattaattagttatatgtgattatatttgttgtggaccctattctcaaggaataagaattagagttataatttccaaattctgaagattttattaaaccctaacggcttgttttggtacgccgtattatatagtattaatgttatttaatgcaatactatatttggtattgatttgtattaatagattgtgtaaagtnnnnntatattttcaatacactcgacccccagaccaactacgagtcagatcaagctcccgtgtccaagaccgggtcccagtccaagtcccagttcgggttcgagtttgggttgcggggtcttgggtccaggtctgggtcttatgtccgtgtttgggcctaagtctgggtcttgggtccgtgtttgggcctaggtctggattcaggtctaggtccagggtccaagtttgtggtctggggtctaggtttgggtctggggtctaggtttgggtctgggtcaaggtccaaagttcagaactgaggtttgggctgggttcgagtctaggtctggatctgggtttgggttcgagtttaggtctgggtatgggtctcgagttatggtttgggtctaggtcctaggtctgggtccaggtcgatgattagtgttgacctcgaatcttttgtgaatattataatacaagctaatacaaaccatttgttatgtattaaataatataacatatattgtattaaaaattttagtcgtaatataattaatacaatacattgctttatccaaacatagtgttaattattattcaatacaatacgacccttatatgatctaccaaatgagccctaagtgtattatatatgtcaatgtcatatgtaaattttaatattttcatgatttttgctcgataacgatagaaaatgcgacagatggccggtagaatcacatgtgttagtttagagccttttatttagcaaggtattcatatattcatatttggaataacaggtttaggtgaggtgtgatatttgattattttacccctaaaccttaactttacttaatcactaagtaaatgacattattagaatatttacctaagttaagcattgtcctttagtagaaataacacagtaatctttagttttgttatttggctcaataattagagtcaaactaatatatgggataaggataagttagaatagatcaaaaacaaagttatatctttgcttttttttttctttctccttattcggcctcaagagaaaccagaagaactaagggcttcttcatcaaattttaaggagattcaaatgaaatttaagttgtagttcaaaggcaaccctagacccctcttctccctaatcttttgaaggtttttctttagttttaagaatgtaatagttgtgaattagctatgtctgaaccctagaagttttgcgatgttttaagttgttttaggtttaagtgagctggttttggtagtttgtagagtttttgagcaagtttgagttcaagaactcaaacttggtccaataatagtggatttcttttctgtatgtttttgctgctgctattgcttgaaaaaattatatggatgttcaattaggtattttggaaagtttggctaagtttggggaagttttgagcaagtttcgaagctcttgggtttttctacagaaaattagttaattatttttccaagcatgaccctagaaaatggtttactggaaatttggttactatttttagcagttttgagagtcttagttttttgtttcctcaatatttagggtattgtcatgctatctatcgataggaaaatttctagttttgagtttagaactccaaaaaggctttagcaagttgtttacccaatttgcgtgattgtgatataaggctcttgttcagcacgtgaatttctattcaggttgaccaacacacttgaatctggaaacgatgtaagattagtataaagatgtatatgtatatgtgtatgtatgtaaattgcatgctcagttatgtgattcgtatactatcaacactagtacggtagtggtacggagtgtattggtatagtatatgatgttcaaagggtatgatccagtgttaccaacactagtacatgacgagtacatagtgcatgtggtacaacacttagtggtactcgaggtacggttcagccgtaccaacactagtacaagacgagtacttgatagtggtcttcggggtacggtttagccgtaccaacactagtacaggacgagtacttggtgcatatagtacaaagatcgtacttatgttaagaacgttcttgatcatctgttaggccttgtaaataggtgtacgagggcctagatacaaatcgatgttatgttatatgttatatgcttttcttacttagtttgttgacttacatatattatttacatgtgtaggtaaaggaaagataaaatttgagcatgagtgaattcaggacttggagatgattgtacatatccagatgattagacgtggagaggtcgatctcgagatgacttggacctttattttgtagtcgtggtgcgacaagtttataaaatgcattttgtatacgattgtaaattttaaagacgagatctcaacttttatgtttagttatatacttatatcaaatgacttgattatatctacgaatgatgcatattaatataagagatgaacaattttttttataaatgagatatgtgtattgctcataaaatcaactttacaaactaccactttttatgaaaataaaaagcatgacaaattaatcatcttagagcatctttaatagatatgaaaataagtgatgcaaatataaaatataactcattttgtc

SEQ ID NO: 18845 - DNA, 6708 bp, Cannabis sativa
tttgggccgatcttaaggctctcttgtattcagaatgcttttaatttaatgaagttgctttttcatttcaaaaaaaaaaaaaaaaaaaaaaaacaataaatacttatgttgcaatttccctatcataaataataataatagttttcaaaataataataataataataacaataataataatatttcataaatataagaaattggtttatttgaaaatgataataaaaatctgaagcggcctaaggaatgggaggagaaagtggagaccagaagccaagatctcggagtagatccaacccctcatcgtcctcatgtttctcaaatttttggtcatcggctctcagattcaagaccattaaccccaactcggatgattccgtccgtacaaattccggcgatggtctcattcgccgccttggcagttttgacctcgttcttcttggtgtcggcgcttctattggcgccggaatatttgtagttaccggcaccgttgctcgagatgctggccctggtccgttcttcaattttgctcaagctttctaatatgaacgacttagatgaaacaaattttgtaatgacttggattttatggtcaaaattaagaggttttgggcaaaattttctgtagcatcaaatttatggaaaattgaattcttaaaacataagcatagttggatttaatccactttttagggtctcgtcatataactattgtcttaaaatagctaatttggatgattttgagctagatagagacaaattatgaattctgttgaatttaaaatcttctttatgtgcttgcttatttctgaagttgatactatgatcatataggtagatggggtttgaatttgatcttattggtagatggggtctgaagttgatgttacattaagatcacgctgctatatggggtgggaagttgaccatgagattaaggtccaacgtgatgaataagatacgatgattaagttagataggtgaaaatgctgaaatttgtagaatttgggctcttctttttatctgcttctttgctgaaatcgattcgaagatcctataggtaaatggggtttgtatttgatcatatgcttcagaacatattggtaattggtggtgtcttacctatgttgaatatcgggtcctacatattgtcatttattaatattataaaaaattgctaaatgtgccactgttgggcaccattggtgggtaagagcaatgctcattggaatttgatcatgaaactagatcatatagttaatttggttgggaagttgatgataagattaaaacaaatgtgaatgggatctgaagttgatcatagaagattatgatcatataggtaagtggggtttgtttccacaccttacgcataattttttttacaatgcaggggttaccgttagtttcgctctagctggaatatcttgtgtgcttaatgctctctgttatgctgagctttcttctcgttttcctgctgttgtcggaggagcatacctgtatgcatattcagcttttaatgagctcactgcctttcttgtttttgcacaactaatgcttgactaccatattggggcagctagcatagctcgtagcttggcaagttatcttgtttccattctagaactctttccatttttcaatggtaacattccagattggattggccatgggggtaaagagttctttggagtgttgtccatcaatatattggctccaattctccttgtatttcttactttgattctttgttggggtgtcggtgaatcctctgctgtaaactcagtcatgactgcgttaaaggtgatgctcccattttgtgttcaaattacagttgaggaatctgtacctgacatagatttaaatagtagttcgtttgtacttagaacgtactatatatgttgcagatcgtcatagttcttatcgtcgtctgtgttggttcttttgaggttgatacttcaaattggtctccttttgccccaaatggtgtgaaagagatactaaccggagctactgtagtgttctttgcatatgttgggttcgatgcagttgctaattcagcggaggaatcaaagagaccacaggtaacaattattttagtaagcaatcttttaccctgttttcttatatataatttatatatatttgttttcagcgtgacctgccaataggcataatgggtagccttctgatatgtattgctctatacatagctgtctgtttagtaattactggaatggtaccatacaagttactaggggaagatgctccactggctgatgcttttacgtccaagggtttaaaatatgtgtctattttgataagcgttggtgctgtagctggacttacaacaacacttctagttggtctttatgttcaggtgactccttaccgatacaacataattttgtgcttgaatatgttacgtgtgaaagaataaatgaccatatctttcttatgatcagtctcgattgtaccttggtcttggaagggacggtttattaccttcaatattttctagagtaaactcaaaaagccacactccagttcactctcaagtctgggttggagctgttgctggagtcttggcagggctctttaatgtgcatgtgctatcccatattctttcagttgggtctttggtaagtcgttatttcctgttttgaattggacatttttgaagatatatgtggacagtgccaaatacatcgatgtctaaaacatgttagtcagctcatgtgaaaagcttaattacccactgaactatttgtcaactaagtgttcaaacttcaggaagcatttgccccgtttaatgtgctcactttatgttctgcattttttcagacaggctactctgttgtagcagcatgtgttgtatctcttcgctggaaaggtaaaacagaaagtcagttatctacctcaacctggagggaaggtgtcatctgcctattcttgattgccctgggtggttttggtgctgggctctcctatcgcctgaatgcttcatttatatatgcactcttaactttagttgttgccatactagcttgtatagctcttttgctccgccaagtaagtactaatctgtattctcagcgagttctttttgttctcatcactgatcggaacatgcaaaatgcacgcggtccctttctaagaatatgtaatctattattaatccaattaataatgcactggcaaatttcttatcgactagtttcaccttttatgttatttcattacacagttctgatgtgtgataatggatgtaacataggctgcatgtttgtattgtcttttcttgttttgaatgttttatcattctcttcctcaggcttatgcagatacgccagggttctcttgtcctggggttcctgttgttccagccgtatgcatcttcttcaacatgttcttatttgctcaggttgcttaatctcatcatctttgatattagaatttatacaaaaataaggaattcaaatttcaacacagaaaaacatatttacaaaagaaaatttagcaaaaaaaggaaaaaatactcattgatattcaacttcttttgcagttacactacgaagcttggatcagatttgtcgttctcagtattattacaattggtgtttatgccttttatgggcaatatcatgctaatccaaattcagaagggactgtaatctatcacagagctcctactgaagagcctctatgataaacattgttggcctgttgtacacttgtagcattaagtagtctagtttacatcagtattggagtcaacctagcatctgtctccttagaatcaatgtctattagctgaaattcatttctctattttacgtctgtatattacttcatccattttgtgatgttcaacaataataataattatgtgtatcctgaaaaatccaccattagacatgtacctgattctagtttcacatataataatcccatatcagaacctgtgtttttgtgattaaatcttttttagattaacatgatgtgaaacattcattgactattcttgatgtcaccgatgaacgtggtgctagacgagaattgatgtttcaaattaagaaaaatgtgccttcagttattcaagtgcatacaaaatcagaataaaacccaatagtcctcctttgacagtcctgaatgctgactagttccacatcaaagacttcaaattgttttgagctgaagaaagtggaaggccctacctgtttgaatcatgagcttcttattaaaaccaattaaatcaaggaaaatggctcaaattcattttgtactgttacacccataaaggccaccaatttttaaagcaagaacaataaagaagggagtgaagatatagaagaggtctcaaaacacagtccagagatgaaaagcggagccatcagaaaaatttccagtagacaatgaagaagaaaaaaataagagaagtgaaactcacaggaggtccaagttctggtggaatgattattcttctcttacccccagctttcatatcttttattccttcctcaaaacctgcacaggacttcattgttaagttatttcttacaaatatggttaatcatcctcacttgttattttttattcttttggaaggattggcaaaagagagtattggctaactacatatattagagagaaaagaacctaaaattattgatctcttcacctggaacaagtgctttggtgcccatgcgaattcttgcaggagcaccctgcaagtaggtactgtcgatacgacggccagattcattatagccaacataatggaagatcacctacagaggatctcaagccattagtagttgatgatccaaaagaaactctgaaagataagattccaactttactaaaaaaaattcctactttgagagcttggtccaaaaggtttctttatcccatgagcattatttaatttttatttttactatcagatcaaatgtgtatgatggacttaagaaaataaacaacaaaatgaaataaaaacctgttgaccagcctttgggcaatcacctttaccaacttcaaaatcccggtatattagtcctgagtcacacttgatgtaatcgtctgatgttaccaccttaacctcaaaacctggtataaacgtttcaagcatcaggtttcaattctgagaaaccaattgaaatcacaataagaacattagtacatgtttaagagatcaacaaagcaagaaaataacaaaccttctctaatgaaattagggaagtcttccggggcattattttctttctgtcgccgcttgttttgttctaataagcgtctttcatcgtatggacttttactctttgtctttccagatgcaggtgaagttggaaataggcctaatgtaaaaggagtaagaaggataagcctcctccttaatttcttatcacaatgtaattgatgtccattctgtgctctaataaccaaagcaaagtcctcattaagcaactcgggattccaagcatggtagtactaaacttctagtaaaaaactaaattaaactttcgaaacaattcataaattgtacctgtcatctttcaagttgtgaattgagctgctatggctactggttatatggctagtttgagctatgcaatctcttagaatgggagatgttgaaagagttgtaccatacactgaatgtagcaaaaatgatgatgaagaaaactaaaacataaccatagtaaacatgattgtgaagaaacaaaagtaatggcaaaaatgtaccacataaagaatttaaatcatgagttataacacttgaatagtgaattattagttcatgttcattcaaactgggaacaaaaaaaacccacaaatctcaagaaatgtagtccaatagatgccaattaaatttgaaggcagcaatcttatagagtttttaaaagttgcctagattttttttatgaaatcgtgtgtttaatgcagatgaaaacattttccggcttttcttgtaaccattcttattttcttaattaaatcatggggtgaccttgcattaatggaaatatgagaaatatactctcttttttttttgaatctcgagaagttagttacacgccgaataagccttgagtaaaccagataaaatgacattaagaacaaagatatgaactttttccataagctacctccagtttattcatttgaaaggtgtattctcatacactgaaaagcttattattattattatcattatatatttattcttacatataatgggaacgaaaaattattgatttggtgtaaagagattaaagatatgaatgcggagatataccaaagaagagaaataaggtaatgcaaaatttaaagtaatttaacaacaaaagttcaattacctataaacaatggtccggtgtgtgtagtcaagtattaaggagacttaccaggaaccgaaactttaggtgtagaagacagggctgagggaagcatcataatcatggcttcgagtaaaactaaattaggcttccaccatttaagtctgtcttgtctgttaaccccaactccaaacttatgccgttcagcttatcttcatcgcattacaaagttagccgaaatatcaattggctcctcgctttttcttctaataccggttatgtgccctttattggtggaaaatggctctattagttaagtaatttttttttttttttttttttttttaatttttaaaaaatgtgatattta

SEQ ID NO: 18846 - DNA, 2854 bp, Cannabis sativa
tttttctacatacaatttaaataaaattaagtatttctttatacatacaatttttttttcatttgaatttattatttgttattttatttattttaatttaatgttaggagacacaaaataacaataatttattttattttgttgctagttatgtgatttttttttcataaatattaaataatttaatattaaaaggtaactaatccaatatgcacttttctagattggatttgattatatttgagctattgtaaagattggattagatccaatatatttaatctgcacgtagtgcggatcgtatgcactatgagccaaatagtacgaattagattggatgaacactacccctaaaatatttatatggtgttttgtatcaaaagtctacccaatatgacaactgacaagtttcgttgctcatatatcgacagtataagatgattttcctaaaaggggggccacgagtaagtggtccttggtttgagaaaatgattgttgggtatcaacccaagtagtccaacatcaaaagaaaatacaagaattgcctttgaaattaaattggactaagtgcatacaacttggtaatcttgcagtagttgggtagttaaactattttcatttggtatgagagctttggtgatcgatatatagttgatttaattttggtttacatactgatatcataccatgttcgttgttagatctaagattgttgctagttgatctataatcttaattcattaatgtgattgtgagactaatttcactttcttttagttcaatctctgagagtgtattttttttttcttgttatcatgtcaatggatatattcaaggaaggaggggttccactacaagatcccctatggtcgaaggggctaattatccatactagaagataaaaatgagagtgtttttaaaagcacatgatgagataattaatctggatggccgtagttgaaggttggaaggttctctttaagatagttgatgtggttgaatctatcaagaaaatggttgattggtcagtgaaagagatttagcaagctaaaactaactataatttcaaggctcttcacgctatattccaacgtaccatatttgttactactttcatctggttagtcgaaatagcattgaatatagcgtgaagagccttggaacttttcaaggctcaatctcttccactgatcaatcataacagaaattaaagaacacttaaatttacaaggttaactgcaactggaaataaattctggtaagttatatattccttggaaattttcagtttgggataaagattctactaaccaatcaaagagttcccacaaattgcttttataacaaaagatcttgtacaaaaatcttctaaacagttcttggacattattaatcaagcatcccgctcgattttcaaggatcgaactccctccgatgcatgaactgtctctcacgatcttgctggatacctgtatcagcagtcctagatctccatggatgaactaccttcaagcttgatttttttgcacatgcaaaaatttacaacaaagagaaaacaaaagatgaaatttgtgtattttattaaagaggtgttaaaatatgaaagttgagctaacagaaaatatatactaaacccaactcagtgaaaaatataataaagacaacccacgtgccaaatgccaattagttactagtcaaatacatctgttatgtttccagattaatcatactacacaaatttgccacactaacttaaaatgatacactctatcagtatggggtcttttgaaaagatctccaaaaataaatccacgaaagtttaggtccaaaatagataataatatcatactaatgtgtgagtaaagatgatgtagcagcccaacaataaaaatattactagttccctacttaagatgctttttataggcatatattattagagtagtgatatctatctgcacacataaattacacatacttgacatatttttatgcggcaagtaattatttcaatcaatccattttatttaagatgagtcatacttgctaaaagtatatgccacatagctagatgtgtttaaagtttatgtgtgatttatgtatacacatattaatatgctttcttttctatgtctctctttgtgagtgctagatgaccttttctagggcttatggcttgatttgctgctatttgattatatatgtgcgactctttcggttgtttggcctagcatgtaagactgttgtccatgttaaattttgaatgaaattcatgccatttccaaaaataaataaataaattgtcttagccagtataaggactaagtacttatatgtaaataagaatatatacttcatttctatagcactcactttctaaacctactaaagaaaaacattcaaggctcatcattaggtattctgaattaagtattgaaaaattctaagttaccacttgtgacttggctatggatggtactacacacccttcccttggtcaatttttaatattgatttcactgtaaaatgcataagaaatttttgacaaagtcactgatttataagaggatacacacccaatttatagccggttaattttgtgattaaactcatatttcttattaatatatatattttctactttaaaatgttaaaagagcacttgtaatatatgttctaaatttaatatttctttaaaatgaagaagatacaaattagcatactacaaatgttttacataaattattagagcaataattaattgctctaaatttattttattcgtttttattttagttttaaattattttttttatatatgggtacgtggttatattaatattatatatattta

SEQ ID NO: 18847 - DNA, 4635 bp, Cannabis sativa
aggtcattaatatttcttttaatggtagacattttaatgatgtacgtactattattttttattttctaaaatactattagtacgatctccttaaaattaatcaacttttttttttgagtgaaggtaattaatatttcttttagtggtagacattttaatgaggtattcttcttcttctatctagttattattactactatttctagtacgagttccttaaaatcagtggccaaatgggctctctctgagagtgtaataatgaaataagcaggcctattcataaagcctgctcatccatggtaactttaattttgctttttttttaaaaaaaaaaaaataaaaaaaaattacaattgtaagttgaatgagctgcaaatcagtaccaagcatggatttttgtctctttgtagcttgtttgctatctcttcttcttattcttcttctttttgatacataatgattcttgcttcttattttttaagccagccaataagccccacaagacactgaatcttctcatggtagctttagctaaaaaccatgatcaaaatatacattattataagatttaccaaaccaaatattaaaaaagaaaaattgttatatatagtatacatatagatgaatgatatatttgagtatttttattaatttatggtggtgatggacaatggacaatactaactttagattaatataacacgcactttcatgtgatatggtagggataataatactatgtataatttaacccaaaaaaatatatatatataaagtcattgatagcaataatcacttatggatggtatttagatattttttccatgaattaatgagtactaactgtactatagagctattctttttttgaaagaaatagagctattcatttatgtgtttatattttaatttttaaagtggtaaaatatatgagtgagaatagaaaattaaacgctataaaaagggcaaagacacaaatagaaggcattattggtgtttttgaagctataatgtgaagcatgtgttgtgttgtctgtggtccccggcacgtgatttaattatatatatttatacatataatctgtttgtgtggactaaaacaatgtgtattatattgtcattgtattttttatatacatgtatattgtataatttgtagtatagattaaggcaggtatccaattttcattggagatgatctttataaacaattggtcaaaagagaacaaattattcattacagaaaaatacataaagagagagctagcttatgcttggtttctactcatacctattacctactataaagtagctagtgttaaatttatattatatattaaacaaatcatattactttatgtattatatcatataccataaaataaattccaccaaaattagtttgtttgtgatgaaacccaaacgtagatctgatctcatattaagcgctctaagtatgaaaccatgatagtttaatttccataacaaaaaaaataatatcaaagtaccttttttatattttttccacaatggttatatttattaattttaaatcttgctctctagttgaacattagtcaacaatcattttctgaaaatttcaaaactaggaatttgggtttgtacttgcgtatcaagaaacgttaattaatcaaatcatacttgaaaaaaaggaaaaaaaaaaaaaatagtaataatcctcaaaccctcatgatgctatcttgaattcataaatcttaaccaaaaagaaaaagagcacattgggttctgtaatattcagagtttttatttttgtttccaaatccatattgaaagtagtaagcattgaaaagccactttcaagcaaaactgtattgtattgctgctttaagaaaaatagcaggtatttgttattatgcttattctatataaatttatacataaaaacaaaagcaaagtaaaaaatataataaaagaaacagaaagagaaacaacaaaattgtaatttctgaaaatcaattcaatccaagccctttgtagtagaacttagaagtagaacaaccccccactcacctgcagattccttttgcttattcagaactttttagtgtaaaaagacccatactttatctgctgactcaccccaaacaagaacatcaaactcactcactcactcactcacactattcatttcattgtgtctctcacacatctctttcaataccgtttccaacttccaagactccaaccaaaaaaaagttagaaactctaatcatattatgaaacaataaaagaaataaacaaaagtcaattataaggacttttatttatttagtccacaccacaacttcacattaacacttcatcatcatcaaatttcaagtcttttccttccttccttcattcctctctctctctctctctttctttctctcctctctttctttctctctctctgtctctctctctctctgtctctgttctctctctgtctctgtctctgtcctatctctgtctctgtcctaatagttttggccaatatggaaaagaagtctttactagtattactacttgtgtttttggttttctttcccatgaatgtaattgaatcttctccaatatctcataattctgacaagatttttaagcttccaggacaacctgatcatgtgggttttcaacagttttctggttatgtgaaagtaaatgataagaagaacatttctctgttttattactttgtggaagctgaaacagatccaacttcaaagcctttggttctttggttaaatggaggttaataaatttgttttgtttgtcaactttctcattctcattgcctaatttgtttgtttgttgttcaattcagactaataaattaattcaaattacaggtcctggttgttcatctcttggggttggagcattctctgaaaatggacctttcagaccaaatgggaaagtcttgcttagaaatgaatatagctggaataaaggtctttccttttatatctaatgtttttctttttttggtatttaaaacaataaaaaagaaataaagttgttaatattatttggttttggtaattgacagaggcaaatatgctgtatttggagacaccagttggagtgggcttctcttattccactgatacttcctcttatgtagcagtggatgatgaagcaacaggtattaatatatatatatttttaatatcactttcaacatatttattaacattaaattgtatttcctttttggtttattcttagttttctcctgtataatctcatacctatagtttagtttgtctaaggggaagaaggggacatcaacagttgatttgcactaaacatatttagacttttataaagtgaaacaccaagcagtatttattgttgttgtttgttgtttcttgtttcactgctttacttaaagattttttttttcttctcttttctttttcacttatgtgtattattattggttgaagaaaataaagaaaagagggtcctagctagatctttttcacttgattatttaattaatgtacatatgtttgtcacttttgatttgatatgttaagccagggagaacctagtgttcttacaacgttggtttaagaagtttcctcactacaaaaacacagacttgttcttaacaggagaaagttatgcaggtacttatctaaacactttacatacatatatacactttctgattgtactaagcaccacaagatagtactatatagtaatattatatatatatatatatttaggtcactatattcctcagctggcaaagcttatagttcaagtaaacagaaaaaagaaggttttcaatctgaaaggaattgctgtaagtaccagaattaactgtaaaaaaaaaattatttcaaattctcatgaagtgtaagtaacatatatgatatatgtatgtgcagctgggaaatcctgttcttgaatatgcaacagatttcaattcaagagcagagttcttatggtcacatgggctgttatcagacacaacatacgaaatgttcagctcagtgtgtaactattcaaggtacgtgagtgagtactacagagatgcagtttcaccatcttgtttgagtgtgatgaccagagtcaacgcagaaaccagtaagttcgtggacaaatatgatgttacactggacgtttgtatctcctcagtcttgtcccaatccaaaatcctaaaccctcaaccccaacaacaacagcaagtgatgatgatgatgagggagaagagtgtggatgtgtgtgttgaagataagatagtgaggtatcttaacagaagagatgtccaaaaagctcttcatgctcgcctcgttggtgtccgcacatgggaagtttgtagcaagtaattaacaataatctcaattcttttaaattattaatcttcttacttatcatatcattatctaccataaattaaaatatatataagtatataataagaattaggtatgtgtttttcagtttcaatttattaaaagttagatttagagaccataagtaaagaccatagggatatggcctgataccatgttgagaattatgaggttccatctcaaaaccaattggcaatgagtggagtagcccatgttattatatatggctcaattctctacc

SEQ ID NO: 18848 - DNA, 3394 bp, Cannabis sativa
acaatttataatgaaggttcttatagtctgtgtatgcatgtgattagaaagttttatgttggaaatttgcagttccatacaatgcggaatgttctctttatggcaatgaccgaattcaagaaggtaatctatttttatgagatcactaatatttggttatcacatagtcaagtttattgtatagacctctcattatatttgacatgtatgttaagaagatctatgtatagactaaattgttcaactctttgttctgctttctgtcaacttcacaataatagctatccttgtctgtttctagtaagatatgtttggtaggaatattaaattgaagtgtcaatttctggctattggcatcctatgctagctttcagaaactccagattggacatttatgagagagaaacaccatagaattgcgtttttgtttggcatcgacgatcactggggaccactgcaaatgtatgaagaggtaagtgatggtatttcattactcaaatcaccacttgcaaagctttagatagatgatatatcataaaattcatgctcaattatggccctccgaacatgaaacttcttttttcttatctgaaatttcttaagatgaatacacattttactgttcggcattgacaactgattagattatacaaggagtttgtctcagacaccttaaattaaaggccaatctattatcaaagatttcggtttcttttctattaaacgattacatagttcaatctaaagtaattatctcttgtagccagttattcctaataaccttcctttcatttgttaaattaaaatggtaattcagagctttataggaggttgttgactatcatgaccattcatgattctgcatatcaatatggctctatcttcatagaccataatctgatcagccaaatggtctgactgctattcctgccgtattagaaacactaatagagaatcaagtccattactttcttctcaaataagataatcttagagtgggaatgtgctatagatgctatatatagaaatagttattccatgaacaatcttccaaactcaaccattgcatgatgcgggttgtctcctatagacacgaaatgctcggtccaccctttgttattgaaattcaagcctgctgagttttcattttaagttcctagagtagattttgttaatgcataataagctggaggtgattatataacaactaactagggttggcaagcatttggaagaagaatagagagggctcattttaaatgctcatagttggtgaagttattcgttttccttcaaaccttttttgttttcctctttataactccacttttgcttttggcattttgtacttttcaactaattgtttatgcttttctggtactttgtctatgccacacagatctccaggcaggtcccagatatttctctatcacttgaaagagagggccacactcatgctttctcttgcactgaggttggctcaacttgggttgctcagcatgtggccaatttaatcaaaaaccaaatttcaagctcaactcactaagacacttcaacacactagtcactattttagatatgacactaattatggtgtcaaattagtaaaaaattcagtgtttttatttttatttttatttggtgtaccttgttgagttagtataattaccatacttaagatgatggtatgctataaacattgtatttgttattgttagatatatgaaacttctggtgaaaaaataaagaaaaagaagacaagtttggaaaaagataagttgtgtctcgtgataccatacctacaaattatgttgatatttgtataccaagtaataaaaatgaaaggaaaatttgaggacgaagtagcccgtgattggagtgttccaatggatgatggtatatagttgcaagtgctttcttgtttgttccataatacacatcatatcatatggtgaattgtttttatttacttttattagatttattaattaagtttgttttttaataagagaacgctgcacatcaagacaacaagtattaatattgaaggtattagtagttgtttgtatagcaaaaggcaacgaatactataaaagaaaataattgagagagagaaaatggaaggtttaagaaatgttgaagattagagtgctttgctcttggtgtttggtggttgtgatattttccttaaaaaaaagtaaaaagaaatgttgaagatctttgttgtgagttttgggtttgaggtggttcaagactcaagtatggttttcctctgccagaggagcaagcgtgggtgtggctcttcctttcttaattccactcattactcttcaaattttgaccatcaaaaccccacttcaatgtttatatgtttttgtttgaatttacaataatatatacatatttatataaatgtataaggactttatatgtttttgctttccacattttggagaaattataacaattttatatgtatatgtgtatattgtggttgtgagagacattttagtggtgtaaattttaaaaataaaatttaaaatagttaattacctgtgtatataataaaaaagactcatgtacaactaattatttgaaatcttatactccataccaaaaataattcagaattttttgacaactagctaaatacttactataattataatgtttattatcactatttccaaaaataaaatggtagttgagcaaagtgatgtctattttttaaaaaattcttgaataaatatatatacatgatattattctacaattggcacattataaattaatttgagtagtgatggtaattttctcatgaattttctatataatttagttttatttggattatgaagtaaatgtaatatgatttgattaattttagaatatagttgttctaatttttatttaaaatattagtaaatttctttttattaatgagatggaaacttaacctgcagggacgggcatcgtgagtaagacagtgattctttgtctaaaataggaaagatagcaggaatgcgaatagctttccattccctttaaacaaggtaagaattgtatttttcactctgaggaatctggtttaacttttttttttattatttattttgtgatattattatctttatgtgctaactcactgtcttacctgataattcaagtatgtggagattccaaatctccgagtattcctgagtaagcactgataattctagtcatacattcttgggatttcaaaaatagggttaatcccaaatcattttcaagcatatacataatatgaactccaatcattaactaattacacatagttttgtacatctagaaaatcatttttgtggctgtctttaggtttggtatgttttataaatagtgtaaggaccgttgg

SEQ ID NO: 18849 - DNA, 2135 bp, Cannabis sativa
  modified_base (1106)..(1106): a, c, t, g, unknown or other
attttatttttttttttattttattttgtgattaaaaattaaaaaataaaattattatcaacctaattttagtggctttgcttcttaattatttgattatttgtaatatacgactatgaatatatttgattaaaatatagtagtgttttggatgagattatacaaaatagtactgcataatacacttcaaatttgaaaagcttgcttcctatcattcacgtgcagtgcaagtgggttgggtacggatgtatcttgattttaatgtctatttttttctaaaaaaaatggaacttttatataatatggctaaagacattagaaaaaaattaataatataatatctagtggctatctagtgacttatatatgtgaaaaagaaaacttaatttataagcaaaccttaaaaatgcaaatgtaattttctttttctttttgaaatcaatacaaatgtaaatttcatagttgaaattttgtgaaagtaactaagtttatggagacggctttatgtttcgtcatcaattgtaaatttcataaatatttctttttcacctgggatgtaaatttcattgttgaaattaatcgaatgtctggacagcttatagcaaatatttgttattgtgcataattttttcttactaatttataagatatataaagatatgtgtaacaaattaaaatatatcataatatatattaattgtcaacattttgtattattttggggagttacttgttattatgagtaatctctagtattatcactaatattaagagtgtaaaaaagtgttacacatcttaatttaaaattcttaatgttataggagttatggtgtgagcatgagttacatttgaatccataacatccgtgggaggttatgagtataaatttcaaattgtcatatcataaacactttataaaaggggtctaaggtcctcattttgagatggaaaattttctataaagaaaatacattactagaaaaccctaaggcttgataattttcaaagctatctcctagagagttccttttatgcttagatataagaggaaataagcttttggacaaaagtgtaatacattttcaagtcatggtgatccccactanatctacactcaaggttgtgattgagtgtattatatatattattctcttactatatatatgtattatattacatgtgttataatcttcttcttctatattttttttatatatattatatatatagtgcatataaatgtcgtgtaacatctatttaatcaatttattttattgtttttgtattatttttacaattgagttgtatataacttgatttatctttcattattgatatataaaatctctaacataacacgtagatattaacttgagatttaacggtgaggtacatacaaaaattaaacttagagattaatactgtcaaaaattaaacttaaatatttgtttgtgactagaagttaataaatttaaatatttacactgtaaactaccttaaaaaattaatatttagagaattgttaatagaaaataataacaatgattagccaatgtaaaatttttatttattaagaaagttattgagctaactcaagctaacaaaaccaacttattaaaattgttcttactttattaagtgaatacatatatgatcagccaatatagaattttaatatgcccctcacgcacaatgtgtacaatgcaaaacaattgtgaactacaaatcaatattagggcatccaatattgtaaaactaagtttgttctcacataatattaagaaagttattaaatctaactcaacctaacaaaattaatgatctcaccttattttgtaagcctaataagcctacagtacactttttaattgttctactatttcactattttttttggcatcattaggattaggagaatgtttagtttattttttatttaaaattgaaagttataattatttaagattattaattcataatttttttcaaaaaattaaatagtttatacttcatacttcatagtactgaaaattaagttaaaacagttgtttacaaatcacgtgtgtaacaaaatatttaaatttaatttttaacatgaaaaattagtatataataaaataattacgtgtgcaaca

SEQ ID NO: 18850 - DNA, 2301 bp, Cannabis sativa
ttaaaattgtgttttttttttgcatattttttgtaattatttaaaaaaatgtatacatttatgtaaaatgcccttaaatttttgtggaatttgggtaaagaggggatcgatgatggatgctaatgaagtgcttctttatgcatccattgttgtggatgtcatatgaaaagctggaaaggatctcattcacaaccacattcatcctaattttaccaatttcattaacgtggtgtctaattgttttgcagaatcctctcaatcagttttgccccagcaacctatagtcatcaatgattctagttggcaggctcctataaggagttggatcaaattcaactgtgatgttactgttgggagagattctatgatgttggcggttgtggccaaaaactctgattctgatgtggtttgggttgagactaagagcctacgttttttgagtcctattggaggtgaagctgcagcgtggagtttaactcttcagcatattgctattagacttagttttttgtttgttgtaattgagtgtgactgtttaaatattgttaatgctttcattggtaagcataccgtggggtacctctaattttatccaggagtgtaaactttctgcctctcttcttaggatgatgtagcatattaccaagtgggcattagctttgaacgtggctgttactgaatctattgagtatttcttaatttcagttgatgctatcatgtaatgaccttattatgttcgcctagcttgctacacttttaaagaatagaatgttattattgaacgtgttgagtcaagaagatcttggtgtgaaactcatctataaacgtttaatacagtagattagttcgtttgttttttatacaaaagatattaagatttatcttttagattaacagatataaaacataagatgtcaaagtaatctaacatagaaattgacttattcttggataggttgttttattttattttattcatttacttttgaacaattggattgggttgttggttattgctattttcgcactgtggagacatcatatgcctatataaataaacatttaatctaacatgagaaatcaagtggaataaaaattattagctacttttttttttccataaaattgcatataaaataaataaataaatagcagttagtctgaactctgactagagattttctttccaataacggattgacttgtcagtaccgcaggaaacaaatgcagcctctactggtgagtgctcaagccaacgaggagccccaatatggttggaaggccaccttgccaccttttctgtcgtcaccgcatcccataccacaatctgcaaccaacacagattccaaatgaatttgaggaataaaagaaataagccaacaaaacagcacaagaatctgcacaaacctcgttgttaggttcatctatggatagtataaattcttcggtatcattgaaaatagcctgcaaccaagaaaggtttaaacaacatattttttggctcaaaaaaaaaaaaaaattaaagattagagcaagtggtgccatttgtaacattccttttccttaaccatattcacttcttccaaaaagccaaccaacagacaacttaatattcctttttgtatgatagggcccaaacataaacataagttatatagcaacttgaaaataattgagataacagaaatgaaagtcaataggcacttcacgcattattaataatcaaaggtaggcaagtccttgcacacctggcatcgcaactgtgtatgaatggcgcctaggtattgtttgaccaatcttccagtgctaacttcccatagcttcacagtggagtccttcccacaagagagaatgaacctacaaggtcaaacttcatgtcatatcacaaagcaagccacatgaagattacacctagcattgtttcaaaaatcgatcgaggcgcgcctcaaggcgaggcagtgaaaaaacgattttgaagcaacgcctcagctgctggacttgagatgtacgcctcaccctgaggaggcatcttgatgcgtacgcctcttaggcgattcgtgttgaggtgtgtgaggcgcacgcctcgccaagtgggtttaatttgtgttttcaggatttgttttgggctgacttggactttttttagtttaatagcttatattgatttgtaattgactttatggacgttagtttgggccttttctaacataattttagtagagtagatagatttgaaaaataaaccctaagcagctctcttcttctccgactcctccctcctctctcccccaatctcacgca

SEQ ID NO: 18851 - DNA, 4106 bp, Cannabis sativa
attttaaattcagatttctttttaatgttttatatggtttagaaaaaaaaaaaaaaaaaccataaccatatttttaatttgattaattagataatgtcatatttagtgacatttactttttatatcatatttatcataaccttaataatttttcccatatttttaaaaatagccctatagccctatataaaatctataaaaattgtaaatatatatgtagtatgttaggcccaagtttatgcatgatgaagtgagtctccaatgaggcagtatggtcggtgagaatagcataacaacatttgcatattcttgtccaaagaagagagcttgaatcttcaaaggccccacaaatcttgtccttttccataattacatctttttttcctcaaaagaaaagataaggtttttccaccgtaccacatccccaatttccaccacccaaactcaactcatcacctcattcattttacctccattccaagttttctttcttttatttttatgtcatttaatgtcaacaatttaattctttcttttcataaaaactcacatctaattaatcatcatttatagtaaaattgttgaagcttattgcgttttttttaagagtatataatatttatcatttcatcaaatgcaagtatatgtattatgtaatgcaacacaacaaaataaaaaatcaaatcaaatcaattattattactgacaattttgaattaaagttttatgaaccttattaaatctatagctccaaagttcaaactatgtctcctaacttccctcattacaaaacaaacatagtatttttgtaaataaatgacatgtatttaggatgtatttataaaatcactatgcaatcaaattttaaattcaatgtcattacaaaaaaaaaaagaatataataatagtaacttcccttattattattaggaaaattattttatgtattattttttaattcttttttttttaaattgctctaataatatttttagtgatttccatattgttgttgttgtgtaaattttagtaataatttaaattgttccattaattattatatagatttctatataaattttcataaaaaaaaaaaaaaaaaaaaactgcttaaaagtaaaaataataataaataaaactcttattattattattattattatatataacaaaataaaaagtagtaactttccttattatagttacttttggtgttagatacgttagtctttagacattctaaaataaagggcaacgaatatatatatacatacaaaataaatttaaatttaaatattaatattaatattaatattcaatatttaatgtagtatgtactatatagtattagtatatatacatacattgttaccaaaagtcttatcttcaaataacttgcctatttctataaattgacacaatattaacatttgagcattccccatattaatttcaaatcaaatctcccaaaccacacaccaccacaaccaacattatgagtgtaaaagactgcggccaccaccatgacgagcggaaaaaaatggtgcgccgcctcattatggcggtggccgccctaataatcctcttagctatggtggtatttctagtgtgggccatactacaaccacacaaacccactttcatcctccaagacgtgaccctatacaacttcaccaccaccacagccccaccttacatcttaaccaccgttacacaactcaccatttcctccaaaaaccctaacggaagaatcggaatctactaccaaaaacttgacgtttacgtcacctacagagaacagcagataacggccgccacactcctcccttacagctaccaaggccaccacgacgttgccgtttggtcgccgttagttttcggtaacgccgttccggtctctccttatcttcaacaggttctcagtcaagatcttaactttgggtcaatgcttatcgaagttaagattgagggaagagtgaagtggaaagttgggacatgggtctccggccggtaccggttggatgttagttgtccggcttatctccggtttgggaatcccaccggagggttaccgacgatgggtcccgtcgttaagcttcagttgtttcagagatgccacgtggaaacaactcttggttcttgatttaaatttatttgatttattaattaatgtttgtttttattttttaaggaaaagagaaattaatataaatgtttccttttttattatatttagctattatagagaagaaaatatcattttaataaatggtgttatgaattgtttggctattaattaatgtttctgtttattagtaatacatggttgtttcttttatgtatatgcataatattgagtgggtaagggtaacaattactttgttttaaattttccttttttattattacatttttcttttctagactgaaatttattaaatgatgcaacgcaaaagttttgttaattagtagcatgaacatatataatagatcgattacaatttattgagtgggtaaacaattaattttattttaattattttccaatatatatttgcttttttttttttcatttttcttattacttttttaagactgaaatttataaaaagaagcaaaagttttgttttattagcatgaacataatagatcgataattacaagggtacgttataaggtttataggttttgtaacactaattggtaagaaatgcttttgaaataaaacattttgcaacatagattacataatttgaccaaatattgtgaggttttatcatgaaattaattgataataagtaaaattaattatgaagtacttataaataactaaaatatatatttttatgtttaatgcatatatgaaataatattatccaataaaattcatactaagtagtgtgaattggtatgactgaaaaatttgtgagctaccaataaattataatgacagcctcataagtcataatgaattttaaaacacaacttgttcttttagaaacaagaaattcagcttcaaattgttctatttttattacatgtaaaaataaactttttattgtttgaatattagagatggaattccttaaaagtagattaatatcattacactaaaattacttttaacataattaagtataattttattacatccaatcctataaatagccctatttttaataggctagaccttgaattctatgcagattcgtctaattaatctgaatcgtgaatataaataaatagagaaatgctaaaagataacagtggtgtctagcatcctcctatgtgttaatatcgttattggtccaactaagtatcgagttccatataatttaatataatagcttttagggagtatatatcgctagccaattgcaacgcgacatgtcaagaaagtgctaaacaccactagtgtctaatagcaatgctcaaataaatactagctaatttatttaattttctatatttatatatcagttgacaattgacatgtgctaatgacaagtatagcaacaacgactagctaagtagataaatgtaaattatgacattaattttgataatgactaataagaaaatgagatttggggtttccaaaagtaaaagagttgacaaaataggtctatatcgatccgtgtcttgggggaccatatttttttgttgggatttgggtgaatttatattatagcagcgttacgtacttaattgtttaattattaaaaaattagtaggacacacagaattaagaaattagtatatattaatgaataaataaacacataaagtactagatatatatactagatatgaattgattagtttcagaggacgtgttcttcggaagaactacagcaaattaagaaatcacgttcataattactataccaataattaattctttgagacaccaagtactaggtaaaatattaattagtcataagaaaaatcaatcactgagaaatgaagagattgtgaagcattagaatattatatattgattaataaaaaagctcccacagtatcaatattaagatattggcatgtttactaataagtaatgggaatcagtagtaaggtaatcattctcttatatttgtttactt

SEQ ID NO: 18852 - DNA, 2872 bp, Cannabis sativa
caactgtattgaacaagaacaataagaaacatttttacgaagtttaaaggtatagaatagatttccatgcagttctaaactcatcttgaaaatttgcaatcatcctgacttctgtaaatcaaaaccaactttgcatgtcatgacacatactcaacatatcacataactaatgtttacatatatcataaatgataacatgccacatactgaaatgatcaagcagtacttctaacattttggataacttaggacttggagcaccatgggacaagcattgctgcattattagcttagctttaaacatatcttcatttctactcatatatctggcaaaagacctgaaatagttaaatgaaaaaaagctataagacagttatgaaaattgagaggagaaagtttagataggcttcagtattataagacaatcaaactcgatatatattgacattagtatgtgagaaatgcatggtacagaggataagcataacttaatttacaaacttatgcaacaataaatgtagaggtccaaatatggtcaaaacaatcttcaggaacatgctgggtgcccaaaaactatcttcaggctattgttacatggaaagtcagctggcttaccagctttgtgttaaaaatttgaatattcctggtataattaaaattcatgaaaagaaaaaattattcgactccaaacacagacaccaaataaaagatttctggttgaagaaatcaccataaatgaacatgggatgtataagatcgacttgatgcaaaaacactgaacattacaaggaacgcacccttgtttgagtttttcttcaagcatctcataagctggccttactccatggctagaaagtagctttcgaatgtgatatagagtgagaagtaaaccaaaatatccttccatatctcggatcataatttgggaaaggtttggaggaggtgctagacgaaaggtctctcttgaactaagtaaatcgcatgggctcaactgtcaaacaacccaaaacgaagcacatcagagttcactagggcgaaatacatatacatgtgtaaatgtatttatattagtttaaaagataaacaagaaattgaaagtatagcccataaaaatattttcagtcggtagggaaaacaaaattacactgatgtccttcaccaaattcaccaaaacatatgtgaaacgggaaaatgttatcaacatgatcaagatatgcttcaagaggtatatgctagacagaaatatacaagacatttgattctacaatgaagaagatatcacataacagattcccctggcatgcaaactagtaacatacagaagacttagacaaacaattaatgaagaatcttgggataatctaaaattactttggaatttagcctttaatttctgaaagaaatgcttcaaattaacgtatttgtaaaattgaatggtagagacttccaaggagcaatgagcatggagaaagaagcggcaaaggaaactagagaatttaatccagcagagtatagttcgtcctaattatataaatatatagtgatgcataatgtcaccatacagtcttaaagtctctatttgggagaactcctttctcacaaagcttggctaagtatgggcgtataacgtctgaaagcttattattgatctcaacagcatcctgacccatggccacctaaaacattccaattaagttagagcaaaaaatttttctattcttaagaataaactaaaaagagaatctgaacagtacacttacttgaattaactctatcttcctattgtgaacgtatttactgacatcatggtcactttcattacgatattcaagtgttgatatacgtaagttatcaataatttgctggatagtctgctgcttcgctgaaagaacatttatcttacaatgtaagatatatcatttaagtccacatcaaccaagtctgaatcagttacttacatccaggtgttgccgttaatgcaagtattctaagttgcactggtacattcattaactgcaaggttagagttatccttttgtaaatggactcagccaatccataaataaaatgctgaagacaaacaataataatcgaacaattaagaaagatcataaagaaactgaatggatgacctcttgaacagcaacacaatatgaaaattttcccatagcacggtgagcttcatcaatcaccaagcaaaccaagtatttgaccaaacaagttcctgcaacaaatttttaataaaaaaaatcagtaatagaatggctcttgaaaaataattattagataaaaataacaggttaaagttagatattaacattaaaaaaaatcattcaagcgtgaataatatatgacctgtaactctgcttagaaattcttaagtttacagaagttactagtatcaaaagacaaatgaaatatatgatattaatgaatgaatgaagtaaacaatgttgtgattaaattgaattacttcagatggtaaaaaacgatcttataaaactaatcatacaaatctggaatatacactcctagaggatgagaatgaatacataatagacactgtttagacaagttaaattttgtcaatagcagaaattatgacaacagtgaagtgcttgtatacatgtttaaaatggtgagcatttattttcattaaacaaaagtagaaaatttacaaaaatcatttagagttaggatttgcttatgtttaaatattttaatttatacaagaataaaagttagatagttgtataaaagtgaaaataaccattaaataaacactagaaatgtcaataatacaattgaaattacaggttcttagagcctacattctaagtaaatagactcctttagctttatgtaatgtatt

SEQ ID NO: 18853 - DNA, 6381 bp, Cannabis sativa
ttactaaattaattaaaaacttaagaactaaactaatttttaataaaaaaaatgtgaaaaataactctaatttctagagttatcaataggtatgatatatcttgttctggttgttagtttgacatctttttcccataaaaaaaatatgatatatataaataaatttctattacataatttattaaaacaatattttttcgtattcttctgcaataaaataggagtttgaatgaaaaattatcaaatatataagatattgattagtttgaataagaaagataatgaataggcgtttgagatattttatatataaataaaatgactattaatatacttggagagagaataataattaatcgtgtcattatacagtaaatcagtttttttttttttttttttgagagaaaaactgttattataaattaatgaggaagttcatttacaacaacagcttgaataggagcagggacatctgctcgccaaaccatatcagaatccaaccttaaagcaaatctagccaaaccatgtgccgcattattcgccgagcgacaaacatgactcagtgacactctaggaaaaaaggacatctgataaataacatcataaattaaatcatgaaagcgactatgatgcacttggtaattattgacactttgggaaacaagttgtgcatcagtttcaatgaaatggataacataaccagagtgatgaagccattgtaaacataaagagatagcatgagcctcaatctccttgacttgaaaacatccacgaatggatttggatatggcagccaccacattaccattagagtctctcacaataccaccaattcccataaccccagcagcagaatcaagagcagcgtcgacgttaagcttaagttgaccatggggagggggctgccaagatttattcatcacaggtttagcaaagggtaggggcgcctgtcgactggtatgggaatggaattcattcaggaaatgaagagcattgtcaacaattatggtgggcaaatttgtttgcttgccaaataaagagttattacggtcatgccataaataccacatgatacaaaggattatttccatttgaaaattatcataaaaatggaacaaagaatgtacaaattctccatcactgctagaagttgcagcagccaaatcaacttgaaatgggagaaggcgccaaacctgcttagctttcttgcagaggaaaaaagcatggttaagagactcattatgataattacaccgggagcatttcggatctggagctatatgtctcttgaacagattggcagccaaaggtaacacattatgaatcacacgccaagcaaaaatctttaccttacagggtaaattcagatgccaaaaatgagaccaccatttagtattaagattggaagatgaaggggactcttgatctctgatattagtagccaaatgatagccagactttacattgtagcatccatgaggagagtgttgccatatgagtttatctgcaggagcatgaagactcaaaggtatgctcagaatacgatcactatcatatcaacaaaagtgtcgatgaagagcaacataatcccaagtacgatcagctgtaatcaagtcagaaactctaagatcattgttagcatccatacaaagaacaggtgcaaagttcgttgtaccaggaagccaaggatcggaggcacaagaaatggaagatcccgtacccaccttccaacaaaggcctttaacccagaggtccctaccccataaaatactacgccaagtataggaaggattatggcccagtctagcttgaaggaaagttgagcggctaaagtagcgatggtaaagggtgcgataaaggagtgagtcattgttatcaaccaatctccaagcctgtttggcaagcagcgcttgattgaagtcaataaaattacggaacccaagacccccttctaacttactccgacacaaagcattccaatttttccaatgcatagaatgaccatcttctttgaaaccccaccagaaccgagatattagactctcaagattgtgacacacttttgctgggagccgaaagcaactcatagcgtatgtgggaattgattgcacaacagcctttaaaagaattttttccccctatagaaaaaggtttttcttgccaagcagtaagaagcttccacacacgatcgttaataccactaaagacatcacttttgttgctaccagtgtaggatgggagtccaagataagattcatgacaaggttgaataggcatacccagagtttggtgaaaagctctttgatcagcaagcgtggtattctgagtgaaggacatgactgattttccagcatttataagttggccagaagcacggctgtataaatctaaagtactcttgatagcgacacaagatcgagcatcagttctgcataataagaggctgtcatctgcaaatagaagatgagaaatgggtggagcatgacgagttatagccaaacccgtgagcatcccctgggcttcttgatgtttcaaaagacaagagaaagattcaacacatatgagaaagagatatggagatattggatctccttgcctgataccccgttcagaaataaggtgaccagtgacatgtccattaataagaaaagagaagctggtagaccgaagacatttcataatcagatcaactagcttcacatgaaagcccatttttaagagaacatgttcaataaagtgccattccaccctgtcaaaggctttactcatgtccaacttcatagtcgaatagccttttttacccatggtcttatttttcaagcaatgcaagagttcaaaagccactaaaacattatcagtgatcaacctattagataggaaggcgctttgattctccgagatcaccagtggtaagtaattcttgatgcgcaagacaattgttttggagatcaacttgtagagcacattacaaagacttatgggccgaaaatgagccaccgtggttggggacttaatttttggaataagagtgatcaaagtattgttaatgagtgaggggtccccattattgttcagcacatcaaggacagccatagtaaccaatgggccaactatagaccaatgatgagtgcaaaacataacagacataccatcggggccaggacttttatcagagcccatactaaggagaccagaataaacttcatcaggagagaaaggctaaaggagagaatcgtttatggcttgagttatagatgtagggatcacctcaagtgtttgggaaagagcatcatgatcaacaccattactgtgaaaaatagagttgaaataatcttgaacttgacttgaaataccatctaagtctgtaacaaccaagccagaaggagtgtgaagctttttaatacaattattagccttgcatccagaagctcgtgaatgaaagtatttggtgttagcatcccctgatttaatccaagagacccttgaacgttcatgccaatatacctcttcttgttcaaggagatcatcaagaatacgttcagatttacggagctcagaaaaaaaattcagcacttgaatcgttggaattatgaagaccagcaactcgatcctatgcttttgagatattcttcttcatattaccatatttcttgtcatgccaagcttgaagatgagtggaacattgtttgatgttggtaaccacttgcctcatagactggtgagaagatggatcccaatggcgagccacaagatcttgacattcagtgtcattaagccataaggcttcatatttaaatcgagatcgcctcttaggagagagatgaacattagtcggctgatcattcatagtaattttgagggccctatgatcagaagagtaataatcaaggtgatgaagagaaatgtaaggaaaagcttgttgccaatgggaattgataaaacagtgatccaaacattccttcatatgtgcagcaccttcagatttattagtccaagtgtatatgtcatcattatgatcaagccgtgtgagatgtcccttgttaacagcattgtggaaagcattaataagagcattatcccgaagagttccaccaactttaaggtcattagaaaatatctcattaaaatccccaactaccatccacggattttggggagcaatatcagcaagtctttttaatattttccatgtttgctttttttcaacattagtgggagcaccgtaaaagccagaaaaatgccatttgattccatcatcacactgaacataacaagaaatatgattcattgaaaaagtaagcaaagttacatcaagattccccttccataataacataagaccaccgccaagaccttttctaggaacctcaattccattcagaaaatttaaagcattacgaactctattgacagaaccagatcttaacttagtctccataaggaaaaggagatgaggagcatgttgggaattgagtagcttcaattgacggaatcctcgggtattccccaaaccccgggctttccagcttaacacattcatggcgactggcggggttgcgcaacacccgccaaatcagcatcctcatcctctgcagaatttgtagatggcacatcatcagcaaggtcggcttcaaaatcagttacagtagctgtagtgagatcggatgtggaattgtccgagtttggatgaagacggcaacgcttgagcatattccgaagggaacatcccacttgaacagattgccttttgaaagagcgattgttggtgaattcgcgagcagtaactattggtggagtgtcaattgatatggtagtggtagcataaggatctatggttggtgaatgaagagatggagaagaacccaaggtggcagtgggcaatatactaggattattgtgagtggaggtaggattttcaggagacgatgtggacatccgattaataatattttgaagggagggtggaggtaaaggattgttggatgattgctcccaaggtgctaagggaaaattacttgaggcgggaaggctagtagcaagggcagcaaaggaaatagtggcttgttctgacgggcggatgttttggggtcgaggagggagggtcggggtgagagggagggcttgtgtaagtgagtttcggacaagtcgagtcatgagtggccacgccacattttggacattggtaagagataaaggtctgccagttcccctcctaggtaaagggtcccctttcatccaaggaccatatggtaaggaagtatcccccccaacatcttcagcctccaagaattcgatacatcttagaaaagtgtggccaagacgaccacacttatagcagatatcaggtaatttctcatacttcagaatcacccataagtcatcaacaagaccagtaatcttcaaaagtgtgccacggaggaggggttgagtgacatcaagagagatacggatacgcataaagggcccccatccttcctccaaggaatcatcatcgaccttcaaaaattctccaacaattgacccaataatatttgccataactttagttttgctgagaaagggcaaaccatggacctgcacccaaaaaggaatgtgagtgaagtccgtaatagccggagtagacagagaaggtgccgagtgaaagacaattggttgattattaaagtgccaaggttggcggtacagggtgcgttgcatatctccagagcacctaaattgaaccagaaagtatccttcacagcgggcagtgatggtaacaggaaaccgaaaagcccataagccagacatttggttgataaaaccatcatcgttcaccttcctgtgagttaagacaaaggcaaaacagcaaaatggttagtagcagatgtagcagaagtaatcgatccaccaatttcatgcaccaccctttctttgtccgtgacaacaaactgattggagaggtctttaagcatattttccatcgtaccaaatttagaacaattgtgggttagggcacatagaactcgaaataaataggagagtggtaagagggaaatcataatggaggaggtgtagatcgtggggatcatggccagaaggagagggtaaagaaatgggtagagatcatggggaaagatgatgaatagaggggatggaaacctggaaaaaaccagacaatgaagtaacaaagtaactgccacagagcaaaatttgggcggacgctcaaagtacgtacatatcaaaattccagtaaatcagttgtgaagtttaattgttttactaaaaaaaatgataaaaaaaataactatattgtgaaacataaacaatttaattaatatataattatataagtacaggtgatttttttttatttgagccaaaaaaaatgtcagtttaaaaaga

SEQ ID NO: 18854 - DNA, 5130 bp, Cannabis sativa
aacaccatgtctaatttttagcatggaatgtcaaatttccctttggtattgtgaaaaaagaagtttgtaacttttgtatatatatggaaggaaagaaagtgtaggtccattcccatagttttgagaacctgggccagacagcaagcccaacccaaccaatgcattccgaaaccgacttggtaaatcatatgaaaaaccgaacctcatctcacctgtgcaatgctatatataaacctcctccactccttagaaatatctcttttctcttttctccggaccgtcctttgggattaggattctctctcatcctatccctctctctctctctgtctctctctactccgatctcagtaacccttgcctgtgttatccaacccagggatatacctgtccctattatctatccccgaattttctagggtttccttttctgctttgtttgtgtatcgatatgatgcagcagccatcagcgggaggagtgccaccgtcgatgcagatggatcaacaagctcagtaccagcagcagccaccgcagcagtggatgatgccgcagcaacaacaagcctcatctcaaacggcgtctggtgccccgccttcgtctggctgggctcctcagagtgggccgccgcagcagccgtcatctcaggcccagtacgggtccggggcccccagtcctgggtctgaagagatccgttcgttatggatcggagaccttcagcaatggatggacgagaactatattcttagctgctttgctcatactggagaggtacaaaatactgaaattgctttgtatggagtctgtttgggtgtagggaagatttatgaaaagtatgattaccttaattttattcatgtttgtatttgttaaaaccaatattgtttgttccgtttagtttgaagtatcctcgtagttgtatttatcttgtgtatgaaggccaaagtacttgtgtgatatcgaatctgcgttgacgctggcaaagttatacacgtctgaatctgatcatctgattttctcttcgtatatgtaaatattttatttttcattggtcccttgtttgagatacgtgcgaaggatggttattagagttctaggatatatgtatttattgttggtgaaaggtgttatcctttatcaaatttgtacggccacacatcatcactcattattttagttgtgtagtattaactattttgtaatatatataggcgaagtgttttctttttttctttcttttttgtttgtcgggtgggggtttaatcttgtcttactgcttttaaatggatgtttacaggctattacagcaaaggttattcgtaataaacaaacgggtttgccagaaggatatggttttattgagtttccttctcgggcggtggcggatagaattttgcagaattttaatggcacaattatgccaaacacggaacagaatttccgtctaaactgggccactcttggtgctggtgaaaggcgtcaggatgatgggcctgattatacgattttcgtgggagatttggctgctgatgttactgattacaccttgcaagagacatttagaactctctaccactctgtaaaaggtgcaaaagttgttactgatagggccactggacgatcgaaaggatatgggtttgtcaggtttggtgaagaaagtgagcaattgcgtgctatgaatgaaatgaatggtcaatattgttcttcccggcctatgcgaatagggcctgctgctactaagaaacccattggtggaggtggacaacaatacccgaaaggtatgtggcttttatgattttgttgaactcttttacctgattgctctttgttgagtgttgttgcttactttttgttaagttgtactcgtctttatttatatttctacctttgattgtttttttttccgtagttgtaagctctaagctatatacttggtttacaatcttagttgaaattttaagcctctttagaagttgatgaccttttagttattccctgggaagttggcagagttaagagtcctttccttccaatatttacctatgtaaacttgggcgcatttaattctgttagaacagtcaaaaacttatatactcatgttgtcttaaagcaggacaccgagaggctctcattttggggggcctggaactgatttcagctgaaatgattccactttagtgcgtggcctcattttaggtcagttattttgtttatgtcataagcttcgtacttcatttactagtggcatctattatgctactttcacgaattacatttccagttccttacatttgagaagtttacggggtcaagttttaattatttccattttcctatataaatatctttttcttttgtcctgaagaccattcaaggatccattactctactttcttggcagataataggatagatgttcttccctagtgtgtggctggtgtgtagtaaattaagtttccaattcactgtacttcattctactttggagtatagacctctgaattatcttgctttgattatgtatcgctgaaccatggattagagaaagcacattgtgtgctgtgttactttatccaaatgttttttttttgataaatttcaatcacacacatagctacgagtgtaatgtgtgctgtctcacaaatcactcacacatgaacaatgtaagataaaacacacaaaggtttttttttttttaatagatttcaataaaaaaaaagaaattcgtgtgttttgtcccacattgctcgtgttgattgtcaatgatatgcttgtattttttaatttacttggatctgtaaattatcaagttatatcgatgtagtaagctcatctctatctgaatggttttcatgctcaattgcttctctttatctgaagctcatttatgctgtgttgctatacttgttaatagttgatgaaggagttttttccttttttacatcctgatttgactttctgctaatcaatcttgtataaattgtgcctgtacatccttatggctaaccagttttatataatctagttctcatttatttatcatttgcagctacctactcaaacactcaaggatcccagggcgagaatgatccaactaacacaacagtgggtagtttgtttcgttgttaatattatttttaccctttttgtttggttgtgactatatatatatatatatattcctgagtgcagatatttgttgggggtttagattctagtatcaatgatgatatgttaagacaagtgtttagccaatttggtgagctagttcatgttaaaattccagtaggcaagcgttgtggttttgttcaatttgttaacaggtaaattggtagtgtagattacgcagttatttaccagcacttgcttcatcacgtgccttatgtgttgtcactgctttatttcagagctaatgcagaacaagcaatatcgatgttgaatggatcccagctaggaggacagagtattcgactttcatggggtcgtagtcctacgagcaaacaggtaggtagttgggctcaaaacctcttctatattttgggtttctctttaacatgaaaaataaagtcttgtatgtctttgtccaagactcagcaagatcagacacagtggaacggatattacggatatccacagggatatgacgcatatacatatgcccctcctgcccaggaccctagcatgtactatgggggttatgctgctgctggatatggaaattatcagcaacctggtgcttaccaacagccacagcaggtactgttatgggtttagatactttattttttgtaaacacgttttttcataaaccttagtggcatcttgtcaatggagaagtgagctagaaaattttccaattataatgtttttttggtttggacgcttctctaactgcacctttatatttgcagtgatttatgctatcttagagactggagggtagtagtatctgtctctgaagcttttgggttggtatttatctggctggagctgttgatggtctgcggtttttgtgccctgttgtcatagagttcgttttctatttttgtgttttttttattttattattctcttcttttctcccccttgaaacagtcttatacgctagactatgcgctttaagtttgtgttttttctcatatgctgatcttgtatggattgattctgttggctaatagttcatactttatctgctatggttgtttgattttcgtttgagaacccttcagttttttatctgttttagtagtaattactttttcttttaattattattttaacataaagaaaatgatggtcttagaacaaaccttaaataccagccgacttttgttgtttgggaaaagatattcaattgccaaatcaagatgtggatgacgtgtgtgtttttaggtgatttgggttttgtactatctaatttcaacccttaaaataaaaatacgaataaggagcttttgtaatatttctgcttcatctaccgaagtaaacgattgagaaaaacaaaatgtaatttgtatggggttttgttgaatcacatctaatatttttaagttcattcaaattcaatctaattatatattagacgttagattttaccatttgatctgattcaattaatttagttatccaatcgatccaacatttattggatgttggattaaattgattctatacgtaggatgtattttatatatatttattgatttaatttgagtttattcaatactttagatatagtactttttgaatcggattggatccatttaatattttaagtccatattggattggattcatccaatccaagaaagaagagtaaatttttaatgttaatttttatgtatatattttatgtgtaataataaaaaatttaattactcatccaaactaaatgaaaatactaattaattcgattggatgttggatgtattgaatttttagtcacctcatccaacattcaattggatattcaaaaataacatccaattcaattcgatcacaattggatatccaatgtttggcggtcggttgtaattgaatgggtcagttgtcattggattggatgatttatgcacacccctaaagaagtccacgaggaaggagagcttaagtggggtttggcggttgcagag

SEQ ID NO: 18855 - DNA, 1550 bp, Cannabis sativa
aaacatatctcacacgatcatataatttagaaattaaaaatctcacaaaatatacataaataaattactttaaattaaattaagatatactattcatttttgccacaaaagattgaagatttttataagaagaaccaccttctttcacagcttctttagccaaatccttccatttctttccgttcctttccatttcattattttctttcctcataaccgtctccaaacacctcttaatttcttcgccctcaacaatttcatcctcgttcggttttactctcaccccaattttccactcttcctcgattagcttagcatttgtcctttgatctgaccatttcgggaaagctaccatcggaaccccacaaaccatgctctctagcgtcgagttccaaccacaatgagtcacgaaacacccaactgactcgttactcaaaatctccaattgagaacaccaaggaactatcattcccagcttaaccaactcttctctaaactcgactaattcattatcgcaaacgttatagctttcaacctttgactttataacccacaagaaaggttgaccaaaagataacaaccctttagcaatttcctccatttgttgtttactcaaatccaaaatactcccaaacgacacataaacaaccgtcgttttagcctttgaattcaaccactccaaaacactctctttgtcgttttctccctcgtgaaaaatatcgccaccaaaagaattgtcaaaagggtcaatcccgtcagtaaaagccgacggaatcaacggtccaatcccaatcaatttctgaccactaatatcgctaaccgctcgcaaagcttcagattccaactcatcaaaagtattgaccaatattgacgattttttatgatctctactcgaaatcatcgaaaactgttcttcaaaatgattaataataaagtaataaacatcctcagcatccataaacgatggaaaatcctgtcgtttaaactcaaacgacaatccaggaagtgtcgttttggaatcagattgtcgttttcccataatctccctaataacttctccaaacccattgaaataataataatacaaatcgaaaaccgtcgccgcctgaatccacaacatcaccggcttaattccgagatcggcggcggccgcggcggcccaaggaaggagaagagtgtagacgaagcaacagtaaggtcgatcgtcgtttcgactcgaaacgacgagatctgatatgactttagatccgcaacgtctcatctcagacgtgtagtgtttcatatcaccgccgcgtttgtaaccgtcttcgtaaccgtctatcgaaaacggagcgaaactcaaacccgacccggggtttggatccggatccgaacccgaagatttggtcattttgcggtaggcggagaggggtatgatgaaggtgacgtcagcgccgaaggtggtggcgaggcgtttggcgaattggagagatgggtttatgtggccttgagctgggtacgtcatcaccatgaaacgcagcggcggcggtggcggaggaggaagattcttc

SEQ ID NO: 18856 - DNA, 2697 bp, Cannabis sativa
aaggtacacactgttactgattagaacctctacacagtgaatatgaaaataaaacgtgaaccagtatagaatcaaaagaagcaactacaatgcagtgcccgtattatagtatactttcttttttattactttttattttattttttttttgacaaaattagtatagtctacttgatcgcacatgtttatttattatttattattattattttccattttcacatatttgtatatatattttgctgaatattttcccatataacaaaaaatcctgagacggaggtgatcatggtgctctaattttctattaaagaagggaaccaaaacgactacattttaaactaaaaaagacaaacatacaatccttagctgagtcatttttcttcaaaatggatgatttagaaaaatccattgttgaagcaagagaagagcttatgatttcatccaatggaaatggtccatttctaaaacaagcccattttctcaaacccactgtaacctccattaaagatccttcctttaagctcctccataaagacacccattgtcactcttcgatcaccactacgaaatgggggaacttaccattcgaggtggcattcgatgggtggcttttcccacaagataaatggaaggagtgggtcagaagtttgagtttcaagcacagacaaatatgggaaaaagctggaatttttgatgcgattatggggtccacgtacaaaataaacaaatacccagaagtggttttagagctagcgaaaaaatggtgccctgagaccaacactttcttgttcctttggggtgaagcaacggttaccttagaagatatagctctctgtgggggttactcagttttggggtgccctgttttcagtcctctcgagtcatcatatatggaagaaatggaggaaatgctaaaggaagctcgtttggaaatcgtcaggtcgaaagctaagaaagcttgtcaatcggcatggatgacgcgtttcatgggggaaaagagcgatttggagcatgtggcttttatttctctatggctatccaggtttgttttacctagtccttcacgaactaccatatcaaaacaccttttcccacttgctattcttctagcaaacggaactagagtggctctggctcctgctgttttggcaactatttatagggatttaactttgttgaaaagaaaaatggtagatttaagtgagtccgaaggagaacttattctctgggctccttttcaactagtccttgtttgggtttgggagagattctcatcgttccagccaaaacgaaatttagttcaagtcggccagcaaaggttggctcagtggcataaagtgaaaaaaccaccatctccttttgattatgatggaggaaccttttcatggcgtccatatgccacaaccatggatagtatctgtgctctaacccagatttatggagaaaaagcagattgggtttcagttgattcagattcaagtgaacaactattgtcacttgttaagtatttgaggccaactgagttggtgggaaaacattttgatggttattgtattgagaaatatctcccacatcgtgtagctaggcagtttggcatggatcaagatttgccgggtaatgttgctcggttcaatgagactcctagtactgcttggaaacaatataataggccaattgactttagaaagttatatatcccatctatgtcttataattcatgtgttactttaagatacttcaattggtggaatgatatgttgaaactcggtggcaaagatgatgtgaagagtattggaaagcaaagtaaatggagagaagagaatgatctatcttggcctcctggttttcctcccaaatgtggtaatgttaaaggtagagaatctgatccagaagacaacttaacactcaaggaaatgtttaatggtgtagagactgatgaaagtgctaatggagagattccgagagatgatgatcctttgttggttactgcaaagataaaacctgttgaggaacaagttgatgaatttatgcagagttcaattgctattcctgtaaagactgccttggagaaagaagaaatccgaacaccttctgggtttgatttagatcaagtagaacaacttaaaaatcgaattaccaagcttgaaaaatggatggaagagagaaaaaagctatttgacacataaaaagtaattaagacccatagtaattgttgatatgccttgtacatgttggagaaggaagctgtggagaagaggttgaagaagagagttttgcccttttgcagattgcagaacgaagtttgcagcgagttggttttgaatttttcaggaacaaactcagatagtagtgagtgtgaagagaggttgttagcctggtatgtacaaagacagattaccttactgaaagttaattaattaagaatggtcatagtcttaaactgtaactagatgattggcatttgaggatgttatacaaggagttggaggaaagagagacgttgctgactcaaaatgtagtttagttccttgactgatcaaaatatgttatggttattttctatactatactatactatactagtttctcattttctatggctaaataaggttggaggaattcctgttggaaattaaggaaactgaagcagaggtaactagatggagagaagcttgtgaattagaagttgaggct

SEQ ID NO: 18857 - DNA, 4891 bp, Cannabis sativa
ttcaattgatgaatctcaacatctgcaaaacttcttggtcagaataatcccagaggaaaagcttcttcagcaggtaaattttcaaatttatccccacgaacaaatgaaattatttcattttcttatatatagcaaagagctaataaaatagaaatctaaatattttttttaataccatataacaaaacatatataccaacaaatccataaaaattcccaaaacattaccataactttaagaatattcaagttataggtttctagataagtaaaaaaaataaattagacatttaaaagtatgagaaataagagaattttatgtggcaggaataattaattaataggattaaattgtcatttttctgccaattataaaatgggggcattaggttacaaggtgacatatttttgggccatttactttaatttctcaggaaacatttttaacaaaaattccatcaaagaacgaagacagtaaagagagatctaaggaagaaagaagaggaaaaatggaagaacccaaaaagttaccgaagcagcaatccaaggatccttttgaagcggcctttgaggaagagcaagaacacaatcaagaggaggatgaagaagaccttggtggagctggtactggtgctactgatccctctacagctgtttctcgcgaagacgatgacaaggatagagatggcgatagagacagagacagagacagaggaccatcttcttcatccatggcattgactgctgctctgccaccaattcctcggaagaagagagaagatgatgacgaggaagaggaggagaatgtggaggttgagcttgaaaagtttccttctgcctccgaccctcataaaatggccaagatgcaagctattctttcccaattctctgaggaacagatgagtcgttatgagtccttccgcagagctggatttcagaaatctaacatgaaaagggtattcttctttttctttcttgcttcttaattatacatcaaaatcatttctttcattcaattcaattcatttcatttgcagttgttaactagcatcactggaacccagaaaatatctgtgcctttgaccattgttgtatctggtattgcaaagatgtttgttggtgaacttgttgaaacaggtactcctttcttttactcttcaactctgcaaatttgtgtgtgaacaagttctttatgtttagtaatgcactttgcttgttttgtacttgtttatatgcacagctagaattgttatgagtgagaggaaagaatctggaccagtgaggccttgccacattagagaagcttatagaaggttaaagatggaagggaaagtaccaaagagatctgttccaaggctctttcgctagcttgtcacagctcattctctaggttctttaaccacttttgtatgtgagtgttttactttaggttgttttgatgctcttgtacttacatttctatgtcatttaatcaatagtagcaccgaaactgcaataggcaaaattgaaaaagagcagaattaaaatgtattcttttcaaagttggcacatcacatggattggaagccatgtaattgctcttcataaaactgaggcaaacaaagctcattgtggttgagttttcaattttcttctcagtacatgaacaggtttttagttgtcctgaggaatatagaagcagagtttggtaatgcaatggtacagatatctcatatacctcattgctgtgattttaccttatccaatgttgaagtacttatgttgtttgattaagacaacatcaatgggtggtcttaggggtaaggggtgttggaaatggaaagtgctggtaggcatttgttccaagattcgaatctctgcagactcgacaaccttggaggtcttctgaccgaacaacagaagtcacttcttatagtagaaggtcgaatcaacggttttaaggagagtttgaaaaaaaaattcaaggcttgttctcaatgacaagagagcaatgtggatgtgttcaatttcggaaaaggaagaggacatcaataacagaaccaactagtatttttcttttcattatatttgtgaatactgaatagaatgaccttttcattataggaagaggacatccctaatagattcattgtggttgagctacaatcatagttattggtgcattttaatatcgggttttacgcattttaacttaataaataatatagaaaatcattaattaattataacttataagacgtcatatcagtgtagtgttaggcacattaaggtgtcaaatagcaattagatctttaaatagattttgggaaatatattggcaacggtgaaagaactagctaaattaaagttaatctaccttgtcttgacaaaaatgaaatctttcatcttcctctagcaaactttaatcccaaggtaacatctttcaagggtatccccacatgggcagtcccaacccaactctcaagtacttagttagtaggccttactccacaacccctcttactctaactctatcaactctacttgttgaaagccataccttcttcttctatgaggttgccacaaaagtggcttgtgacttgtgagagtgtggagtcatttgtaggtgaggaagtggacgagaaaagttgtaaggtggtaggtgtaggggcaacggtgcccaacttcttaaaaaaaaaaattgattgtatataggctataacaacattgaatgtaccttgcattaaaggtgctcttataatccattacttcttttgccactaataccacaataaagagaattgttaaaaaatactattggtatgtaacatattctttggtgttatatcactattagtgtaattaagtatcaagttccatataattttaaaaaataatttttaagaaatatcgctaaccaatcgtagagtgtcacctacaaaaagtgttggacactactaatacccaataataatactaccataaaatacattttcttagttttttctcaatatcttaaagtgtaaagataattttgtaaatgctttattattaaagcttatagtagcctctagtcttttaccttaaacctgttctccattttgatgataaaggaatgtaaggctggttgactaagctagggataatatccttaccaagttccttaaaagcttccaccaattagagatgatgagtcaatatgtgtaggctataccctatagggatgaacaacccaatttattgagtttttttttagtataaaattatttagattttgggggataacctattgcatcaccatttgttaaatatgttaaattcaattaattaaaatttcaatcacccataataatgtcatattggggagctcaatgcactactatagttatctattttttctttaataagaatttatagctttttttgttttatttttgtcataacatttaaaatatattttattttacattatttaaaatgtatattataaaatagatttgaccttatggttacaaaactcaaaaatttggatgtaaatgctaaaaaaatttgattgaggtcctaagtgataatttatataaagattagaatccatgtgatatttactctattattactattatttatttggcttgtttataatgcgttgtatgattttgtactcaattataaaatacaaaaaagaataaatataatagtaagtataaccagctattgttgtatgtaccataaggtccaccacttgaacaaaatacaaagctctgtacatatttgcaacttggtaaagggaagaatactttttctttgtccaaatctaattaaataaagcttcagcctttttctaaattagatttactaaaactaaatattttcccaaatctaaactagttcaatccttttattttattttaatatgttatgaatacttgatcttaactaaatctttccttatttgggattgtgaaggttatgctcactctaggttttcactaagcaataaatcaatttttaatgatatgaaagaaatatttttttttaatcagaaattaatatttaggtgaattctttactattttcacttttattaatattaatttatgatgctaaaaataatattcaaatattcatttatacagattgattatttgaaatttatttttagcttcataaactatttcaaaaagaaaattagaaatactttctaacatttaaatgccttattacgagtttctattttattttttatgaaaatgaaaataccataattattcccgttctctttgtttttgtcttattgtcgaattcgagtaaacaaaagaaaaaatacctcaatagaagagagtcactaaaagagaagaaacaaaaatagttattatcttgattaaaagggcttagtgtagatttaatatgcattcttgaaccccaaatttcttcatttttttttactacacttattatactcttgctatattatttaagatgggtattttaaatctttcaaaatttagcccttttgggtattagttctctgcctaactaaatcccaaatacaaatgatgttggcaattataatattaacttacattttgtttacatgaaaaactaaacaagaatgaatagaaaaataaggagttaccccacttgtgaatttcaaagtgtatcatcataaagatgtactttagtcaaacttgatacacttcttctctgcctcaatcaaaaccatatcccctttttaattcatataactctacaaaccttctctacccaagagaatattgttcctactctcaacactattattattattttacattaacccccattttgttctcattctcttcaaatatttaaaacaaaatacaaacattattatacatttaacaaatacttgaaaggattagtattttttttt

SEQ ID NO: 18858 - DNA, 4137 bp, Cannabis sativa
aactgggaaaaaactgaacaatactgggaattgattgaagaaaaaacggttagaacccatatgggacattcaactgccacagagcacaatcacataggcagacactcattatttaatcatcaaaaaaaattatatattactgtcaataatctaagggatatcttgagttgagaaatacctcatttttttattcattaatcaaaaatatatttatattatgttttattagtttgtaagtagtttgtctaatatactcttactttatatttaagtttaccacataatttatattgacttaaaaggtataatggggatattatttataaaagtgaatatatcttaaaaaatatagaaataaaaataaaaattaaaataaataaagtaaaatgagtatacattgtaattttctccaaatttaatctcataaaatagttcaaaattataaaaatgccataaaaagtgtataaactttaaactatcatattcatgagagaatgtttcaaatagtgtaattttcatccttgtaaattggcccaacccattcttcatctcaaagatgagttgggccaggctttgaaagtaatgagttagactagatactgtttctgaaaaaaattacactataccatttttatattcttttttttttatttttaccttttttttaaagtctattatttttactttttttttttttaaatattttaccaattttgcctatatcacttcaatacactcttcgactcctttatatcagagtattttgagtacaatatatataaaaagaggtatgtttcaattaaatataaattagaggtagatttagataattgataaataaaagaagtatttttcaatatatggctgtttctgggttctacgaaagcataacatcatctcttatcttatcttaaaaaatccattatcaattcactaaacttactcaatgcgcagttttattatactattaaaagaaaactgtttatgggttaaaaaaaaaaaaaccgttaatatttctataaaagtaataataatttcattaaaaaaaatacttcaaaaaaacttaaaaagtccgtaagaacataattttttttcttaattttttttggatattatgaataatctttacatttttttgggcataaattaaatgctagattttaggcttaaaataaaaaagaaaaagaaaagaaaacattttagtgttcgtcgagtattgacacttgggacatagttagtcgttacccagctcggttaacgcgtcaaataatagtcaagccactgaaacttactcatcaagaaattactctctctttctccttatatttgtggtctcaccaccattttttttttgtgatttttttctgaagctcaagcagaatcaagccaaaattttcagatacccagagctaatttttgtgttttctcttcagttcttcgttcatatatatctacattctctcttcatcccctgttttttctttcttctcttttctcctcgatatttcttaccataattctaaaccatttttcttcttctttcttcgtttggtcataccacagaagcaattttgacccaaaattcaatgtgggtggtttttgttagccttaagcccgaccccattatggtcttcatttgaactagatatatagttgcttctgtaaatttaaactcccggggttctgggtatacctgcaatgagcttcttaagaccttccgctctgtattatctcttctttacgtacccttcattgcgatggatgccgtgccagagttggggttttctccgatcgccaggtcttgatgggtttatgagactcttcgtggtgtttcttttatggtccatgctttctgaaattcgattcataccatcttcttctatgtacccgactattcttgttggcgatcgcatcattgttgaaaaggtttccaaaaatcaatacatacaaacactagaaatgttcaatagttcaaatgacatttttgcttctactttggcaataaatttgatgatatttttaagttgtaattactattaatagtttattggttttctaattttgtttaacaataaaatggcttatttctctaacctctccactctccaggcttcatattacataagaagtcctgcattacatgaagtggtgacattttggaatccaacacaggtttattaataaattgaaactacatattaggacttaattagtttcctctgttctctgatgctggatatgtttgttgtcttatctatagccaccagatgatgcggaaaggactgttttcataaagagaattgttgccaaagctggagactttgttgaggtgtgattatattaatttatgctttgattttaatatttttggtcttctagtttaggctaagactaattaatgaaaaaagaataggaatgaattaaaaatggattaatcctatttattccaaacatacccttctttcaaaccctccaataagagttctcgtacaacagaacagcctggagcaaggtaacctataagaaagtaagccttaaatatccattttttgatgttatagtgttggaaattattgctgccaacacaacacacaactcaaagtagagagtattcaaacacaaacaacaatactaagtcaacagacaaattattaaaataaaggatgaagtgaagacaactaaagtttaatactggttcagctaataatgcattggcctaatccagtttgttaaaggggttccactactcaaaaatgcctatagagatgttttaatctataagagctagaacagagaaagacccttttacaaacaagttcttgaaccaacaatgttgaagactctcaactctctctcacacttcctgtacaagtcataagtgtttcccaaagcaatcactctaatttttgataatttccacacttgaaactaaggcttgttgttctggtataaatattattcgtatttcatcaattagtcattattactcaaactgcataatttggttgttacaggtcaataatggattactctacgttaatggaattgctcagcaagaagattttatagcagaaccacatagatatgtattaaatttaacggtgagcccttcttctcataccacttactttcaacttcgttgtacaatttttaagcatttgcatttgccactctgtattctaccatatatatatatatatatatatatttatatgacggacgcaaacactgtattttacttggcttataatcatttgtacatagagattttcaatatcaactaactccatgtacccaataactatataataacctcctcacaattcccacatctctttactcttcacaggaagaattttttaaccccaattgatagtttagttataaaaacattttcaaacttttttttacgtaatttacataaacaaatttctctacttcacaaatatgaactagttaaataggtaaatgatcctggtgtgcattagtgttacaacctgcatctgtgttggtgtataactaattttagtttgacctgaatttgcagtatgtgcctgaaggtcatgtttatgtgttgggtgacaaccgtaataatagctatgattcccattattggtgagttttttttaattcccctctatatgctttgagctttagcacaatcttcactctcacttttattgcttcttcatcttaatttactaagtaatctataagtgaaattactaacaggggacctcttcctgtacggaacatcatcggaagatatgtaatttgttgccacagaccatccaacagttgagacgagatttgaagatgagccaccgctgctgctcgctagagccatctaactataatctgagtgcctctaaactttgccatattacagaagcaaatcgagctgatcacgttttttacacccgcggattccttattctgcttattggtgatccacaactcattttagtaatttatgctaggcattctattctcttaatttgtttgtctgcagtaagatttttaagacgattgtagaattttgttagactaaacattttcataaacacttgcagttatggacttgtggtgttttgccagtttagtttatgcttcataatttagccaacagttgtgtca

SEQ ID NO: 18859 - DNA, 2036 bp, Cannabis sativa
aaaaacacagtatttttgaaaagatttccgtgtgacagtatttttgtaaaagttaacctaaattccaatatttttgtaaatttccctcaagttttgagtttgagtctgagttaggttcaaggcttagtctagagtccaagtcttgagatgagattcgaggttaggttcaagatctaaatttggactagtatgtaacaccttttaagtattattaagtaatgattttttacatatcactaccacatcacaccatggttaaaaaattggtaaatgattcaattttttgtatgtaaaacttaaaaatagataagtattatgaaagaaagctggactattatttgtagtgtgtttgtgtgactgagttgattttgtccatagtccacacatgtgtgaagagtttcaaataataaatgttgacaaatagtatatttattacacttctcctacttatttggaattttgggtcattgctttgaaaagcttatcaataatccaaattacactttttcattttaaaggacttattattagtgtagaaactcaaactttataaccttattaagtgtgaaaccttattatatacataatacataatacatatatatatgatgtggatagataatcataatcataataataagataatgaatatttcacacttggtacttttgtcaactccaaacacaaaattcaaaccaatcccatttgttttttgggtcaaaattttcttaaataatgtaccacatgcatacattgattataagaaaatgaaaattcaaactcatgatattgtcttcataataatagtagtaagtttcataaaactcaaaattttagaacattccaagaaattaaaccaagccaaataatatttatatattttattaatgtgtgtgttaatatgggttagtagtataatataattaatactagagctcaccatcaccactagttgccagaagagactgacctgttttagtacttttttttaattattaattattttaagacttaatcatggttcatcaaactaagttattactattattataattatttttagtatttatttatagttaatattattattattattattattattctctatccgcgttcacaaaatgagagacaatataatcttaattaataattaattttaattgtagtgtcttacgtgtggaatgatgttataatctaatcattacctcatgtgtataacatgaggaggggtattttggtctttttcagataaagtcaaagtcaaactcctccacaaaacactaactaaaatccctcccatttcctagaaactcccaacaaaacaaaacctcatcatgttataaattcccaacgtgtgtgcttacttactcctcttactaattagacaaatatgcatgcatgtctaacacttttctagatattatattattattattagtgtatttaattattgaattatatataattttaataataaatttaaaaaaatatcaacaactagaatgtcacctttaattggtgttaaattttattggtgtccaataataatatatataaaaatataagagaatgctaaatggtacctatagtgtttaattagtactttaataatgtgtaatattgctattagtgtaatttaatatcaggttgtacttattttactttaataaaaagagaattgaaaaaaggtactactaataccctcctttattgatgtaattaaatatcgagtatcatacaactaaagaaaataccttttaataaatattgctaaccaatggagacactactgatcgatgcctatgaacaatactctaataaaaattacaaagaaccgctaatcatttatagaatgcatagtgccaagcatcttggtaaataacaatgctcaaaatataatagtaaccaaaaaaaatgatgttctgttattgattcttaaaaaagaaaaaaaactactaactataaacgttaactagtgcttaataacaactttttttaagctgtgtaattatcataattagctaacaaatatt

SEQ ID NO: 18860 - DNA, 7114 bp, Cannabis sativa
aaatttcagtatgaccgtgtttagaggatgtaccttagaattttctttatattctacatagctagcaaggcttcattcttataattaggttcgactcatgaactaacttaaggtcatattataataaattattagacaaagttattttcaaatttttaaaagccatcatgagttgattactataaaaattagaattgaataaattatgaagagatggtatatatagtgtgaatggttttgaattgataacctgcatttgaatataattaagtaaattaattttaattttttttcttaaaaaaattgatgaacgcaccatacaaggtggaagaaaacggggagaaaagaaaagagattttcaaaaatcgaaaagaaaatgcataaaaatttcgttgcttcattaattgtttggtagtgtcaacttttgatcaaataatattattggttctctttttttattttctatacataaaaaaaaatcattatctttttagtgcaaaggggtagttagctattttcatatcccaacaaggaaggcaataactctacatcctatttgaagctatatataaatttagatcatgaatgtataaatatatgtatttatacaaatgatcgatgtacacaactttataaatatgtatatatatgtgtgcaatatcatattattatatgagatataaatatgtatttttaaagtactatagtacaatggagaaaagtattttccactagtggaactgtagacgttaactttcactatagtgaatgagattaataatagggaaagtaattaagttatataaataattattaaggttaagatatatctatttctgtgcatagttccaacaaaggcacgtgtatttgcatacgatatggttgttcacatcacccaaaaataactttaaaccgttgaatttaataacaaattatcattaattaaaataacttacacaaaaaccacctcacctatattaatttacctctcttcttctctcttaattattgtcttaattaattctttctttcttttttttgttttgattcataatttttctttaaaattcaaattaaataaaatcacgaatatttccttgcccactcaaaattaaataattaatgaatccacatgtatatcatgtattttttataagaaaaaaatacgtaatattagagaaatatgtatgtgtgcataaagacaaattacagagttgtacggcatgatcaagttacaaaaatatcttacctgcttctaaaattacaatatattaatatggaacatttgttaattatttttattaattaataattgtacactaatcataggaattaatagtgtattaatcttaaatatatcgaatcaggatacactaaacaaatcttatcatctgtggtggaccatataataagtctccacctaccactttagactccatctatatctacaaacaaaccactataaggcaatcacaattaataatacttatgaaaaattagtactaatagtgtaatagtctcacttttttttttgattaattataatttttgtcttttgaatttttattcttactaatagtgtaatagtctcacttttttttttgattaattatgatctttgatttttaaatttttacatgtactaaattatgtcctttaaattttttaaactattaaatttttcttgaattattattgaaattattgttaaataattcaaaaagactttttttttttttcttttcaattttactattagaattagtctgacgtggataaaagtttaggaaatacgatttggtacatgtgaaaatttagagataaaatttggtaaatatcaaaattcaatgggcacgatttagtacataaagaatcttcgtgttagtgaaattggatagaatagagcaaaactctttaaatccaacaatgacaataattcaagaaaaaaatttgacaccctaaaaaatttaaggaaggtgatgttaaagattagggttaaaagttgtaatcattttttttttttttacattatatacgttccaattttctatagaatattagatatttcaaacacaaaattaattaattaagcatatacattaccattaggggaattaaataaactaaagaatttagcattaccattaggggaattaagatataggtattatattatgagtagtcataatatacaaagggtagatacaagtaattgtcatgagattaaattgtgacacctgtaattagaggaacaaatctttaaatttctctgttcacgcgtgatggtcaaaagctacatgagatagaccgcaataccataattatatacatttattatatatatcaatcaacatattttttctaatgatatgatatgacattggcttggctaaatttaatgtatgtgaatgtatgtatgtattattgaatctgattgtagtatatggttgtaacaatgcttattactcgatcactaagctttgtggtaatgtatttagacctcattcttcaaatggtgtagtacattttttagctagctaaaaatgttttgctttgtaaaatgtctccgacggaagagatcttccaattcttgatttatatgtacaagagtatttaggtggcgtttggttgagagaaatgaaaaatataagaatgcgaatgggaataaaaatggaatgtaataaaatttaaaatgcataaaaaaattgataaaagaattattaaattttttctcatcatgcattagaatagtctttatttcaaaatggaattgtcattctactaaaatagtggaaaggccattccccattggaatgataatccaacactttaatatccaaccaaacaaagaaatagaatggagattgttttctttcctttccattctatttcatccaaaagccaccttagtgttctgttataatctcttacttaatttttgtactcgaaaatacatgttagaatagttatgctaatcatttttgtaaatttttgaaatttttgaataatttataatactgaaaatacgtttgaaattttttgagcgcgcatgataattaagaatattatgtagtctattttcagtattgtaaattattcaaaaatttacaaaaatgatactataactataacaaatattaatatagaaaaaaatattttgtgatttcgaatgtgaaaattaataattcaaaaattataataagagattataattacattcaaatatatagatattttcttttttttttttagagcatgaaaagtaattaccgagccaaaattaaaacatgaccaaagtgtatatgttgcatattgttaatcatctcatcatgagtgcaaacgtgaaacgttgtagttataaagttacatgattaaaaaaaaaaattgattcaacaataaaaaataaaatggggttaaaaatacatatatattctttgacggtttgaaggggtgaaagtagtgacaaatggggtgtatgtaacggctattaaagcaataactaatatttaaatgtataaatagaaagtgatataactagtcggaaaatataaaaataaaataaaataaaattataaacatagaaatgataaaaagcaagtgagtaaggaattgtcacgtgaaaagggtacgtacctgggaaaaacgcttcaaagtttgttttttgatttgttaaaataatacgattaaacctttcttggttcgtaacgtaagagtatagtctttgtttcatattgatgaggtggcacatttgggtgcatggttttgtttgtacaaccactaatcatgccacctaatattaataaattaatacataatatactatatactactacagtactctaattatattcatgcaaccgaaggtatcatttattcccactataaataccatagagcttctaagtttaggttcgtgccaatacaaaccaatacaacaaatattatatcttctctcccttataataacaagctcttaagttttcatttctttgagaaaaaaaagatgtctatcattgcaactggtcatctgggtgtttttatttttggtcttctagggaatatcgtttcctttgtggtatttctggccccagtgtaagagatcatcatcattaatttgattattttttttatttatgtgttacatatatatatagttaatttgtatgtgtatgttggaatatatataggccaacattttacagggtatataagaagaaatcaacagaaggatttcaatcagttccatatgtggttgcactattcagtgcgatgatgtggctgtactatgcaactctcaaatccaatttgcttctccttgttactatcaattcatttggttgtgtcattgagaccatttacattgccttgtacattgcctatgcaccaaagcaagcaagggtaagtaattaagaataattaactacatacatatatttaattatacataacaatagtcttatatatatataattatatatgtgtaggttttcactttgagactacttgttgtggtgaactttgggggattttgcttgattcttctactctcacacttcttatcaaaatcacttagagcaactgttttgggatgggtttgtacaagttttgctgttagcgtctttgcagcccctttaagcataattgtaagtactaattaattaataatttaatcattaattaattataatattttttatattattgttatatttaattattttaattttaatatttttgtatagagggttgttatacgcacgaagagcgtggagtttatgccgtttcctttatcattttttctcacaattagcgccgttatgtggctcatgtacggtataatgctcaaggatttgtgtgtggcggtaagtaattaatttatttaattatacttaattataatactaattaaggtttttttctttgtggggtttggtcatatacttcataagttgccaaattaagcagttcaaaaatctttttcaaagttatcttttaagaagagacaaaccttaatgtgaagaaaaaaggaaggataaaaaagatacaaaaagcaaaatatatgaagaagaaaaaaaggaagggggacaaacttttttttatttgtttttagtgatatacatatatattaattgatttgatcatatatatatatattaattctcgtgttataattaattacctatgatatatgataatctagtgcattaattttgttacacacaaaacatgcatgccgtaattaattcatgaatataaagaaaaaaagtgcacttaattaaattaattagagatatgtttgggttgcctaacttattatttttgtttgttttatgctacgtgccccataaaattaaataagttggcaaataattaaagtaaatatatacatataaaaacatgcatagatagcaattagtgtagagaaaagttttaataattatgtatagtgctactacaattattagtttgaacacgtatcatattatacatttatttacatatatattaatgaactaattaataattaacaaaaatatataattaacgacatgaagtgacctatatggagtaactttgatataaagctctatcttcttctccttttaattagtgtaacaagatttgtatcttatcaatatctgaggtattaattaattaattaattaattattcttaattaatttgcagattccaaacatattgggtttgatctttggatttcttcaaatggcactatacataaagtatagaaaaaacaagagtgttatgcttgaagagcaaaagcttccagaacaattagcagtgaaatctgaattaggtgatgaaaaacttgatcatgataatcataatcacaccataatgatggctgaggttcaagtaattaacacttctgatgataagaaaaaagcccaaaatgatcaaaatgaagagaggatgagcaagaaccaatttgtggtaccccaaacaggccattgtgctattaacatggaaggcccaggcccaagcccaagcccaattagcccatgccaaacagtgaattgtgtagcttaatgggctttgcttaattgaatctctctctaataattaaagccctatttcataagtccctgtttggctgctgggttttaattaatttacataatattattaggatggtgtacataggggtatcgatcgtcctcggcttattattattattaaagtttttggttttataatttgaaggtgtaaaatccaaatatagtgcttgtacatcgactttgtcacgccgtacagtacggcttacaatgtggcaaagtatatatagccatgacctgtactatatatatctttacctttttaataatatataatatattgtgtgtaatgtgtttgtatattaattatgatgatgactagtgttcttattacttttaattaagtattattattattattatttaataattaacatttcagggcttatatatattgatttccagctgagtctattaaaaatctaaactacgtatctgtgtattccaccaacatatgtctgctatagtagtgcttagcttttcttacctatatatatatacctattaataataaataatttatgctataatttatcaaaataaataaataaataatatatgggtgtataaatataaatttataattattgaactctattgagaaaaatgaaagagagacatctaatatatgtatggctattggctagtgcatagggcaatattagtttacaaagagctaccatagatcatattatatatatatatttaaattagtgcatattttcacacttaaattaatttaataattaattagtgtcgtgcccatacacacaaattgattaattatttgaatggtaaacaaatgaagtaattaataattaattagttaacactactatagaagccatgcatgtaataaattctgctgagatatttttacaaaattgatgtcactttcaatcactaccttagaaaagtaactaataagaacaaaagctatatgatgatgatgatgatgcatattgtagagtactctataaactataaattattagtttatgtctcactacatatatattggaaaagaattatatatt

SEQ ID NO: 18861 - DNA, 4916 bp, Cannabis sativa
aacaacagtgcagacaaggctaataaatcacaaatgttctgcaactaacttaggagaaagaatgacaatcaaattaagctatactaatctaagactagtcagagaatcagtcatcaacatataactcaactatggggtatgagtactaactgaggggtctttcgatttattctcttctggtgcactctcagaatcagaaggtcggatttcttcaatcatcctaacaacttcctccattgttggtcgcatgtctggcactgttgccacacatgccattgctacctgaagcatctgtaccaactcctcttctatattttgatacttcatgagctctacatcgaaaacctcagctgtccattcctctctaaccacagactgaacccatcttgggagatcaacaatgtcatcacgtcctggcgattgaactggtgcctttcctgtcaatatctcaaggagaagaaccccaaaactatagatatcacatttctgggtaaatttccgagattcaaccacctcaggggctcgatagcctatgcttcgagaagggacagtgggaaagttcataagaggagcaaggccaaaatctgagatgcaaccattattgtcttgacttaagagtacattggttgacttgatgtttccatggatgaattttcctccaccagcagaatggatatgggcaatgccctttgcacagccaatggcaattttaagcctggtttcccaatctggcggaggactttgtccaccatccttgattcctgcaaaatcggagaaatttatatcattaattgtaaagaaaaaccataatacactattcatataattttgaatgataaaagtcttagcatatcatattgagcaaataaagaaaaacaaaaaatcaaaaatccatgtgaacctaatcaattgtttattatatattggcatgcttctcctgcaaattttccaaatttgaggaaagaaattaactcaacatttagtagttagtctttataggtgacagtttatacagttagcatagttaattcaattagtacagtgtattgtctttattggtcatttcaagtgatgaccactaatgccctgtgttcggttatgttagttaagagtctatggcctataaatagactttctatcaattcatttacatagataggcttgtaataaccaaatacacagaataatacaattcagattagaacaaaaagcttccattcaattctatcactggttttctttgagtgttgttcgagtcaacaagtgtatgagtgtgtgaccaagatcaacagaaggcattggtattaacatgtcatactacaaaatgtttcttacttcgctcgatttatttattcttacaagaaaatctagtttcatattgccaaatttgaggaaatgacagataatgaattagttagaaagaacataccatgtagcaatgctgaaaaactaccggacgatatgtagtcataaacaagaagtttctcatctttcgaatagtaataagcacgaagaggcacaacattcgggtgctgactaaccctccccacattctccatttgttgttcgaactcctttttccccaccacaacttcttttaacctcttaaccactacagttgtgccctcctccaagatggccttatatgttgtcccataactccctttccccaacacttcagctgaagctctaagtagatcctccagatcaaaattataagacgaaccttcataaaaaaccaacttgttcttctcagcctcttggactccacacccaaaatcctccttcggtggctcactccttcccgtctttgattttgctacaccactactgtcttctctgccttttttcttcaaacaacaaagcaacgtcaacaaaactaaaacgaaaagcaatgcaaatccacccccaactgcaatagcaataatagccccttcgctaagtttcctttttgagacatttcggtttttaggaggggctgttggctcggatggtaaatgagatggagaaggagaaagagaaggcgaaatgcattgttttagaggagaagacccacataacatcatgttcccttcaaatgaagcagcgggaaacaccctaagggcggtaggaattgaaccacttaagtggttgtagctcagattcaaatgctttagcttaggaaggttaaagtcagggatagatccagtaagggagttgttttggagattcagcccagtgagatgtgatagatttcgaacactatctggaatcttgccactaagggagttgaaggatagatcaaaaacagtgagatgttgagatagagaagcaggaatactacccgaaaaatcattgttttgaagatatacatagcgaagtgaaggaagggatagaagatgagatggaagagtcccattgagtctgttggatcgaagactaagtatcataagtgtatccagcttctcaagtgtgttggcaggaattgggccatacaatccaacaccaggaagccgaatggaaataacattagagccattcaatgtgcaattgataccaacccaagttgtgcacacaggtgtagatggatcccagttaactttatggccatgaggaacagctgaaatgaagtcaaggagggcctttttatctgaatctaaatcagccatggttggttcagtgaagatacttaaaaggaacaataaagccaccacacagtatatctgtggcttcataattcatgtagtattgtaatcacaacactcttcttcccctaaaacacaattgtaatcaaccaaactgtcatgggaaaattaaaaaaaataaaaataaaatgaaatagttaactgaaacacttcatttcaaagtccagtaaaaaagttgtgtacaataatttagttaaatatatgaaaagaaactcctagctcaactaaattttaaacaagatagatacaaccttaaaccaactcactcattttcactaataataataattaaaacacactgctaggcattgttagaaatcttaacattttttcccattggtatcgatattaagtaaaaatgggaatgagaatgagaatagaaatataatctaattgaaaatgcaaagaaaaaataataaaataaattataaaaaaatttctcatcttgtattggaatggttattcctactgaatagtgattctatcaaaatgataaaatagtcattccaatactttaaaatgcaaccaaataaaagaatagaataaaaattgttttctttcaattccattttattacctccaaccaaacaccacctaatagtaataattatcaattgtagttgaacacaatgaagaagacactcacaatcatcatattatcacatgaattcttacatcaaaactcttctaacaaattcgtttacatgttatgtagtgcatagtcatataccataatatgaattatgtgctataagaaaagtagagatgatctgtttagaacactataaaccatttttttgacataataatcaatattatctcaatttaaagtcttagaaaaataaataaaatataataactaaaagtaaaagcatataattcttttccactaaagagaaagaaaaaaaaaatgaaagctttaaagcatataaaacaaaatgctgagagaatccctttttacagctatattaacatatacatttcacttttatggcattaaatagaatcaattacttgttcattttcatatccaagtcaatattttgaagcactgtttagaacttcaattacttatggagaatgataaattgataaacatatatttctcccatttaaattattttctttgaccaaaacaattaagataataattatttaatttgctgaaataattaattagtgaaaactcatcttatcccaaaacaagaaaataaaaaaaaaaaaaaaagagaataattagaagtgggactgagataccataactttttaaaagtaataaactttgacttatatcatgagtacttttcatcaaatctcaccaattacatcttaattaattaattatttaatgataaatctgtagacaacactaaaaaaacatgtaaaaatgtagatgaacaattttgaattggacaattgtctaattttttaagtagatttttcatggatcaagtgaacaaacaaagtgaaagtagcagcaatttaagtatgtttattttgttcttacacaattatattttaaagcaatttgtaataatatcccataaaagaaaaactgtaataattagagagtgagagagaagaatacctgaatggaaatggtgtgaattgtgatgttgaacccaaccttaagaagagagtagagaaaagaaagaatgagaacccattataaataggagagagaaagagagatctttaacggaaaaacttgaggaatacgcagtgaggggattttccaaagtgatgaaaagaaaagaaagaataagagagaaaaggatggtcttcttcagtatttattgtaaaagcaaaagattcatgttcaaccgttagaatggagaactgaaagcttcctcaaacaattcaacccttcttttgcaagcaaaaccccctcactcactccctctcattctgctcagatctcaatgtctcctctttctctctctctctctctctcacacacacacacacacaaacactgcttagtaccttactaactcactaccatttgagaaaggattatcattcattccaccatttgagcagttgagaaaacggatgcaaggaaatgctcctctcttagtggcaaattcccatataactattgcaatttaatattggtctatttattttaatttaggctaattaatatttttttttttcagaactttgacatgtataaaattatgtctctgagattgttagatttaaagatttttgtctaattttattcaa

SEQ ID NO: 18862 - DNA, 1455 bp, Cannabis sativa
aggctcgttaatgccccaaccacgtaaaaatctcatgcattaaacttcttacagcttttcctatatactatttaactggttgccgaaaacctcggtcaacacaataaaaggtaagaaactgattataaattaagaagattaataaatgaagccatatattgttttttcatataaaaaataaaataaaatagtacctcagggctattaaactctttcgacacaatttccgattaacctccagttttcttcttgtgtatactctcccaattcaacactcgaggatatggattcgcaatcatcttgcagtacttagaactaagtctagacagaatctcaaagaaccaaataaggaaagcaaagggataacctcgtaatttaaaagaatgacatttatctttttcatctttttccttttgaatcttataaaagatattgtcaccatccctaaacgccaagttaatataataaaatgtcctatcccacaaaaattttccaaaagaaatatttctcaaatgagacaactccttatcaagaaccaaacaactcattatctactttctttccattctcataaccatataaataatgacttaaaaaataaattatacccatctttatagcaactacatcatcatcaaaattacccctcaaaattatatcccttacctcatcttgttcaatattaatcattaccttaggaaatatctacttcttgaatgaaatcctcttcttaaaatgatccaaatcataacaaccttccagacttaatcaagttatcaatacaaactcctccaaccaaaacgaacaactcgatctcgaatgaagaaccacttctcaaaatcctctctctctctctcatgatgcacctccctcactaaaacaagatgaggcaacacaatcatccaattaatagtatccatcctcaaaaaatgagaaaaatgagtcttcatgaataaggtcttttgagaatcgttaagattttcattcaacacgttaattatccaaggataattccaggtatgcaacttacttgcaaacctatgttggggtttcatcttcaagaaagctttctacaaaaataatcagttataaaaaaatttatacaaaaaaaaaaataagaattacaacaaaataattgattttttaacaaaaataatacacaaaaaaaaaaaaaacaaacaaatataaaatataaaatctttaaatacataccacgtttgtaaaactagtggtcttcttgtgagaatcatcagaaagagaatggctactaccttcgaagcaacacatttaatattagaacgtgttacacgacgagctggttcgtttagaacatccataacattgtgcccaacctacataaaaaataaaaataaattatagacataaagtaacaaaaatatatagtaaaaagtaatactaatccataaaacaaaacaaaaaaataaaaacaaatat

SEQ ID NO: 18863 - DNA, 8041 bp, Cannabis sativa
  modified_base (2343)..(2346): a, c, t, g, unknown or other
aggttttgctcccaatttttctgtctcagttaacaaatcaagtacatacttcttttgagacaaaatactttgtttactccgagtaacttcaacacctaataaatacttgagcatccctaaatccttcgtgtgaaactcagtatgaatgaaagacttaaaggatgagatgctttcagtatcatttcaaatcatgaaatttgtgggtgtacatgttgggaaatttgtgaatttcgaattttgcatttcgaatcacaattctaagtatggctctgataccatgtagagaatggtgaatcaaattgtatgttgtattccgtagaatagtatatatttatatacaaagctaaaagactaaatgggaaactactaaattacaagttactgtaatttttacaactaatattctaacagtttggcaaaacagagaaaggtaatatgttggaagggaaaagacaattgtttggataagtgtgagccttacccctcctgacaagaaagagcatttctgtccaccaagcctctttgcatacttgtctaacactggttcccaaaattccccattcctaggggatcttcccaatgacatactaagatatttcaaaggccaactccccacttcacacccaatggaagttgctcatgtaacactaacaactcattcctacatatcctaagcaattgacttttgcatcttcattcctaatatagcacaaaaagccataactaccgtcaacaatttttgaagagaattctcatcatttacaaataataatgtataatccagtaactgtaggtggctaacttggacttttccttttcccaccaagaaactagaaattgtacctgatgccattgttttgtccaccatcctcccaagcacatccaccaccagagtgaataggaagggcgcaagaggatcaccttgtgtaagtccccttgattctttgaagtctcctctcggttgaccattcaatgaatatagagaatgatgtgttcgaaatggaccctctaatccatttcttccaaatcttttcaaatccttttgtagtcataaccaggtccaagaattctcaatctatccaatcatatgctttttcgaagtcaattttaaaaaccagtcccctcttttctctgcttctatagtcttcaaccatatcatttgcagccaaattgagtctaagatttgccttccttcaactaatgtcgcttgagtacttgatattgtatcctccaaaacccctcttagcttggtagcgagtactttagcaatgatcttgtacacactagttatgaggctgatcggcctaagatctcttaccatgcaactattgagtttcttagggacaaggcaaatgaaagtttcgttgatactccctggaattctatcatcactttcaaaggccttatttcaaaacaaaatggttactccaacctacaaaacaaaccctactatattaaaaaaaattcaattgaaagtcttacttgattgggtgtatacatatttggtaccttatgttttacctaaatacaggtttggtactttgtattttcaataatacttatttggtaccttgtgttttaaaatcatacatatttggtactctaaactcaaattttttttgataaaattttatcaatataatcaaattgtctttaattatttgattacatataactaagaactgtttggtcaaatcaataaaagtatattaactatattttactttagggtactaaatatgtacaatttcaaaatataaggtaccaaataagttgtattgaaaacacaaggtatcaatagtgttttttgtgcaaagtcagggtactaagtgagtatatctcctacttaattttaaaacacttccatgaggtcctcttttaactacttcccaattcacttgaaagatgccatgctgtaactattcggacttgggctttgctaccttcacactcgaaggcagtccatttgacctcttcttcttcaaaaggtctttcaatgtgccttgctaaaaaccctggaacctttttccactcaattccttccactcccgtgccttgtctgctcttggaagtgtataatttggtaaaaaatgctatcagctcccagctatatcttcttctctatcaaggattgacccatcttctctttcaattcttgaaattgtatttcttgccatgtgttcactaagttatgaaagaatcttgagttggcatcaccttcctttgcccacttgcattttgaattcagccacacaatatctttttcaaaagctaaggtggcatttggttgggaagaatgaaaacataggaataggaatgtgaatgggaataggaataggaatnnnntggaataaaatttaaaatgcatataaaaaattgataaaaaaattattgaattttttcccatcatgcattggaatgctctttccttctctttcaaaatggaatagtcaaaatggtggaaaggtcattccattagaatgaaattccaatattttaatatacatccaaacaaaggaatgaaaagaaaattgtttcctttccattccattccattttattagctccaaccaaatgttacctaatttccgccattccttcttaatttctgcacttaattgaagaacttactaggggaattccaagcttgtaaaaggcatacattattagtgagctctcgttatagttactttttattattcccctttccatggggaagttcttatatgaataattgaataaaaataccattatgcaaggaaacatcagagaattcaaatttggtttgtaaggcttgaaagaagattctcctttaaattattaaccaaactaaagagattggatattgatttccgtttgaacaaatacaattttgttttttcttccaatatgtgtagttttgtagattatttttctctgtacgtgataacatgatgcactggttcacttagtcttataacataatgcttaacttagtcttgtaagaaataacttgatctaatgtgcttaattattagacgagagtgtagttgtttctcatttaaatatttaaattgacagaaaaaacgatcatcaaagcagaagggagatgtatcgcgtggtgcctcagtgtccaattctcgtaataacaggtaagaaattgagatacattgctgagaagaacctatggcacaacagttattttttggcttcaaatttttgtagctgaacatatagggcatgtttggtgcatgggataattattgaatgaaattggacaatttaaaatcacttaattagtaattgaacattaatatgttcggtgcatgggataattagtccataaccatcattgacacatttttaaatttttgaggtactgaaattttttttctcaaactttaattaatcccgggattattttatgtccgttattgatctttggtttctgaccatgcagcatgcgatttattcctcctgttaatgggcgaagctctccctcccaagccacttctaaagtggacacgacactaaaatatgataagggaaaccatttaaattcttttgattctagagctgactctggatatatcgaatgtgttttccatccaagttcgtcggtgcaagctggagaacaagaattcaaggattcacccccatttagagtgactcagcatagtgatactcgtaattctgcctatgctgatgaacatattggcttcatggatgttcacgtttcccaaagttcattacaggaaccaattacttctggttcatcatgtgttacctgggatgagaaggcagagattatggatcgtcagagtcaagagagtaatttggatgaaacactacatctgcatgagaattcacctactatagatgcaaatgcatgtgaagctcggaacattgcagttgttgatcaaatggaaatgtttggtgacaaaagcacacatgaacaaatttcagatcaaatggaaatgcttggcaagaaaatcatccacgaaagaactgttgatgaaatggaaatgcttgctgacgaaaatatccacaatagaacggttaatcagtcagttatgcttggtgagcaaaacatccatggaagaactgttgatcaaatggaaatgcacggtgacaaaatcatccacagaactgttgatcaatcagaaatgcttggtgaacaaaacatccatggaagaatttttggtgaagaaaacatacatgaaagatctgttgatcaaatgaaaattctagatgaaataaacatacaagaaagatcagtcagccaaatgggaatgcttggtggcgataatatacatgaatctgtctccatctcgaatgagattgatgaaaatgaaagcgaaactgacaatttcatggatgcccttaacaccattgaatcagaatctgaaaatgatcttgattatcagaccaaaagggaggtagaacaatttcccaccattttcaacaatgaaggggaagacagaatccatgaagatgaactgattatgcattggtcagatcatcatggcgatcctccaacatctacatttgacaatgtatccgtcacttccacgaacaaagaagtggcgacagatctccgcgactcagtctctttagagagttgtgtgcatgaacagctgtgtacacctgacatttccccaaacaaacaagagccctgtgatcttcccaattcatttccattagacagtcttgatgtccaaatttctcagaaaactactgaatcatctacagatcatgatgttgttgttactagaagtggtgataattatgctggttcaaaattagaatcaattatttctaacccatcatcctctgtaaccaagactgcagatgtgcaggatccactggaaaagaagactatgagtgtagtctgtgattctgaagaatctcaggtcctacccagaaatcattcaatgaggttctggactaatggtggcttgttaggacttgaaccatctaagcctcctgatttttccatgtcaagtactgtaactcaggattctgtgaatggcagtaaaacagatacagtttgtctattaaaacatgcttatgagcttaaggatgagatgcatggaggcaatttgaatatatctgccatgaacattggtgataatgaaaaggattctagaacaaatacaaaatgctccacagcgtgctccaatgatgaaggtgatggtaccgttgctaagaaaacatctcagggatcttcaactgcttgttcagactctacatatggaaattctgatgattctcatatgcataatggaaatcatactgataattcaaaagagtccagtgtgtttggaactgttaatgtacttccagttgctccaaataccaaaacctcttttactgaaaccagtgaagagcatgatgaaaattcatctctggtttttggacttagccgtcggttactttccaatggttttagcagaaaagtgtctgatgtgaaagatgaaaagtttgaattcgttagttcaatgaatgatagcattgtggaacagaggaatgagcaccatatagcagcgcatcaaagagttccagaaatagccctcaaagatcattttcaatgtggttctgctgccaattcaccctcttcttctccaccacttgaacatatgaaaatatctttccatcctatagatagcttcgagacttctacgctaaaacttaaattttctgatggaacacaaagccatgaaagcatgggggaaatgtttccgtcatttcaattgatcccaaagactgctattcctccgcacaactatggttctgattctgatgatgacacattttgtagatcttctccatgcatgtcagatgattgtcttagccatcactcagaacagtgggaatgtggggaaactatggaaggcaaggaagaagatcatggtgtatattatgccttacatggaatatcatcagtggagcatatttcaggttctcttgattttgatgaaataaccaatggtgaaatctgctatgatggtggatttaaacgttcaaactctggcaatgggttggaactctctctctgtgatcctatacttgatcttccaagttttaatgatgagaaatcttgtatggaacaagaaacaaaaaatgattctgatccgaagtttctccttgattcaagatgtcatgctgattcttccccaatgcctccacctcttcctcctgcacaatggcgggtttcgaaacctcacatggatggggcagaagacagaacaagtattacatctgaggattttaaaaatgaattgggtgcaaaattgttgccttctgtgacttcccggcaaccagaagaagttccatcaggccaacagaattatgaacaactcactgtcaaaccaaaaactaaggtattatggttgtcgaactttttttttttcttctttctttcttttcttttttttttaataaaaaaatagctataaaaattggataactggaattctaaagtgaaactttccaactatggaataattctgttcggcaggaccagcagaagttaaacagccagaaagaaattaagcaagccccaaatagcaatggagtggatgaaagggaggacttcttacaacaaatcagaacaaaggtgagtaatattttcaggattctcattgtgatttttattttccaaaatcccgaagatatttaaacaggacttagttacatattttggctgtaattttatttcaaattaatgacatgagactgcagataacatgaacaacgaaaaaagaaacagagccttcagatttctttaaattgagtgtatacgataaacacagttgctcttttttatgttttctcattttgctttgtctcatactagatgttgcacacttttaaaagataattgaaacaagttttctggatcaataatctctgctagcattcatttttgtgtttatgtgactttcaaactaccttgttatcagaaagaagattgctgatcttttctaataatcatcccatgataaataagatgtttatgttatgagatcttgcaaaataaatttttgtatcgaacattacaattaacctagtcaataaatcaataaattaactagagactaaggattctgtagatgatgtagagttcaacttagctgaattgtactcatattactgtttatgtggtttcagtcattcaatctgagacgcaccgtgacagcaaagccaactactacaacacctgcacccgcacctgctgcaaacaacaaagtcactgcaattttggagaaagcaaatgcaattcgccaggtttcacatatcctcttttccttgtttttccatttctacttcttttcttacccacttaaattgacgagtgataaatttccaggctgttgggagtgatgatggtgaagatgacgacgatagctggagtgacatgtaaattttactttagacacgtttgctgtagctcgaacaatcaaaatgctttcaatttgatgtatgctcacgaagttgattaaggccgtctatcttatgtgtatatgaataaatagtttctttgtaaattatgtttagggatactattgtatctcattgcaattatttttcttaaatatatttttataatggcaaggtagatttccttacgtttacttactttattaaagggggaactttgttaaatatgggataaaagaaagaaaatatttttcccaaaggaatgctattagtattaggtaaggacttttatttatttatattttattttttaatattaaatatacattgataattttatcttttaaaatattaaaatatgtcttataaaataattaacatatattacagtttaattataaaagataatttagttaattttaatattttgattacgtttcttgataaagtaaacaataagataaattattattacagtagaatctctattcaagaatacacttgagatcaaataaattgtatatctttaatactacattataatagaattatttttgagtaaatataatatttatatgtgtattacaatttggaataaaattattaattctacataaat

SEQ ID NO: 18864 - DNA, 2354 bp, Cannabis sativa
  modified_base (2324)..(2328): a, c, t, g, unknown or other
atttagttcaagagttgtttgagccattagattaaatcaatagctatggaaattacaatacatattgtattagcttccatatatataacgtttttaaattataccgagtaattcccataaatattcaaaagaacaaaatagaagcaaaactaaatcagttaaagtttttattcttttatttacatataacattctcattacagtatatacatcatttcattaattgggtgagtcccatgtccttttaagcaggtcaagaaattttttgaaataatttgaaagatgacactgtatattaattaaaaaactgattttttaaactatcattatgtaaaaattcaaaatctgaatttcgcgttggtatttttattattaattttttttacatgattttataaatttgatcacctattttagtatttatattttcaaacattaaaattaactagcttaataattatagattaatctttttactttttctaacaaaaaaaaatcatttatacccatagattatttaaaataaagactaacgagcactcatcaaattcataaataaattatcaagacataattttcataggattttagtaattagataaatactattttagcgtgattaaatctatctcaaaaaattataaataaatattgagaatataaattttataaatcgcataacttgaaatttaaaaaaaaaaaaaaaaatcattctattcagattagtatcaatttatttgaacatgactagctcttaactcttattcttatacattcaattttacaattatcatagaacgatatttttcagctataactataatgaagacgttttgtataagatggagtatcaatttttaactttgaaaataaaactgctgaaaattttaaggtaaataccattatagacacagaaccaaaacttgatgctaaatgcttgagtgttgatgctccaatcctttatataggaaggtagttgagttggtttgtccagcactaaaagggtaactaacttatacctaccttcctttgagacatggctaataggtaacaaaggtaagtggatcaaatccacaataatggtattcatcatctttattaatcactcaaaaatccaattacacattatattactaaaaaaaaatacatttaggttgttcttaactcagtttgtcttctatttttaaaaatattcgctactaaagttatttaaagcaaataagtagatttcaaacacaccaaaaacgtaagaggcgcttatgtactctttggttattacaaaataaccgaaaacattggtggagcctaatctcccactcacttggggcaacaccctacgttttcggttataacataataacttaagatataaaatatttatgtcttcgattattatgtaataaatgaagaggtaggtctatcttttttttaaaattttgtattattatttaattctagatattatttttatttttaattattatcacattaatttttgttagtgattatatattattttttgttgaaataattataaattaattataataataaagacttaaattgaaataaaaatacaatttaattatattaacaaagctaacaaaattttaaaggtaacaaagttaaagttatataatgataagtacttaaaagttagagtttatatatataatgataagtacttaaaagctaagtatcaaaaaaaatttagaacacaaaagtattgtttaaaattaaaaatctaagtattgtcaaaaaaaaaaaaattaaaaatctaagtataaagctagctagtaatattgtgtcaatttctctaaacattaatggtgttgcaatatatcatgatatattggtgttgcaatgtatcatgttcattcttttttgtttttttaggaaaaaaaaccagccacagcactatatgtaatatatcatgttcattctttttatttttaacacaatactctccttctcttacacaatatatcttttatgctttaaaaaaggcctaattttgaaaatttgccctaagcccctaaaaggcttgagacgacctcctctacttataatgagatattacaaaaaattttatttttagctacaataaaatatgtaagaaaaaaattattaagtttatgtttcactaaaaaaattgcataaaagtattaaccaaaatatatttttaattataataaatgtattgtgacaatactaaattagtacaaatttatatatataaatactacaattacgaaatccactacacttgtttggccgaagtaataatcataaaatgtgatgatacacttgttgggttttatgcnnnnnataaaactctttacaatctgattagt

SEQ ID NO: 18865 - DNA, 6072 bp, Cannabis sativa
  modified_base (55)..(66): a, c, t, g, unknown or other
tttacctattggtaacctgctattgcaggtcaaaaaaaaatgtaaccatatggtnnnnnnnnnnnngtaaccattgaatagtcacccaactttatgagttactaaagagtacttcttatatcgcaaaatcaaattatatttaattatatagttgggattaattaattgagaaattaagtgggtaataaattacagttaaattagaaatgtaatgcatatatcatctaatttgattgtgcaacttaagagtgtatttatcattgtttttctaaataagcctatttttaaaaataattttgataagttttaaaataaatattctaatagtatattttaatatcataaaatcattacattacaaaaataaaataaaattgttagctaataagttttatatagttacttcctataattcattataacttacttaaataagtttaaagtaaagtaaaaatattttaaacaaattgaacactatagaataagctaaatataaactcataattttaaaaaataactataatttaaaaatatatataagataaattacctattttttcttattgaaagataatcaataattagtagccaatcggcatcataatcaatcaaaatgttacatttgaaaacctacaaaaaaaagaaaaaaaaaagtagaaaattttagaaagtaaaacttttttatttttagtattcggaaaaaaaaaaaaaatttattttcttgtaggtattacttttaattttcgtatgctagtgcttacaatggtaaaatgtgttacatcaaatttatcaatctacttttgcaattatttttattttagctatatatatataaaaattaatctagatcatatttatttattttggcatcaaaataattttggtgatcgtgtatgttatagttatatataattacttataaaattttgaataatttaccatatcaaaattaaagtttaaatattttattgcacacgtaattatttttttttatacgtataataaaaaactatttaaactttattttcgtaactaaaaattattcaaaaaaatttaaaactttaccattagtctttaataagtgtataatgtacaagattattttgaattgaaaaactatcttaaatacctaaacatataggagtgtaccgagacaacaatttaaaaaagcttactataaatttttccttaatgtacatgacataatcatcctaaatcttattgaaattcccatctcataaccaaatacaatcacacaaatttttatataattatattcacttccttagcattttattaatttgttacgaatgaagcaattttattaactgcatagttcattttaagttccatttcataatattttgattttttcatccaaaaaaaaaaaatggacattttgacattaaatattattcaataatatcatgcaaatgtctacaatgcaatgaacacttgaaagtgtgaaattacaaaagcatccacattcttctaaaacagacaactagacaagaaagctttggagcctttggaaagaagaaagtccctatataatgtccttctctcctgtactggggccaaaaattaacaagacatatacttaaaaggacaaggacaaggacaaggctagctagctatagctactaatgaatcattgcatttgcatacatacctcttctttacacaaataattttgatttcacgtgcatatgcctcaagaagaagaagaagaattcttgcgacaattatcacaaggattagatccattcctgcaattcttttcattaaaagactctccaaagtgtttcaataatgtttgtcttcggcattggtcctacaatagcagcagtggagttacaaaattaactagtaatagaaagagaaattattgttggttggtttgttgggttctctcccaatttcccatatcgtagcttaaaaggctggaagttttattgtaagaatcatcaataaaaaaaaatttggttggtgggagttaaaaagttgctgaccttaagttcacagtactctttcattgtctgagcttgactcattgctctcttgaagctatctttcttgtatccttgcccgttacgcaacatacatacaactcggctaaaatcttttttctgataaaggagaatgcatactgctgagagatcatctcttccagctcttccagattcttgataatagctttctattgcttttgacattgtattgtggatgacaaatcgctggatattgataaggaagattttctcaattaagtcatattagtacttaagacaatgtacatcagattaaaattcaaggttttatgaaatgtagtctaatcttaacagaacaatgtcatatatattaaggggatttttgcacagaaaattaactagtctgaaatactgcactttagtcactaagtaattcttatacactaatttggtgagactgttaggcactatctgttagatctaacagactttcgtcgcaccaaattgatgtaaaaggtgacttttaccgccaagaaaaagctacttagtgcattaagtacagcacttctgactaattactgcaaaaaaaaaaaacctacttagtgatttttgcaggtttaggagggaaaaaaattgctgagttttagttggacttacaacatctggtttgtctattcccataccaaaagcaatagtggcacacgcaacatgtgcctctccttgataccacttcttttgggcagaaactctctgagaagggctcataccggcatggtaatagaccgtcttaatgttgcatttctcattcaagaatttcgaaacgtccacacattcacttcttgaaagacagtagattattccacactgattcttgaaacgatcaatcagtagctgtttaagctgcttcagtggttctttagtcttaccaactacttcgtatttcaagttaggtctatcaaaacttcttttaaggacaagtgcatgggggattcttaaagcttgtaatatgtcctgcaatagatctcagaaccattatttttatccagaagttacacaatgccagagattaattcttacaaagtcagtaccttccgaactggatcggttgcggtggcagttaaagccatcacaggaacttgagggaaactctgcttaagacaacccagttctctgtaatctggacgaaaatcatgtccccattggctggataaaaggactagattgatcatcaaaaattaaaagcagtaatatgatctaacgaccccaaaagcaaagattttcgtcgaaacttctaatcagaacatgtacactgataaaaacaaggggaggaaaaaaaatgtaattcttatgtccttttttgttttggaaagtaactcgattctcttaacagccctctttctattcctaataatttaaacatttcattccccgcaatacaattatacattcacatttctcgtggggtttgaatcagataattggattggatcatcctgaagtcaagactttttttttcctttgtactttcatagaataaggctagtttaacactagaagattttccagtgcacaacaaagaaaattttgaatacagaaaagaagacaataaaattaatcatgaatggaaaacaataattatcaaataatttttgtcagcatatagtcaatagtcaagaaacggtctaatgactaatgaaggtgtcactgcatatcttcatactatactagaaatactaaaatactatcaccaaaatgaatgaactatgaatatgtgaaacgtcctacctcacacagtgagcctcatcaacaacaaaccctgctaattgtccctgtgatttaaatgcaagtaggttagatttgcagtaagcgtcaaagtcgaatgctcttatacaaggccaatatatcaaactcaataacctgaaagtattcacctttcgatggaggcatttaaggtcctcaaaaaaagtttggttaccagcaattctctcaggtgtcacgtacaacagtttgaatgatggtttatctttcctagtaccaaggatagataatatgagcaagatggatcaatagcataatgagtaacagattagatataatttacagggtaatcatatatttctcatgatgaaaatacacttttatctcaaagttacaagagtgcatccagaaaacaaaaaggaatccacacatgtacagaaataagccttataaaagtgcacatgatatttttttaagcaagaaaagaaatgaaggataaatagcggtagaatatagcaaatacgcctgagagaaggagagagatagaaataaaaccttgccttagctcttggaggactatggctgcttgggaggcagattgttgagaatttaaaaatgttgcaggaataccaaacttgtggatcagtgcacctatttgatcctgaatgagggaaagcaatggagatatgacaatggttacaccttcttttagtgttgctggaagctgtggaagcacacaaaaggatattacaacactgaaattaagtatgcccctcttttaaactacactccaatgaaaaacaaactacaatgaaacaaatatacaaatatagataagctaatgcttacctaacacattgtgtagttagtgcaaacaaggaaaactaacctggtaacataaacttttaccacctccagtaggcataagaatgaagcagtctcggttttccataaccgctctacaagcctgatgctgcaaagggcgaaatgacctgttaccaaaaatcactacatttgccaattcaaggtcatccaaagcctgtaatgattcataactgagaatctcagtgtcatttttggaagtcctgagaccctgttcttcattatgtactgttgaaactgagcctcttgttaagccgctcttacagtccttcaacaaaagataaactacttcagcatttcaaactacacatgggagattctttcattaaaaaccactcattacactcttatacagtccaagtttgtgatacttcaaatgagtttaaaactgaaaccaataaaacacctagctacacaaagaaatatatataccattctgagtttagttcttagttcttaccaaagacccagaagaacattgccctgaactttgaccaaagccaaaactacgcaaatcagaacgaggatagggattattctcaacaccttttcttttccttattctcaaatttgagtcactatcactcgaagaacccaaatccacaaatttttggtttttctgagttaaaggcgactcatcaatgacattatcatttttgctattattgacaacttgttcctcaaacaaattttccatagctgcagtagtttcaaatccagcatcctgcacattatcccattcctcgctatcctccatggattcagcgagcgacacaagaaaatcatccccacagtactccacagtgataaaatctcggccatcctcacctaaacacatttgaacacataaaaatctaaaaaggaaaaaccagaactttaaactccaaggcatataaagattaatcgaaatggtaccgtaaagctggaccagacgatccaagcacttttttgcggaatcttgatcgaagccgaattcgagtgccaagcttaacaatcgagctttctccaactcgagatcatgatcggccattgtagaagagtattatctcccgcgcgaaattgctttgaaacctaagcataataatagtacggcgatggcggtttctttgtccaagccttgttttgttacgcgttaaacgacgtcgttttagaatagttttcccatgatgatatatctataggcacttcattttttttttttgcaatgtttacaaaagtaattgtttttttggagaattttaatgggtttaaaagtataagtttgtaaaaatatggttttttcacaaagatattattttatgggaaaatttaaaaaagtatgtgaaaaaaacagcataagatacatgattaccccagagtgtgccctaggctaaggcgtagggtccactcctattagggacccaaataaaaaaaaaacttttaataaatatatatatattta

SEQ ID NO: 18866 - DNA, 5006 bp, Cannabis sativa
ataataaccgactccatatgtgtcctatggcgtcggttatttcataataactgacgccataggggtcttttggcgtcgattgtttttaaccctttagggtcattcggaacagcgtcggtaacgaatttcgcgacgctgaaagcccttaaaaactgcctctaaagcacaattttgtagtagtgctagattatgataaaataaattccaacaaaactttccctgaacctagtcctcttccaagttagctaagactttcggcgacctcccgcgattaaagagacttgagcgataattactttagttcatcatcttctatcttttatcacgtgtctctatattgcaacacgtataacaataataactttatttttttttttttttataaaactacttctgctttctactttgattttgactttaaaaactaatagttttatttgaaaattaattaattatgagagaagtaatttaaacatcttagagatgatattattatgtaacactgatacattagaacctctataagaaactctcaaagattcacaaatcatacccaaatccaaccctatatattatgaaaaaaccttgcataaactgttagttatttgctatgctttatttgttttctttccttccttatttagtctaaattaatgaaaatagtcatgtgatttgggtcaaagtaatttgacttttagtctaaattaatgaaatgtgttttgttttttggtttaacattttttaaaacattgtgtctgattgctaagaagttattacataaaattagaatgaacaatacaaataatttgtttggtaatgacaaccttaattgcgcaacattaattcttgatatattttatctatgtgtacatacacatattataagcacccatacattttatattaatacaaaaaaccaaacaaaaaaacagatatctatattttatatacatttaacgtataaataaatcaagttaagtccacttcgaaacaatttttcccaataaggtgatgaccagccctgaaatccagcaggggttactatgctgaatggactttctcatctaaaaatatgaaaaatattaccaaaaaaaaaacaacattggcatgttaatttacactatataattaaatgaacattaattatggtgagaaaaaaaaatagttgtgaaagagtagacgtcaattgtaaagctaccacacagaggctgccacgtggacgatgcaatatttgtaattgtccacagttttttcttttttttcattttagtgctaactccagggttgagttaaccatagcgggcgattaagttaacctgaactctgactctggtcccccaattcacagacccgggcagtagtagtacgataacagactctctctccatggtctatataaatctgttgtggagttaactaaactcattgtaaaatcactttctctctcttatttccttttgagtattcaccttctctctaggcttataactactactgtacaacctggaaaactgtcaccaaaatctccttcgcacagagacgacacattcgtaaaattctcgattccaacttcttcgttagtaactaactaacggttttttatttcctttgtattcttttattcccaaattaccccttcatctactcctaattttcatttcaatgccattgtaagcttcagatctgaaccagagtttctattttgaaaagttcaaggacagttagaagaatgatcacatggaaggacctgtacaccgtcttaacagcggtggttcccctatacgtggctatgatattggcctatggttcggttcgctggtggaagatatttaccccggaccagtgctccggcatcaaccggttcgtcgccatttttgctgttcctcttctttcatttcacttcatctccactaacaatccatataagatgaacttccagttcatcgccgccgacactttacagaagatcattatgctcttcgttctaggaatttggaccaatttaaccaaaaacggcagcttagagtggatgattaccattttctcactatctaccctgccgaacaccttggtcatggggattccgctcttgaaagctatgtacgacgaagtcgactcgggaagtctcatggttcaggtggtggtgctccagtgtatcatctggtatactctcctccttttccttttcgagtatcgtggcgccaagatgctgatcatggaacagttcccggagactgctgcttctatcgtttccttcaaggtcgattccgacgtcgtctcacttgatggccgggatttcctggagactgacgccgaaattggtgacgacggaaagcttcacgtgactgtccgaaaatccaacgcttcaaggcggtcactaggtccctgctctctccccgcattgacacctcggccatcgaatctcacaggcgccgagatttacagccttagttcctcccggaacccaactccaagaggctccaacttcaacaacgcagatttctactcaatgatgggagttcagggcttccaggcccgacattcgaatttcggacctggtgacatgtattccgttcaatcttcgcgaggtccgactccaaggccatcaaatttcgaggagaattgcgctccaatggcgacacagactgcaccctccccgaggttcggattttacccggctcaaacggtgccttcggcgtacccggctccaaacccggaattcgcatccactgtagctaagagctcgaaaaaccaaacgactcaagagaagccacaacagcaacaaccgggtcagcagggttcggcggctaaagcaaaccacgatgctaaagagcttcacatgttcgtttggagctcgagcgcatctccagtctccgaaggtggtgggctccacgtattcggcggtacggactttggagcatcggagcaatctggcaggtccgatcaaggtgccaaggagatcaggatgttggttgctgatcaacctcaaaatggggaaagcaaaggtaaaatgataagtaaatcaaataaaaggaaaaatacatttttcactaaattaacatattttcttttcatgtaaagcagttccggaaagcgagggctttggtggagaagctttcagtttcgctggtaggaatggagagggagatgaggagttaagagatcagaaagatatgggacccactgtgctgaacaagctggggtccagttccacggcggagctacacccaaaagttgcggggaacccagatctcagcgtcggcaaacaattgccgccggcgagtgttatgactcgtctaatcctgataatggtttggaggaagcttatccgaaacccgaacacctattctagtctcattggtctcatttggtctcttgtctgtttccggtgagccaatagtaaaaattaaatccaaattatacctttttacagcacacccgttttcatccaatcaactatttctttttcttcgtcttaaaaatatatacatatatgtatacatttcattttctttttaaataatattattattattttaatatgaaatttctctttatgatataggtggaatgtgaatatgccggaaataataaagcaatcaatctccatactttcagacgcaggtcttggaatggctatgttcagcttaggtgagtggataatataagatttaaattaataatacataaaaaaaaattaatattttaatatagggtgtctttgttacttttgtaattcctttcctttttccccatcctccaataattgaaatcttttaatattttgtttgagttttgtataaacaagaggccaatgggattggattatagtagtaagtagtagtagtagtagggttgtagccgtggcataattcggatcatatagtattactagtttgagagagagagagagagtgagttaggcaaagggaaggagctaggttggcaatgatgtcgacccttgtctgtcatactgtaaggttatggctatcaattcttccacacccttaatttgtttttgtctagtacaaaagcttgcaagctagcaaaggagttctaatctttggactataaattaggcttgaccgcccgacatgtggggccactaacgtaacctcctttgcggttcaggggtcggtggcttctctctccttttaaaaagagctaatatatttattttttatggtccaaaaatttgacgaaaaataaaaaatggtgattataggtagttaaaatgtaaagctgccgtttcaatgtatatatgtttttttttatatataaataaattaaatatgacaaactaaaaattactaataagggatgaggggtgttatggtgtgctgatatttggttgtacaatcaaattctaggtctctttatggctcttcagcccaagataattgcatgtgggaactcagttgccacatttgccatggctgttagatttcttactggtcctgccgtaatggctgtagcctccattgcagtgggccttcgtggtactctgcttcacgtagctatagtacaggtaatttttttaatattttattatccggttaattttcgttgccaaatttatttaaatttaattttgagtactaattgacatgaattgtattatgcttgttaattattaggctgcgcttccacaaggaattgttccttttgtgtttgccaaagagtacaatgtccatccagccattcttagcactgggtacgtaatgtttaagaattcgacatgccgttttaattatatacgttggcttaattttctttttcgaaaagttaaaactgattaattgcttcttaattttgttcaaatttacagggtgatatttggaatgttgatagcattaccaataacacttgtctactacatagttcttggattgtaaacctggcaactagtgttcccgtagttagccgaaatacaaaagcaaatgaagagttctttttttttttttttcacgaattgactaatattgtgtggcaacaacactttgggg

SEQ ID NO: 18867 - DNA, 7079 bp, Cannabis sativa
  modified_base (1802)..(1805): a, c, t, g, unknown or other
ttatgtttaatataaaagtttaaagtttgcgctattttaattagtaatcccgattaggggattagggtttcctaaatacattttgggtagcgtgccttattatttagggcgttacagggtctttgttcaaatccatggaagtaagagcaaactctttgaaataatgaacgaatgagaagataggttttgcacacacatatctcgctatacggcccaagtacggtcctagccctaacctaagcaagaaccttcctctccctaaatgaaaaatgcccagaaactcaaacagggggttagtgcacttacttgacaaattggaggttcacccaaaaactccggagctagttgatgtagttgtcacagttgacctgaaaatcaaatgttccctctaaacaaggatttagctggtttagttaaaggggagcaatgtctgcgaagagttctgtgcgaatgagagtagacactggatcaaatcctccaattcttcttgcatgcaaaagatggcaagaaaagggaaaacaaagtttcagagaaaatatgaagctttgatcgtgaaaaagaataaaaatgataccgacatagatagtttttatttcaaaaaagagacagagctctgcgagatcaaggactcaaagatattacagtgaatctaacagctagggacacgaggggccccatatgatagccctggggcacaataaaatgtcaaggtcctttcctccacgtcacttagccgccaatagcactcttcctttcctgctaagcatgccttgccacacacgaagaggagcaaaaaacacctcctgctgtactgcgtgattaccatctgaagggaagtagatgctgaaaataccctctgaggggtacgagtaatgcgttcgtgacctaaggctgcagtgtgtgtctgcgatcaacattcaagacaatagcaaacttccgtgatccagagagtctcgaaagcttgggggtaaaagttatctaaattttcatccatcggacacgtggcacgatccgagaagggaacacggtccctacataaggcattcgtgggaactaaaaaagatgacccttagatctagaaggcaatgagaggcaatggctttcgggagcaacgtccttcgataatgatcccgaaaggcaatgtgggttttgtagacgttggacatgttagctccttctaaaagtatcactccatggacctttctctgacacaagatcagatcttgtcccttgtgcaggtcaaggtagtgtgcatacgtaccctcgagcatgctttttgcccaagggcctgcgtagagtctattttgtaaaggagagacctttgcatgacacgtgtccaaggtcatacagaagcagtcactagccgttgtacaccacacgatgaagaaggttcccaccagtggatggtcagatcatccttacgtagtacaggccttagtagggtgtggaagaaaaaaatcctagataggtaaagggtgttccctttaccccatgggtgcctataaatagcctcattcttttgaaggcaagagaggacaatttttggtcagccatcaccctgctaaaatttctaacaatcttctctttcacaaataatttcatattgtaatactttgtaatctcataacatcagcccaaagaggttaataatatagactcgtggactaaggatccttaacgcctgaaccacgtagaaatctacttgtttattatctaatactttttttcttctttaatctctcaaaatatttggtttccaaaaaactcagtaaacaatttgaattcaaaattcaaattcaaannnnaatatctaataactgaatatcaaaatattagtagatcttttattctaatacttatccttttatttaaaaaaattatcaaataattaatttcattaataataaaatataatttaaattattttaaccaattaaatttattaaaccaaagtaatcatgggcttttatatgtcactctacacatgtagaatgggcctacatgggtgggctatattttcaggtccaaagttgatttcttaatttttgaataaataagatttactatttattctgccaataaacaataattgattaattattattgtttaccaagatttttgaaaactgattaactagagtttaagaaaaatataaattagtaaatgatagacaaataaatttttacatggttcaggcgttaattatccctagtccaagagtctattgtattagccttgtaagcaaatgtttaggaagtataagtgtttacaatggcaaccctgtattcctctcgtttctcttgaagaagaaagctctctaggtatttcggtagagtttttgtaagtaaaattcttcaagagaaactagaggaatacagagttaccattgtaaatacttgctacctaaacatttgccttaaaggctaatataacggactcgtggactagggataattaacgcctgaaccacataaaaatttatttgtctatcatttattgttttatatttttcttaatctctagttaatcaattttcgaaaaatttggtaagcatttttgtgctttcattgagagttgaggaaagatttttagttgttgtctcactttgactatggtgaatacacgaaataacaccagctagaaaactacattggacatagttatggaggaatccaactcccacaccttcgaccttcagatgggtggtgttaaagaagaaggcccgaccaatgccaaaaattgaggggatgacaccgagaacgtactcgatgaccttgacaatggccaaaaccctagagggggatgaagaaggtgatgatgatgactccataagagacgggtattactaggatggttattactatgaccatgacccaaacttactgtgagtaaccaatgacttagaggcagctcaggcggagttagcagagcagaaaattctcactgcaaaaatgaagaaaatgatgcagcatttatagagtaagtttaaggatctggcgggactccatgatgaaccctcggtggaagtggtggccgatgaacgttcctaaaaacaaacacaacctgagacctcaaatcctcataaggataagggcaagggaaaggtgggcaagcacacataaaagcccgcacctagacctccttgaagggatgcgaatacggctggccagtcctttaggacaacttgtgtaagaagatgaggatctagaaccttgtgtaagaagtattacggaaactccactctaagaaaactttaagaggccccacactgagttatacaaagggagaactgacacatgagcacatttggcaaaatacaacaagatgattcaggttgctcgagtcagtgatgatgcaaaatgtctgtggttctccttgaccttatataagtctatagaggattggtggaagtagttagcaccaggattgattgacagttggaaagacatgcagtcagccttctgcaagcagttcattaccacgcgagacaaggacatggaggttggtttgctcaccaatgttaaatagtagcataatgagagcatgaaggcctttattcaacggatgatggagggggctaacaaaaccatagtcaatgatgatatgaagttgatggccctccaatcctgattggttgttggttctctgctatggggagaaatgcaaagaaagaggtcagagaccttaagagaatttatggcaaaagcacaaggcacccgcaacttggaggatgtctatatacaagctttcatagtccctctttctccaactccttccgtgactactcctaacttctctccctaagttcctactctagctctaacccttcccagagcttagtgttctccaaatttttacaggtcaaccacctttgctctcgcccctatgcaaacctacttttctgggaatggggctctaggataggaagaaactaaggtcccaaatcataatgcagggcattgctagagcaagagagggggtaagaaccacaactgtagtgattctttgaataagtcgaggaaggggtatgatctgaaatatactgagtatacaagcttgatagatactcgggaaaatgtatataaagtgacctacagtatggtccattattggaaacctcctcgtatgtcgcatagaggaaggaatatgcatgaccaaagtaaaagagtgcgaatatcatggagagaagggtcacaccaccaattaatgtgattatttgaaggatgagattgcaatattagtccaagcaggacattcggggcagtgggtccgggtcgcacatgggcacatgattgttctaggacaccagggtgctataaatcctccgtagagggtaggacgctctcaagatctaggaacaacattgcttggcctttctgctctaccagcctcggctggggtggcattacttcccctgggactgagaacctcgtatcctcccggacttgctccaccgcatgtggatggacacgttgcaataatctctggtggatcccatctcaccgaaagtacttgaaacacagaaaagagatatttgagagaaataaaagaaggggaagtatgtgcactggtgtagtctcccactcaacaccccagactgttgagtttgaccataacctttgccaaggatgatcctagaaatatgtgagtcccccataacggccctctaatgattgacgtgcatatcgctaacaaacgagtctctagggttctagtggagaatggaagctctgtcaacattctgttcaagtttgcattccaagaaatcaagctcaccgaagcagatttaacaccttgacccattcatttacaaggattctatggcaatgccttactgcaaatggtaagatttagctgcatgtcactctcaaaggggaaaacgatacaattgcttttaagcacttaacctttgttgtggtagactgcccaactgcatataatgccatattaggacgaccaaccatagtgaattttggggatgtgacttctattagacatttgtgcatgatgttcccatgtgacattggatgcattagcacgataaaaggcgatcaaagaagtgcaagaaatggttacaatgtttcgacatagattgtgttcatggttgtaagacttgaaggatactgagactgttcgggaagagtttgaagatgagctagaccctaggttcgagattgaaaggaatttgaaactaatggaggaggtagaagaagtcacccgagctttggttttatccttctcttctcaagagaggcaaagatcttcctgagtcttatgtaagttttcctaaagagaggtcatagttgcctaaatgttgctctcaacttgagccttatggtcctcataaagtttccagtacttggaacttatctctttctccttcagggctagattagcatcacagttatccttggcctttttcacggtgacggcagcttgggttttgactcgctcaacttcagcgcataaggtcccattcttggctgccaaagattggactttagcatggagttagcctagctcgatggtcatgttgaccacttctttgccgtcatttccatgaataaggtaatcttacataaaacaaatacacttagattacccttagtaatggtgaactccaccaaaaatagttgaagattaacatttacccttgttgtttgctatttagtagccattgacaaagtgtataggtctaggttgttgctcacaactcatttctttgatgtaagtgggacttccaagctgtagttagagccccccgcattcggtgcgacatcggggactgcttctgccatatgtgggacttcccttaaggcttgctctcctagagtgatgggcgcttcggactcctctcgaagggtgatggagtctttttccacgcctaatgaagtcaaagagcgaaagaccacagacctacccttagagggaggagaaatctcttagacatctaatgatgaggaagttaatggaggacgtggctattgggtcctggaagcctgagtcttggctttccccttgcctttctcttgagtgctccagacttttgccaaagtggtcgtgatcttactgcttaaggatttcagcatcttggactctagtgtatctgcacacataacaacaatataagcaagtaaaaaccacaaatccaattagcagaactaagggaacgattgtaagaaagtaaaatttagtaaagaaacttgtgcgtgcatgtaaccatttagtgagctgctataaagtttcccatgagcaaaataagctatttctctgtgaccaaggaagctactatacgccttaaaatggggcgaagaaataaccataaaaggatccaccttaacaatgtctgaaggtgtcctaggattgctagggctcctaagaatttggtatgctttatctatgtagtctttcatggggtacctacggaggtctatacttaagaggtatttatcaaatcctccctgatccccctaggatgtgcaatataggcggggggtacagaagacgcagaagggtctattacctcttctcgaagtacttcctccaggagtcccctcatcgggctatgtggcagctgttaggctatttttagcctatatttcggatcgattttatgtccgcttttcactgttttcggacggaattacgcttgtgtttctatgttttcaggttcttacgaataatagaggtctcgggatgcagaagtctagtaaaagacgagctgagccaagaaaaacaccaatttgaggcctgatgcacttctggccgtgactagattagtgtggtcgcagctagatcatgaaggcagaagccccatcatttgaagctccagttgtcgcggcgagatacaccctcaccgcggccatatagaaattatagagacgtatttttagacctctatctggccgcggcgagctacaacttggccgcggcgagatcccgtacggcccaagggtaaaattgtccgacgaaccttaaaaataacatataaatagaaatctgcgattggaagtcaggggaagcgatttggagacctaaaacgcagtagagagcggcaggaagagcagaataattcaaa

SEQ ID NO: 18868 - DNA, 3918 bp, Cannabis sativa
atatgtccgtctactcatttggtcgatccttttgtcgcacttggaggatataacgtaattaattggatcatctagtttattgtgttaggttaggtcacctttgctaataattttgttttagattttttaattttaaattttgtttttaaaaaataaaaatgtattttataattttttttttcaattttaaaaacaaaaaataaaaatatattctataaattttatttttattttcatttgttaattttatttgaattagggtctagggccgagtctgaggtagaattgggagtaggtccaaatccaagcttgggattaagtccgagttcaatttctaaggtctaagttacggtaagagttcaaaatatttattaaaaaaattatttaaattttttttgaaagtaattgttttaaaaaagaaaaaagaaaaaagaagattcttaattaaaaaatttaaaagtaaaaacaattttttttgaaagtaattgttttaataaaaaaaatatatttttgttgaaaaataacatttagtgacaataaaaaaaataatgttcaatcacaaattatcactaatatatacaaattataattactagctaacgtttcattgacaagcataaacatgtttatttaatcacaatattttttttttatcattaattagttacttaagatttttttttttttttggtaagtgaaaaagtcataagattaattaggatatatataactaattatttactaattaattatttaatggttgtggaaaacgaacaaaaaaatatggtgtttgcactattgatgatatggaataatttgtaaggatgatgaatggagtagacagcaacatggtacgtgggcagacaataacattttcgaagatatagataagaggaatccttaaagatggtttggcctttctatagccttttttgtccaaatgctcaatgcctacctatctatctatatcacttcactatagctcttgaataattccacatagggtttttggatttttctcttctattccaaaacaatactatacctcctttagtactactttatgattttattataagtatttaaattttaatcacacataaaattttcaaattttgatgttaaattaatttatatctttaaaataaaaattaatgacaaaaatacttgttttttatttttattttattgctaaaaaatatttaaattcttgagataggaataaaaatactcaaattatgtatttttgatattctcgttagtacccacttaacattaatgtcatgtgttatttcataattggtttaatttaaaaactttgttaaaattatttaaataaatttaaaataaaaaaactaagtaaataaaattttacaaaatatataattgttatttaattcttcttcttttctagccatatccattttactcagccacttcattaacttttcacaaaacaaattcaaaaatgattatacaaatgtaatacccaattaatatttgtacgacaaccagtaccaaatcttcacaaggccttcctgacatatatcgagatctccgtggataacaaccagttagcgctattagaagagacccctcgcctcaagcctttgggcatcacctaggtggaaacaactaaagcttggaagactaaaccatgagagagatcggagtatttgaagagaaaaccaaatgaatgctcagatgaggcctccaacaccatatgacacgatgatgtcatctacgactagccccatcgatgaaactatccaatcatctaaaggactgtgtctccagtacgatgcatgttgccacttgcttcacaaggcttaagataatggccttagaagaaagaagcatatgtacttggggagcttagctcccaaatttgttgctcttaattggagataaacaacctcggttggaagaattctagaggttagagaccacaatggctggtatgaaaaaggtgttgagtggtatacttgagggcaaagcccaagtattgctctccaagtgcgataaaaaacaaagagagaggagaatccattgcttgtgttaatgcacagaactacatgctctctactaatgatatccctcaagatagtcatagaaaagacatgccgctagacaaatgtcctactggtcagcgaaggtaatacaagccaatcctctcttaaaaggtcacaccgaggggaacaccccataaacttgagaagaaactttgtccaaaaagtttcattgtaggtgacacctcacctatggcttccttccaagaggaaagcaaacgtgaggtcgtatcgccaaacatgttgagaaattaataatggacggaacgagagaggtacctcatgcacctcccatgaaaacaacaacagggtcaaagttccacacgctaacttcagagggagaatgatggaaaaaaatgaaggagctggaagcggagatgtgataactacgctgaaaaatagcagttgcctcaaaaggagacttgagtaatgatgagaaagttgataacgaatcccttttcttgagggagattcaagtggaaccacttccatccaacttcaaagcgccacaaatgacaccatatgatggtactacttacctgaagtaccatctcagtgcttttaatgaattgatatacatgaaaaaagtccctaacaatgccaaatgttaatgcttcacagttacgttaagaggagctacgtataagtggtttaagtggctagaattggaaatgattacatcttggaagcaattctgagaagagttcctccaaaacatcatgttgtatgcgattacatcatgctcatcatgagcatcgccaatatgaagcatggagaataagaaattttgagaagctacattcgatgcttcaacactgaagtcacaaaaatagaaatggtatcaaaagatgaactcaagatggtcatagccataggaacatgcctcaggataaaactatgggaaaacatgctgaaagatgagttgaaaagtctcgatgatttctacgaaagagaggagaagtatatccatgtggaagaaggtaatagagacttataagatgacatgggtgaggactcatcaaagaactcatcggacttttatagggtttgttaggagacataccttcaaactcaccgattgatacgcctatgagacgcctccatccctcaacccatggacgccaagcatccaagaactcatcggacttttatagggtcttgccaccgattttgtttcatcaagttctgcctgtgcaaatttgacaaatctaaaacccgtcgagtactttttgttgaccaaaagtcaataactcacttattttgatgataaaattttttttcattattctttgttactaatttttgttgatcattttgcaaacaatttacaaagtatcaatgttttctcagtaaagtcaaacataatcatagaagtagattcaacaagtatatcaactactttatatttgataagagcaaaagttttatcaagagatcaagaattcaagaccctatccaaaaaaggacttcaaaagcttaaattcaaaaccttaaagttaaaagttaaccagaaagtaaaagtcaaagttaactctccagaaaagtcaactagatcaagacatgcaaattaatctaggaagctcatcaacatcatgactacataaaatcaaatggtataagtttactttagtcttgttaaagtgatttgcatagcacattttttttttttgataaatcagaaattcattgcacaaaataatcttttttacaacctagaagcaccaaccaagaaagcaaggccttagtatgctatacaaatttatttacaaagtgttgaaccaatcttcatcctttttggttactttttttggccatacaagagctattctttgtttcactaccactttaa

SEQ ID NO: 18869 - DNA, 2062 bp, Cannabis sativa
tttatgagttatgtagtggcagagcaagaagaaaatggaataccgatttttctgaaatgattatctgagtaacggtctgcatgtggtcctgttgggtttggagttttctcaggttcgagatgaagctttcggaaaaaatccacagttaggtagctagattccatatccactagtcttgtgactgttttcctgctgtcgtcgcgaaatctttctaatgcttcattggcggcagctgctatgtcagcttgaagggtaggaaaccgtctaagttcctgaaatcgtcatgacgtatatgcaccgataaatatatttattcatacatctaaaaaatccaaaggaacaataatcaagtagcactttgaacacatatactccaattctttcacataatatacaagcttgcatattttgacacttaacttggaaggatacaaaactgtaaatgctgaaatccaatcttgttttacaaatcataagttgacactaaaattgcaattctataattagtgtttttatgcccagaaatctcgatcaagtaaaagttcagtacctcagtttcagctatggacatccgaacaagttctttcatcacatggtgcacctgaagaaatgaaatacaatggttcttagtaaaccttaatatacattcagaaaagaaaaattaaaaactgtagaagatttggattattaattacaagaacaccaaatacaattttcactcaaattctgcctcctaatttcgttcttagtcctaacactaattaaatgacatgcctaatctgatgaacaagaaaaatatacaaataattaaatattaaaggcatcaagttaaccatatttctcatttcaaaatatctccacaagtaggataagagagcaagagttacacaagattgatcaagctaatacataaatattcaaaccacataaacaacataaaacttgtttgacagtacaatcatagagaaaagcttattaccgcatccacagaggcctcagctggtcctttaaagtaaccgatagatccatcaatgagtctcctgtaaccttgctctggagcaatcaaatgaggttgataaccatcagcctctgaaacaactctctggacatttttagttgagagatgtcgatcaaaggggagttttttcaaagcagccggtaactgatgatcaaaaactccatatattcgatctccaccaggtcgcctgaagtattatggcacagttagtttgacatatcaaccagttttaattccaattgctatgtgcattatggaaggactgccttgaaaagaagttatatccaattagttaattttcatttactcaagtacaaacgttttatcttaaattttaaggttattgtcggacagttgcattggaaccattttcatgcatcctgtgcaagaactcttcaacaaaatccaatacatgctaaaaagtttcggaaacataccctccatccaagtgttccttaaatactcgatcaaatgctcgacacatttccaaaatagtgtagagctgggcctgcagaatatcatgtacaaaaaagatcattagtaaaacaaagtttacatacaacacaagcaagaagctaacaaaggtcaaactcattacccccgagtctactgcaattggcctgccaatgcgatcaagctctgcattaagctcatctatggttttatttattaaagaaatgatacttggtatgcgctgcctgatgacattctccaaatgctaacaaaggagcaaaaagaaaaggactaataagaaagagtggtaggaggaagacaaattttttgaaaagtatttacagtaatatagaagtatttatttaagataaagacagcaccgatagaatatgaccttagacaaaagtttggcaagatactcagatcccatcttatgtgccaagtgtccatactcgggactagtttgaaagtattcacgttctttcctacgagcagccatcatatcaacattcttgttaatgtcagcctgcgaacggttcacaattccaacccatggatgctgcagtctgtatgaccttccttcaagaacct

SEQ ID NO: 18870 - DNA, 2807 bp, Cannabis sativa
  modified_base (36)..(51): a, c, t, g, unknown or other
ttctgatctttattaataaataaatctgattatatnnnnnnnnnnnnnnnntagggcacaaaacccaacacaggtgtgggcattctattgattaggtaggtagttgtcctataagcctcatcccaatatttaagaggtaatgaagcttgagcaaggagagtcaagccagactcaacaatatgtccatgctttctttccacaacaccactttgttcatgggtgtgtggacaagcaagcttgtgaatgataccactattttcaagaagatttgtaggcaattctagttgcaattctacttggattttgaacttagtgaatgtaggtaaggcttcatctttggttcttaagagataaatccaagtatatctagaataggcatccacaaaacttatgtaatatcgatatccattggaggacgtgacaggggcaggaccccataagtcactatgcaataattgtaagggagtgtcataaacagtggtagaagtaggaaaaagtaacttatgtgatttaccaagacaataagcatggcacagatcatgtaaatctttattgaatgttacaagaatggagggtctgtttaacaatcttattccatattccttttgttgtcttttctccgacaagctttctcctcacactgttggataggtacatgatgattgtgtaataagttatctcctccatttttgctttctcatatggtttcttcttagccagtaacttctcatctccaagaactttggagactttctagttcactaggatccctttcaaactttctctccatagcacaaagtcctatgttccatcaaacttctccaattcgaatctcaccattgacaccgtaattgtttcttaaagaattgcagcggaaagaatcttgatgctgcgttcttgatcgattaccaagctctaatttgcgggaaaattacaatgaaagtgtaggatcaaaataactgaaacttaaagaacaaacaattagcaatgaaaagattaacaaataatacacagttattagggatgaacaaagtatataaaccataaacgattaaagtaataagacaataaaatcaacaccatgatatatactagttcaaatcttatagatcgatgtaatttatatggctctactttagttctggaacaccaccaaaaattatctttattgattgagcaagaacatggtacaatacagtcaagatcgattgtctgttgaattctctcaaagtgtttactctaaagtgtttactctcatactcttatccaagaactcttatccaagaacttatccaagaatctttatccaagaatcttcttcatctacagaagattcttcatataaaactcatagtcaatctctttcttttctctgtaccactttcatttctctacctctcaatctttctctctcaagattgcctctctcaactcatctgatctccttcttatcaaaatgataagtgttggtggtatttatagattagggatatggatcccaaaaatggtggttgcaaatgctaagttgttatgttagttacgacttaacaaatttctcgtaataatatatgcacgtcatcacaagaagaagtgcttccaaataagatgtacgcttcctggaagacaagccaaagtgtacgctgaagggatttctaaataggaagagcatagttggagtcaactatctgagacacccttctaggaggaaacatctagccatccataactcctttccgaaggggggctagctttcctgaaaactccttccacatagacatgatatgcacccagaaagcccttcgagatgacgcctatcattccgcaagattactttcagatggtaaggttagacttctagaaactccctttcaaatattatgtaactttccataacaagaataacttttgaagatctttatatttagaggaactatattacaattttttattttaattctgatgttatagctcttaataaataaatgataaaaattattgagtttttattatttatgttccttatattatttaatatgatatttaagggtatgcaatgatttcaaacatgaaataaactcattgcgtttagtatttgattataattcaattagattccgattcattttttccgtctttctagattttgtcagtgttttatttctttattccacatcagaaggacacaccagcatttcaaaaaacaaaaaaagaaagaaagaaagaaaaaagacacaccagcaaatgattctaacagaccaaatgtttaaaaaggatgtcttaagcatgacattaacttatttaggagttctattaataattgttgatttcactgtttcttattatatatatgttatttattaagtattaaaattaaatagacatttaattaagtttattgaaaatatatcttatatatgggattggcaattaataatgtacgtatagtttgtaataaattttatggaccagctttaaaagttttgggccttttgctgcgaccagagttcttgtaattttttatttagttttattaggtgataatgatcccttaatgtcgttcataatccttcatagtacataaattaattgttattgaataagaacactctcaaatcactctctactcaattttttaaaatacaacactcatactctattttatttattttacatcacatttttacattatatcatacaataacttctttattttttcttacatcaaggaaataatattaattttatatctattttattaattaaagtaaattaaaaattaaaataataataaaaaaatctatatatat

SEQ ID NO: 18871 - DNA, 5060 bp, Cannabis sativa
  modified_base (1039)..(1044): a, c, t, g, unknown or other
  modified_base (4082)..(4088): a, c, t, g, unknown or other
aatgtgtaatttaagtaattttgggtctattcctaataaaaaagacatatgaaagaaattgtaagataaaaaaaaattaatactaaaactgaagttatgtacgtaattcatgaacttcattgtagtagaaattaatactttcctaatatacatatatctcttacaaaaatggcaacttgtgcagagaaaaagacaaaaagcaactgagacaagtctactctagctggtgaaagtgtaactgtgcaagtctattcaatatatactgactaggataaggacatgggctttaatatggatccaaatttgagactttttttataattttgcacttatttaattttttcaattattttttcgaactctttattatttcattttagtcttggtgtacatgtcaattttcaatggatcaataaccaccacaaaattaaagcatttatagattaggtgaggttaaatcaatttgcactaaatatttattgtttttgtcatcatgtcttcaaaattttcttcttctcagttcttcattattagttcctttgaaaaagtttaacctaatcactgtttaatttttaaatacacctcacctcaacacactacacactttcttttgtttaaataatattgggtaatttatttaaaatctaaaccaaactagttccatttaataaaataaaaaaaaacctagtcaaaaattcatggtttttttttgggatgcacatttatcttatgggaatggtttcgtagggacccgcccctagtgaggtggagattcttcgtctaaatggagaacgcgacgaggattgagattatgttttgtctctgaatgttaaacggagcgaggacgtagaccacatttcctgcctcgacgggaacctatttagtattttattttatatttctaataatattttataatttataatttatgtttgtattttttaagtatattagtatcttttttgtgacaaattagtttattaaataatattaatgtataatatttaatttttatgtagtttaatatttttatatattnnnnnntttattataaattttatttttttattaagggatttcccgtcccatacctgataggaaataagcggagatagaaattaaaatttctaatagggacggggacggggagagcactccttgccaattctccgccccgtgtacattcataatttttctattggacaatgttctgctaaaaacaatgttggaaaaattattatatcccctaaaaggattattatggtatactcattaattatttgttttagtatttaggataaatttttaattttttttttttttataattgtacatgttaaaatttgttataaagtttttataacattttaaataattgatagtgttgaaaaataaaattcaaatagttaagataattagatgagtaataaattattaaaattttatttttgtaaatagaaatagttgtttgattatagtaattcttatcacaaaaataaatttattatgtaatttttccaaacaaatattcatccttaaaatataaatagaatattaatatagtctagtttctaaatttgaactttattatttgaatacaatcaaaattaataattataagttttatgaatattattattagggttatactatattattgtgttgggcactgatcaaatgataaggattcaaatatgttcaatacttgggatgtctgaagcagatgatcatagtatgtatcttggccttcctaacacaattggtaggaaaaagactacaatacttgaattcttaaaaataaggtggttaatcagattaatagttggaatggtcgctttctatcccgtgctggcaaggagatacttcttaagacggtcattcaatctcttcctacctatgctatgagtgtcttccttattcctctcaaaatctatactgagattgaaaaattaatggctaacttctggtagaagaccacacggcaaaggcaatgggatcatttagatgtcttgggataggatggagttcataaagattctggggatattggctttcgtcgattacatgattttaaccttacaatgcttgccaagcaaggctggcgggttcttgtctcgccaaattctcttgtaagccaaatttacaaaggaaagtacttccctcggtccgattttcttattgctaattttggtaataatccaaattttgtctggcgaagcatatggcaagtaagagacattgttaaacttggtgacaaacgtatcataggatcagggaccactaccagcatactgtctcaaccttggttacctgaccactccaatgtgtttgtcacaaccactcatcttgggcttcacaacaagatggttaactctctctttgagcacaacaatttatcatgggatcgttagattgttcatgacatgtttaatgcgcgtgatgcatctctgattcttggactgtcgttatgtatttctgctggtgatgattactgttcttggataagggagagcactggtaatttcttggtgaaaagtgcatacaacttgctgcagaaatcaacaaatcaacatgctggtgcgaataactctggcttttggcacaaactttaacagctcaagatccccccaaaggtcaagaacttcatgtggagagcagtttcgaatgccctccccacctgcttacagcttgtcactaggcatgtaaatatctctccaacttgtcccattttcaagagccaaccaaaatccatcactcatgctcttattagttgctcttttgcccaagcatgttggcatcatgctcaaccttctgtcaatgctactgctaacactactgttggtatgtggttaagcaatgtgtttactgcttctgatatggaaacaaactatcgcacactcatgctgtgttgggcaatctagaaagcacgaaacaatcttatttggaataaaaaaagatcttctccacagcaggttgcttcatcagcattagttactcttgatcaatggcgcaaagctcgggataaacaaaatttattatcattggctcttggaaccgatggctctaaagctgagcaatggactgaacctggacctaatacaatcaagattaacattgatgccactttgtttgagagagaaggctcctatggcttcaaaattgttgctcgagactccttagtcaccttgttggatacttttgcagtatgtaacatgggctcttttgctgctgaagttgtcgaagctataagggttaaggaggctcttagttggatcaaaactaagggttgagataaagtggagattgaaactaacagcatgctcactgtttaggccattcgtacctctcattgtatgtactctgtttttaggttggttgttaataattgtaaacttctactttctaatctcccacatgtttctttgcattttgttcaacgatcagctaatcgagttgcccactatgtggctaggcactctcgatttttatctggttgtagcattcatgttcagaatttaccgcctgattcataaggttttttgtactctgtatgctaaatttcaatgaagttgctatttcatttcaaaagaaaaatattattgtgttgggcgtgctagttattgttctcataactgtattatctaattttttggaggacagtaatttgttaaataatggtaatcttttattgtggccttgatataattaacacatgcattttgattagacaataagttatcctgtttgaagagagtttaaatttcgtgagtttattagtgattttaattattttgtgaaaaaattaataattataaaatataaataattaatgagtactagactttgttattgccttaaatatgatacatataaggctcaaattctaaatcatgagatttggacaaaaacatatactattagtcacttacaaatacttttaataaatttaaaattgaatttgttttgacgaaattgaaaaaaaatatgataatttttacaaatattaattacttatgccactaataaaattattaaattattgaaataattacataagacactattttttgtaaaatatttannnnnnnacgttcaaagaatgtttttttttacatttttacagttttccaaaaaaataacacgaaactacataaaatcaacaaaaaaattatataaaagtaacatgaaaataacatcaaaataacaataaaaaataacatacatataataaaaaatcaacaacaaattaacaagattataacataaaagactgtattttctgtaaataaaataaaataaatcgtaaaaatatttaaaatttcgtaaaactgtatttttgtaatttttttttgttgtttttatgtttttgtgaaataatccctaaattagttatactgtatacaaactcaaagaaatttaagaacttatgtctttatttaccaaattttatttttgttggaatataaaaaaattggttcacttttgattttgccgtgagaattaaaatcttggctcaccttagtccttacacaaagttagtgaggtgagagtgtcaaacaattgttggaacaattattatattttttcatgtttggtttgttcgtcatgccacgtgtcaggactcacattcacgtgtcgttttattgattcattcattggatccaatcctatcaactcaaacgtttttcttcttcaataattcatacctttgtaatttgttccttctataaagtttcaacctttgtcctctctctctcttaaccctgaaaaatatcttgctcaccacccatttttatttttatttttaatttctctcactcaaaaaaaaaaaacccccactaagaagaagaagaagaagaagaagaagaagaaaaagaaagatcagatatgggggaagcagttgttaccatttttagtcaaattcgtttaattgctgggtactaaactaaaacatattaaacatttatctactctcaatctttttttcctatgtttttttttttttttttgagttatttaatgatacaattaattttttgcaggcccatcttgacattgct

SEQ ID NO: 18872 - DNA, 2743 bp, Cannabis sativa
  modified_base (2109)..(2115): a, c, t, g, unknown or other
gaagaaaatattaaattaaaaaaattatattattatcaaaaataatgaagtgagaatgagaattaatttgttacttagataaatgactaaattaattaaaagcaatgatcactcatttctttgaaggcatatatagatctactacttataagatttttattattatagcataattaatggatatattaattaacataagaaaaatgctttaaaaattgaacatttgtgttgttaatccaaactaattaatttttaaacttctgtttacttcttttttaatcattaatttatagatatgatcacaaatggaatttttcatcatgagagatcagcagatgtaagcatataaatttctgttaagataaaaatttaatttttaagtatgttttatattattaatatataacatacttgacatgctaataaatccaaataattaaatatatatatataaatatttgacaagctaataatccaaatccaattgatattatataataaagaaataattaaatcccaaaggtggggctgtgtatatagtggtgtgttgtatatctatgccgggtgttagaccaacaaaggttaaacattcacaatatagttgtcaattcacatgcaatcttccctcttatgtttattgaaaaaaatttctccaaattttttactttaatgtaaattagtctataatttcgaaaaaatagcaataataatctttaaggttatgttttttttaagtccattaacctaaatatatctgattcgtttacttatttaagtgtcgaagcattatttatgaagactgagttagagactgtacgtgaaagaactagatcaaaatcagtgtttatattagttttatcacgaagttgacacacagaacgagtgttagaaggtagcccgtggactattacggcaaaagtctccaaaaaatttactttgatgcagattaatctctaatctcgaaaaaatagcagtaatagtttccaaggtcgtattttttgtaagttcgttagtcctaaatttaactgatccgtttacttatttgaaattgccacgtgtcgaagtattatttatggagactaggtcggagaatgcatgtaaaagaactagatcaaaattggtacttatatcaattttatcaagttgacacataatgagtattggaaggtagcctatggacttttgcgtcgaaagtttctaaaaattttactctgatgctgattaatttctatcctcaaaaaaataacagtaatagtccccaagattatgttttttgtaagttcaataatcctaaatttaactgatccgtttatttatttaaaactaccacatgtcgaagtattatttatagaaactaggttggagactgtacgtgaaagggctagatcaaaatcggtacttatatcaattttatcacgaagttgacacacaaaacgagtgttggaaggtagcccatagccttttacagcaaagtctccaaaaaatctactttcatgcaaattagtctcaaactgcaaaaaaataacaacaatagtcctcaaagttatttttttttgtaagtctgttagtcctaaatttaatagatacgtatcgtattatttacaaaaactaggtcagagaccgtacgtgaaagaattagatcaaaatcgatactaatatcaattttataagtagcccatgtggttttcgaacaactgaaaattggggaaaacccttgtatagttgtgctgaataaattacatttctagattcaattacatggtaggggctgtcatggagaaaactagtagaaagtcaactatgatttttttcttttggctccaactgatatatattcaaataatagtctcctaattttagaggctgaaaatgatgatgggcttgttgtggaaaataaggtagaaatgggcctaagtgagggtaatgtgatggaagtgggcctgaatgaagataatgacagggttaaggaaagaagggaagtggagatgagcctataatatattataatataaagctagtgagagtgatttgggcctcaatggaggtagtaattcaaagggattatttcacaaaaatataaaaacaacaaaaaaaaaaaaattacaaaannnnnnnttcacggaattttaaatattttttgattttatttgcagaaaatacgatctttttatgttgtaatcttgttaatttgttgttgattttttgttatatgtatgttattttttgttgttgtttgatgttattttcatgatacttttttgtagttttttttgttgattttatgttgttttcgtattatttttttaaaaaccgtaaaaatgtaaaaaaaacattctttaaacgtaaaaatgtaaatattttacaaaaaatagtcccttatctaattattcctaattcaaataagggattatttcataaataaatgacaaaaattttatatttttacagatatgctgttttttcttgtatttttacgatttttgttttttacaaaaataaagtgtgattttttcgctgtttctaaaaaaaatactattttaacattgctactacaaaaaagtaacgtgatttatttttacaactacacaaaatcttgtttttctgttgtttcagacaaatgttattttgactttgccgcaacaagaaagcaatgtaaaatcaacatttttctatataaaaaaagtgaaaatctgtaaaacaaataaatataaaaatgtaaataaaaaaaaggtctataaaaaaa

SEQ ID NO: 18873 - DNA, 2126 bp, Cannabis sativa
tatatatatatatattattcagcaattaaaatgaaaaacaagtcacacaaagatagtaaacgtatacctagtttttaacaatacactactatcaaaacttaaacttaaaaccccttagcagtcaaaaaaaaaaaaaaatagcaggccaagctaaaccacttagaggctgtcacataattaagtgcctttattaagcaggcttgtaccttcaataaagtgattccaaaagtctattatattccttctctccatgacactgttctaccccaagacttgaggtactgttcttcacaatgacaaattcagagccttcttcgatcagggccaagatccctaaagtgtagtgttgggtggttatggccttgaacttgaatccttggtctctatctcaattacatcaaatttatgcttagtccatcctttttctccattccacttgacatttttgagacctttttacaatataatctgaatctatagttcctcgttccaatccaatcgaaccaaaccatttgagacaaaactaataaattggttttgaatttagaaaataaaaagcggtaaaaatactagtttagtttgaaaaaaaagaaatatggaccaaacaaaaaatagtattaagttgcaaaaataatgcataatcataaaatgttgcttctacatgttctatgctttaaccccagttacacacttattgactttaaatcaattaatgataaatgacccatcataataataaaacaaggcttttccttgtttctcacccctaaaacaactttccccaataatggcctaaagggaatccaattccttctccacatacttgccaaaacccctctcactcacaatactttttcttattaatatatacattactttccagcccaaccaacaaagaagtttttcaaaatacaatgtgtattgaaaaaaaaaatcacccttgaaaactttttaacttatcatggttgccccaaaagcaacccctttaggctgaaagtgatgaagagattatgcaattacaatccaaaagtaacctttaccaatattttattaagctactactatcaacttaaacttaccataacttttcaatagttaataatttagaataattgtattattagctaaccaaataatacatgttttttttcaagaaactaaaagtaccggaaatgcatgcaatgctctcatattctattgaatattggtttatatttgctatggtttaactcatttcaagagaagaggtaatttatattaaagttataacaatcaaaacagggtgaggatcatatataaggaaactgaaggtaatgatttttatgacatacaactcaaaaggatgaaattaaaatgaccagacagacaatagacacggttacataaattagtactgtctttgaccattctaagcaaataaataataaaaagaggtgagtattatttattaaagagaaatagcaatactctttatcaactaaaactttatcaattacaaggtaaataatagtcggagaagtaaatttaatgtttatttttagttatataaatattcaatatttgtaatttctttagcacaaattttgttattatcttaaacatggcacaaacaaaactcagattttagattattggatctagacaaaaatatatattatcagttacttctaaatgttatttcaacaaatttaaaacagaatttgtactgacaaaattagaaaaaaaaaaaatcacagcgttacaaatattgggcacttatcccgctaaaaattaatattaagtttatgcttcttgaaaatttaatattttaagtaattatgggtaagacccaatattaaattactctaataaaattataccatctattgtgatatttgaaaacagtagcagttctgtaataaaaaggtctatgccatttgtaaaggtaaagagcagtggtttttgtgaaaagatttaaaaagcaatatatgtattgattatttcaaagcattacatcaagagaaggacagcactagattagcaccaagatatatagatgctatatagggaaatttgattttctatacttagaaaatcaaaaaaaaatttccctaaaccaaaaatttaaaacctaaaaaaactattcc

SEQ ID NO: 18874 - DNA, 6253 bp, Cannabis sativa
  modified_base (4854)..(4855): a, c, t, g, unknown or other
taaacgtgattaactgctaatttccaaattaaactaagcggtctttacacataccttttaaacacgatgatatgtgtaaacctatcattgatctatgaccaaaaagatggaatagggttggggctttattttcttctgggttggggtcctcaggtacatccgtcaggggtgggcgggacaaaatggatctgggttgccagggatgagggtcgtttgggttaggatgctgagaggaggacgccaagaggttgagtggaactactacaaaaagccttatttgcgctcgtcaacgcgtcacaccaaaatagttgaccgaagcaaaaaatatgtagcgattttattcttcagagtataactgatgctaaaaaataccaattagcgtcagttcattccccaatgctaaaagaagaactgagaaaagaagtgaatttttttaaaattatctattacattttacttcagtgaaaaagtaaggtcaattatttttgcttcaatttaaaactgaggttaataaatttgccacggttatccaccgacgcaagaaggtttaacttttataaaacccaattttcacaaatatttcatttgcctcttttcccctgcccatttcgaaaccctagcagagcccccccgccatttcgaaatgtagcagatagccgcaccaaccccctcaaaatgctacttcttctccatctcaaacaccattaacggcttttgaataatggcatccatgcttggaacttcatcgtcaacaatctttgcttctggcttcctatcttctccctcctcgaagacttctagtccctctttttctttcaacctaggtacactactcaacgaatcaatctatggctattgacctcattctttagttcatttattttctgggtttcgtctaattttcatttttggatgatatttcattgacccagttcactattttgagcttcttttttaattgtggttttttctctttgaaattagtggattttacagggcagggcaacgtgaatcggttgtatggaggaattgagattttagtaaaaaaggggaggtctctcctttcgcaagtctcgtctcgtttttcatgacttccttagtaagggcatgtggtatgggatcaagaaggcctcctcgtagattagctacctttttcgcccgaagcaaattgagtggaattttatttgagttttagaatgtaattcttgcaaatgctaaggtttaaattgtggaaactaggctttagaaaaaaatttatagtgattttttggtaatttagtctagtagggattgaagaactaaaaaattataatatttctattatgttcataaaaactacactcgacttccacatcttcatctgcagcaagtgatgaatcagaaataatgatgcttgaacatgtcagaaggcatatcccattagcttcatcagctatggttatcggtagcattctcaggttaatcaaagctttgttccttattttagcagctaaaagaatattgatttgcatggatgttgattctgtatgtgcttcaaacttttggtcagttagttttgcaatgaagatatgtaaatgttttccattttgcattaataattgtgttagtgacttgtttattttaatggacagaattcacctaggtaaaaaccagcaatacaatatttgagtttgagatcattgggtgcccaagctattcttctctctttaggtatacaaggagtttttcatggattcaaagatactaagacacctctttatgctacaagtaatctaacttctctttcttattcctctcatttaagtattaaagttcactttggagttgctcttatttagaaccccataaaaattcttacttagtctcttataaggcctatctgaccaagtagttgggataaaccccataattaagcataccattgtgggtgttgagattcattctgattacataataatagacatattaaaataagcttgaaattacttagtgaatctgtttttgtgtttgaaaaggtctgccaactttgaattaatgttgataacataatcccctgtatgtgattatttgttaggtaggctataagaatattgaaattgagtttaattgattcttttcttcgaaagattgtatatgtgtaggaggtaatgtatgcctcttcaactggatttcacatctggtttgttgattgctgagctagggtttcatacttttatgtgttttggctttaacaaaaagaatgagaaaaaatacactttatttattagttgtccatgagaaatacaagcaaatttgtttctgtatttttcaatagtatactactacaatatgtagaatttgcgtcggtcaacgggacggtcaacgtcaaggattgacgcaaaaaatggaagcgaagttgttgggtcggttggaaactgacgcaaaagaatgggagtttgcgtccgttatcaattcgacgcttaaatttaaaccgatgacaaacttaattttttttttaaaaaaagaagttttatgcgtcagctatgaacggacgctattaatgctgacgtcagttggcaaccgacgcaactgccatgagcctttaatgaaaacagtctctaattagttagtttttcacaaaatctccaattctaacttagatatttcattttcagaaaacctaatatcccattgctctcttctctttcccgcccaacattccatgaatctctcttcacccaagctcaataaacgactgtctctcgactaggccatcggcgcaccaccgaatcttgaaggccatttcaaccctctccactctatttccctctccgctggatctctctccccttcgtcctcttcttcgcaaacccgtagcccaaaccaccaccaccagatgcgcaacccaacgacccaaccacaacaacacttctttggtgtccttctcgttgtcggccgctgctagcagaggtatatatatgtaattaaaacatttaatatatacagagaaggaatgtatatattattaattttgttaaagaaataattatagtaaagtaattagtaaggttggtaatcacaccttgatttggttaaagaaaacaaaaatttagttgttgcgattctatacacattctttctttttctatttcgtaccaagatacttcttccatatatatagttttttttaattgatttgaaaatcaaaagctctaattcaaaatctataattatatatatagttctttgaccaggttgggcgaaggttggattggaggcgacgggcttcagatcttgttcgtgggctacgggacttggactggttggtgaactgctgctagaggttttcttcaaaactgtaagaacaatttcaagattttggtatatttggtttttaaaatttatttctattatgaacagatgctctggtttcttctgtactagaaagtagctcctgtatgtattcaattccgaaattagtttgcaagctggtgattaataaataaaagaaaaaatgtaatctatacttattaacaataatatagaaaataagaaacaagcaggtgttttaatccaaaatagaaatatgattcgaaatgatcttttagcaataaccaggctatttgagcatatttgaaagtttcatttctttgtgttgtggattttcatcatactgttttttagaaagtatgatagtgtttatcttactattctgtctttgaacaaataataattgtatttttctttcttgaaatcatgtaggtgttttcttttgtaggatttctcatcacatgcttttcttagctttagcttttagaaaattgactatttctcaatttctattcttttgtaaaaaggaaaaattccctgggagggtccaagtattttgaacttgggaatgaatttctattgtaaacactatttttgataccatttgtttcttttgtttaaagagtttcagtctacgattatacttatttaatctgtattatttcttaaatgaatcttgggcataacaattggtgtcaatgtcatacttttggccattgtggctgtttgactctaattacatgtttgactttatttgtgtggagcttgcactagaatagcattgcaattcttcgtaattgtttgtgtttttctcgcaaagaaaaattggaatctgtttggagttagaattatatgttttaagttttgtaggtttagagctagctgatatattgtttaataagaaagatcttgagcaggtggtagttgaggtcatcttcttttccctttaattagaacaaatgcaagtgtcaagccattgttatcccaaatgtcatgtttttcaatcatttattgaattttatcaactttgttcagcataagttatcaaaattatttattgggatttcaagacacaataactaatagtacaatcatcaaacactttgtaatcagacttaattatcacactatgataattgaatacttgaatcattattgagaaaactatgatctatatgaatttaattaaggtaacaatctgtgcatctgaaattctctaagaataatggggtaagaacttagcctaagtgatcggttagtatgccttatataattggcttcatagcatacatatatagttgttgttattctgttaaatcacttctcttcacagtattggagtactttgttactagtcttaggtccatttccctgtgattttatatttaaaatttaaattgtgtattggcttatataaattttcttgattgttgcagaaaaatgctcaatctttcattataaagcttatggcgctaactacttagcgatacaattttaatcgagattggataagcaaaaaggtacttcggataatatcaagagttnngaaagttaggagtaggagaaccttttctactcatacatatagaggataggattgtgtattgtaagtgcaaatttttactaagttatgaaggttcgacttgtatattgaaagtattgttaaaaatatttgttatatagacactttatctaatattactcatgtaattgtcttttgaatttatcttattaattttaactttatattattattttttaatagtgaactttcagttaataatatatatatggatatatgatcttaatttatcttttatatagggacaaaataatattagtttagttgtgattttttttaatatgtggtaagaattttactgtgaaaaatattctgtgtacacctaactgtcattttataaccgacggaaaaaacacttattgcgtcggttgaagattgacgcataacatgttgtgtcacttaaaaactgacgcaaaatgctttaattttttttatatgttttgcgtcgtttataaaatgacgaaaatagttttttgtgtcattttataaccgacgcaaataaattagaatttgcgtctacggtttatacgtcggttatttaaaccgacgcaaaatctttattagtcacttgaaaatcgacgaaaatacccctttttgacccaattagacaattttatcagatatattatctttttgacccaattagataattttagaatttagtttcacataacaaataatcaacggagactatttgtggtgtagtgaatttgattgagtgttgaaagtttagagaagctttgtgcaaaagggaatgaatcaacgacaaaaaagcaatggaaagcagagaagagatgtggttggccattggggttaagatttgataaagagagtgagaagttgtatatgggtagtctatatttcatgttcattcaattgaagagtgaaatttttttattcatctcgtgctatatgttgtgttttcatctatgttgcagttcctgactttcacttgttcttgttaatacttttgattgtacaacattccttatattatttgacatacccaaaaaaaaacaagggcatctttcttttttgtcacaataatgacattctgttatttgaaattttgcaaattaaagatgtattgttgtgatgaagaatattacaaaactagtaccttatttggctaaatcccatactgtttttgcttcagttctgaactgaagtaaaaaacaattagcgtcggtgcactaattttttactttagttatgaaccgaagcaaaaacctttcttttttgcttcggttcataaccgaagcaaacaactaataagcgtcggttcataactgaagcaaaaaaattagtatttgcgtctaaggttataatgtcggttataccaacaaaagcaaatactttata

SEQ ID NO: 18875 - DNA, 5609 bp, Cannabis sativa
  modified_base (3533)..(3533): a, c, t, g, unknown or other
gtggcattttgctggattgaattctcatctgggggaggatctttatcacactccaaatgaggaggaagtctataatgcgctcaaggccatgggacctgacagagcccctgggcctgatggactccctgctgccttcttcaagactcactgggatactattagaggagatcttatggctatgatgcagtacttctttgccacggcgaagctccctgactttataaacgacaccaacctagtgctcattcccaagaaggataatccggtgactgttaacgactttcgccccattgttctatgtaacgtcgtgtataaatgtatctctaagatcttggccttgcgtcttaggccgatcctgccccatataatcactcctgctcaaactgcttttatcaaagggagatcaatctgagagaacattgcgatggcccaggaaattgtccactctatgtcaaagaagaagggatcaaaaggttttatgatgatcaaattggacatggaaaaggcgttcgacaaaatggattgggactttatcctcgaatctctgcaatttcatggtattgaaactcctttgctccaatggataagtagctgtatccaaactaaaagactcaacctgttgattaacggggtcaatcaagggcgctttgctcccttttgtggccttagacagggagacctgttgtctccagccttattcatccttgcagttgatctcgtttctcgattatttactaagtttaacctccaggggaagattaagggtttcaagacatctagagcagccaccccaatcactcacctcatgtttgctgacgatgtaatgcttttcggtcaagcatctttaaaagaagcgggtgccttcatgcaatgcttagagacctattgctcgtggtcgggccaatccgtgaattaccaaaaatctacgatccatttctcgaaaggtgtcccaagaaatcgagcggatgcaattgctaataaactgggtatgaaaaggatgaaggaggaagcccagtaccttggtctgcctctcttcaagtctcggcagcgttctcgtgacctgaaattccttgtgtctaaggtccatcggcgcatcgaaggttggaaggctcggttgttatccaaggcaggaagggcgtgtttgatccaatccgttggcaactctcttgctgtctacgctgcctcttcggaagtgatcccttccagcattgctaacgccattgatcgtagtttgagatgcttttggtggggagattctgagtcaagaaaaacagtccataccattgactggggtagcctctgtaagtcaaaactacacgggggtcttggctttagacaaacaaaggacattaacaaggcatttattctaaagtggggatggaaaatggtggctgagccgtcaagtctatggtgtcaatctataaaagataagtacctaaaaggctctactttttgggatgttcaaatcaaaggttcagactctaggatgtggaaagcgatcctcaattccagacctcaattatggcaggtattgtgtcggagaattggtgatggaagttcaacatccatctggttcgacccttgggtgccatcgggtaatatccagcctgccccgctcctggatgccacttaaggtgcaaatttagttagtttcttcatcaacgatgaccaatcttagaatgttcgtagggtccgacaatggtttgatattgcagatgcaagaaccatcctaaacattggcctcccggccaccaaacaaaatgactcgtggagatggttaggagagagcaatggaattttttcaattaaatcagcccaccatttgatcactaaacggagatgtgctgactctcctcagaggacttggaaactcatttggaataatcccatccatgtcagactgaaggtgttgtggtggcacattatgagtaacgctctccctacccgtgaaaaaattgatcaggccttcaacttgccttcaactctatgtccaatttgcgataaagagagtgaatcgtccttacacctgctttggaattgtgactacgcctcagccctttggtttggctgctgctggggtattagaactgatatccgtaacttcagaaattgggaagaatggacgaattggttcgagtgcaacagaaacagacctgctactctcagctttaatgatttcatgacgggtgcactgtgcatcttcgacgtcatttggaaagtgagaaatgaagttattcatggtggccatctcctccaaatttccaaggcaatgagtattgctagtatgcgcctcaacgatcatctagcttgcaaaatggatcaaccagcgactacagcagcatctgttcttactccaccatcagggtggctaaactgctgctctgatgtgaatattgattcaaatcattccttcggtgcagcagtgttcagagactcaatgaatcgaatctgtagcgttgttacagatcgcttcccagtgacagaccctgctctagccgaagcttcaatgttgttgagtgcagctaagcatgcaactcaatcgaattacagttcagtgaacttcttttgcgataatgtttgtgctgtgtccaacattctcaaagctcatggtacccatcataacattaacttagaaggagtttccacacattttcaaatgttaactgcccaatttgcgaactggagtgtccaaaagatcaacaggaaggagaatttcatggcacataatgatgcaaaatgggctaaaatcaactctgctattgggaatattcaggtctcttccatggatccaaaggtcttcgaagactacaaggaatggtggccagacccagggtagttttctgtccgtagttcatgaagtttgtgtctgtagggttcagtcctgcacttccgtgcttggattgcctctttttcagtgtttcctttataatgtttttctttgtttttttgtctgtaacttgagacctgttggctctctgttgtttttctttcctagtttctctattgttagtttcttcagttttttttgggggttcctttaatgcccttctgttctgtactagctctgtttttttattgaatgggtgcttcgcacccccctttccaccaaaaaaaagaacacatcaatgtagctgcaatagctaaaaaaaattctcaaagatcaaaatctcaaatcttattttaaaaattaaaaaaataaaaatatattacctaattaaaaaaattaaacatacatatattgcatttaatattacttaattaaacaaaaaaaactaattttacgtgtattgcacgtaacatcaacttaatatatatattaacctgatacaatagattctaactttttttagttaatacaacaataccacccatatttaaagatttttcaaaatactaaccagcctagttcgatacacacttatttacaagagaaatgctaaaagacaccagtagtgccaatcactctcttacgtgtcaatattgctattagtctaattaagtatcaggtcccatatagtttaatataataactnttagggagtatcgctagccaatcgtaagacgacacatcttaagggtgataggcatcactagtgcgaatagcaatgctctacttacaactataatgttttaagtattattgatacattcattagctgctgctaggttgggatatgaaatactgtttaaattttggtaactacaacatatgaatttaatgaaacaccatttgactttgtttgttggaagctacaactcttggattctccaccttaattaaggtgtttgaacttctttttatgccactgccattgaagttttgtaatttaccaacctataaactatttttgtccattacaataactctcagctagcttcaagctgcagttactggtttcagtttcatgtacaattgctttttaataaatatgagtgtttatttggtaccttttactttatctacatatggtttcagtttcatgtacaattgtttttttaataaataagagtgttcacttggtactttactttatctaaatagtaggaatgttcaacaaaatttacaaaccgccccattcgaataaaccgtccaaattaaactgaataaaccgacaaaaaatacaacctaaatagtacaatgaaaatccaaaccgcctaataaatatatggtggtttacaaattattctaaaccgcttaattaactcgaataaaccgaattaaaccgattaatatattttttaataaaagtgcatataatatattacataaattatatttattagtcaaactattttgtaattaaaatttagacattttagtgtttaacttaagatttaaactttatagttaataattttcattgtatttggatattgaagtttaaaatctatataatattattactttttttttattaattattttattcaattatttcatgtttactcaattatatttattttctattataatttttaaaattaatttagactatagtatttttttaacttgaaatatgaataatgtatttttattcttgtaaattttattttttgaattagaaactaagaataataattataaaaaaaaagtgtagaacggtttggacgagttaatccgaccaaactaacgaaattattgggtgtgtcaaactttttctaatttttaattggacaggttacaattgaatatttgtaattcaatatttatattgggttggtaaaaatatattacaactttactaaaccgaccgacgtatacccttactaaatattggctcaaaatcttgtgtattaattaactttagactaccaaattttttcaatacaattaaattattttttaatttataaattttaaattcaaatttaattattaataattatatataaccaaaaattatttggtcaaattaatatgtacaattttaaaataaaaagtatcaaatgaacattattaaaaacacgtactaaatatatcacatatggagaatttcatgatacttttcctcatttatttttatattatggtgaatcaattttttaggaaattccaaatgtcattaaaaaaaatataactcaaaataattaattacacttgtgtatctacaaaatcacaaaaataacccctccactttagtaaaatcttaaaagaactacaatgtttcaacaccacaatcctaaatggaagagttatgagatgagagactagaaaaccaaaattgatttaattattgaatttattgatattagtctttcttttttattatttaaaaaaaaaaaaaaattaatattggttttaaattaagtgacaattggaagtgcatgccaccaccttacacccccatgtggccagctttgatgacactaaaagtttcttccaactattaaaaactattaatctttcataaaatataatatttttagctgtattttttagttaggatgccaaattattagcaaacccatctggacatccctctcttatattaagtaccttatttatttttctatattttattccatattctatttccttctaaaatattctagaacaactgtaaaatcaatcgaacattgtaaactagccgaccaaattagtccatcta

SEQ ID NO: 18876 - DNA, 2706 bp, Cannabis sativa
  modified_base (38)..(51): a, c, t, g, unknown or other
atatgaaagaagccctgaaaaatactcagaaatctgannnnnnnnnnnnnntggactatgcagaatttttactgcaaaatcacgtaaaaaaccctgtattcatattatttcgatagcttttattttttctgtgtgagatcaatattctaaggctctatcttagttaacaaaaatctgtgttaacatctatctttaaagtgcacctcagggacactaattttctcttgtaatttttcatgaggtcttgaagaatcatcacattgtgagctatagacctacctttgatgaatgccccttggttttgatcaatcaagctaggaagcgccacagctagtctcaagcataacaatttaaatatgcatttatagattgtagagcaacaagtattatgtctaaaatctatagctcttataggattctcaatcttaggaattagagaaattagagtcgagtgaaactcaatcgggattttacctgtattaaaaaagtcgttgatagctgcacaaagatctgctccaactttaggccaaagcttcttgaaaaaaccagcaccatacctatctgcacctggagatttcacatctggtatgctgaaaaaatagctctgatttccttgttagagaacgacttgagaaggcaaagttgctggttcaagtcacgtctagaaccttggatgatacaatcagcattcattttattatagatcagatttctactccccatgataccccaaaaatgagacacaaaatgatcaaccacttctgcaaaattattcacaactcaccatgatcattgatgaaagaagtgatactgttttcaagctttcttttttttttttcttttttttttcaggaaagcatgaaaaaaagaagtgttttcatctcctttatgatgccaagtgaccttgcttctttgccttaaaaagtagtgatgtattttttcctgacatatggagtaagcaacaacttctttttccctatcaagaaaagtgtgatccaaagggtgagcttgagattgtaatctagcttcaatatatttggactttgtatcctgaaaagacctgccaatatcaccaatagaatcaaggttaaattttcttaggaaatgttttagtttcaatagcttaagataaattgtctttagccccttagcagcaatcgacttctcccagttttccatcacagtagctttaaactctgggtgttcactccagacattaaagtacttaaatagtttgtaacccatcatgatagtagttgtattagaaatagaacaagagcaatgatcaaatattgtttcccaccgaaacaaagctttggcatgaggaaaagtatcaaaccagtcttcattagcaaagacatgatcaattttagaaaatattctactgtccccttcttgattattagtctaggtgtaggtataaccagaccttggcaaagcttccacatgggctgaggctaaccacaaagaagaatcttgaatgtcattgagagaaatgggattacctctagctctatcatccacattaaacactgcgttaaaatcacctaagatcaaccaaggtttcactcgcacttggttttagcaagtttctcccataagttctttctttcatctatagtgttgtgaccatagacaaaagtgacacaaaaagctttatcacaacttgtcatcttgacaaaacagtgagtatgttgagaagattcagcaatgataatagctctagcaaagcttttcctccaaacaattaataagcaaccttctatagttgaactcgtgtaatgatcccacttagctagtttaatatcaaacatctcttttattttattccccttaagttttgtttccaacaaagcaccaactcccaccttatttttttttttttgacaaaattcagcaacaacatcttgcttatctttattattaatacccctaacattccaacatattatattacatctatccatgagataaaggtaaagattggttaccctcaatttcatgaacatggttctaaaccaaattgccatcatgaaccaaactaccctcatggtcctgcagagcattaaacgagttatcacctgctttgctttcaatgttcgtgtttcgagcttgatgcaccttcccttgactagttttctttggaattcgcaaacctttatcattcttggtttcataactattgagacctttttctggtttttcctcattagccttttcttcattaatagtgcctagttttacagagttgccctgaacctgtgctggtttttcttttgctgaaccaacattcttcttctttaattcatcccttcgacaatcaacaacagtgtggccaaaaccagagcattttgaacacttgactaggagccattcgtactcaattctttgctccattaactgaccatactcattaatgtattgcagagttctcagggggtccttcgtgatatccatttcaaccaagatttaagcaaattgaaccttagttctatccttagtatgttggtctgccattggtttcccaatagtactaacaatagcacttcgactcttactaccccaatattgcagccctaaatcaaaaagacaaatccatagaggcacaaaccttaccaatttgatcgagttcaagtctgttgtccaaggtcgaacaataactggtttctatcgaactgaatgactcctgcctccaaaatctcattc

SEQ ID NO: 18877 - DNA, 1740 bp, Cannabis sativa
tgattatcacgccagtgtaaatttagtgcactgataaattgtgggactaaatgatttgaagcatataattacaattactttttactgtgatggcttcacaattatttggttttatatgtaaggccatctctaacatgaccttataattgaggttatctccaacttgatatatttgacgttgcaggaaataaacatctccaacgtaacattatacctctcttatagtgttggctacaatgcactgcatatatgcagtttcactgcagttactgcatcctagtttcttcttttttatatatataataatgttacatatatttatagaaaattttacaatgcattaattatttgagaaaattttttaattcaatttttttatggtcgtgtatgttatacgtatttatataagacatcatgtaaaattttaaaaaatttataaaaatttagcatgccaaaaatttattaaataatattctttttagtgtaattttttgtgtattaattgtggttagtgtaaaaagagtttgacaccaaatttattgttaaggttagagatgctgatcacatgtgacagttgagctatgtatgggtctccaaatactttttattgaatttttttaattgttctaacagtttatttaatgcgcgccctctttaaattttgtttttaatctacactttggttttctcacagttactttctgcctccatgatctttttttttttttttgaaaactagcgtcatcattcgattaataagataaaatagttagacctcccggtcattataaaaaaggttccccggaaaagaggagaccggaaaagagccatacatccggtgggtgaacacccacttagccacattatgggctacatagttacaagttctactaacattcataaaggtacaacaaataaaagaaggagaggacttaacacaaaaagagacatagttttcaatagcccaatgagactccttcccattgagagcattgatcacttgtcttgagtcactctctacaataacaaatctagcacctaaatccaccgccgtagttaaagccaaacaacaggccacaacttctccacaaaccgcatcaacgaaatccaaccgagccgtgtggatacgaaccaccgtacccagatgattccttgctacaaccgctatgcacatactctccatacccactctaacatcacagttcaatttaatccaatccagaggtggcggctcccatctctcccgcaagattggagtcggactagggataagagaagtacgtaactttgcaaaataagtggaaatactgtcaatacatttcataacatcaggggcggtattattgtgaacaacttcattgcccatcctccagatgttgtcaactacaatcgacgcataaaggaatatatcctcagtacggagacccctatttttaagattccacataaatttcacccagtcccaaacacggattccattgtcacagacagggtaaatgccccaaggtgaagagcgccacaagcgtagcgccacatcacacgacagaaacaagtgttccatagattcctccattaatccacataaaggacatctcaaatcctcgatctgaaaccttctaccaatctcatctctgacaggaagcgcctttgacagaatacaccaccaaagaatcttgtgtctctccagaattttactattccatagcttgttccaaagcgacggagccacctcacagtgac

SEQ ID NO: 18878 - DNA, 7121 bp, Cannabis sativa
  modified_base (45)..(47): a, c, t, g, unknown or other
aaaattttacttttattttgtaattaaaaaattaaaaaacaaaannnttaccaaacggcacctaaattttattttcgtattgtaaattatttaaatttcttttgaaagcatggataatgtagaccatcttataaaaaaatagattacaatctcaccaaaagtcaaaaatattgatgcctttaatatcataaacagtcccattttatgtaattttcacataaaattctaaattttcttttttaattttttttgcatggaatatgacatctttttatgatttttttaattacattcttacggaaaaacaatgtaatagcaatataatataatgtagcaacaacatgaacacaatgtgtaaacaacattatataatgttcttgtgaaaacaacctccatatttttgtaaacaaataaaataataaaatctgtaaaaatgtaaaataatattatagattcgcattttgtgaactttattatctttttttggtaataatgaaaaaaatcccaaaattctacattttttaagggccccttaagacaaatctttaggcccaataggagatatttcgagttccgggaaatctaaaccgttaaattcgttaggatatcaaaattaataattaataattaaaaaattaaaaaattatcgttgccacacgcttagattcatctaagattttttcttacattttctcttcactttctcagtacccaaacagattcactgcctttaatattttcttatcatattttttctcggtgaaaattcaacaatggcgttgaatttctcccagaaactcctctgtttacacacagtacacactcacaaaaccaatccactttctaaatcccaatccattgtccgaaacccaatctgctcagttcgtttccggaatcgttcgctgctcaaatcatcgcctcagaagaactcgaccacttcgaaagagcctgaactcgaaatcactcccggggatgaaacgccgcctcgactgtcgatttccgattctggtgtctctagccttcgtcgtttcaggtttgctttctcttaaaaaaccctcattttcatgtattgagctattcaaagaactcatttcttgtgtgctgtgcttacagtgatgggatttttaagtttgagggactccttcctgagataatgtcaattgctttgcctgctgctttggctcttgctgctgatcccattacatcgttggttgatacaggatttgttggccatataggtatggatcatggtatagctatatatatactagcgtgctttagcgaattatgtgttaattttcttgttttgttaactattactgtcttagggtctgctgaattggctgcggttggggtgtctgttacggtgttcaatgtaattgctaagttctttaatgttccgttgctcaatgtcacaacatctttcgttgctgaagagcaggcatctgctaacaagagcaatgaaaatttatcccaaattggttatggtaatgaaatctagggactttgtgacactttagtgtgttctctgtttgactcggaagtagtgttgttgatggttgatttggtttatggttgtgaaagatttccagggcgaacgccagagcaagacataccttccatcagtatcaacttcgttatcactagctgctattattggcattgctgaagctgtcgctctcttccttgggtcgggcttcattatgaatatcatgggtgtaccagttgtatgtcaaacttagccgttttacaagtttacttaaacttgaactattttcttatggaaagcaactgtagcttttagttttgtatgcttgtattttcattttcatttttgaatgttgattcatttaatggtatgtattccattataaggagtttttttgtgtgtttgaatataggattcaccaatgtggatacctgctcaaaagtttcttaccttaagagcctttggtgctccaccaattgtaattgcacttgctgcacaaggcacatttcgtggatttaaggataccaagactcctctttatgcaataggcaagtgtttctgcacctcctcctatgcttatgtggttgtgaattccaacaatataactgtagattttcaatgtcactgaactttactgttagccacctacatggatcctaaagtttctgtccaattttgaacgtgaagttgtaaattacgcattgcaaattatttccttccagttgtgtttagccaacgaatagttcttgttgagaaagtaatatttcaaagcattctggaaatatattgtaaaagaaatagcgatatagatcacacagttgatggtgtttgtagtgatagcctaaggacagactcgtgtttatggagcattacttaggcattgtgtcttcttttgtccagtttctgttttcagagtagtattattcatttttagtttttgtttaatttgtagcataaattagcattttttagactacctactaaatatgccgtattttaattggtttgagttttggaattgtttaagaccggaaatcctcatttattatctccttttacccttgttctactattgttttggttctgcattgacatttcttttcagaagtgtaaattaattatgtcaatgacttgtgccttttctggaatatcagttgctggaaacctgcttaatgctatattggatccaattttgatcttcagttttggactagggattgagggtgcagcaatttctactgtgatttctgagtacgtcaagtgatgtggtaatttttatttaattaacataattttaacttgatctctgtcttcaaattgttatgcctttttttcctgagacactttcatgtgtttttcaccagatatttgattgcttttattcttctctggaaattgagtggagaaatgttgttaatccctgctaacatcgatgggagaagaattttcaagtatctcacatctggtatgttatttgccacctacatatgcgtggtttatattgtttttcatctaataaaaaacggtacttgtggtatgaaaattagacaaggaaaaggtacagtgaaaattttaaatgactgaaggacaaaggggttgtgtttgtggaagaaaattatcccctcattaacttcataaatgtaatgattgatgattactgagctagaatgtaaggatgatttccttgtcattatctataacttgtcttttatttataaatacaagtctcctttcaattttaaaaatagaacgagctagaatggaacagtttagtgttcacttatgtgacagctgatattcttgaatataagatttgactgttcttctgaatctagattgggtaaaatgttcattcgttgatgacgcaaaaccagctcaattatatcatatacaacatatgtacatgtatatgtaaaaattgtatttaaatatgaagtagaccgttatagacctttgcatcttctcacaaatgtctattttatatcttcaggcggaggttaaatactgtctcatggggttgaaaaaatagtttcagttactttttggtcataccaatgcatgcagtagagattatgtcaatgaccatataatatgtagatctgatcacacgaaggattatttcaatatttactgaattaattgaattgagagtatgggactatgtctaaacagatcaaagagaatgtataattacgatttagaatgtcatgagaatgttcaatgtagacttatatgttacaagaaatggggatttgatcactttgacacttggactagtgtacttaaattaatcatatttcattatgataatggtccaggaaagaatcttattgatgattcagtgcctatctatacaaaagtgtttgttacatatgcattttcttgataacttatagattcgtttattgttttctgcaggcggtcttcttgttggtagaaccatagcagtgcttacgcctataacactagctacatccatggcagcccgagaaggtcccgtaaatatggctggttaccaaatatgcactgaagtttggttggcaatatctctgcttactgatgctttggcacttgctggtcaggtgttgtattttctacatatctcttaaactatcaactagagaaaaaaattcttattaaattcttgagagcaagttaaaaaatttctaaaaatatcctagcagttataaaataagcaactaaacaagagctttgagtttacaatgagactttattgggagagaagtaagctttttctggcacataatatctaagtggaagggctgtaatattcgatgaatggtagactgtcagaatcaaggttgtaagattgcaaattctaattactgcatggtgtttttctcagacgcttcttgcaagtggttattctgaaagaaattatgaacagtcccgccgggtgatttacagcattctccaggttaacagattccacaatttctttttgcaatctgatctacttcctcctttctacatgggatttttttttcttggctgacctaaaacatcaacgttaccatgatttgatttggagcagataggcttagtgatgggaacaggcctggccattatattatttcttgggtttggtgctttttctagcttattcaccacagattcagaagttttggatgttgccttgtctggttcactggtaagggaaagaatatgtttgagcaatttaatagttgcatagctagcttatgcattttcatctttcacgataagaatcataattagagatctaataggtatacttaaggccagcggcacatgtgaaacaaatttcagagggagccaagtaataatcctgaacaaattgctcaataacatggttgatttcacaatttcatattgtatagataatcatttttattttatgaggcaatgcccctccccttgtcctataaatgcttaaggaaaggtcttcaccaatgtgctaacatatatatatatatatatataatctgggacattcggttgtttaattttattactctatgaagttcctagaaatttctatatgccaatagtagaagaaatttttaggaattattaggcataccaaatagtggaggtctggtcaattatggcagaaccgagaatgacatccctaaactcagtttatatgctagggagttcgtgataatttattataaaccaaagtacatagcaaagaacattctttcctctcgggacatctactttttttatggctcttggacattcttttcctagtataatagtagtttaaatggaaaagttgagttgcaaaataagctataaaccactaaaatagtagaaagggatacacaaagtgaccttgattaatataagaagtagagctatattactggagttactagcgcaccctttagcaacatcagaatgattgagttttgagataagtagggggctagtgattatatactgaaggcagaaaactatctttgtaatatgcatgcaaatgggtatcttatgatcatgatttagacgagtatctttttatgacttctggaccttatactgcttggcatatatgattatcagttcgttgctggatcccaaccaatgaatgcattggcatttgttattgatggactctattatggagtttcagactttgcatatgctgcatattccatggtaagtagctaaccttatggggaaccgttaatcatttagtatgatacgtacttttccctcatcaatttttttttttgttgtttaggtgtttgctggacttatttcttctgtcttcattctggctgctgctcctgcatttggtctagctggaatctgggctgggttgtttctcttcatgacattgcgtgtaggagctggaatttggaggtaatttagatttgtggtatccttttagctctatacgatttgtcctttggaactgctttaatatgcaactaaactaaacaagaacaggttttactcctctctcatagattttagaccacaataattttcatgcttaacagtgccatgatatagaacttaggctaattagaatttttttctcctgaactttgacatgtaccaaatcatactccttgaactttcctgactgttaaaattttctcctgaactatttaggtgattgtccgtgtactaaattatactcttttaactttgatatctactaaatcatgcccctcaaaatttgacatgtaccaaatcatactttctgaatttcgattcatattagacttttcttactaaaattggacaaaagtccttaaattctaaatttcaataattcaggagaaatttgtaacgactttaaaagttcagggagtatgatttagtatatgtcaaagttcgggaagcaaaaatcttaattagcctagaacttaagttagaattgtggccataagtcaataactagcctctcaaattttacacaccaggaactatccaatcaaaatgccaatctgctgtaaccttgaacattttgatcatgactaatgctctgccattcaggttgagcacgaaaagtggaccttgggaaaggatatgggacacaccagaattggaaagtgaatgagatgtggtggaattctctgattcttgtgttgaagttgtaggaattgcgacgagatgtataatttattttacactcggtccaacaagcagccttagctttcacactgttacacgagttgcattgcatcatggtgtgctcaaagacccaattcttttgtcatccagatgaattggatttgcttttagtgaggttctaaccaaccattcatttagttgcacaatgggtcaattgaggagattcaagaacaacttggtttgtattccttgccaggttcatgattctttttcactattggtgtacatattatttttatgttctctttagcagtagcttcacatagatcatatacctaagaggtacttgtaatagaactgccatttattgactgtaaatagctacacgctcttgtaaaggagagaaaaaaaaaaatagggtaattagtggcgaaatttttatttgttttaatttcatacacttaaccctttgatctttatttttggtggcaataccctcttaagtttacttttatttacaaatgtaaggtgtcagttaaat

SEQ ID NO: 18879 - DNA, 1960 bp, Cannabis sativa
  modified_base (572)..(573): a, c, t, g, unknown or other
tcttaataatattataatatgaatttatgaatattttttttttttttttaagaatgccaaaaactttgtttatcataaaattaatgtaaatattaatgtaaatatgaattaacagataattaattaaaataattagaaaatgaataaaaatttgaaaaagaaaaatgagaaaatagaaaaattagctctttaaaagcttaaaggattacatcacctatcctaacattagaattgtataattatataaatataaatatatagatagatatataaatatagctatatagagaactatttagggtgtgagttatgaaaataaaagccactatattaatcatatttatgaatgatttgatgatattttttatttataggtagttatttaggatgtgagttatcaaaaataaaaagacattatattaatatcctattaataaatgatttaataatttatttaaataaattaataaatttttttaataaataagaaaatggaaaaaataaagaataagaaagatagctcatatatgatgtcacatagcctctttcaaaaccttcctttatatatatanntatatatatatatattgattagttattatgggctattaatataaataatataaattatgaatttgtgagatttttaagtaaaatatatttatttaatgtgatatttagtatgaaggtggtatttaatatgaatcattagaattgttgcattaaccgtaaaagattatacactaaattgatgcaaaaaaaaaaaaaacaccagaatagtgtaaccattagagaaagttttataaaaagagaatataaagtgaggaaataacgttctaaaatcacttcaaaatattaattattttttcctttttttaattcacttttatcaatttatcattgaaatatataaaatggttattgaagaaaaaataatataaatatctttgtactttttaaaattaattataagaaaaaaatatgtttttctataaaaatattgactaaaaaaaattaagtttatacatataaaagaattataaacgattagtttctgtattattttattttatattatctgttgacgtgatttttcgttaattgatttaagaagatcataaaaataagaagactatgctgaagtaatattggattaaataaaaccgctaaaagatgaaagaagacaccaggatttataatagttcaccccatgtcaagataataatagggctacatctactttatattttattggttggacccaacacaccagaattatgttctcaagtgtgtgtgaatgatattacagaaaaaatttctaagagaaatctatatcaaaacttatgaacgatggatcatgagagaccaacaattcacaatccaacaatcatggaccaatgttcttgagaacagaggtgaaaaggaagcaaaaagagaaattggtctctaattcttggtgaattcgtgtctccaatgattgggtctctcaatgtattactactacctgcctcaatatttgtcttaatgggggacctgttggtaagatttttccctcctgcggcctccgacaaggtgatcccttatctccctatctttttatctgggcggcagaaatactatctaggatgctggaaaatgcccaaaagttggggatcattaaggggatcaggctgagtagggggggccctcttctttctcatattttctttgccgatgatctcattcttgtcgggaaagctaatacggaggaggccaagggttactgggattgtctggagaaattctgttcttggtcgggacaaaaagtgaataaaatgaagacctcaattttctttagtaagaatactcccaataatatgaagcagaggataagggagatgttgggtttaggatcgccagaaggtaatgttaattatttggggcttcctctattcagatcaaaacaaaaggatgcagattt

SEQ ID NO: 18880 - DNA, 4783 bp, Cannabis sativa
tatgagcaagaaaaacaaaatctttcatccaatttgaactaatacaagttaaaaagaaagaaactgaactaagacaaattcaaggcaaattcattcaagaccataaaccagtgaagattttaagcatattacattgaacacctttcaaaactattcaaaatttcacatatatgaactcatctcagatgaatggctgctaaaatcaacagttacatcacttatgagcaagaaaaacaaaatcttccatcaaatttgaactaattacaaaactgaataaccccaaatcatagtttaaacaaaaaaaaaagatcatttttttcaaaaatctttctcagtaaccaatatatgggtattaaacaagaaggtctagatcttagactaaatcttcaaaattcaacatctctgcacctaaaatgaaattgaaaacaagaaaaaaaaaaaccttttgaaaaaaagatagatcctttcatcaatatttgttcagataatagctctaaacaaagttcagaaagatacccatgtctacaaattaacaaagaaaacccattaaatcaaaagaagagagaaaaagagagatacccgactgaagcctctgaaagacatggcagcaaacaaagtgtttggctatggaaccaaagaaaaacagtgaaagaaagaagagaagagaagagaagaagattacaaaatattattgtaattagcttttgttaaattctgaagagaaagaaagaaagaaaaaaaaggtggaagattcttattgtaaggagaggaaatgaacatatatgaagaaagggtgccttaataccattcccatttctcttctctttatcttttctttcttgtgtataactttcttttcttttttcttttgaattttacttctttttgtaaagataaatatgtttgtaaaatatatttttcaattaaaaaaaataattggtctaattttggtatcttaaaattatttttttaaaaaaaaattgttataaaaaaatctgaaattttagatggtgtggtatagatttattgatttgatataaattataagatattaaaataagagtaattagaggcgaaagtatctggttttcaagtttatagcacttagatttctattttctcttttcgactaagatacttctatttcaatttttggcggtagtaagtccttaaatgttaattttcatgtcatgtcaattgtggatagagaaaaatatctattaaatgatttttttaacttacagttaaaaaaaattactgattaattggctaaagtttagctttaaattttagatctcttgcgatttttattctaaaataaaaaattaaacttcatgtaaagtacttttttcgcttcgctataatgattaacttcttcttaaagtactttttggatttagcggttaaattgtatggttaatctaattaaattttaaaatgaaatttaaaagtctagccaactaagatctatattatcagggtggttgtttgattagcacaatttttgaaattaaaccaaaaaaaaaaagaacattgcttttttgtttggaattgaattaggtatgttggtaaaacattgttgaagttttagggtaatcaaattaggccaaataattcagattattgtgagtggtcaaatttgactataacaagactaaacatatctaaaacgtgtagcccaatttcatattccctattaaatattttcctatttaagacaaaatacataaaaaaaaaaaaattaattattacctcaattaatataaacgttagcattatgtgaaaaaaaaaaaaaaaaactgaaatttgtttactattgaccattgagtagtataagttataaaatagaaaaaaagaatattattgagtagttttattttctaaaaaataattcaaatataaataaataaagataagaaaagaaaagtcggtggaccaacaaatctaattttattattaaataaataaataaataaataaagtagaggtgagattgggaagggaggtgcgttatactaacgcttgtttaagtttttttattttttattttttattttttgacttgtgccaattgtttctttgttgaccaataaggggctaagaatctagtgtgctacttgcacgtgtgagtgttcattggaccctacctcctattagagttgatgaaaataaaaatgttaaatttaatcgacaaattaaattttagagaattattttatatattattttttaattttttttttgtttttataatttgggttgctttattgatttctatgtgaattgctatatgaatttaagttgcgatttaaatttctgttagttgttatgtggatttctctaaaaaaaaaatgcaaaagaaattactttaaaaattaaaataaaaaaactccttaaattttagttaaaaaatttgtatttttaagtgggtcttactttttaaattaaaatgatgataatattaatagagtcttgtattttcttaatttaaactctttcaaactctagtccatccaattcaaaactcacgtaacaaaactcgataatgtttgacattatttttagaaattaaaagagtgatattattattagtaaaatttaatattaaacttgatgtattttaatttaataataattataaaaattattaattattcaaaaatttatcttggtatcaaatacttatataatattagtatctaataataatattcactattaataattatcgtgtctaatatcatataaacaacctcttataaatagttaacaattttttatttatttattaaattaaaacatataaaatttaatattagattatcaatttctttattttattaagatgtacaaataattatttcattttcttcttatcatcatttactcacttttagcctacacctttccgtagaggataagaataattggttcactgggtcccaccgtctccacgtcagcagcggtatctgctaattctgctcgccgcgtcttcgtcttcgtttgtttattaccaaagtcaaggtaggtacaattgggccgataattctaagtctaggcccaaacgtcaacaggcccaatattaattttatttttattgaaaaaacgacgattttcgtgaagtcgtatcgatttttgactatctcctccgacgaactaacatttttttttggacggaaaataaccctagaaagcaaaattgagtaaattgagtgccctaatttcttgagaagatttgggatttagattttagggtttatgcaaagtttgtttctttgaagaatcttgttttatttcgtaagagaaagatggatacagaaggtactgatttgaaatctttttcaatttatactttttttaaaaaaaaaaaaattgattttgatttttgtttctttttcagcgcaaaagtcttcgttgaacccaacggcaatgctctcttctgctctaagtaggagagccaagctccaagaagatcttcgaaacattgaaaaacaggtaaagatttattctttaatatctttgtctttttagggttggtaattttttttttttttgttttggttgcatatatgtaaaattgatgtgggaagaaaagggcattatctcaatatcatccatttcaataattttcctagttcatagttcacaattcataatggttttccattgttgaaacaggtgtatgatatggagaccagttacttgcaggatccaagccagtgtggcaatgtgttaaaaggttttgatggattcttgtcctcatctaagaacactgccctgtatggagtaacactgctatttcattttctccattttatatctttatgatttttcattttagtctttttagtatgtgatgattttatattctaagttaatcaattttagcttgaaaatcagctcattgggatcagttatttatgctaggcatgactaaattaagttcatgtattccacagtctcttacactcatcctcatcattatccctattagtcactactagaataaatctcaatgttatgtatttgagaaatcattcatcagatgagaaacatgctgatacatctccaatgaggttcactaagttgttttagtggtttcattgctaatagttgttgattatgttctgttaggagttttattagtaggttgttatgtttctgttaagagcagtagttagtggagcagtatgaataagtgattagtagttgttataatgagttttagactcttgggagattggctatctcgaattagctactgttatcttgtattgtgttgtactcagtctctaattgaggctagggtttgagaaataaaagtaagatttctggtgtgtttgtgagggttcttggctgagattttgagagaacttatcacatgcttatgaatgggtttacttctaaatgtattatcgaaaggttactcttatgttatgcgcaatgaaagtcctcaaatattgtgtatgcagcacgaagcggtctaggaagtttcagcctgaagatagactcttctcattgtcttctgtcacatcaccagcggtaatgatttaattgagatcacttggcttatgttctgatctagagcaacattttatgaaaagttgtcatgttaagtacatatttcagatgttgaactatctttgtagataccccttatgattcctttgatacacttattcctgccttttctttttccccttttttccatagggtcttgatgctttgttcatcttttttttttctttctctttgagagttcctatgatcttgtctatgagtt

SEQ ID NO: 18881 - DNA, 2548 bp, Cannabis sativa
aaatgagtgaacaacaaattaacagagtagtagatagatgcctctggttttagcagaaccaacctaccatttcgatatttgggaatcccattatgtgctaaacagctcgtcagcaacggaatgtgattcactgttggaaaaaatggctctaagaataagagtttggagcactaaaaacctgtcatatgctcgccgagctacattggtgaactcagttctcttggctatccactcttattgggctcaaattatgattcttccaaagaagtttctacaaagagttaactcggtttgtaggaatttcttgtgagataaaatgtgtacaacaaagtgagaagtagcaatagagaaatatgaatggatagttgaaactaaacaagatacgttgtgggtcaattggagcctggagggactacaaagctccgtcaaacagaagctggtattggaaacaagtagtcatgattaaagataaattcaacaatcttcactcgggtatggttttaacaagtccttatcacatcaaagaagttacaaagcattgtgtcctcctcaacaaaaggcttcttggcaaggtgaggtattggaatagactttcaatttcgaatcacaaatcttcttttcttgtcacttgagttctggttgtttgaaggttattagaaggcaactttttgcagcggccttggtatatcagatgtggcattgtcgaaatggctacatgaaatttaaaggtatacacaataggagcaattgtgaagaaaatacaatatgatgtaaaacatagaattagaaggatgatgcccaaaaaagtctctaacatagattgattaatgcagtctatagagtccaatgaaaactctttccatgggtgaattttggttcaacaatggccaaaccatttatgaaaattaatacattttgctattaaataaatatcaaataaataaataaataaatagatgattaaaatgtatatgtaaagatggtattaaacaaacatagtataaatataagcattaacaaaagcacataagcaagattaaatcgacttatgattggaacttgggaggaagtggcatatgattggttgtgtgagttccattctttttttctctatgattaaatatttatttacttatttactatcaatgaatgcagattttgaggttggctatacatgaatttaagtgggagaaatgtgtttgttcatttggaataaaatgtgtaatatttgggttgtgttttaatgttttttttcccacaattacaatacatatcagtcattttcaaaacccattttgtaaaccatagaatgaacttctcttcccttattcaactccatcaaaccaacacaagctttaagcacaatcgaaaaagagaacttattagcagtaatccccaattctttcatcaaagaaaaatacccaattgattctttataactcccattaaaagcagaagcaaaaaccaaccaattcaaagcaaaaacatttggcttaggaattttatcaaacacatactttgcatccctcatatctccacaacttgcatacatacccacaagctttgaattcaacgacaacaaattcatgttcattcagtgattaacaacaccccatgaatctgcttgccttgtctcaaagcttttcctttgaggcatttattcaaacacaaagccaactggtctggggaggaatttaacgttttttcatgattttttagaaccccatttgggaatcaaacccatgaatcgtattccatggcgttgtttatattgatatgaagaattgaaactataacaactacatagaatcttttgcttgaatgaagaggaaatagagaaagaaaggaaaaaaaactactcctacgagttcagaagaaaaatttaacttcatgcaacaatattgtcgtttcaaggaaagatgtcgttttgcttctttattaagaaaatgtcgtttttcttcatgcaacaatattgtcgtttattaagaaaagtgtcgttttaatgcatgaaaaattactgtcgtgtatttataaaagtgtcgtttttttaatgtaacaatattgtcgtttatctacagaagtgtcgttttaagaaaaaaatctcgtttttcttcttcattaagaaaagtgtcgtttttcttcatgcaaaaatattgtcgtttattaagaaacgtgtcgtttttcttgatgcaacaatattgtcgtttattttcagcaaaaaaacaatattgtcgtttattaataaatatgtcgtttttaataaaaaatttcagaaaaaaatgtcctttttcaagagttcgttttttgttttgtattttacactgttgtttaacgaatttaatttatgtatgtaatattcatccaaatcctcaataaatatcatttagtttctggtggtaaagaagaaatatctgtaataatgccacaatttttttttggaaatttgttaattgatttgtgtgatttgtgctataaaacaatatatataatacaaagcaggcattgttgaatatgcatatggtactgtaggctacttttcttccatcaa

SEQ ID NO: 18882 - DNA, 8533 bp, Cannabis sativa
aagaactcaaacacattgttcatgtttttcgtgactcaaagagccaataatgacaacgaatgtcagattcagatcttttttatctagaaatcacacattatatatcctctatcatggggatcaaaataccgaaaggacaacaatctaacataggaatcaaaggatattcaaagcaaagaacaatgttcatgcattcatggcaaaatcaaccaaatcaagtaaaatagtaggaatagaaagcttacccacaacaagaaattgctaagaaagaaggtgggaagcttggatcgtcgaaaggacgcaaaaatccagagagattaatgcttggtaggttcggccctctagagagaaggaggagcttcttcaaatgtcaatttctaatgagagaagtaaaaagtaaaaagtgaaaagggtttccccccaaaagcacttatatagtacatgtgagaccccttcttcacttgcttcacctacacaacaaagagcaaataaagtagttagtttactacaataattgagattagacagtcaaggcaaagtatttcaaagggctaaaacgcaacaacttttattcagcaaatgctacatcagttccaaccgcaccaatctaattagtaagttcatatccgtacagacatctacacagggacttggggggcaaatgttatcctgatttttgcccacctgaggtggcattacttacgtgggaaaaattagcactatgtggcaatacaactcaccaacaataaggccaagtcagtacctcagctaacagggatcccgacactcaaaggggacatcaagtgatagaccatcttcctcatagaagttggcccgccacccctggctagccctatggccggccaacctctgaataacacatggttggacaacctacttcctgcaggtgtctggccggctagggaagggcctgtcatgattttctgtgcaattccacacgtggactatgagttgggccctaacaacccaataaaacagttggaaaatatctatgtttaagggcattttgttctttagtaattaactaatttaatatacaaatatctaagggtttcagttgtaaattagggtttaggctttcttatataaatgccttaactctaacctataaaacctaagtctcattctagcctccaagtgataaagctctaagcctaaatctctaagtctgataactctcttcctcacactctctctcacatgcccatacaagcattctcaacacttgagatttgccaaccttgatttctactgtgtatccttaagggagctatatcagatcccacctatagtgatctgaatagtattatccctcggtatcaatacaactaaaagagaagtaggtcattacccgctatctaagggcgccgaactgctataaaaattatgtgtgttctttactcccttattctaattgtgtaacacgtggcaaacattatattcatatgacactgctattggttgaccacttttcgaggtcaacacaccctattcgacccaatttcaggttggattgggtggattgacgggcccaaccctagcatgtgcacccataattataagttgggataattacacaaagcactattttttgtaaaaaatttatatttttacatttaaagatttttttttttatatttttacgattttgtatagaaataatacgaaaacaatacgaaactacataaaagtaacatgaaaataacatcataataacataaaatataacatatcgataataaaaaatcaacaacaaattaacaagagtacaacataaaattatcgtattttctataaataaaatggtcaaagtcattataatatttaattattctaaagaaccgtatttttagtatttgtgaaataatctcttataagtttccaaacaaatatattctctcttttattgttggaaattaaattatgttaagcctttcataccaaacgctgcattgaagtacagaaaatccagtaaaagaaaataaaattatacggaggagtaaggttgtccacaaaggtagggagtagtgtgacttgaggttgtgaaaagacgcgggaatatggcggagatttggttgggtccccgtccctgtaacactactactcacacgctactcctccccaagttccctttctcatttcctttcatttccatggctgctcctctctaccttccctcctcaaaatccacccactgtcgttcctcttcgtcttctaatcccaaccctgggccgtcacagccctctttgctcgtattctcaggtggtactgccttcaatggcgtcgtcgaagaccttaagacttacaccactcgtgtcgctcatgttcttcctgtttctgatgatggaggaagtacggctgagattgttcgcgtcctcggtacgtactactcacatttggggctctgtagcttttgtacgtattaggatttaactgttcgatctaaattatttgatgttttcttttctaatgtgatcaggtggccctgcggttggtgatatccggtcaagatgtttgaggctgtctgatgagagtacttctgaggcacttgctgtccggagactccttggtcatcgtttaacgctcgatccgcgccaagccaaatgcgaatggtgactctcttcctacatttaaattgtttgctttctattaattcagtaattgtcttataataatagtacagtaatttggtggattctagacaattccgtatatggcattacttggtgtgatgaagtatttaactggttcttgcgtttaaatagtattaaatgggattgttgcagtgtttcgtttattgtttgttattctccccttgcattcatgtgtttgtgtgtttgaatttactatactagatttagattacattagatagaaaacagggtatacacagcgatatttgtgcgaaagctcagttaatggaatgctgagacatagcctctcatttataggaaaacaaatacacagtgattcaattagatgccgatgggaacctattgaaagtgacactgggatcagaagagactattataggcgaaggggtgtgctgtgattcaaaattgtcatctccatttaatgcttttacctctagtctatcaaatgttgtgatttctaggattatcaacaaagttcttggtacttttctatggaaaacatcagttttcgaagagataagagcatataaacagaatgcaacttggagactagtgcagttgccatcggacaagaatgtaatagggtgcaactgagtgttcactgtcaaataaaatgcaaatggatctattgagagttaaaaagcctaattagttgccaacagttttattcaaaattatggaattgactaagctgaaacatttggtacgattttcaaactcaacactatcaatgtattactttctctagtagttaacctagattgggcgctgcatcaacctaatgtaaaaaatgcattcttgaatgggtgagtagaagaagtgtacatgagcatggttcaatgcctatttagaacaaaatgaagtctacaagctaaacaaatcactctattgcatagaacaatctcttcgagcatggttcaatcgttttttgaaagtagtcaaagggcttggatacaagccaggctaggctgattgtacgtcgatgacataattgtcactagtgactacattgaagagatgaattcgatcaaataaatgttggcaaaggagttcaaagtcaaggatcttggttaacttaggtattttatgggagtggaatttgttagaagcaagaggtatttttgtgtcccaaagaaagtactcttgacctcttaaaagagacgcttggatagaagaggaaaatatttgaaggaagtccagttgacaaagaaaggtactgacagctagtaggaaatcttatctacctcacaaactagaccaaacattgcctttgcagtaagtatggtcagtcaacatatgcataatctgtgtcaaggacatctcaatgcagtgtagaaaatattgtatttattaggatttattcgatatcattatgataggaaagctagttgtataaatatttttatatttagattattctattatgggttagaatttctataatttactttaaatattttggtattaagtactagatttgttagggttgtacaatgcctattgataggtattattcgtcatgaataagaatgtcagtcttattttccacatggtatcagatctcaacctaagaatttcgaaaattttgttcactctcagccttctttatttactcagggttgccattgcagaaaacatcagattccaccacctcagaaaacaatttggccattgctcccaatctaaaaaattgttctgatccttcacccactacctttaacaaccaaaactttccaaatgactatccacaaacatggtcaaaattttcttcgatggtcacaatctgtcaagatgcatctctggggtaggggacattgggctacttgacttaaaatactacgactccagatgctgccaactcaccctatgcctagtggggagctgaaaagtctctcattatgccctagttaatcaacacaatggaggtagatattggtaagacagttatttctttctacaactaatgaggtgtgggaaattgttcaagaagcgttctttgatttggaaagctcaacacaagtttttgaactcatattaaaacttcaagattagcatcaaaactcatggtaacccaatactataatattctttataatatgtggcaagaaattgtcatgttttatgttcctgaatggaaatgttctgatgatgcatttgcctaccaagaaatacttgatcatgagaggctatttgattttctcctcacccttaattgtgaacttgatgaggttcctgggcgattgttgggaaatgttgaaaatatgaacctaatccgtaaagatttggaaacttattgtacaatattaattcagttattctgaattatttgttcccttgtatagtcatttccttccatgtttattagtgattagaatagtctagaatattttgtatttatttggttatattttgtatctgcctatttaaaggctctaaccctatcaaataaaatacattagagttttagtctcttaagtttttaggaaaagttgctctctcttctattcgtgaatcatttttctgaagtccggtgagaggagagttgcaagagtgttatgttggggtcttcagctgatatagtccaatttgctcttgttgcccatcgtcctaatactcttcgagaacgaccttattatactcaccgcaacacacactaaagaaacttgctgcattctccatggtaagcccgttgattggaaaccacgcttatcaaacaggctacctcaggagagatttgtttaaaatatttgttcactgtgttattttaaaataaacacttgagcatacttaatgtgaaatttgtccgttcgctaaacatacttgtgctattttcgattctatgcaatagagtagcatagaaccatgcatagaacaatcacgcttagcccgcagcaacttcgattacaatgaggaaaacgagctcgaacaagtagagactccaggtgctgttgaagtatccttaaattcagtttcgagattgacaactccaaaaaccatgaagattaatggtatggtgcccaaccggggagtggtggtgctcatcgacttggagcgacccttaattttatctacaatgatttggcaaccaagaataagcttccattgatcaagatgggaacctatggaaagtgacactgggatcagaagagactattataggcgaaggggtgttatgtgattcaaaattgtcatctccatttaatgcttttacctctagtctatcaaatgttgtgatttccaggattatcaacaaagttcttggtacttttctatggaaaacatcagttctcgaagagataagagcatataaacagaatgcaacttggagactagtggagttgccatcggacaagaatgtaaaagggtgcaactgagtgttcactgtcaaataaaatgcaaatggatctattgagagttaaaaagcctaattagttgccaacaattttattcaaacttatggaattgactaagctgaaacatttggtacgattttcaaactcaacactattagtgtattactttctctagcagttaacctagattgggcgctgcatcaacctattgtaaaagatgcattcttgaatgggtgagtagaagaagtgtacatgagcatggttgaatgcctatttagaacaactgaagtctacaagctaaacaagcactctattgcatagaacaatcactcttagaccgcatcagaatttttaaaataaacacttgagcatacttaatgtgaaatttgttcgttcgctaaacatacttgtgctattttcgattctattccatccaaagcatctcagccttttacacttattcatagtggtatttggggaccacctgaaataacaattctaaaataacaaaattcatagtgatgtatgggacccttctaaagattgatggaggaattatcaacattaggtatgtacttacggatcaataactggctgatattctcacaatggggttatccgagtgagtatttgatttcatagtaaacaagtttggactactaatatctataatataagaagaaatcaaatcctatgatttgattgtagctgtaatttcttagtttccatatttataggatttgtagttaactatatttactatgctttattctgtaattaaggatattagttgcatactgattgtatttgtggtacggattgtatactgaaaagaaacaaaaataataaacaaatatttttctctccattgttacactataactcagaaatacgagttttggttccatgatattgtcatggaaattatttttttgagaccactcagaaatacctctgtgatgcaaaattttagttttgttgttttttgtttacctatgttgtgaaatacacttattttgtcgtttataggtataatattgttgaaggcgaacactctttgtggagaggtgtatcgaaaccttacagggaaacaatacgtgcatttctggtttattttcagaaccaggtgaacattaggtgcatttcgaatatgttctgcatttataattgctgtttgcattgtggcttctattaatggaacttttacatgttttatcgttgtcttttttgcattatagccgttgttttagtttttccttagaaacagtatcactttaataattctttttaaatgttttaacttttagtaatttagttaagctctccaattggcttttttcttaatgcagattcttcgacgagctgatgattcattttgttttagcaatggcaggtaacacttttcatttttaattgtagttaaatctttggtttcgctctatatatgtatgtattgttgctttacaagtttctgtgattccctttaataagttcatcaatcagactgaagctcaacatttctgaattgaactgacgtcatcatgttcgcagcattggcaatttctttttcgcaggagcgcgtatattttttcagtctttagatgctgcaatatttttgttctcacgtgtttcagatatcccttctgaaagtttggtcctcccagtgatttcaagcaacgacaggctgacattaggatgtgaattaatggtgggattttgatctgtacttttatccatctgcaaaatgtatacggaaaccacacaatgaaacttgtatggaactgatagcatgtaaaaatgatagtttagataagaaatcttatgttgcaagttcttaattgtgtttatgtcagtccttacatgtcaaagtcttagtttcctctttctggttctgacacctttttggcttaattacttgtattattttaattgattaaataccaagttactcattaatggagaagctttattgttttgattccttttaggcttttttaacctatattcgctttatttgtcatggctaagtcatcaatatgggtactattgcttaactcttttctacattttcgtcatcaaggatgggactgtcatacggggtcagaatgcaatttctcatccaaccaatggatctatggaacctatcaacaaggtagaatagttttcatcaactgctctgtttggtggtgttgtaattgcttttgttcagtatattgtcatctgaaacatctaaacttattcttattgacatttgatcctgactaataatattttgtgaatgatggtggctgtgctgtggtgcttcagaagtggaaaagatttgtggtggctttgaaattaggcaaaaatatgtattagtcacccaattttttggttttccatttgtgtgctaggcaaacattaggtggtgtgataggccttaggatattaaataaaaggggcataagggtaattgtaatgaggcattagtattatatatatgagtgactagaaaaggaaaaggtg

SEQ ID NO: 18883 - DNA, 2475 bp, Cannabis sativa
caagtgttaagaggtactcaataaattgcagatgagtcagcctcatgtatttaaaatgcattaccaactttcttatcaaaattatattcatgaatcatgattaatgttgagacttttgcacttacaacttcaagcaccgtgagtgtctacaattgcactgtttttgcttcttaggtgtaccgtctttcacttcattgggtcttgatctcgatttcggggaatctggctttctgaagaaagaaattaacattcataagaaatttgattcatataaacaaagcttttatattaagactttcacatagttccatatctttatctggacatctgccagttcacaagccaaaagttttcagcttttacaaacatttatttagtaaatgcatcgaagacacaagacagagatccacacaaataactgcagtggaactgacaccaaaacaaggtagaaggaatagcaaggaccccggcatatgctgtatggttcggttttagttatgattcttctctgaactatgagccctaagggaaactattttgtttagtaaattagtatgagctcacattcactagccactaatgtaaaaatatgaatggaaatagaatacagttaatagcttcctcaaacatccttgacaagccaaaaactttggaaagcacatacatgtttacgctgtccttggcttggaacacttgttcacgaattgttaaaacagatatcaactacttcaatataccaacaaaaattccttttttaaaaaaaataacaaaaaagacatgaagacagaagattttcaaatcttccataccaccacagtatagaaataaaataacggccattgatgtactagagcctaaagcacaaaataaccaaattttaacttctggaatagatggacaaaacccagcatgaaattccacggatataataccttcactatttaagatcaaaacttcaatgttagaactttttcaagaaaaccctcccataatacaagcacatacatttgaaagtccataaacaaatactgtcaactcgaccacaaatttaggccgaaaaaaaaaatcaatttaaatttgaagttttcaacttttatagtctttcctcgaagaaatcacgtcaccagaaaccacacttgagctaattaagagtataattagcttaaacaagaatacttacactatcctcgctgaaggaaccgatggttgaggcatcactggcccggtcactaccggcggctgcggctgactctgcaccactggctgcggcagtggctgcgtcaccgttactggctgcggtggcaataccagttgcgactgatgatgctccggtaaaaccacactacccggggccccaccataacccgtgaaatcgagttgcctcgccagtttcttcgtcggagcatcagataacgctatactgctccctcccgcaccatccgattgtattttctttggtggcaaatcgccttcctcaccttcccccataaaattcaaattcgaattttaaaaaataaaatctccaaattcgaattttatttcaaaatattaaatactaagaaatattcaatccactgattgctcccaaaataatcactgaaattccagaaatcagcttaaatagatatggtttcagatccaaatgcccaaatatgattcaaatttgccgaaaccacgcgatttcacagttgaaggctcgtcaaagaatggccgaaatccaagaagtaagtttcttaatacagaacaaaaaacagagtaaaacctagagagagaaacagtcacagggatagtgtgtgtgtgaagctgagattgtagagagagagaaagtttcgaacgatagaggaatggaggagaaagagaagaagaaagggaagagatgaccaaaggcccttttgtttgttcttcgtctctcctccctctctctcccgagcttttgaaattcaattttgtaaataatggacggtcagatccgcatgctgggcccaatccaacggcgaatattgattaaagtcatctcacggtccaaattcatagaagtgaggttagtgagtgattgaccgtcgattaggaacgataaacaatgaattttccactagagtggcgtgaatgggaaatctcgaatagaggggttatcaagtagtctcgtccccatgggagaggctgttcctccatatatgttttgccacgtaagagatagctcgtctcgagctgatcgcttgccacgtagatatattttattggtggaatatgtactggatcgcgagtacatgaaaaacgagggaaaatttaataagattccgctccgttaaaaggtaaaaaaataataataaataaagaaaataatttggcgctaaaaagtcacgtcacaccatcatttgttgaaattggattggtgtttggttacagggctaaatgaaatataaaatacaattatagtttctacaatgcatcaactagaaatttagaaaaaaaaaa

SEQ ID NO: 18884 - DNA, 6130 bp, Cannabis sativa
aaatggtgagatctaaaattagaaaaaaaaaatcacattatgcacattatattcttgcctttcatttaacaccaatttggaatgcacagtagctagttgagtaactggaaaatctatcttaagatcagcctcgtggaacatatttgcacctttttcagtatctcatgtattctctaatctcaaaacaaaatttatgctttgtaagatgattgtgctaaaataattgatagaaaacaaatatacagtacaaaagagatctaagttgatcttcaattacaaacacaatacaagtaagctattgagaatccaaactatatttgcataaaatgcaaaaattcataacaaaaattcacagaatcagcacattgacaagagaaaaaagctatacatatatacatatacatgtgcgtgtatagtatatatacctgtttaatacggttctccatctgcaatctgaaagttctgattctacgttcttcatacccagaaagaactctcacatagaataaggcttttcttccaaattccaaaaacttattcatactaacaccttaaattttctgcacaatcacaattaagtcaaatctatgaaagggtcgtcctcgtcctcgtcctgtataaagaacattatcatttcttcgagaaatcagctctaccgaaaattaaattcatttttctagagaatgctaattaggaattcattttcccctacaagaatctaagctcaaaactacatttctagagttcgaaatccaaacacatgtagagatgaaaaatgaaaagaaaaagagtaattaataagatagctacctgatagggatgaatgaagagtaggagaacccagcagagagaaattttagggtttatgtgtgaatttgagacagaaacgatagcttagctttggcggaggaagaaagcactgtctctggatttaaccgatgatgaaatcggaggatccgttgcgacttgcgactaatataaataaataaataaataataaaaatccctataatattattgtgacgaaaatacccttcgtataactcctcttctttcttttactgaatcaagaaaaagaagagtcagagaatgcaaattaaaacatcaatgtatattttttaatcaatacgaattacgaaataaatattgaaaataaaggagaaacttgagtctattttcagtcatatatatttttataaaaaaaggaatgaataattttgtgttagcttggccatggttggttggaagtagtagcttaagaggtgccaatgttgacagtgtcgcagctaagaaatagaaaaatcaccggaaatgaatgaatgagaaagagaaggagagacaaccgttaaccaaaaagagcacatgagactaagctctgactagggctgaagatcgggcgagtttaccaaattttgagttcgcggatttcggatacacgagtttcgggtttaaaaaaatgaaaccgaacccggacccaaataaggcacggattggtgggttgacggattggcaggttggcgggtcacaggtcggcggattagtgggtcaagggttgaaaaaatatttattttaagattatttaaaattattctttaaaactactaaacaatacacactagcaactgaaagattatttatcaactctattacattatttttctcttttagaaagtttagacaaattgaaaataataatcctagccttcaaaacatgtttattcaggctactaagagacttcggagaaccacaaactacctcaaagtttcaggcatgggctaaggcggattaagttcgcttaaggctcacccagctcaagaactcaaaaaaaaatattgtttttttgaaagtatacatattttttagtcattttcaaaacttaaacatatttttaaataaaggatcaaataatttttattttcctaaaactcaccaaattttaagttcgtcttgcctcaaatgcacaataatttcatacacaacaagttggcttttgcctgagtcaactcaaaaacctccaccttatcttcaaacaaaaatggcatatacaacaacatcaataagagcatctccaatagagatgtaaatgaatgatggaaatgtaaaatatagctcactttgtaaaaattttactctaatggtgtgttaaattgtgatgcaaatatgtcacgtaacaaaaagtgatccaaatttagattactaacatagcatgataaaaaatttacatcataataaatgatatatttttatatttaccattatgtcatttttaatattttattattaattttagttaacaagttcttttaaattaaaatgacttgcattgttattattaaattttatatttatttttgcattattagagcttctctaaggaagcagcatttcatataaatgccgtttctttttgttccaacgaagcaccattcaagactgcattttaaggttaatgctacaatgcacagcatatatgcataattgaatgaaactaaatagaaatttttaaatttaacaatttcaataatttaaaagaaatttttaacaacttaaagagtttaagaaatattatttagtacatctcaaaattcgagagcaaaaatataaaaaaataaatatatagtacatgtcaaaattcgagaaaaaaaatcccaccaaaggagacaaattcaacattatgttcacgattctatgatactgattgggaccaattttgtaattgattgaactcactaatttcaataaaagaataaaggattacaatcaaatattgagtggaatattcaatcttagctcgatattttatttcctctctacaattgttaaaaaatatggcacaacgtcaataattaattttcatatttcaaagtcgatagccagaaaactaccaattacgatactaagttgccatgattcaatatggaggtggtcacccgggttgtactacataatttttcatggtgaaaatttcataatttgattataactgaaaaactaaagcttgaaccaagaagtatgtcaatacgtcaaatttatatatccacacaagtaaaaacattagcaaaacaaaacaaaaatagtataaggtccacgtgtttaaactatttttcttgtttctgcagtttatacacatgttttatccacgataagatccattaaggctgtgcttacacaaatacgaaagtaaattttgaatctaatctaatctcttctcttcttcttcttctcattcttatcggatgtgttcttcaactgcagatagaaattcaaacagttagtagctaatatatagtaaaaaggtacatgaataaaagtaaattaattaaaccaccacacttgtgaaaacttaccatgatgataagaattcgaacaaagacagcaacgaagtctgtgaagagggtcaaggcatgcttgacatagtccatatcacccatgtgtgccttctcgatgatgtcctgagtgtccactaccatgtagcccacaaacaccaaaagcccaaaatacagctgcaggaccatgagaagtatatcaaacaactgcaaaagcatggctaatgtgatcacagaatctattagttacaaataatccaattacctcgaacttgaagatggctgcagatcccccgaaaatggaagatgcaaagtgcaaccagagaagcatggacacaccagaagagagaaggccaccgaggtaaaggtactctctacgttttgccaacacagctgctcctgagaaacaagcaaacgccaatgcagttccaacgaatgcgctgacaagaatgctgaaacaaaagaaattgaaaaatcagcatcatctaggttcaaggctctaacatgtcagaactggaaaataatatacatgccacatatggtatatgtcaacccaattgaattttatgaatttcaatgatacataaagaatgcagttgagtaaactaataatctccacacccaaattatacagaaacaaatttcaaaaacacaaatgctagctacctcaactgcatctaatgtataagaatcaaatgaccaaaattctataagaaatgaacaatgaagaaaagccaaccgaaacaacactgaaaatttatagccaatttaaaaaccccgtaaaaggtatatagttaaacatactataaagtataaagcaggccaaagtgatttaaaagataatatgtcaacaaacagatacctttggtcaatctggatggctaaatcaatcaaaggaccaatggaagctccttggaaaacagaagacgccatcaaaattgcaaccctcttttgctgctcaaaagaaacaaaaaaattcagcaaaaagattgataagaaatgaaagtagcaagacttcaaaagaccaaaaaccacacctcttcaaaaggatgaatagagagcagccagaacatacatcctatgctggcaagagttgtaagcaggccaccgatgttccaaagaatatgaaggtaagacccaacagcagcagccaccagagtgcaacataatgtgagataaacctataaaaataagatgtcaaaaccaagaaggcaattacatatatgctacaaccatttacagcactcccaaaattatgaaatcaaatcctagaggcacccaaaagccaaaagccaaaagaaaaaaaaacccaaactacaatgaataaatccatcaaaattctaaaacagaataagagatagacacaaagcatacaatcaaaaaaaaaatagcaacaaaaataatcaaatctgactcgcaacaaagaattgtcccatttcttttctaccaaaagaaggaagaaaacccctacaatcaaggatagtataaacaaaaaaaagactaaccgagaccccataacttccccaatcgcaaaatcccctaattaaacaacgattatcacacacaatcaacaatttcccctctttccacatttttatatcaacagaaaacctaaattcagcaattatactctggttacccaaattcattcaacaaaaatatgaattcaatccaattcgattaagaaaaacataaaaaatttccttcattcctaaatcttgtggtttacttacccgtttgagatgagattggacatgaggagagatatgacccagattcttgagcgagtcgtaactccaccggtttctcgaaccggtctgggaatcaaagaaagaagcgaaagcgtccatagattttatcaatcaaagaaatatactgaagagaattttcacaacaaaatgcagacagggaaagtcgataatcctttttcttttttcttgttgaatttatataaaatgatctcaactatttatatatagagaattatctatatcttacccaataggttcgtggaaatttctggttgtttgtaattactataatacccttcacttgttattaactactcatatataagagacacaaagaggaggggcattttgggagtggaaaagaggagaagtgttcagaaacatcgagataattttatgtttaaagagaaaacaattaattttgggtggttgactcagcttgatgacatcagctgaaactaaatcttgtgacttttgctattggtcgcatctctttgccaccaagcaagagatctttaattattttaaaaaaaattaaaataaaagtgtggtggtattgcaagagacgcacggtgttacgtcccatgtccaataagatcttgccaagtaagcaacgtgacacaagtcacgatcctcccttaagaatgttctagtaactagtaaggaggtaggtagatgggaatggggaaaattgctaaagggcaccaatggtaagcacctttttatgtgttaatattgttattggtctaagtaagtatcgggtctatataatttaatataatagttttaggggagtattgttagtcaatcgcaacgcgacatgtcgagaaggtgctaggcaccactggtgtctaatagcaatactgagaatgaatgctttaaaatactaggatggaattagaagtcttttatgctgttaaaatcgtctgatctattaattaattcgagtgtgtctaattaaaagtaaatacacatggtccttaatcattgtaatattccctttagatacattacaacaatctacacacggacaatgaatacgatcgtgattt

SEQ ID NO: 18885 - DNA, 5729 bp, Cannabis sativa
acaatatcattattattcttgacatataataatacagtatcatttcctaaaataaaaatcaccactaagagtggaagcaaaaaaaaaaaaccttcagaatctggtacaataggaactgcagaggccctggtgctgcgacacatgttttcaatctgaaaaattgaacaagcagcaagaaggtcattgtgaagcaattttgacaagtattatatattatttaaaaataaaaaaaacaccataagaaagttgtcatatataagttaactaaaagttaattgattttgtattaggactactgtctgttttacttatgacaacattttcctatttggataccattgtctcatcaagtttcacacaatcaagggcttctagtctttttttttacgaaactaatgtgccagtatcccagaagaattgttccagctaattcttatgaattttagacagcaaattacctgcctccacacttcttcatttggtgcattcttgtccgcaagcataattgaatatggtttttttctgcgctcatcagcaaccttctgccaatactttcctagagaaacagatacaaagagacattagattgtatttaacaaaaaaataataataaaaagaaaaagtcagatgtactaagcatcatgtcattaggaaaactaatttatacaaagaccagtcataaatttacaatttccaatattcagattaattcattctcaaatatgtgttatatcatcaaagatttagacctgatcataaatcttccaacttccgtatcataaatgtaattatcaaagattccatatcaaaaaatgatttgacgactagcacagttgttcgacattcagatgggaaaaaaatactaaaaacaaaaacacctttgattagatcacccatcagactttgaataggtcgatcgtcaccaagtccccctggagcatttagtaattccttgcaaagtgctgatttagcacaaccgggtatacctaaaagatggccattgaaagagaaatcaaaatcaaatgagtgaaagctgtgttaacttaagagttatgcgactgcgaaaaacaaaaagtactcagtagctgcattgaagatatatttatgcaaaataatttcaaataaaatgagaaaacagatgaaatgtacttcacaagaaattattaaaattccaagttggtaaaaaattaagaaaaagaagacctacatgacaaaggatatatgtatggaaatatcactcaaaaatccatcaaatgggcacaacgtcggtaattttttttaaactacttattcacaagtgcatgtttttaatcttttgattcaatatttaaaagtgatgtaataagataaagaaaatgttaacagagcagcaatccaaacataaaatattggcatagctggatgcattttaatggatttacatctcacttttgtattgtatatggtgcatgtaagcttcacttaagagtacatcataaaattacttatttatctacagcaggtatgcaacaaataaatgacttacctggaaagaacacaattaaaccttcatctcttggcactgagtccttaatagaaggactaggacttgatggcgttacctctcgctcaatctccagatcaccttcttcatccctgcctctctcgacgatggctaagaaatcttcagttcttaccaagttacccgcagatcctatcagagcctgattatgaggacttcgctttgcatattcttcaagaaaaggctcaacctcgctaagatatattgatgatgacagctgtttgtttccacacttccttcttatataaacagccctgaaaataaaatgcatagtttaatcattggaaatagtaaacacaatgcacaatattaagaatagttttaagttggtttctcttttataattttggcctttgtaaactgtgaagtgttttgcgagtctagctttcggcacactgccttgctgattttcttcatttatcagtttttgaagtaacaaaatagtcctcttatttcatcaaaattaaagaaatcactgaataaaatcgcaacagaaaccacagtatagcaaactaaacaataccaaaaaagaaaaatgttaccattcatcaagcaatttactcagttccctctgctttcctgctgaagtgccccatattttcatttgcctatagcacaaaaacaaacatcaaactgcttactaaagcaatcctcaattggtttggtaatattatccttacatatcgaggatgagatgggatggtaagagtgctattatacttgataaaaattttatttacatgaacatcaccatcaaaattttagctcaaatagatgtatcgtgtaagaaagagaaagtgtgagagtgctagaataccatatcacaatcacccaaaaaaaaaaacaagggaagtctgtatctagaaaagataacttctagaattcctttgccattgaagtctttctttgacagtgaaacaaccattgaagcttacctcaagtaataggccttataagcagctgggccatctttaaagagaactgacaagccattgcgaatcaaaaaggtacgcaactgcaaaaaaaagagacaagcatagccagtataagtttccagctctgccaaaatccagacattggagaacaaatcaaggaatatagaaattaaagagaaaagaataatgtttcaaacaaacaaacaaatgcttgatcttattacagataaaaatacacacatttcaagtcaatcataattatatcctgtaattaaattttagacttttactgttcatgaatgcctacgttatattattaaacttgtaccttgtatgtaagaaatttcattttgatcattaagtttgcatcctcatcggctaatccatccttttctgatgcactgctgctagcattttctactatagcactctttttagaaagttctgcagctctctccttatttgccttgaataagttaatatcaacaaagaaacctgggaaaatatggaaaacatcaattatgtaaaacttcttttgcccgaagataaaacagtaaacagcgagaacatctcagctgtcaagttttacatactccatgcacatatgcatgaattaaaattgactaacaaagaaacttgcaaatgaaaggaaaagtttgcaatgtattggtgctatgtagtctctgttagcatttctttacctgcatataccacatggcaaatccctcttttaataatctatacagcatgtttcttcaaaaaaatgaaaattcagaattttaggtgatcaattaaatgacaattaagattatatacaacattaaagatatattcacctcgatataatggccacaatcctggtctgcacctgaaaagagccaagattatagtttagaaaggtgggtcacatcaccaataatttaacagaagtgtttgataaaagaaaacagcttagcatataggtagaactaatcaaatacctcatttctttctgataccgtcgaaatgtagagtcactgtgaacatgaatgactatcttatagaaaaggttatcagttgatacagaatcaactttgtggtagttatgataacatttaaaggcggcagggaatcgtttttctctcataatccgaagtatttcctggttcagttaaaaccataatatcatatgtcattgtgaaatgcccaaatcacaagacaaagaaaacttaatatcagaaaaagacagaagactcaaaatatagcaatagaacaaaggaacactaaaacttggacctatagtaccacaaatgaagtgcaaatgacttgccaaactattttcaagatcctgaggcaacccattaaaaacaattataaataactaaggatccagcaaaagtgtggtacatctaatatttctaaagtccacggcagattatgcgaaaagtcaaacagatacatggaccaaggaatcgaatcagagcagtaaaattagtggcacatcattcattgaaatttttcaaatcgaatacatcccaacctgcaatttggtggttgagaaatcagcaggatgagattgtaaaaattttgaaacaacggatttatctgcatttcttgaatgggaatcaccagcttcacttccaagccaatctgaatggtcagggcagaaagagtttccaatgctctgaagaagtgcttttatttgctgcggtatgattggacatacacttataatcgtttacttacaaagtctttagtaaataacccagataaacatttttgactgaagaacattacctgtttttcgtcagaccgatttgctgcacaaatatccctaagacttggtcccagatcaaggcagtctgaaacacaaaccaaatattagtgctttaccttagttgattaaaagtttctaggctgaacatttattaccatacacagcagtcttacataaacaacacaaagtatcttgaatatgaaatgattcatgagactacactcaaattctaaatgcacaagtacataatgaattaaaagaaataaaaattgtaagctactagagagatccagattgattaataaggacacataaaatatgaaaagaaaagaagaaaaaaaaaagtatacctccctcaaccggtggaggaggaaagtccttcaatactttctccatatgttttgagctctcgtgactaacaatacgagccacaagaccttccagtatttctccctgcaccttgacatgatcttttgaacctgtatataaattgaaacttggttatctaccccaaaataactcatgaaatggtagcatacccaagggtacttcgtattgcctaaggcatgtagaaggacattacagatttgtttggtaaacgcatatagctactgtgatgataaaatgcaattgctacttcaccatcattttggccacaaaatggcagtcctaaaatggttcatgaaacagaggcacattatcttgcgactcaaaaggtagggaacagtagaaacggtagaaggacattcacatctgtttagtaaaaccatatctatctcatgtatttatttttgagttgctaatgattcaaacccaatccacatgtcttcccaaaacctaatagtccttccattactgagtttaaaagacaccggccttgaaaactcattatagcaagatgttatgcctttccaagatcacaggctttctcaaaatccactttatagattactcattttttcctctgcctgtattcttccacttagagcttcttttatattcaaaaacagcacctttgagattatcttgtacagactggtcaccaaatatttatttattcagcgatgtgcatgcctagctctacatttatatggatgccactattatgcctacatatacataaggactcagtgtattattttgagtaattcagatagaaagcaatcaaatagaaatttgagtagaacggttaccagctacagagatatctgcgacttcatcaagagccttacatacaggtgttgccgttccttcttcacaaagcgcatcataggcagcaaaaaatgacgtgacagatttccttcaggtgtgaaaggagagattaatcagaacacattaaactattatatcacatttattatcaaattattagatcccatatattcacagcaatttaagctagtaatcccaatgacagggtctgttgaattctagcacttttaatagagtagtgctgattgtcagatgaaacaaaacc

SEQ ID NO: 18886 - DNA, 2249 bp, Cannabis sativa
gataaaaaaaatatgaaacaaaatcttgacaagtccaaaatttgtatttaatggtctctcatttctttagatccagcattgtcattgttctcattccttttgccatggctgttcacaattctcaccatcacgatttaggagcttttctttaactcttctcataaaacattcacaaaaccccacttgcccattttcaaaattttgaatttcttttcttacatgaatttgaatacttaataggcatcagcgactttgttttgagctaatggagttcacggagggttataagcagactgggccatgttgtttctctcccaatgcgcgctacattgcggttgctgccgattaccggctagtgattcgcgataccatttctttcaaggtgggtaagatgtttttctatgctctctaattcaattggtggaatgtttcaattttgctgttttttcgtgtttggttgctcagaaaaaaaaaaaaatgctagaagagaaaacatgtccttaatcatttacttgattttgcattcctctccttgaaaccatatgtttgaagattgaactggtatttggaatttgttacttcgctttaaacagttcatagccactggttataggtttcgtgcaacgtgaacttaatttggtaccaagaatgtgtagctttagcatgaaggtgcgttagtttgtgcttggtggttgcaaaaataggaaatacttaactatacatcttcattttcgtcttaaattagttgaatgcaatgcatctatttggtttagtggatttttaatgtgaagtaatttgaacgttcttagagctactgagttgttttgatattggtcattatggtgagttgttgtctttagaagtgtgtaaatgaaataggacactgagtagtgaatttggactccatgcatgtatatggagtaaagaaaaactttcaaggaagctaagtattagatgttaaaacagtcccacatgaaaaacatatattagaaacacaatacctttattaaggaaagggtaactccacttaacaccaattggttttaagtggattgcttgcaatgctgatatatagctctacgcaaatttgtggattggattaagagtattcgagagtacgctcttgatggtcacaaatgtcctaatttttgtgtgttttatgctttttgattttatctgatgaaattggatttactggtgtgttcgataaattcaattatgtgcacttcgaaggtgaacctgttttgtatcctccaatgcaggttgtgcagttattttcatgcttggacaagattagctatattgaatgggcccttgattctgaatacattctttgtggtctttataaaagaccaatgatacaggcatggtcattaacccaacctgaatggacatgtaagattgatgagggtcatgctggcattgcgtatgctcggtggagtccagacagtcgtcatatacttactacatcagaatttcaattgcgtttaatagtttggtcgttgctgaacactgcatgtgtacacgtgcaagggccaaagcacgcatcgaaaggtgtttctttcactaaagatggaaaatatgttgcagtttgcacgaggcgtgattgcaaggactacattaatcttttatcttgtcatacatgggagataatgggtgtatttgctgttgacacactggatttggctgatattgaatggtcaccagatgatagtgcaattgtgatttgggattcacctcttgagtataaggtgaccgtactatttttctccatccccttatctttcttctcttatggcaaagagatagccactagcttaactatatgcgtgtctaggtgtttgcaagctattctctgccaaagctgtcaaagcaaataaatgacattgttttgaattatttcatacaggtcttaatatattccccagatgggaggtgccttcacaagtatcaagcatacgaaagtggattaggcgtaaaaactgtgtcctggtctccatgtggccaatttctagcagttggtagttatgaccagatgttgcgggttttgaatcatcttacttggaaaacatttgctgaatttatgcacctatcaactgttcgtggtccatgctgtgctgctgtttttaaggttttttggttttcattattcaacagtgatggacattgtatgtatgtatatatattgtatcttttaaaaagaaaactaatttttatatcttgtatttccaggaagtagatgaaccatt

SEQ ID NO: 18887 - DNA, 6696 bp, Cannabis sativa
tcgttgtagtatagtggtaagtattcccgcctgtcacgcgggtgacccgggttcgatccccggcaacggcgttttttccttttaaataatttttttgttctaattaatttttaataattttattcatatcttagctataaatttagtgtttgggttacttttttccttaatattaattaggaaagaaaatcaacgataatttttaacaattatatatattagttaaaaaatttgtgtttgggtttgtaaaaaaatgaaaaagtttgcttgggttttttaggttgaatattgatatttttataacaaataatataatttttagaaaaaaaaaaatataagaaaattctaccgttatatttttatctatttcgatatctaaaaaaaaataattttatttttttatagttgtatatgttatagttatttaagatatttagcaaattttgttgaaaaaaaaaatattatttgttttgttaaaaaagaagaaaaaaatattatactagtgcagtcataatttgattttcccaaataatcacaatagtttaattagaaaatccatacaacaatatataacaatatataaatgctcaaatgttcaattcttaaaagtgtggcagttttgactattttgattaatattagattcatataattcgaattacttcatacttttttcctttttttttcttctcactattaattaacattgaggaaattattaatatatagaaaattattaatagaataaaccataaaatgataaataatattctttcaagattaacttgtgatgaatactctataatcacaatcattaattaattaagaccaagaaataattataaatttatgagaataataatcactataagaagaaccatataattgttcttcaccccctaatacttaacattcatacatacataataatcaataataataatatatatataaaaaaaaaatatttaatttaaatttaatcaaaacatagtcatttttctccacatgcattatattatgcatggaaactctcttcttctttttcttcttctagtcatctatagagctcgatttacgacccaaatcggcgaggttagagccaaccgagccaccgcgcagcatacctaaagagcggtggtgacgacaacggaatgagccgacatgtgtggtgggggagcagaggcaatttgaccttgtgctagaggatttagtgactgaaggagttcttgctcttggtgacaccacaagtatgtgagtatgttttttgaaatcttctaaattgatttctggtaagtttaatttgtatttatttatactcatttccttgttatttggtgatgatgttgttctttgctccatttttgtatccatatcaaactacttcacaaaataaaacaaaatatgtcacattttattataaaaaaaaaagactatataaaccctcaagatataagtttttcacattcaaatatcattatatgaagcattttcaaaaggaaaacaacaatatagatgaggcctattgatacaatcatacaagtattgggacacactttttgagtgagtgtcaaacttttataaaaatactcctaattttcatttattttcttcattatctttttgtgaaatgattttatatatttatactggctagataatactaacaatttactaattaatttttataccctttcatataacactttcgagaaataaaaatatcgatcagaaatatctacaattttcttatctttaattaagcttgtagatatcattgaaaattctactttattcttaccctaattctaataaagtctatgagcattcataaggctaaaaaaaattatcgtccagatttttatcttattctgaccctaatttttcagtttttaagaaatcgtttcttaatttttaatgacacatttgataaaaatgcataacagatattataatgctattatatatcaatcaaattaaaataaatgaaaacaaaaattgaaacaagagaaagtgtaccttaattaattgactaatagggtattatgaagctttgaagagttaaaacaatagtgatgatgatgatgagataatggtgaggcaaaatctattggtagttcaaattatgtgtgttttggaataataaaaggttaagagagaaaaaattaagtttatttagtttttcctaatattaaggaatagatccaaaagaaatataccaaccaattttaaccattttttgttaaacagtttcaaatgttgtggttactattaatcaacaatttgtggccattaattctcatttttttgacttgaaaaactcagcctatttttgctcccacatttctttaattttctatattaatattccttcatgagttttataatttcatattaatgtagtctttaattatgttaataataaagtgagtaacttgaaatttcttaacttgaaatttcatattaatggaattaaagagattcatttgtggttgattaggggacagaaaaatggtaaaaaaaaaaaaacaaatcttttgtgaacttgggtaaatatgaaaacaaaaacaaaaagagagaaaaggaataatagaacaaatttctcattagaaattatttaattttcatccaaagaaaacacataatattacattaaaatatccaccacacttagtagggtaagtaagaaacattgaaaatgaactactaagaattcttatgactagtaaccaaaaacaattactaaaagttacccttttattaaaaagagtgaaagaaatgctctaatgttcacacaaagtacaattttgttatctctttacttctgccttttgtagattttagccaagaaagatttgagcacagcttgaacttcttttttcgggtgagcttcaatcgatttattaagcttttggtaacttgtgctctcataatctgcaaacacaccctgcaaacaaaaccgaaaaatcgaatttagtaaagggttactccacaaactcgaaaaaaaaaaacatggatagaaaaagagaatgaatgaatgaatgaacacctcaagatcaagagttttatataactctttcacttttttaacagatgcttcatctgctttgccataatgctcctggaaaacacagaatacaaacatgtaaacagaagtaacatacattctattgagacacattttcatatgaaacgatttggcttacaaataatagcttcttttgttcatcggtaactatttcaagtgctttcacaaccaaccaagagcatttgaagtcttcaatatctgtaccaatctgataatcgaaaagggcataaatgaaaatcgaaaatttcccaactgaattaaacttggtaaaagaatttggctttataacataccttgccaattacatctgggtggccaaaacaatccaaatagtcatcctacaatataatatgtcattggttttcttagtcaataataatacaataaaaagttcagtaacaaatgaggccatcaactcacctgtacttgaaaataggttcccatttcgataagaatgttcttgacatcaacatggttatcaagattttcaccagccataaccaatgcacaagcaacctattcataaatagtgttcaagagaatgagacatcaaaacaagcagaactatcaaaaactcgattagaaacaatctaggcaatggttttttccataccggaaggtagaatgagtagtaagcagtcttgtactgaacaattctatggtgactgcaacacaacacacaacacagcattttagccaactcgaaatttcgattgaatagtaatttcagatctaaatatttcacttacagtggaattgagtattttgaaagatctttctctccttcaattgtggtgatcaaatcaatcatttgtcctgaggcagtttggaattcaacctatcgaaaaagcaaaccgttacacaaattacacgaaaattaaaccattttgctctaaactgcaatcaatcaaggaaatcacacctcattaaacaaatcaagaagatcaacatagtaactcttccccttgaaatgtttcttgagaattcttggaatatggtttcgaagtaaaatgccatcatttgcagcaatcaaaccaacctaacataaacacttaaaacatgttaagaatcattcactacatagaaaacaaaaacaagataagaaaaaccacaaaaaaggtcacacctttggtactctaaaccagcaaggttgaccgcgacgtgtaaccgagttatccatgatatcatcaagaacaagaaaatatgcttgaagctaacatagaattgaatgtaacaacaaagtgttaaaaaagagtttaaatcccaattgatgaattgaaaaaatttacctcccaaaaatgagttgcatacccattcaatacaccaaccaagagcagaagttaagaaaatttcttcttcagttagttcctttcctcctttaagaatttggtaactatcaataactgacaaccctctattaagtttacctaccaaacaagaacaaagaaaatcaaaatcaataagaaatttgtttaaacaaggtaaaacattgtaatcattctcaaaacaaacctcctgggacattgtaatccaacatctgcaaaagtcaaaacaacacttaaaaaatcagattcttgaattaacaagatcagataaaatctgagcataatcttattataatgacactcaatcttagcaaaatcaaactaatttaaagaaactaagtacaacccactaaatcattaagctaaaagttcagatctttaaatagacataaacaaaatcatgaattaaaaaggactaaaaacgaatctggtaaagacttaacaaaaaaaaaacccaaattccataaaatgaaaaacgatggagagagttagagaaattggaagaatacctgttcgacccattggcgagaatcatcggtaaactcgaaagcagggtccttgagaagctcagatttcaatttggagtaaacctccatgaatttggacttcaaatcactcatttttatttttttggttgatgaagaagaagaacaaacacaaacacaacaaaggtaggactcgaatgggtttgtacttgtttgccctgtgatactgaaaatctatatatacaatgtgtatatatatatatgaagagagagagagagaagagagagagagagagagtcagtgtaggagtactctgttcatagaccactggagtttggaggccacttgtattgaccaattaaataatgtttaaaatctttaatattagaacttcatttatcattttattacaaatttgccatttcaaacaaattatataaatatacataaatattttgtaaaagttgtactctattttattaaatgataaatttaatattatattttctaaaataatacaaaatagcaccttgaactgaatgtgttatgaaaaaattgagaacattttttgtatctttttatactataaattgtcttcaaattagttatattgaaatatatatatcgaaaattgagtttattgtactattttaaaaaatataaggtctaatgtatcatttaatgaaatagagagtttatttaataatttttacaaaatacaagatctaaaatgatattaacttcataatatcaataattgctaagaataaattaccaaaataatgttgtaaaatggcataatgtaattagtataatttaatatcagttacatatatgttaatttaataatatattaaaaacggctagccgctacttagaacgcgttttttgagatggtatttcacaccctaaacctaataacgcaacactccaaatatagtaattctttttaaaataaataggtgacatgagtgacacgtataattgcagtataagagtaaatttaacaagttatttgaaattgaaattataagtaatagacatataaatattaactctaagaatatatatacatatttttataatttatcattatactgctatttatgtatttatcttttctataaacaaagacgaaaggtaaaaaagtatatgtgaagaggtcaaagcataaaaaaaaaaaaaaaaatttgaggggaccttggacctccatactcccttcatagctttcatcctatataagttcttgaattacgccatattagcgttacattagaactacatcactaaactatttaaacaaatgaggagaatctaactgaaagaatgttatttacaataatttttatagttaaggttaatttttgtaaaaaaaaattcataaggtaaaattttacaataacattgttttcctttcttaaaaaaaatacacataatatatatttgattaataatacaacaagtttttacagctaattatatttattttatagtaatgatatgtgtattgacctatatgcaccaaaacattttttctttttcaaaaattaatacaaacacaataaagtgatactttttaatttacaactatctaattatttaataaaataatttgagaattaggatttgtgtaaattgaatttgcttgaaaataaataaatgcattggggatcaagaattagaatttagagtttatttctctgttggaaaaatgtaaatcactatacatgatcataatattgttgcatttaatattagtaaaagattggtaaaaaataaaggaaacttgaaaaaaaaaaa

SEQ ID NO: 18888 - DNA, 1476 bp, Cannabis sativa
aattcctggtaaaatagatctagtttacaagcttcataaaagctctttatggcctcaaaagaagctcatagagcatggtttgacaagctccaaaataaccttttatctcttggttatgtttcatccaactcagatcactctctatttattaatcgtactgtcactttggtaattgtgtgtgtagatgacattatcatcacaggtaatgaccataatgttgttgttaaactaatctcaactctcaatactcatttctctctctcaaagatctgggtcctcttcactattttttgggtattgaagtttagcacactgaatagggttttcagagcaaaatatgcttgggacttacttgccaaggcataaatgactaatgcaaaaccttctcctactcccatgatcagtagcattcctttgtgatctcaacaggggaaactagtggtagatgtccaactttatcgatctgtagtatgagcattgcggtacctcacaatcacaaggcctgaactttcattcagtgtgaacaaggtttgctaattcatgcaaaaacctttaaccacacattggatggctgtcaaatgaattctcagatacataagtggcaccttggacttcggtcttcatctaaaaatacctaattcttatgatcttgtggccttatgtgatgctgattgggcctcagatccaaatgataggcgctccactattggttttcctatcttttttggatcaaacttaataacttggaagagcaagaagttgtcaattgtatctccctcaagcactgaagttgagtacaaaagtgtggctaatgtactgctgagttatcatggctgcattatttgttctcaaaacttagaattcagctgcctcagccacctacgatttggtgtgacaacttgagtactgtcttgctaactcagaatcttgttttacatgctcgaacaaagcatatcgaacttgacttgtactttgatcgagagaatgttctcaacaaaatggtccaaatcaaacatgttccagcctatgacaaattagcagatggtttaatcaaggcaatctcgtgccaaatattctctacattatggaacaaacttaaaattgagaatgtttcaattatgagtttgagaggaggtgttagagctaatagttagttagagttagttaacgggtagctctacttatcctagtcagcatgtatgttagtagagttagttagattctgttatggttaatgtccaaatgtttataaactctacaattacattgaatggattgagatatctttgatgtcttcattctttctctttctttcctattcttattcttttctttctgttttttttcttgatgttcatcaatgagcagaaggtttaacaattggagacacgacctgcaaaattagaattagaaagatgagccaaataatccagacgtcttattcccaaatcgtttaataaaaaaaataataaaaat

SEQ ID NO: 18889 - DNA, 4993 bp, Cannabis sativa
cgtcgccctgatcagcgtcggtagcgaatttcgcgaaaaccgacgcctaaagggcttaaaaaccgcctctaaagggtgtttttgtagtagtggttatttaattaccttataattaaatattataacttttataaaatatcgttaaaaacgttacctataaatactattggacaatgttaatatactttatagcaatgctctttgagaatttaccatgcaaattgttttttttttttttttgacctataacgattccacatccaactatatatacacgttgatgagttctctaccacactctctcaaccacttagggttccattattaattattaatttcaccaaaatatatcaattatatataaatatgtatacccattaaatcatttccatctcatttaatttattctcttgattatttgcattgtctttctcaaataagccataacttacaattttgatgcaaatgaatttctaggattaattattctacagttaaataataataaataacattaacaaatttataatttaaaatacaatttggtaccaaacttacaaaattggtcatcgttaaaactcataatgttgaattgagaaaaatttaagggaagctttggacaactactatctcataattttttaatattatttatatatatttatattttatatatctcttaattaaatttttgtttatggccgcacataaattagcaattgttgtatcaaagtagataatagagtagtttggatcatgaatattttgccatcttatttctatatataatatatatgcatttttagatcaaatgttttaataaactaaatttaaatagcttaaaattgctaaataagatctctagtattgcagcataattttataattttctagacattaattactctattaattttataataaattttagtattacattagtttagagactctcaattaattgtattctagaaatgtatagatttgtatggatcatagaatttctttaagtgaaagaatagtttagaataaatcattctagccacatgtgtaagtgtaagggatagatcgatactccttcaaatgttttagattgtgtactaaaagctcaaatttagggttgaaactgaattatatatatatatatatagatattatttaatattaaaatatattctatttcattgaaaaataatataataataataaagaatactttttttgtgtgtggtttgaataaaaaagattataatgacatatttaatgttagtgcaacactaaatataatattgtggttggagttgcttgttaaaactacaatccatcacttagatatttatatgcttaaaatacaaattttacctccatacccacccattaccatcaattctccaaacatcaacaaaatacaaaatattagtattataattagtaaatcctgaaaaggctcaatacttaattatactattagaataaggataaataccattttaaactctgtgatttatgaaaattattaattggactctctgttttattaaatgacaaaatagaccttatattttcttaaatgataaaaataggaccttgagctaaatttttaataattgaattttttaatataatcaactttaagacaatttttaacacgaacagatactaaaaatataaccaattttatcataacatctctaggtcagattattattattaacttttattttgacaaaaaatcagttcaaagtcctatttgtacaattttagaaaatacaaagtctattttatcatttacaaaacaaaagatccaattagtaacttttacaaaacacaagaatcaaaatgatatttaccattaaaatataataaaatatggtagagatgttagaaacaaatataccccaataaaaataatttttatatatgggctaagtcatgatctaattttccacatggaattttattattggataacaaaattgcatatttacaatccttatctctatcttttatatcattacattcacaactccaaagccacatatataacaactccaatcctatcaatcaattatagtttttcacatggatcttaaacaactttctttcccaataatcttcatcactttaggttttatgtttatggtagtgaaaatagttttgaaaagagctcatcaaactaagaactcaatttcaaagctaccaccaggaccttggagactaccattagtgggaaatatacaccaaatccttggctcttctccccatatttcatttagagacttagctaagaaatatgggccattcatgtaccttaaaattggacaaattccaactctaatagtttcatcaccagagtatgctaaagagatcatgagaacccatgatgttgtttttgcatctaggcctcaaactcttgctgcacagatcatggcatataattgtactgacattatattttcttcatatggtgagtattggagacaactcagaaagatttgtatgcaagagcttctaagcccgggaagagttcaaacttttcgaccggttagagaagaagagttgttaaatcttgttgaagggatcatgacatcttcaaaagatggatcatcagcaatcaatcttactcaaatggttacaaaatgttcttatggcatcacatctagggctgcctttggcaagaaaagcagtgatcacgacgagttcatttcgattgttgaggaagctatcaaggcgggtgtaggctttgaattcgctgaggtgtttccagctttgagatttcttgattggaaaagtcgtcctatttttgagagcattaaactaaggtcatcaaaaataatggaaaatatcatcaaggagcatatgaaagagaaaagtggaaaagatgaagatttggttgatgttcttttgaagtttcataagaataaacaagatggttggttcaccctatcaaatgacaatattaaagcaataatctttgtaagttctcatcaatatcaacttatttatattggcaagtagtatttcaaaataatagttcatataaaaaaaggttatttattattatttttttttatctagaatacataacttttaaaagatactttgtgaagtgttataattggggtacattatatttttttttctagcacatataaaattataatagatttatagaatatgggcggattccctacaaaaaaaattgctacttttagtaacaattttttttgactaaatgtgactattatatagtcacaacaaaatattacttatggtgacttaatttcaggatatcttttcggctgggagtgaaacatcagctttatctgtagattgggctatggtagaaatgataagaaatccaaaagtgatgaaaaaagctcaagatgaggtaagaaaagttgttggcacaaaaggatcagtgaatgaatcttcaatcagtgagatgaaatatttaaaattagttgttaaagaaactctaaggttgcatcctccagctcctttgctacttccaagggaaagtatggaaaaatgtaacattaattgttatgagatacctaaaaaaacaagagtaatagtaaatgcttgggcaattggaagagatccaaagtattggaatgaacctgagaattttatgccagagaggtttatagaatgctctattgactttaagggcaacaattttgagtacattccatttggtgcaggaaggagaatatgtccaggcatgttatttggtgttattaatgttgagctttctcttgcatatttgttataccattttgattggaaacttcccaatggaatgaaccatgaaaatttggatatgacagagttatttggacttacaatgagaagaaaagatgatttgtatttgattcctactatttatgagtattcttgtatagcaaaatcatgaaattaataatgatttgttgtacttgattcttacaaaaatgttaagctttgtttcaaaggttattaaagaattcacaaatattttgattggaataaagaaaataaaatcacaaatgtaatagtcaaatcatgatcccatgttcatccaattttactatgtcatacagaaggggacaagttgtattatttggatactcatttaggggacttcctatcagtctaactatcctctaggagggagtacggggctgttgacttcaactggagccaaagttattatccttcgaattttaccatctatatgctccggcacattggatatttagatttgtaatgatcgcatatttagatatggacttagaaaataattaacatttattagtaatttaattaatatgtatgattatgtgtaaattaatacaaattaagccttattgtcagaaatatacattggagaaataatttcattgcttccttagcttttgaatctcctcctattatctctaaattctggcttgtatttctacaaactttttctcccaatctagtggagcttgtggcgggtttacattaccaccagcaaaagcccttctacaccatctgccttggccaagaggatgaagggattctgatttccctgaccaccactagcctctaccatgttacccttaccactcgtgttttttgggtgtccattttataggacgagcctacaaaattataagtcacgttgtttaggcaacaatcaaaattgtaatttaattgtcccatacatggaaacttaaacatgctcttattcttctatcaaactgcatatgcttcttatcatacttttctaatcacgcttatgtgattcaaacaaccatgagctgagtttgtctctcatgatgattatacatatcttgacggtcttcaaaaaataacatgacaacactacaaaaaaatttacttttagtcacaacaaaaattgtgactaaaagtgaaaaaattgtgattaataataaattatggttcttatgttgtaactgaaccatgagctgagcttgtctgatctcatgatgattatacatatctt

SEQ ID NO: 18890 - DNA, 4455 bp, Cannabis sativa
cgggcactcggagctcggggccctgggtggtcaaaaatctacttgctccaattctgattctgatgcctcaaatatgtctatggtacgtcaagttgatgtcctagtgaaagttttggccactctgcactaagacggtcccaaaaactaaaaccctagttgtagatgtcaacttgggcgtcaggtggaaaccctaggtgcccaggttggcttatgggttgcaggttcatgtaatttcaattcctgaaccttgtattaggttgctccatgtcttcatggtacataatactgaaagatagtcggttagattcaagttattgaagtccaaactttcatcccggaacttttagagtcaacttgggcgcagggctagggtctccatcccaggttgactgttatgactcatgactactcaacttcgtgacatcatccatcatgccatgtgtcaaacattaatgtccacgttaccagatttttttttggattaacagatagtctcttttaagttcaagcacttcacagtgaattcaatcgttatgaattctatttttggttttattgtcaacgattgtcaagttgttttttcttatctaaatcatgttgttttaagattttttaaacgatctgtcagttgtgttgcttactttattgtaaggggctttcaattcttgctgatcgtattgatgaattttttttaaacaaatcgcatggatgaattttgtatcagttgaatgacaaatttttgtatttagacccattatgcatataaaatttatttatttattttttttttctaaaagtttattttattaaatgttacattttttttttaattattacacattacatttatagcaggtaacatgacaatgatctctaaatttgtttataaaatccagcttataacaaaagagcttatgtatatcttatattcttacgaaagaaaagaatatcatatactttaataataatgtttaagataatataccaaacaatataagaaaatgtataaaaataaatagcagaatttcttaaagagaaattgagattgtgcaattgataaaaaatgaaaatgatctatttttaaaatgtttgctaaataattatacattccattatgaaagaaaaaaaaaatttataaaccacaccatagtaaaattagaaataatatgacacacgattaattaaactaaatatatttttttgataaggagtaatattttaaatcttaatacccaaacaatgtaatttttttaacaataatttattgaactgcatatatttttctaaaaaaatttagatgtctccggcattattggattaaatgaagagattttaggacatttaatacaatttaaaagaataatattaatctttaagttagtttttcaagatattcataaatgtaagagatttaaaaaagtaaaggtaatagactagtgacaagagctacattgtcattgatggtgggtggagtagtgtggtaccaagggtgctatcgtgcgccgcctcaaaaaagcaagtgcgttaagtacgcaccacactcacacaagacgagactacctcatattcatccatccaatctcaaccccctgcttgttaatactacgacaaaaccatttcccaataaaaacacaacaacttttccactcacgacgaccccttaacgcccgtcacgctctccacccttatcacctatccaatctcgaaacgtcaccctaatcaaacggcaagatcttaacgccgtttgtacctttttttttttcttttatcttatttcctgtctccaagccgccttttattaattattttattagtaataacaatatatttttctgattaaatattaataacaatatttaacacagtggtcgtcgttcagatcgtgtcgcttttttgggcttagtgattaaggtttaccggttctacccggtaatctgctttagcagaaagtaaggtccaccggttacttccggttgcgtgagagcttggagggttagaaattgaccgcggttgaaatcattgcacgctgttttgaccactctggttaagtctcttgtttcagacgcgaataagagagagagaaaaataagtctttgtttggtgttcttcctctggttcttggctcacgcagtgttttagctgaagaagacatagtttgagagagaaggtgcgggtaaacggtctgaatcatttgggtttttgctgattttcagactaattaggaatttgatttaggttacagaggaagttaagggatttgagctgcgtatggttgagctggagtggtttatttctggatttttaggtgttttgttgagggttagagactagggtttgtagtaagaagtgagaaatctctttcttctcttgtggagaaggattcctatgagagatctatgttaagttcacaagaaatggcgttgtcagaggcatccgttaaagggaattctggcaaccccatgggagagagcttctcttccagttttacagaccacaacgatgcaaggaaggctgctgaggcgcgcaaaggtctatattactatttgttaaatttccggcgccggtgaagattattccggcgatgattttagattcggacgtggttttctgaggatttttttggtactgatttggtttttcttttgcgtgctgtagatgctgaggctgcgctgtatgaggaactttggcacgcttgtgctgggcctcttgttacagttccccggaaaggtgagcgcgtcttctattttcctcaaggacacatcgagcaggtaatttctcatattcaagttgccatatttggctacagctttagcgcttacaaagctgtttttgttatactttattttctcctctagttgattaattgggtctcctttttcaggctttgtagcttttgggtttgacggctaattgttattctattttttatttatttattttgttttaaattggacatttgtaagggtttctcttgctgtaattgtgtttttgcttctaattgttgatttcttttctggttttttcataggtggaagcatcgactaatcaggtggctgaccaacagatgccagtgtataatcttcctcccaggatcctttgtcgggtgatgaatgtggagttgaaggtaacaactattagtagatcgatgtatgtgaattagtaatattaagtatctgcagttgcttttagatttgaggggaagagctttccaattccattgatttgctaattgacgactgatttcatatgttttaggctgaggccgacactgacgaggtttttgctcaaatcaccctgatgcctgatccaaacgtaagtttctaattgtggttctggatctttaaagatttaagggtcctttatttgggtctaaaatctaatattttattctgtgattgtgttgattttaaatgacagcaaaatgataatgcattcgagaaggaaactcctcctcccccgcctccacggtttcaagtacattcattttgtaagacacttactgcttccgatacaagcactcatggtggattttcagtcctaaggcggcatgctgacgagtgtcttccccctttggttggttcatttgagcttgtttctttctttaattctctgttttattttctgttttggtgactaaatttacgagtctcgttttctcttgacaggacatgtctaggcagcctccaactcaggaactggttgccaaggatttgcacggcaacgagtggagatttcgccacatctttagaggtaataactgaagtattatatattatttactctgcttctgtgtctataatgtcttctcctttcgtttttttattgtctgctattggcttgtgttgctctcttgtataattgtcatataactacaatgtcaggtcaacctcggaggcacttgcttcaaagtggctggagtgtgtttgttagctcaaagaggcttgttgcaggggatgcctttatatttctcaggtcagttgatttttccttcaccttagaagggagtctttcttattttgtttttctaaaataggtttttgttattttgtgattgtctttaggggtgagaatggggagcttcgtgtaggtgttagacgggcgatgaggaagcaggaaaatgtcccttcatctgttatttcaagtcacagcatgcatcttggagtacttgcaactgcatggcatgccatttcaacaggaacaatgttcactgtgtactacaagccaaggtttgctttcttatattttgctatgcctgatcttgtaagatgataaatttatggctttaacagaatgcaaacttgtgttagagttatgtattgctgcattaatatttttataacatttacaagtgactattattgaataatttggcttgccttgattacaagaaaattgttttttcatgacttattgggtgcaatccatgttaaaatagtgataaaatttgaaattttg

SEQ ID NO: 18891 - DNA, 5534 bp, Cannabis sativa
taaattaatcaactttttatttaacattttcaccattttagttaaaatgattatttacattactttcagtgaaaagcgtggttaccaatctattggtattctattcttaacatctttaactaaattctgcatcaacgcatatacgttttaacatgaataatgttctttgatcacatatattgctttgtagagcgagctagtttgggaggggatcttcaagatgtgtgtagcacattaacacgttcaccatagtggagtcggataggacatatattgttgtggaaggatttttgacaacaccaaataaaaatcgcaatataattatttaataaaaaaaattgtgagtactcaacctagaatggcgagtattcgaatgagactacactgacaaactggaaaaattgataaacacaatgaacacgcagaagtatggtggttcagtcagatcacggtctgcttagtccactattgcaaggatttctgtcatgttcttattcatactggatcactcatttatatacaaagcaagtgtccctttgattatatagaacttaattaattattgaaccgttttacattgaatatcattaaaattaaggaaaacgtaaatgaaataaatgaaagacagtttcaatctgttttactaaatacagcaacgtacgcaacatctatagtgcgagttgtctgttcagatcctcgcacaagctcgtgggcctagggtgtgtataggactaatgggtctcgtgctaagatatatgcgtcctagttgagtcgcatacacagatatcttattcttgtcgataactgaggatgtgtgagtctttaaacaggttatcaatcacgctgggtcatttggaccagctccctaagcaaagactcaatctttactaaatcgtaggagaagttttcgtagacatcgcatatatcttagtatatctgagacccgaacacatccttcttggtcctacctcatggacggtgtaataatacgactagactctatcagggtcgcatcatctcgctatgttttgttcatgcgaggtttatcctcgagcgatctccttctgatagctcagcaatcctcaaggagagtgaatccatgtgtcatccttatgggagcctgagctcgagtttctaggtgaaaaatactataacacatgcccctagtttcacaattgacagctatatcgtgagggaaactatgagagagaggcatgcgaatggttgtcacaagatggtgacttttggctgtcttgttgagggtttcgaaaagacaactataattattattttattcctttaagatgcaacgtcatcataatccttcggggtacgggcaggcgtgattattggtaaccattagattgagagaccttaggcattctttcgccacgtgtcttcatcccaataaatgaggaattctagtatttaaacttcttgatacaaaatgatccccattcatttccctctcattttccccattttccttacaacttcaaattttcaaagttcttttgaaaaatcttagttcctttcaactgagaacaatttcgaaggctgcaatacttacagaatcaccttggaagaactgcactccaaggttggtgtttaccttctctgtaatcgttttcttttttcctgagaatttgtatgtgttctatgctttttaggggtataaaatgcatgaaacaataggattcgccttttgatttttgtagtttaagcagaatactacattattctagaaaattcatgccagaaacttgaataatcgcgggtttcaggaagaatatttcgaatgtttgcaagtttttcgatgagcatcttgaatactcgcgggatttcctttgaatattcgaaggctcaaaataactttatttcactgatagctaaggtttttgatcccgcatattagagtctctaacccttaggccctttagtttttagattacttgtatttttattgtgaaaactatctaggttctcgaaatggtaggagtgtcacattaactcaatgttcatgcaattgttgcatgccccttgggatactcgatatgcccaaccatttcttgagacatacgattagttttcattttgctcgcattttattcattgttggaactgattagtttctcgaaatggtgggtgtttctctctgacttaatgttcatgtagcgacatgacccttgtgactctcagaaacacccagccatttttagagatacacggccagttctatgaacttttctgctttgatttttgtgtgggtgagggtacttaacttgtttaaattgcacttacaccacactaaaaagatcttctatctttcaaatgagtgacctgtcagatagccagagatatgactctgcaatgccttcctggatgaattaggaaggattgacagcttcatccccaccccgatgtttgaggatgaagttcttgtagccagaacccacgagggctcattatcgacgggcgagatagataggatggttcaagaattagctgaactagtgactatagaagtatgcgatagcgagtctatagtgtcagcccaaggttacctcgtccactcgaggcatgctccagataccgaggtcaaagagatgggtggcaccagctctacaggcaacctctcctcatagccataagctagagcgaatggggtttgctcagtggccatattctcagttgtcttgtgagaccatagaacctctgagagtaattcaagacaattgccttttgccacttctaggtgcttcttcagggtgtccttgagggtcatttataagcttctacctacccattttcttgaggattaatggtcacgataaagaagatttttatgatgccatgtcgtctacagtagaaatcagtcaaaatgtcatcaaactgctttccattgtctaacacaatcttttcttgaagtttgaatttacatatgatgttcttaacaacaaagtcaaggaccttcttggaggtgatttttgttaggggttcagcttctacccacatagtaaagtagtctacaacaactatagtgaattgcacccctccttttgccttaggagttgaccgatcaggtctatcccccatattgtgaagggcctaggagactgcatcattgtgagctcgttgggtggagcactagggatttttgagaatctctatcacttgtcacattctttgacatagtccgtcgaatccttaatcattgttggctaaaagacccctactgaagtaattttttttttgataggctttgcctctagcatgattaccgcagaagccttcgtgcacttctatcatcaatcactcgacctcggccttggtgatgcaccttaagagaaacattaagaatatttgtgtctacattaatctgtctaggattagagacctagcaacttttcttctcatattttttgcctctttcttatttttaaccaaggctgcagtttagaggtaagctataataggtgtcatccaacatgccaaattcttttaatatagtaatgctttgttcctttaggaattgtatcgaaccaagtttgccttgtcaacaatgttgttgcttgctagatgggtaagtgcaatctgttttggcattttgttcccaagggatttgccttattgtatagccttcgagatgacttggaaagtcttggatcatgctcaagtaggccatcattcttccacctcgatctgtgtattcacctaggacttgtttcacgactagttaagagatgttgaatatgtccaggtggtcagtttgtacttcatgcgccagcttgaggctaacaattaaggcttcatattcagcctcgttgtttgagcctttgaagccaaatttgattgctctgagtagttgttgcccccaggtgttataagggcaatgcctgcactagaaaagcggtcagtgcaacttccataaacatggcgtatccatggttattcttcaagtttttgctactactcttgctctcgcttgttctctagctcttgcttttctcctgaatattgagagatttcaagagatgtttttttacactcttccacaaattttgcaagggcttgaccctttatggccattctaagttgatatgtgatatggaattggccaagttcaatggcccaattgagtagtcggctagatgcttcaggtttttgtaaaacctactgtaatggttggttggtgtacacctttatcgggtgtgcttggaagtatgacgttagcttttaggatgcccaagagaaagttgtaggtcaacttctccatacgtgggtaccgacttttagtgttgatcagtttctggctaatgtagtatctagggtattgtacacaatcttcttgtcttgtcaggactacactcacaacattgtgactggtgggtacacgcctaggtcttcattgtctaggggttttgacaacacaagtggttgagccagttgttttttcatctcctagaatgctttcacattcctctatccaatcaaattttttgttgcctttgagaatgttgaagaagggtacacatttgtctgtagaattcgacgcaaagtagcttagtgcatcaatacgtcctattaagctttatacttccttgatggttatgggtgacttcatgtttgaaagggcatggatcttgtctgggtttgcttttattcccctggcattgactataaagccaagtaatttgcctatgcctactctaaaagaacacttgagtgagttaagcttcatgttgtacttgcgaaggaccttgaagtatttctctaggtcttccacatgcccccaacaattttggacttgacaatcatgtcatccacatacacctcaatgttttggccaataagatctttgaacattttgttcacaagcctctagtatgtggcccttgcattttttagcccaaagggcatgactttgttgcagtacaggcctaagtctaacatgaggtttgtatgcttctaatctagcaaatgcatcttaatctagttgtaacttaaacactcgtccatgaagcttaggacttcatggtcagctgtggcatccaccagctagtcaattcttagaagcaagcagtcctttggacatgctttgtttaggttggtgaagtcaatgcacactcaccaccttttttttttttggtttgggcaccaccacagggtttgatacccaaagtaattagaattattcagttatgaagtcattggcccacagcctctatacttcatctctgagcacttgggcatgttctttgtccaacaacttccttttttgttgtacatgtcagaagtttggattgatcttgagggcatgggtcatcacagaggggtcaattctgaccatttctccatgtgaccatggaaagaggtccaagttttccctaggaaattttattagcactgattttatttccagtgctaagcccttctcgatgtacagtcttctatttggagaagtgggatcaacctccacttcttcaagcttttctacaggtccaaatttttctgcaggttccccaaagcaacaa

SEQ ID NO: 18892 - DNA, 5198 bp, Cannabis sativa
  modified_base (2202)..(2211): a, c, t, g, unknown or other
aaattagttacggataggttgtgaggtaaattatgttaacctttcatagttgcttatgtgtagtaaaaagttgcattattatatcaatcatgtggacatgtttaattggatgatatacatgtatatttatttatttttattttttgtgtaaattttgtttacattcaaatgtatataaatagcctatagggatcatgtaacgtaactgtaatcgattatcagttgatttttgtacatatgtgatatagtgactatattatatgtataggcaaagatggaccatgcacaacatgaaataattaagtgatgaagtcttcagaaagaaggtaatcagaaaaaactgcagtactactatactgtgtaaagggataatatatttatttagacatcacaatctaactatatgttataacgtgtttcacaattatttatactttagaaaagaaacaaattaataagtagaagaagaaagagatgcatggtaactatgggtcaaaggtgtagcccaaaaaaaagggtaatgaggaagaaaggaataatgattgtaacgttggctttacttggttagaattaattcacataaaaagtaactctagagaagtgatcctcatcaaatgcagtacagcctttttctatttctatatataaatatatatatatatattctatatcctaattaacaaaagcttacttttcacaaatattgaatattaatatattcttgttaagtttacaatcttaattaagtttccatcacattgtaaagagcataaacagatacacacacatacaatattagttgtcttctaacaatatagatgataccagttattgtagtgtaaaacgcacatacatttgcttgaataatactcaaaatatcttttggtacttgaactattcaccaagtaataaataaatttggtgattttatataaataattatatttattgtgggatatatataagtgaagactttatccgaaactctgaaccataaagtatgcggactgttacaacttagcaactcatgatcagactgtagagcacacagtagggaatccaaagtgatctttgctttcttatcactcttctacaaccaatccatatcctctacaacctcaactcaactcacctcaaccctcccttttgctatactattatatatatatatatgatatcttgtttttttttttcttttttgaatgaatatttataggtgtgttgaggtttgatgataagattcgagaattctaaactcaagtacacaataaaacagtagcaaatagctcaaaataccaataatagtaataaaagaatagtagcaaaatagtagccaaacattagagatctatattgatagtagccgttaggcccctttgatgcagagattgatttactcaatatattgcatacctctaattctctttggaaaattttatgcatgcttaataatagacttattattatgatttagacttttcactattttatataaaataatattttaatttatcaatctttttcattttagccctgaataatttaaaaaacacaaaacttaaaaataattgtggtaaataatccactctaaacaaaacctgttttttacctccactgctacttgaaagtcagttactttcagttacatctcttcaacttgtatcagttatttgttagttagtatgttagttattaactaacttctgttgagctgttaagagctggacatgtcagcatctaacaagctatatattagctcgatccatttgttgaaaggcagcagaaaacaaggagagaaaacaagatacagagagagagagttttgagagatcatgcagatgaaacttaagtctagattggctaaattgctctagtgttgagtgttggagagcctagaaagactaagagtgttcatgatgatcttgtacagaaattgatgtttgtaattgcaagttcatagtggagaaatctccttgggggagagctggagtaggactcaagatttgagatccgaaccaggataattctttgtgtttttctctgtttttatgttcaagttattctgtttatgtttctggttttgataacttaatatttttgttcattgtctaacaaattgattgatatgaattagtgttgtttgtttacaacaataatctatttctctcaatctctcatgcagttctctctctctctctctcnnnnnnnnnntatatatatatatatacaattatttgcacaaggtcaatggtcggaatgtgacaagtagagcactaaggtgtcgaatcacgcacattgaccgtggtaaaaagtacattcaccccaaccccagtaatgggtaagtatttttcaaacaatttcttaaacattgagaatagtatgtagttcattaccattaaatttgtgtagtgtttgtttgtactggtattattttgttatttttttatttaaaagggcgagatctgatttttcaacgaaccctagaatttttacaatttatcaatggcttctcgattatatatcgatatattatcgatgatcaacaagctaaggttaggaaagacaattatcaataatatatcgataattttgaaataatttgtcgataatttctacgccttggagtttatcccattcttatcgatggaatgtcggtaatatatcgatgctatattgattattttggaaaatttatcattcactcaacatcatgatattttatcgatagtacatcgatagtttatcgatgctttgttgatttgtgctctgtgaatgtggtttgttattatgttaacatttttatcgatggtataacgaatgttttttgatattttcacgatgatattgcaaaattttttaattactttctacttgtatatttatcaattgtttatcgatatttgtcgatgttttattgccaaaatatatattttatcgatcttgagtgtttttgatatttatttttggttatttcttaactaatattttttatgaaattataggatcgactgtgtttttggttatatttgtatgttggtatttggagtgttgaaagaagaggtagtttgacgttgatggttaaaactaacacaaccttacagaaaatgcgcgagattttatatgaagagttggaggttgacccgttagcatatgatttaaaattggagatttatttgttgtacatgaaagggcaattagttctgccagaggttattaagaaagaacgccaactaagaacgttcttagagatgagggcgataatgtcaaaaacagaatttattccattatttgttgtgaccattattccattggctttattttcccctcaacctccactcgcaggtctaattcatcttcttcccaaaccacccccaatgccggttgagcaagtgtcacatgagctatttcttccacttccatggcctcttcacgaacaaagaagattggcctagtggatatgtttcagcatttacatgcacttttctgcttgcccttcacgatgcttatgctgcaattgtcacatgggaacttcgtgcacaaattttgaatgaaagtgactgtgccaaaattaactaggatggaacatactataattatgttgtatacagtggagtagtccactaccacaaatgtgttgtatttgaacttggagaatgggcttctggctacacccctacttagagtttggaagttgaatctttcccagtggcatcaaagcattcccattgaaccctttcaactggataacacatggagcgagattggcttcaaccaaaccgatggcctaaaatgcgtagctttgaacaaagattttgactaaactcccattctctaccaggatctgtgacacccttctattggaaatttaggctttaatcaccagcaaatcaggatgtaggaggtgtactccatgataatatttctcattgaaagtgatgggtaagtcaatcatatgatgtctttgcgtaggtgcttgcacttggcacaaacttctccttcatgtctagctcactgaggtattatttttgggcattgttggtactccttatgatacgtggacctccaaatattgttgcaacatggtcatctactggtggcaaagtaatccctgacgaataatggtttcccggtctaagagcttgggtggttctgggttgctgagtagttggtggcacttgaaggacttgtgttcccagggactaatagtagaccactccttaagggagcctagaagacccttgttgtccaagaacaaccttatttccttgtactattagatttcccagatacacgattgatacccttatccattggtggagatggcccaacttgatcaagttctccatctcatccttcagctaattgcattcatttgtggtgtggcctatgtcactgtgatacttacaccacttgcttggatctctgttgtcctcctttgaacatcacaggaggttttcaataatggaggggttgcaagtggctcgatagatgttctttatggtatccacaaagatattgtactcaatataatgggattcatatcccctcttctcattttttgaggattcactttgactttggggtttcttgtttctttttccttgggagtggcttattcatgactcttaaacctttgcttgctatcgtagttggatagctctggtagcgacaatgcattccatttatgtctccccataccccgaaaaagtagtatgtgaaggagcttaccctgaggtagctggtccatagactgttggtgagatatattgcaatttgggaggcacaatagttggagcaagatatgaggtagttgggaattggaccttgaatcttgctgcatttacattgttggagggtataagaactaccccaaaagcttagacataaacttcctaaacttttataaatctttgggcccttgccaaaaagtcagagagtgactaagctctcttcctttcctttgcacttcattctgaaatagggatctgactctatctgtagggccactaggttttgttgatcactaaattttgtctttgatgtttcctccatgaagcgtttgctgtaagctttgagggactagttttggtgctacttgatattggccaaagagttgtcctccatatcgaaatctgttgtgaaaattatatacgcaagtatacgcagtcaaacaagtaataaagtgataagtaagatcg

SEQ ID NO: 18893 - DNA, 7591 bp, Cannabis sativa
tattaattttggtgtaaagacaatttcttttctaggctaaattttttggcaagactcaagtgtaagttaatacaatttttatttttctaatatattgattctctttgttttttattttcatatttgttatattaagtttctcttcttctaaattgcactttaaaatttaatagtaccttttgttaggttatttttagcctattatttatgttatttttagagttaatttttttctttattatcattttttagaatagaattacgcttgtttacattaatttcaggtttcaacacctggaatgtataaattggtcaaatctcataaaaagatgatctataaaatagagaaaattgtagaagaaaataaatctgaaatttcaagcctaaattagactatgttctgctcagattttggagaaagtcaaaacataaaagttctagatctctcttttatctttctgaaacatcttgaatcgtcaaattctgagcaatatcgagagagttatggccaaactactattatgcgacacaacagaaagctcactgcccaaataaaggggggtcatgcctaggcatggaaatcccatgctgcggcccgccctcctaatcctgaaaaaaagaggtttttagcgtcttttatcttttttttattattattttttggctataaaagaagtggacttcaatagttttcaacaagcaatgaaggagtacgaatttcgaagagcaaatcaatattggaggctttctcaacagagtttttagcattcttttcttctcttttctaaaattgatatatgtgtacaatgaacatgagtagctaaatagtttattagggtctagatggagattttttgatattaattttttgattttaatatgatttaatttcccctcaatttctatgtgtattctatttcattcgtacttaattacttttaatatcttgatcaccaattaaattactatgattttgatgcgagatctaagaagtgagtgtcgattatgctatagtgaaacagaaccgaattttgatataggacgagagtacctataaggtttagatagcttatagggtttctatttttaataccttttacatgtttaatttatcacgagaatagagatattcccttaattctagagatattcccccaagatccgtgcgaatccattttacaaatagcaaccctaatattcatacctaaatcttacgcatgcaaagttgtacgtttctacaaactcgagaccacatttctaaatcaaaccaagaaataatagtttgggtagaagaaatacttgcaaaaggtttaatggaggatcgttggttgcatatggttggtcgaggtcctacgggccgcttgatggttcgatcacgactcgccgtaacagagaattcttcttctgtatgagcttcgctattggaaaatctggtgacaagattggaaaaagattctcgttttaaatgaaaggttaaacattcgcaacctacgcacgatcacaagaagttagcaacaggaaaaaatgtggtttttagttcgagaagtgtattaagaagacgagtgttcttttaggtcaaggatttctggagaggttctgtatggtaaggcttgtaatttgaaatgagaagggaaaaatgagcttctttgtcaagcttttccatttatatgagtggcaacgacaacatattttgaattagacaggcagatcttactgatcaaagttgctccatctaacggctggggactcgaacagtttgcatttaatgcaccttgtgagagtgaatgaggcattcattactcatcatttcatggaaacaaacccaatgcaccataaactagtcgtcttttcaagtcctaccgcctttcactttccatgaggaatgcgcctaggcttggcggtaagccctatgaacttgcagaatggacaccacatcttaacaaaataatagttgtacatcaccaataagagatgttaacctttcaactatcctatataacacgaaagatagcatccgcatttcaagatgttgcttgcacatcatagtactaactcaagcatctaagagaaggttggaagctcccaccactcaagaatcctacgagcttgagggtaaatgttatgcgtgctctcagatgccttatacgtggcaatcacggaagggtgccaccctgaacattccgtgatcagtatgcaattaccacttaaagacacgaaagaaactattatattttggaagccgctcaaaggttcccaatatttaggagtaaggatagagatccaggagtcttactatccttctacaattgaaggaacaagaattacctgatgctagtgtgatccaagaaggccttagcttgttggtccccgagttcattcacaagcatcatacctgaaacccgaagcgatggttattcgccctcttacacagaatcagatcttgtcccctgcgtcagaccttggtagtgcgtgtacgtgcctttaaaacctcctttttgtccgacagcttatatctaggcaataacttttcaaggagaaatcttttagtgatgcatgtcctcgtctacgtggaatccttcactacagtcgtccaccatatgatggggaagtttcttaccaatagatggtcagatcttcacgttgtagtacctatccttacaacatgctttagtacaaaactctaggtgggtaaagggaatccccttacccacataagtgcttataaatacctccatttttaaggaagagggggtggataaaatttatactagtcgaacatctacaaaaaatcctacatgttttcttcttcttcaagagaagcaaaaggaatgaagagttagagtttataaacacataatgtattattaaaatacttgcttgtaaggccaatacaactgactcgtagattagggatagttaacgcccgaaccacgtaaaaattatatgttcattatttactattttatttatttctgaagttctatttatttaattttcaaaaatctcagaaaacactccagctccagaaactacacattattcgaccttggatgagttgcattgccataattgatctttctatcaaaatagaaaggttgacaggaataaaactgagctggatcggctatggtgttgagaggcgttcaaggaggaggaaaataaatgatgacatcactctcagactcgaagatcgaagctgaaaagaaaagctcaaagatcggtaagaaaagggttaaatttctaactgttagagcttgggtctacatctggtgggtggtgggcgataatcgacgatgggatggaaggcaacgattatgttcgattttgagttgtagtgactctgaattttgggaaatatatttttttatttagaaaaaaagttagaatgaagtagttgaatttttttttttttacaaaaatatagcataagaaagctcataaaaaaatgtaaagaaaagccgaacacccataactcaaatgcattaaaatattatgctataaaaaaaataattaaagtcttaaatttttctcatatttaatgtaaattttactatttataaagtattcatgtgtctctaattaatatatttagtgactattagtcatcttgttatatttatttgacaaaaattataattacataattaataattatggttatagaaagtggattattttgtttagctcttgtttagctatttatgatggttaattagtatcttgaatggggttggtatagtgctatttttagtggatggtgtgccttgtatggtggcttttttttttttttttatttttttattttataatttaaaactcaacttaattttaaggtacaaatagaacttttaaaataattttaggtttgatgactatgctggttttttataccattttttgattgttttcatgctttcaatggattttgtgctattttttatggcttgcccctaattgtgtaagatagatttgtgttatggtcaatgggtacgagaagtgttttattttgtactcataccttatgcaaacgactttttccaatctaacagataagtatttcaagtcttgaagttcttatatggatcgttttaccatattcgttattcatattaagtatttttttttcattaaattgtgtggtaatagaattttatatatgtattgttaatctataagtcaattttgaggagggccgactgttacagagattcggtcaataagtttattataaatattatttatttgagagttgttatcttctaactattaaaaattctttttacgttttaatatcatcgctaggggattaatttatttttttttatctttttttattttgaagatattttggggaccattcttgatatattaataagttggcgtgtagtattcaatgatacaagtcaaaattctagctctcttagtgtgatgtttgagaaagttatagctttattgtctaattttttaggaataattttgttttatgttttgcttactaactttagcagtttatggtttgacaaagtatgcttttcgattagacaataaactattcaggttcaagaaagttatcacgctgtttgaggatgtttgcattgtaattcatgagtgattataatgttcaaaaaaaaaattatgattacagaattatgactataattatattagtgcataataataataatactgacatatattgctggaaattaataatttctgcactagaattagatttttattcctcaaatcttgatataataatatcctttcaaaagttatcatgatacaatattgatatttgatcttacgccggtgttctctccaataagtaagaaatatttaattataacatttattattataataaaataaatattaagctcgtgctgaatagaaaatagtattgtatatatcagtactttaattatctgtatttctattcccatattcgtagctttttcctaagtaccttcctgttgctatagagttttgaaatctagacttatgccaggccaaccacgttatgtcaacaataataaattagtattagtatttcagtcttacatataactgcatatactcgcgggaaaagccatgataccgacaatcaaaagtcgtgcatataaatactaagccccatgaaaccgacaatatatatatccacacttatcatcaaaggcatataaatactaagccccatgaaaccgacaatatatatatccacacttatcatcaaatgcatataaatactaagtagtagtacgtgttagtattatcattaatttcattcaaacaccacttactgcaatacacaatggcttcttcttttcattatttccttctcttcatcatcaactcttttctttttctcaattcttgcatagccaaaacgacaacgcagcgtcttaatgctctagttctccccataaccaaactcacttccactaatgatatccaatacatcacccaaatccaccaaagaaccccactcgttcccgtaaagctcgccttatatctcggcggtgactccctcgtcgtcgactgtgaggacctcggcttcgtttcctccacctacaaccccgcactatgcggctcagctgagtgcacctttgccgacgcgcgatgcaacgacggcatgtgctctggcattgaaaggccaggctgccataacaacacgtgccttctccaaggctccaatccatttacctccctcggcagcgtcgacgaagtcggaagcgacgtcgtttcggttcaatctaccgacggctccagtcccaaaaaatcagtttcggtagggaatttcgtcttcgtttgttcaagttctacaatcaaactgggtttgggtaaaggtgtaaagggcatcgcaggccttggaagatacccaatcagtcttcccttccaattggcctctgctcacaacttaagcgctaagttcgccatttgcttgccttcttcaacgtcagaatccaaaaaaggcactttgttcgtcggagaaggtccttacgtgtatcgacccaatattgatgtttccaaatctctcatctacacaaaactataccaaatgcccagattatttctgggtacttttcggtctagtccagagtcttttactgaatatttcgtcaaagtcaaatcaatcaaggttaacggcatagctgttccgttaaacactagtttattaccagttaaaagatcattgaatcttggtggaacaaagatcagtaccactgtgccttacacaaagttagagacctcgatattcaaagcagtggtcaacgcattcgtcaaagcaatgggtaatattccgagagtgaagccagtggagccttttgaggcatgttttagctccaaaaacatcggcagtactccttttgggcctgcggttcctaagattgatttaatgtttgagaagaggagtgtgtcttggagtatgtttggggcgaactcgatggttcgtgtgagtgacaaggttatgtgtttaggatttgtggacggcttcgacatagagagtatgaggtctgccattatcattggagctcatcaattggaagataatcttcttgagtttgatgtagctaattcacgccttggtttcagctcttccttacgatttggttcgaaaaccacttgctctaactttgactttcaaatttaaaagactcattgtaaagcttcactatattttacttcaaataagttccggaacacctatagctatgctctgtttcggcgagaaaagaagaaataacctgactacaaaagagtatatgaagaaaacatttaaataaaaacatcaataaaataactaacatttacgggatcatcaaacttgaataaatacttatttaaaaaaggatgaagaatttgtttcacttgttcatttttttttaatacaaactgaccaggatttctataaatttttcaattagatttttaatttcgtgaagttatcatattttttgttttggtctagtgcaaccaatacagaggctgtgaaaacatcatagtgtattcttatgttaaattcatttatagtaagatcgagtatattatattaaaataatatttacttgttaatctatattgaaataatattaatatagtgatagcatgcctactttcctatagtaatagcactcatgactccatttcacttaatttttaaagggatttttacacaaattactattttttttttacattttaaacattcttttattaagaaagaagaaatttattaatcacaagcacaatagaaactaaaatcaaacaatgccaaaccaaaacttacaaagagcaaatgctcgattcaaaacattcctatcattaaaactctataaggaatatcactttttatcatatctacaatatgattcacactaaaagtaaaattctcaaaaaaaaaacaagtgtttctattggtccaaatgtggtagatcactactgctaaaatagcagctgcaacctcatttttcatcccttttttcgaaccttcaaaccacctgatctagtcttgatacagctgaggccagctactcttgcaccaaatatggactctatataaaacctgctgagaaaatagacagtagaa

SEQ ID NO: 18894 - DNA, 7652 bp, Cannabis sativa
  modified_base (28)..(28): a, c, t, g, unknown or other
  modified_base (6277)..(6279): a, c, t, g, unknown or other
aaatgtttaaaattccgtaaaaccgtanttttgttattttttttttttgtttttgtgtatttgtgaaataattcctaaataaaaacaatattatggtcctaccatgatgaacataaaaatttatttagtaggagctaaaaaataaaaattatatatattatttatattgacaaacataaatattattattgactatttttaggagaaattttatattttattatttgtggggactttttattaatctttagtaaaagattaacataataaaaaaatatatacattataaaaatatatatattttttttcatgtggggacttaagctctcataggacactatgtaagttcgtcactattaatattccttctggacatagaataaagagaaaaaaaggaaaaagaaacaaagaaaaattgaatcaacaagaaaatgattcattattgagctaagctcgtgagcttagtgtttatataccaaagacagtgagaagttaggtaggataactaactgacagctcaccaagttacaaccaaattacaaccaacttgatcataagctaacaactaatacaaataacaaacctaactaacttgtaactgtcttaacatcctccctcaatctcataattgaagaatcttcaatagtgagattgtttctaaaactagcaaattgagcacttgaaatagcttttgtaagtccatctgccagttggtcaaaggaagaaacacgcttcacttcaatgaaaccctgatgaaccttttctctaacaaagtagagatctaacttaatatgcttggtttgggcatacatattagggttttgagtgagcattattgtgctcaagttgtcacatcagaccacgggtggtcgagccagattgagtactggatcttgaaactgtatgctgcttcttgctttgccatgtgatgagggttgatcccagaaagacagcaaagccagaggtgcctgtcattacaatctgtagcccaatctgcatcacaaaaagccttgagatcaagagatgcagactgtttcagatgcaatccatgatgttgtgtgccactgacatatctcaaaatccttttaacttccagcaagtgactttgcaagggattatgcatgaattgacagacttttgtcacgctaaaagcaatctcaggtcttatgatagttagatattgcaaagtccctactattgacctgtaaagttgaacatctttaatgggatcattgccataggcatagagtctttggccactggtcatgaaagatgagttaggttttagcttcttgcatttttgccttatagagaagatccctaatatatttggtatgagtaagtagcatttcttgatcaccgtactcacttctatgcctaggaagtagttcaacattcttaaatccttgagagagagttcttggtgcagctgggatataagagagtcaatggcagagtgatcacttccagtgatcaagatatcatcaacatagactaagatgataattgtggagtgtggtgtgtgttggatgaacatggagtgatttttctttgatgacagaaagccaagtttggtcaagcactgttgtaacctttcaaaccatgctcttggtgcttgctttagcccataaagagctctgtgaagcttgcaaacaaggtgaggagttgtggggtcttcaaaaccaggtggttgaagcatatagacttcttcttgaaggttatcattcaaaaatgcattattttcatccaattgtctcacacactaccctttgcttagagcaagagtttattgtgactagtttgactattggactaaaagtcttagtaaaatcaaaaccatgttattgatgaaaacccttagcaactagtctttctttgaattggttgatagaaccattagcatttcccttgatctatacacccacttacaccttatggcttgtctcccagcaggtagtctaacaagggtccaggttttgtttttcttcaaggtaaacatttcttcaaacattgcatcattccaatagccatacagcaaggcctattgaattgattctagaagcttggacacaatgaatgttttaggcttgtagatacttgacttagatcgagtttgcattatgtgtctagtttttttattatgaggaacactatctgtactgagtgtaggagtagtatatgtagtgagtgtaggttgcatttttctgagttcagtttgaacaacaagtgcattattggtagtattagttgcattggaatcagaagcttgtacccttatttggtcaggtgctggaataggaatagtacttacaatagctagagtttcaacttgaccaatagtggagacaattgtgggatttgtgacttgcacattactgggaacctattcaaagggagtatgatgcacattaatggttatgataacatgtgaagtggaacatgagggatctatttggtgttctcttgaactacatgtaacaggagctggtggtatagggtctgatagtgtaggaatatgagttgaaggcaaagtgtcaacacacaggacaactttgagatttttgtgacttggttgattgagcatagggaaacggatactcatcaaagatgacatctctagagatgtatagtataccatttgagctaaggcacttgtagcatttgggattaaggctatacctaagaaatgtacaaggtgtggacctaaattggagtttatgcttgttatacggtcttatgctgggataacaagtacaaccaaaagttctaaacaagttaaagcctggttttatgttaaacaaaacttctatgggggatttattgcctagtgttggtgtaggaagtctgttatgaaggtagatagatgttctaaaagcatcatcccaaaatttgaatggcaagtgtgcttgagcaagtaaagctagaccattttcaataatgtgtctatgctttttttcagcaatgtcattttgctcatgagtactgggacatggatgtatgtgagctattcccatttcttgtaaatgactagtgaatgacctatactcccctcctcaatctatttgaagacattttagtttgaaacctagttgcaactcagcttcagttttaaagtttaagaacacctttaatgcttcatatttgttctttagcggataaatccaagtgaatctagagtatatagagtgaacatagtatttgtatccattgaatgaatctatgtgtgagggacccccccaaatcagacacaacaagctgtaagggttatgtttaaacagtgtgtgatgcctttggaaaagaaaacttgtgaattttccctaaacagcaagcttcacaaatagaattagattctttatttatagaaatgttacaagattgtaggactttgtttacaattttcttagatggatggcctaatttattataccaaacatcaaaaattgtgaaattattaaggttatgactacaacttgtacgattattgacagagatagattcacttgagctaggttgagaggacaccactaagaagttgacaggagactgagagacgaagctagactgaggagattgaacttgaggagatgattgaagatgaagatcttcagattcaaatgaatacaggccattcttgtgtttccctatgagtagagtagcatgtgtcacttgatctttcacaagacagtagctagaatgaaattgaaaataaacaccattatcttcagaaaatttagacacactaactaaattctttgtgatagtaggaacatgcaagagatttttaagaagtaaaggttgaaactgacaagatttttgggaaatgaaagtaaaaccaatgtgtttattgggcagaactgtaccatcaccaatatacatgcattcggggctagtgtaatcacagttgttcatgatattatgagcttctagtgtgtaatgattggtagctcttgaattagggtaccaattattgtctgaattttggtcaacagtagcaagattggcttgagcaggtgggggtgctgatgttgaacttgatgcattggagtgagagaaggtcttgtcaaacctatagtagcaatcttgtgcaatatgaccaaatctaaaacagatttgacgttaaggtttattgttcgatggagaaaaccttgctcctcttgaaaaaccagatccaccacctcttaacacacctccaaacgcacgatcattaggataaaaagaattatttgaggagaggttaggactgttaccttgagcaaaagtgcttatgttaaaatgtccattgaaatttcctcttggagtacaaaagtaattgtgatttccctgctaatattgtacgaagctcctgttgttggtgtagttggccttaggatgaacatcaggttcatttatcataacataagcactgagatccaggtcagtgtcaattttctcgattcgagattttgagacaaggaacaaagagtagccttcaattctagtgttagcagacatcacaaacgtatcatacttgctaggtagtcctttaaaaatgactccaatgtgattgcgtgctgatagaacttctccaacaaatgctaatagatccacgtgttgcttgattcaaagtaggtattaattcaggccaagattacctttcctgaggttttgaagcttagttctaaactccaatatcttggttgagacctaaagtgtgaagtatttttctaacgtgtgctagatctaaccagtggattcacattccaccatgcgagtcagtaagctttctgacattgatgagagaagccaggacagaagtaattggtcttaaacatcccactcaacgtaggttggatttaaagtgtttgaagcttgatcatcatcagataagaacttaggtggaggtgcagctccttggatgaagtgcatcaatctatttcctcttatagcagccataacctgttgcttccacaataggaagttctagttattaagcttcacagagagactgtgattgaaaaacacagtggatgattcattcgattcctttccttttacattggttgatctaggaccgactgtatgttgattgctagaattgctggtaataacatttgccattaatggcagaaagtgctctaatatcatgttgaaattccttctggacatgattgaaaaagacagtgaagaacaaagaataaagagaaagaaaagaaaacaaagaaagattaaatcaacaagaaaatgattcattattgagctaagctcgtgatcttagtgtttatatgcaagagagatagtgagaagttagttatgataaccaactgacagctcaccaagattacaacagaattaccaccaacttaataagctaacacctaagccaaataacaaacctaacagtcacatatgccttggatattattgtcgaataattgctcaatagaaaccaactgaaattagacaagtcacaattcttttatatcaatcttctcgaggttcttccatctttcttagctataggattgatcagagcaccgagaattttcttacagaagactctccgatgcttaagccaagtaaagctagtgagtaggaaaacagaaagagagagttagagagataatcgacattttttcttattcaattccatctatttgtaactcttaaagtgggacaactagagggagttcaacctaactgactcagtgactatttgaattcttgccccaaattcttgcttagccctaaaggattgtttacaggattgatgacatcaaccaagctcaattctcgtttatgtagatcaatgaaatcaacagagctacgttccatcagtcaattgaccttgagttcttattgtgacttggatgcatatgtttttggtaactaatgggcttttataggccttgccttccttattaagtaaatttgatgggctaaaatatttgagctccatgaatgtaacagtaaaatttcctaagattagctaatatagtcagaattaaataaaaaaaaatataatttcattgacattattattattgagaaacaattgactttattaattggttgctgtatatataaaacactatattcatgtattaacaggcactataaaaaaaacttactaaaatagttttgactaattataaattatcattcttatgttgtgcataaaaagtttgtggctaaatgtattagttacaaaaattacaatttgctgtaactaaatatatttttactcacaatacttattgtgactaaaactgaattagtgacaacttgtatttaaatactnnnttttagtcacaagtaattttttactgcgacaaattcatatttaatcataaaaaatttatgttataactaaaaagttatcactaaaggtaactgttttttgtagtgagggtaaaaaaaatttgtattacgaatgaagtattatatacgaaatcattcatataattaaatttgtacctcttttatattaaatgtggctatttaacaaaaattattggtttaacagtttttttttattattttttcgttaaaatatgatttaacaccgttaaattaatcaattaattattttttatatatttttttccaatatataaatttaatttatttattaagatataacttagataattatttaaaagtattaataaaattagataatctttttatataaatctttatttaaatttaaattcgaagtgaattcaattgattaatcatattttataataaatttattagttatattatttaaaattctaaacttatttgctaattttattattcaataaaattagttagatatattttcttataaataaattcaaaactagattaaattatatatatattttaaaaaaaatatttaaactattaaattaatatttttttgaataaatcatgtaattttattaatggcaatgtataatccagtcgggacatcttttttgttggagacacgattaggattagaaatagaaaaaaaagattagccacctaattaccagatcatttgataaaaaacctaaaaataaaataagaaaaaaaatttatagtatcacacttaactttaacatatatttagtttcatctaccgatacaatactaaaaactgttgcagtaggttcatttaaccttgtagcttaagcactcaactattgtgcaagataagtaattgcactacactagcaacctcatcagtcgcaaagaagttgttatttctaaccactaacagcaatttgatggcgagtcatcgaagattaaagaagaaccaacaacaaaacaaaacaaattaaagtatgtttcgtagataagactaaaacactcaaaattattatcaaagaaataagactattcacaatagcaaaaattaaatcgtaatagcaaaccacaaccctcaaccaacctacacatgcgcaggggaaagccagcggggctggccaaagaaaaaaataatcttttgtagctataaatttatgaaaaaaacccctaattttttatataaggctaatatttatttaaattaataattaaataataataacaacataactctaatcaaatatatattacatgttacaaatacctaatatagatatatattataagaaacatgatcatattaattagtgttatatctttcaagttaatagatt

SEQ ID NO: 18895 - DNA, 4936 bp, Cannabis sativa
attttctttcacaccaaatgtacctgatgctggagtgattgcaccacctgaattacccgtcacacaggaaccaccaagtatctttctgccacctccgattccagaaaatccacaggaaccacttcagtttaatgagccagtgcaacagctcccaccatcacagccctttctgtctccaatccagcttccaccaccttcttttgattcacctccatttggaagctaaatagttaactcttttttttttttctttctggttttctatgatatcttcctgtagtctatttcaataatatctaccagttcttaatttgtttagtaaagtttgagtagttagtgagcttttttataacaatattcattactaaaacaataattcacaacagaactagctttacataactaagaaaatcatcacattcatatgtctcccaaattaatacagttgcaaatatgattcacattcaagtaccttcaaatgatctttacaattgccaatgaccatcaaagtatgaaaataataatacagtaacccaatttagtttacagcaataagataagtacataggaaatgatactaatataccttgaactcagagaatgagtagttcacaaaagagaaaattttgacataaacagttgaattccttcaatagctagccttcacaaacaaaacatccatggcgtaagaaaaaattcctctggctttcgctaggaacaaagccacaaggtgggactattcttctgagtgttggcctagagaacaccatccaggcaatgatatctatgctgactttattacactgctttagaattatctccctcaatgctcggcagttcttcaccacttgcttcactccaccatcagtcactttgaagcagccagtcaagtccaattgcaagagttgagggcattttcttccaaccaaagccaacccatcatcattgattctcaatcctcttgcacataacacttccaatttagagaattcaaagtccataagaaaagtcttgacccctctacaataactcatgtccaagtacctaagctcagtgcatctccttgaaacttctaaaaggccttcctctgtaatgcttaagcaactgtttaaatcgagcagtttcaaattgctgatggcaaatgcgaattcttttaagctttcattgactaaagagaaattttgacccaaatacaaagacttgagagtgttggaaacatggttggtatttggttttttagctcctacctttgtaccaacctttgtaccaaccatgttgatcccattcaaaactggacaattttcaatgagtccgaagaatgttgaatctgtcaacttagtgcacatagaaaggtttatgtattttaaacttgggagaaactttgttaactgaaacatggactcgtctgttaggaaatccgcatcctgaagatccaagtgctgaagagattggtgcttagatagcaattgtttgataccatgtaatgtaaaaccagagcaacaagagagaataagcttatttaatggcatatgtgcttctgcaattaagtaaagcatttcatccaagatattaaaaccagacaaatcaatagaacataaagcctttgctgaaaccaatgaatctgtcaatgctgaatccacaacactaagcctagttccaaatacagataatgaactcaaataaacacagccacggatcatcaaggcaattccatatggtgtaatgaaatcacaaaagtgaatcactatctcacgcaattggacacaattcgtagaaagatggacaagagacctatcagtaatgaagtgattaccagaaagattgagctttttcaaacctttgagcttcaacgacaacgtcaagatcccagaatcgcttatgggtttcgtaaaactgctcatatccaacaacccattagagtttgagcgataatcatccataagatagctaatatccaactcttcaagagttgggatcgaatttgcaatcaaacccagatcgctgtcctgtaaagaatagatttttgagcaattcaaacacctcaaattcttcattttggatcccaaaactcttaacccatgaattggaagagttgaccgattggagatattgagtgattcgaggtccaacccagattccgaaatttgagaaagaaggccatcgacatcaccgtggaactcactgaagtcaaccgttctgagtctggtaaatcttcgaagcaattgagggagaacgacgaccgtcggatgaggaattgcaagggaagtgatgagttgattggtgatggagaagaaaagcttgcaaaccaaagataaagatgcataatgtcggcggtcttcgacgaaattgaggactaattcccagcattcttctggcaaatcaactgaattttccgccattaatagtaattttgtttcccctgttcttcctcaaagccaaaatctttcatcaaattgtgaaattcgaaaatcagaggcacaaaaggaaagagataattaagttgggaaatttgagttttgagaaggaaagagagaatctcacttttttgaatttcaaagaataactttttttaaaaaaataataaaaaaataaaaaataaataaaaattcaaatccacatcgctttggttcattttcaacttttatcttccattattaaattttaaaagattttttatctaataaaatacgtgtctattaaactttacaatatatttggctgaaaaaaaaaaagaaataaaagataatgtgattacaatggtgataaaaatagaaacacaccattaaagacaaggagataaataattttttattatttatttatggtgaagaaagcatagttcatctcatatataaaattcactagcgaaataatcttttgaattttgttgggtacaataaattatttgaaattttaacatatttacaagatagtctaaataatttggggcctctcaaaagaaaaaaataaataatttggggaatttagataaaataataatagtaatattcacatgcaaataatataaatttccacatgcaatttttttttttttttttttgaagggccacatgcaattatttatcataaaaaaataccaattttaatatgagaaattggaatgaaagaattttggaatattctacacttctttagaagttgggaaatttgagttatggtcatcaattcaagagaaccaaagcaagtataagccactcccacctcatttttacatctttatttaggtacttagaaaaagttcaaaagtgatgagccttgtgatttggtcactttcattatcatatttataatatggttgagttaaagatgttatgtttggagttgggacaatgggacataaacataatgttatgtttgaagtaaagaaaagatgggatggggactactaagactaacaataataacaacaataatatagttataagtttccatacttttaacattccctacactgtagggtaaggtagtgtgtgtttaattaatctctttgtcacatatccataaccatgcacctactatcatatcctatccacaattcaaaccaaattatcattatttatataatatacatcatgtatccatttttttatttaattatatatataggttttggcctttgctagtatgtgacccttttcaattttgattatggtcattaaaagaagttatgtccatttatatgatattcaatattgcagagacattaattatgcttatacttaatataatggtaaataaatagtatttttccttccaatttatgtttttttaacttatatttgtttaagttgtgcatgcaatagattagatatagattatgtaaggtatatatgtttgtcttgtttacatcaatataatacaaacgaatgttccttttaatgatataactaacatagttaaggttaaaagcacatgcctttcgtttgcttttctcttactatggaccactccaataaagtacagttaaaaatccaatccaaggaagggaaaaacaaaagaaatatatatatatatatgaactttaaacaaggtaaatataagttgcaattttaaaaatacttgtctattttaggtatatgaaagacatttctcaaaataaataagcatgtttttagtaggtcattcacatatatgttatgtctcatgtccaccaatggagacatgacaactcttacatatttttccattagttatgtctatcatgatactttaatttatctctattaaaaaattgaaataattttaaactctacttataaatatactcaaattccacaaactcatatatggtgtacaaaaaattgtgtgccaattaagtttagcatagtataaaaatttacatcataataaataatgatttacttttatatctatttttatgttatttttgttattttataataatatgtaactatagtattaaataataaacgttttattattttatattttgaataaaatattaaaaagagaattaatttaatattaaattttgtaattatatttttctgtagcacaattaattcttaaaataatatgtttaatgaaatgtttaattatattttgaaactataataatgtgttttttttttaaggtttttaaaaaatgtttaacaggctctctaaaaaaaactttttaaaataatatgtttaatgaaatcttttatttcaataataataataataataatgtgatagtttcacacttctcctcacaaagaggaggtttcaatcaaagtagtaattgttaattatttttttttttattattattattgctattttaattttgaggagagggttttaatttcagatcactttcctcaaaattaaaatagagcaatttgcggcgaaacccccttatgttttgatttttatacacttaacccccttatctttatttttggtggcaaaa

SEQ ID NO: 18896 - DNA, 4344 bp, Cannabis sativa
  modified_base (33)..(40): a, c, t, g, unknown or other
ccgtaaatatgtaaaaaaacattctttgaacgnnnnnnnntaaatattttacaaaaaatagtgtcttatgtaattattcctttttataacacgttacaacaaggcccatattttttatgacccagtacggtacgacctgtactttaaaaaacttgaaaaatataaatcgagctagcacgacaagcacgtagttacagctatgaaatcaaccgatcaatttcatgttttaaggccagcatcttaatttgtttgactaattcatgaagggatacatatggtttgtttgtggtttatagacaaggcccatcccatccatgatgaagaggtgaaaatctatatatgtacatgaaacttaaatacaagcagtattaacagtaaacacagctaaatattgaaacttaaatacgctgctaccatggtcgttaatggaacagatagattgtcatccactacattcgaaattggaagagactcaaccactgttgccaccatagacaccagagccactctttgaagtgttgagggccaatccaaattgaaataccccagagctgagaaatagtacagcatcctacaaaagaaaaaaagaattgcacttataagatatgcagtattagatcttttaccaaactcgtataatcagcaatggtacaagattttcttaaggaagaatgcaatggaataaagttctaaccaaactaaggaaaataaaggaaatggattcctttccttttccacttaacagggcctgagtttcagaccatctgggagcaaaccacaggactggcctctcagctaatccctcaagtattttaactactaaggaatgatattagtaataaagtttagaagtgcacccgacagaaaccaggaatccaaagacgaacattgatatgctacccaccaaactcttgtctgggttgtaaggaatctttgcagacccaaaccttctgcccattatatcagcaacacctgaaaccacaaagttatttatatagaaaaagaccaagtacatagtgcaaaaggaatagagtaaattggaagaaggctagaagtgttaccatccccaccacacatcattgataatgagatcacggctactggagactctcgccaaaagacaagagcacataagatcaacacaataacatagtacaaaggacctcgaagcaactccctgcaagtgtgaaaaacttgaagctaagcccctgacaatgtcttcgatatgaagaaaacaatgatgagcataggaaagtttactcggggtttccatgtcgagtcacagattttatgagtccatcatcttcaaccaacgaaaagccatggacaagaagccttaagcaattcaccataggaaccaatgaagcaaagtatcgagcactggttgaagtgctattctaccatcaaagccatcaactgaagtagttagggcatctgatatataaattattagagcacaaaagaaaagttcaatgatatcagaatctttgaacaagaagaaaaggggtacctaaaaattggccatgaaaccatgaacatcaacccggacaatatgtgaactagttttctgcttaaactctgccacaattattgagacataaaaagcattgtcagaaacagttaaacatgaactaatgtacacatcatttaaaactttaatattataacaattgcagttgcatgatcagtaacttatttttgaatacctaacacattcatgttataagaaaaatacatcagatcacaccaacaagcattaattaagatttttcaccctatttataccaagtatgtgttaggatcacacatccaatatgtatgacattagttgatggtttataacttagttaggcatcctgttctcatcggttagtcatgtaagagtgttctactcaagtggttggagcaaatcagcactctctagcgatgtccctctaaagggggtgtattgttaggatctcacctaaactaagtgtgactaatcgactgtatgagattagttcagttagtgcttgataaccacttgagcaccctcctctcataagctagtcttttggcttcccacccgctgtcactcactattagcttttttcagcactaattatcccttttaaaacacagaaggttttatatatgtgtgaattagagaagaaaaattgtatgcctgcctatgtaaatttaataagtgcaaattgagttttacatggttaattggttatgaaaaataataacaaccaatagatagtttcccataagcaccggcaaggttttaccgtctaccacttactagtattgttatttaaactgttcattgagaaagtccaaaatgactgtacaatacagtatcgaaataaaccttaaaaataaacagttcatactaacttttaatcaattgtttcaattttagtctgtttcactttgattttgcaagataacaaaagagttgaatttaatataaaattttgccaaatgtccatgactgaaactatatttcatcatcatcatcattactaatatatagctttaaaaaatggactttagcaacatccatactcacaagtcatcatcacagctcatggaatcttcaaagcttttcgtactaataattgaacatttatgagctaaaaatctaaatacataaaacaaaaaagaaccttgccagatatcatctcatacagagttctgttaacagaaccaatcaatcagagagagagagagagagagaaagacctgttgaatgagatttcgcccagttagactgtcaaaggtagatacgagtccgtacgcaccggcgagtactgcagccacagctacggcgtcctgcgtcaaatcagcgccggcaacaatcggtaggccgcgacacacggggaaggaagcgtgtcggggaacattcggagcacggtagagaaactggaggcgaagtggggacgaaggctccagcgagaggagggcgggaaaaggcggggtacgaaggaattcgacggcggaggtacggaggaaggggggttggcgcacgataaatggtggagtgtaggttaagagggtcatggtagcagaacaatgctctgtgagtttagcaggtaccttcttctctgtgagttatcaattcaaaaaaattgtcgagtccattccaaaaacgcattgtaaattgtaaaaatgttttatcaggtttttttttttttttttgtgtgtgtaactgaaaacatttgtggttgttgtataataatagaatatttacacaaaccaactcaaattcaaaacttttctattttaccttttttttctttatgttctgatatattgtttctcagtgtcagtacaaggtgtgatgcgcgtggccccaattgcttgtggtggaaagaggacgcgcgtttggaacttattttgttttttttaatgaaatcattgaaatgtatcttttgaccatgttacgttttttttataaattttatttgcacctaatattaaaaaataattaatttttaaaaattacttttaattttttttgaatttctttttcacattattttcatttaatattaacagttaggttttttttttcatatttttttaaaatcatgtatgattttttttattttttttaataaaatttcatataatttttttattttaattttttttaccttaatatttaaaaaaatattttatttctattttataggtatattttttaaaaatatagaaataaagaaaaaaaattaaaaaaaaatagtactaattaaatgtatatattttatataaaataaaattattaaaatatggtgtatttataattttatgaggtgcaaataaaaatcctttttttcaaattagaaaagtaaattattttacgattttgttacagtcatactctttttttactattaagtgtcaattcaaaaacacatggcgacatattattggactatgtattaaataagttaaagaaatatgtcgccacgagttttagagttgacacttaacggacttaattggaaattaacaatcaaaaaaagatacgattgcaacaaagtcgtaagataaagtacttttgccactaattttttattatgattatatgtgtaacaattgcaagtattaagaaagtttcgctgcaaatattcctattaattaaatgattaactattttttatagcataagaaatataaagaaagagattaggtgactaattagttatttttttttaaataatattaaaagtaatattatattaaatttagtagaaattacacaatatatggaaaaattataaaagtttaatttttatggcataaataaataataccatgggttatgggttttttttaattttttacatttgt

SEQ ID NO: 18897 - DNA, 5800 bp, Cannabis sativa
  modified_base (2194)..(2196): a, c, t, g, unknown or other
  modified_base (3381)..(3381): a, c, t, g, unknown or other
gtggcaaacctaaaaatgccatatttttctaactttgttatgaaatcctatatttcattgtaattttcacttatatgatatccaagtagttataattcagtgtgaatttgagttgctctagtttaacaaggaacataatttttgaatttctactcaaatcaagatcgagaaaataagttttccaatcatttaaatccatattattagatgcttacaaatggaaagaaaaaaaaaacatatttttagatattagcaatagaataaaaaaagtacatttttaaaaaaagttctcatactaacctgtcctataagaaaggcccaagttataatgagtttgcagagacatttgggccaaacaatgacttgtcctgggcttgcagaggcattttgggccaaaaagtgactgtaagagatctatgaaagaaacaaaaccatgcttgcaaattcttagtatacaaggaaaaagacttgaaaaaaaacacctttggcttggttactcataagtttatttactttattattattattctacattgtattctatatcccccacaaacaagcatatcccttttgcaccaataagctcaaaccaagacacataatcatttgtacaataattatcttaataattagtagttagtgccacaatttgtttggtagcataatgtagggtttaatgctttcaatttttataattcatttttcaaatcaaggggcaaaatctcattgattgatataaactcatgtaggacctcaattaagaagaagaagaagacacatttaagaaatagaaacaaatcataaaaatacaaaccacattttcatattattaatcacccaattactctaatactactactctacactaaaacaaaacccattaaaaataaataaataaataaataacccttgtgtgaattttccttttggcaccatctaatatgatggccaaaacccacaaatatatagctaaaaaagaaagaaaaaaatgacagaaaagaagaagaaggaaagaaattgaagagggcaggtctgatactactaaattgtaccaaaaaaataaaaaataaggactgtcagtgcacaaccaacactttcttcacaatcttataatgattattgggcaggtttaggaccaccctataattcaaaaacagaaaatatatataaatatatattatatattcatgggagtggtcctctaactttaggggttaccataaggctgagtacagtaattgccaaaagcaatgaaaattgatcatattggtaaagatatcagaggtaccaataaccattatcagatttatattaaagacacatctttttgtattgttgttctctaaaacaaaagttgtgactacctgccacaacaagagatttttgatctgatgctcttctttctttcccaactattgtggtcctaattattatatatacttttaattttagttttcatttttatataaatgctgtacttttctctgtgtcttacaatgtctagctacctatgttatgtatgtgtatatatatatatatatactatgcacagttttctgcatcagaaaaatctgatcccaagaaagaaaaaggcttttgaaaaataaagtagattattgtaagtatgaaagtttggatatataatgtactgagataagtcttgtacaatattgtgagatttgagtttagattggtacttgagctctatagattcaatctataattagttactctctttagttttttcttttattttagaaattaacccttttcatataacaatttattgtaaaatatagtttttttttttttttttggattttagaaaagagtttctcctacaaagtattcttgagagcaacctcattttttcttagtaaaatgcaaataaaataattaatattttcaaaatggtacatttactcaatgtttgcaaaatattttacttttgagtaatttacagcataatttataaaatattatccacgtggcaacacttgattagttcacgtcattaaatttttatttttttaaaaaaattaatttaaatatactaataaaaaaataacgtgtggataataatttaacatttaacaatcaggtacctacggagttttaaaaatataatttaagtattattaccgctaaaaattaaacttaggtatttaataactgagagttaaacttaggtatnnntgccgcaaattactctttactttttatatccattatattccttttatgtttgtagtaaatattctcaatatttttatacttaatctttaaaaataatattaaatagtattagtgactaaattctcacttttcagatacaatagaatttttatctaagaatacacttgggatcaagcaaattatattctaattcggaggttataactaaatagagttacactagaaaaaaaaaaatcaaaacaccaaaaaatatcaatgtaataacaatatcaataaataatctttaatactatattataataaaattatttttgtgtaaatataatatttatatacaatttgaaataaaattattaattctacataaataaatttataaaatatatgtatatattttattaaaatgtaattattcttatattaatatagaaattagaaaatgcataactaattacaatttaaatgttcctctgaagcacattctattgtttttaacgatttgattagtttataatgataccgatttgagtcaaaaaaaaaattataatttagagattatttttatttaaaatcggtccaaattgggcttttttttttttttttttcataataaattagacattattcttgaataaaatatttttaaataaaaattctattgataaaatattgcataaaaaaaatgtaacattttgacaatatttagtatatttactgccaaaaaagcaaaattggatataaaagttttaacactttaaaatggaataaaagtgcattagattagtaattttaacagtaatctactttttcttttcttaaaaaaaacaacactattattaccaaacaacccctagacttttatctaattttgcaaactcccaatttagaaaaatatatagcattatacaacagtgcattagagataccattattaattattttctttttcttactcacattattgtagtacaaccaaattgtcccccccataaaaggccacaacctatcaaatattttacacatatagactctataaacaatttaaatacagaaagtgaaggaaaaaaatatatatttagatcaaaagagtgtagattttttattttcaaaaaaataaaataaaaaagagtgcagattttttgtatgaaaaagtgcaacccccacaattttttttttttaaaaaantaataaataaataaaaaaaaatgcaatattttggaaaaacttaaataaaaggtgggtagtgggtagcctatctattaaacaatatgcagagaaatgcaaccatcaaagacccctccactagcttgtttggtgggaaaattgtctacataccaccccatttcctacataagtttttattttttttttttaattttttatacatatgaataaatataatttatgtttatgacaataatttctatatacacttttgcaaaaaaatcaaaatcaaaattatctattatgatatgtgtactacttttattataggttcatcaatgatgaatggaaagatagctcggcccatttctttacaaaaatatcaatatctaattaatatcttatatagtacaactctttaataatttattgttggcttcatttttctttgtcattcaagttttgtaaggtctttgtttaatttagattgttaagaattgtaccttttatagtctttttatttatttttgtgttctttctttttctttgatttttttttctttttttgaaaataatgtatgatatattaaaagttgttagaccaattggtcattacaatcaagttcattggaatagagttaacatcactattaccagtgatatccaaacccaaagcttaattcacaatattatgggcaaatagtatttaacacgagaaatttagaaaaattatatcccaaaaataatttaaaagaatttaaacaagcagtaatataattacatttctcatctactattggtatcgttgatagcattgattactatttcaaaatcactctctacgatcccataagagatgccctagctaaagaacacaaaaataaattaataaatatactaaaaaagtatatttttttggtagttttggactatttatagatatggataattaaattgtggcataagaacttaaaattttacatttgtaagtgtcataaatccaataatttttgttagcagtataagtactcaatatttgtaaaactataatttttcttatattttattagtacataatttgaatttttttaaaaaaaattaatttgaaagtaactgacattacatgtttctgtctatacacaataatatagaatttgagacttaaatatttattgtttaaaataataataaagtatatatcgacgaaactgcaaaaaaataaaacttttacaaatattagaaaaacttatgccgctaaaaaaatattagaattatgccgcttacatttaaaattttgagtacttatattattatttactctattaataaatataaaagtatgtttgctacattcataaaatttgagaaattcatgccaatatatcttaaaataaaataaataaataaataaagtcaactgaatatgggactaagggcgactcagatcattaacatttccacacttatatatattgatgacttacatttttttttgtttgtgataattgtatcacaagagtcatccttttttgcacttattgacttagctaaaaacaattaagtgtaaaatattaaaatatgaatcatcacccaaaaaaaaattgatgtggacggtacatagttgtatatatattcattacattgtcccaaaaaaaagattattcaaaccttattataagaattccattattacttgatgttatggttcagttcagtgcactcgaccgatatatatggtacatatggaaaatgaataaaaaatgtatcataattctcataaaaataataagaaaaaaaaatattatgtcatatttacaaattattcaaatgaaaataattaaaaaaaacatatttttataaattatatgatttgatgaagagatagagaatatatatgtggacaaatatgtatcatgatatttatatatataaatgtattaattagttgatttctccctaataataagagacctaattttcaaactctgcaaaatcatggaaatgtgtagctattataagctagccttctcaattcttataaatgtatatacatgagttttttacaatattattatttaatttaatatagcatttaaaaaaaaataagaaaaagaaaaacaaactaataaacctccttatgacaacaaactatatatatattaaattatatatatatatatgacctcccaaaatttataaaatgaagatcatcatatcactattaccaacaaacacattttaaatttatatatcatgtaatgggtaatacatatatataataagtaatatgtaacatataatttataatgcaatgtatccaaatcacgttgtatatacatatatacaggtgatatatattggaaagaaaattattttaaatagtatcaagctattattgtaatgagtttattactatacttgtcggctactatacaatatt

SEQ ID NO: 18898 - DNA, 9160 bp, Cannabis sativa
cttacattctcactattgtaatttaagaagagccactctagaactcacaacacttgtgatctaagtggtattacctctcgtatcaatacaactaaaaggagattaggtcatttcccgctaatcaagggggttgaacctcaataaattgttgtgttcatttatttacttgtttacacatggtatcgatcatatataagactccgttgtctgttgaccaaattttgagtcaacatgaacaattaatctataacttattatagatttggatttaaccattagcactcccagaattaaaactaatggaactaatattcgatccgtcagaaaagcttagattccattatatatcatgttcccagccactcatgttattagattcttaaaatagaagttataagaatcatcttctctgagtaactttaacaggtgaatcaaaaaacctgatgaacacaaatatgaattcataaataccaggatttagacagatctacccatgatcatcattgtgatataaataattctttcatagtttacggtatgttaatgaaagatattattacatatcgatccagtcatatataatcaaattatacacaacacttttactatatgtctatctacatatgtgatccaaatcaaaatcacacacacacacacactagagtatagtgtataataaattgtacttagtagttccatattaaagatccctttactttaatacactaccaacttgttttattcatattgtataatcttaattctcttgtacaaccttacaagattataccacttccatatgaataaggaattttaagatatttattaattatacttctataattaatgtattcatttatcttataattgtatttcatatattttataatatattatccattaattacttttagggcataaatcccaataggataagcattgtacaacatcaaaacacttttctctctcctcctttctcttctctctctcttaaaaaaatcaacttaaggaaaccccaaccctaaaaccaaaaaaaaatcaatagcttctcactaatttttagtcaaggaatcaactaaagggattgagttgtttgtttgaggagtaaggtaagcctagttgtactttttcctctttgaattttgaagaaaatatgtcttgagttgaattttgcaaattcaattatgtatagggttaatcttgttagagcttgttcttgagtttaacttaaggttgtttgtgttttaaattaaagttagggtggtcgttgtagcttgattaagtgagttgagctctaagaattcaaagctcactcatcaatggtggtttaattattgtgctattgtgttaattgagctatggattatgtttagaattgatattataactgttctgtgaagtttggtaggttttaaaggaatttgggataaatttgggtgataaaacctcaataattgtgtttcctggtgcaaactgaaccaaaatcttgtaatttcggttaatcatatgggaatttcagttaactggttagggccaattttgggtgccttgatttttgtattttatcaatatttagggtattgtcacgatatttatcgataggaaaactttcagttttgagtttaagtcctaaaaaaggattaaatgagttatttaccagtttatagttgttgtgacataaggtctgagatcgtcgagcgttttccactcaagttggctagcacacttgtatttggatttgaggtaagaaaagtacaattgtaccgcatgaaggtcaatatatgattcggtaattaccgtttgtaagcaagagttattactctaaattaaaaccgctattatatgtttttgacttatcggttgtctcactaggcaatgatagtaacattggttgtctcatttaataatggaagttagtggatattttatgaagtatcgagaatagtttattttaataaacaaacacttacaattgtaaatatttgtgttatattgtgatttcctacatgagttaaaagcttgattaatataattgatagttttaatattgttagttatttctatatgttgtatatgagttgtttttttattttttttgttagagtctttgtaactcagagttgttttgtggtgctagtaaaagaaaggaaatgataagtcaaccatgagtcggagatcttcactgccaaatgtacatatcaattcagttggcacaaaattttaaatatattagtattttgtaataaaatgtcatagtaaaacttttgtaaagtttataaaagggaatctcaaaacctagcaacttttaattattgtaactttagggttcgtttgttacgccgtattacaccttattgtattgtataatattatatttaattatactttttgcaatatttttatgtaaaactatatgtggcattaatttttatggacacctaaatatataatattttagtataaattaaagtttaacatagttttatataaaaatatgatatataatttaatttaatataatacaatacaatacgacctaatacgatattccaaaccagcccttaaatttttaaaaataaatagtaaaattttaattaatctacaattttagtgaagggatagtttattattataaactatttacacgaataggacactacatcagttgactcacatgcaacatctgcctcaccttcttctttcttctctatctcttgcaaattattcttcaaatgtgttcttggtctttccatgactatattcttgctttccttgtattctttcttttttatattttcttttaacataaatagagcccttcaccactagttttagctctatcttctaatttcttcagccattatcaatgttcatacacctttagtaacagactgatcaatataattgcttaatcatcctcttcgagttttactccaatattgttcaatttggtctcctttaatttggtctacaaatgaaaacccgacaaactttctcattgtttttaattattcatcaaatcaaagtagtgcaattctcaacaaagatttcttaatataatcctcaggtcacaagactaatttttcttttcttgaaaaataaatattgtacagaaatgtgagtcaatatggaaacaaacattctcaccgctagattcaattacaggtcaacagaaattcaccgtggcagaaatccaatggcccaaaaatttgggccccacccgaccttattattattaagtagtcttattaattagtcgtcgtcgccgaccttaatgactacaactgttaaatcgcaatttatataataataattattattgatttgagtattgagtgaagtttatgaactaaatttagagagcgattttttggagggtacgaatttggcgttaaaaagaaaaaagaacaaaatccgaagctaaatctggcaaaggtggaggggttgagggcgcgatcgtcgttgaggcaagacgggatcggaatttacgacgatgacgaagacgacgaatcccatttgaggccttggcctcgtagattcatggcgctccctttatcttgttcctccgcttcaagatttgcccttcttttcctcctactcgccgccattgccaccgcttgcattttcctccctattgaaaaggcaccgttcaatctttctttttcttttttctttgtttacctttttatatgcattttgtgtgtatacaatttagcttcttatttgcacaagtgtatttaatttggtttcaattgcggtttagattacttatatggtatttttggttgggagttggactagaaatgtccgcgattttagtttcaggtttttgatttcacttaccacattgctctggagtacatccattgctaagaattttagctaattctgaaactggagtcattagaccaatatttatgttgtaagacgaagttgaattgtatgttaaagcttgacgtttttgtgatcacagaagtatttggttggagtgaattaggaaataaaaatttaactacctaaaaccatatgattagttatctaatgttagtaaaacaatgaatgatttagtaatttagaaatggtgatttcctatgatggaatctttagtagatgagtttctggcccttagtttatttattcagttttatatgttatatgtcttatgaagatttactctttgttttggccatgtttggcatgctgataggaaagagctaggattgggcaactttatcatatgttttggtcatttaattagagaacatattaggaactttaatccaaatgccaaactattccacttggcatgattgaattttgtccaggaatctgatataattttgtcctacctatctcctttctttcactagattttttttttggctactgaacaactcttgatatccctttcattcttcatagtttgcatcttgctcttcttttctgtgcagatattgaaggatttcttgatatgggttaaggaggatctgggaccttggggccccattgtcttgtaagctttccttaagccataaacttataaatcctcaaatatgtttaatcttttaattagaaatcatagaagtggtatcctatattctttaatcagtatctatattcatatcacatccatgtttatgaaacttaaatttcagtgagtttcactgttaaaaacagtagaaaatgacagccggagtggccagggccaagtttttgggtttgatttcttattggggcatctagctaaatgccataatttcttgcttcctcacttttctaaatatttcagggcaatcgcatacgttcctctcacagtcctcgctgttccagcttctatacttactgtaagatatgcatctttactgtaaatgctttaagattatttttcattctcttatctcatatcatcaagaggacccgttaattatggaattccaatatttacagcaagttaaaagtcactaattcttattgcagagctaaaacaatgacattattttgagtttttatatttaaattgagtatgcaattgtcagctcagtgatcctccccagtcgctctgcagataaagtctgtctagtcaactttttaagtttaagtgtgaagtatatctgattatcatttttttatttattttgatgtgctttatttgtgtttttttttttcaactcttgtacagcttggtggaggctatctttttgggttgcctttggggtttgttgctgattctattggtgcaacaattggtgctacagctgcatttattcttggtagaacagtgagtattgtagaccatagttttgcagggtgtgtgtatgtttagttaaacggaataatagatgcaccgctttatgttatactaatccaaaagcagcatagtttgtagccaatatacttgaataaactcaagtactaattatatacttgttttagtaggcttggagcaattagaaagttatctaaattagttattttgatatttagattggacgatcttatgttatctccaagttaaaaaattatccaaagtttgaagctgttgctatcgcaattcagagatctggctttaaggtattctttattttggaacattttcagattgttctgtgtacgttgtagtggtcatagaagctttgtttatactctatttgatgtttcataccaggcacatcaatcactattgcacaaatcctaattcttttttaatctgggtttatttaacagatagttctgctgctacggctggttccgttgcttccatttaatatgttgaattatcttctgtctgtgactcctgttcgcatagaagagtatgtggtggcaacctggttaggaatgatggtgcgtattctcttcaaatgactagcagttacatgtttcccattttttatgttgcttaatatgaagtataatagacaacaagcttgatttacaaatgcattattcatgattttcttgttcaattattgccattgacgaagtacatcctagcatacctccataatacttatgtgatgccaaggcatttgaactaatcttagttacacctcaaaaactatcttatgtgagagctcatgatcgtttacctatagggataattttatataggctattccaagaaacaatttatgtcatttattcctaacaatcaagtcaaggctgatttatctgtgatcttatttatttgtatactctaacaagaattattttttgcctcacagcccataacatttactctggtatatattggaactactttgaaggatctatctgatgttacacatggatggaatgagttgtcaacctccaattgggtacgcattgttcacacttttattttgttgtcctttttgtatgtgtttctactttatttattttttaaactgttgaggcctttacattttagtcatgttttattttatttgcttgtgcttgcaggtgtttatagcactgggttttggtatatccagtaagttccctgaattgtattattactcatcacacctgtttatgtgctcaagtgcgagtttgattgaacacagcttgttcacgaccctccctgtccgaaccatgctatattagttatgtagaacttaacttatttgttagaaacttatagagacgacgaaattgttagtctatcaaggattgaagggcatgtccacttaagcacatattgagactcaagttgctcccggctattctgactttctttcattccatgcataacatgttatttcaaatagtttgttgctgtgttaatatgtctgttcttcaggaaagcgcaaaatgacctgttagattccctttatttataaaaccgggttaagtttgatatatcatcagcaataggaatatgtagctggattcatgtttatacttttggtttcctgtttaacatgtttttcttctggtttgttcttcagttattatactggttttcattaccaaagtggccaaagcttctctggataaggcacttgctgaaaatggtgaagtggaaggcatgtcggctccagagactctaccaatttcatcaaattctcctttggatctccaaaagcctctcattatcaagattgacccaatagatgaacaccatgagagataacatacatattcttttcttcttttacttctcttttatttttctattttcttgtaaattctttcacttctttacacctcataatggtataaattgctttagatctgcaggggttagggagtgttactttttaaaattgtaaaaccttcaccttagaaataagagaaggaatacctatttgagctaaactgtagtccatactgaggttttaaaattaccaattcctcccagattttagtttatagataaatgtaagcttgtttaaaagtagatcaagcttaacatatatagattaaaatactcatgtaaaactccgataaaagtttatcagataagtaaagttctatcttgagttatatgagactcgatgtttatttgtatcactagcgatacgatattttggaaggtgttaggcactaatagtattttttaacatttttattgagactagtataaaataactattttataaaagtggtctagtacttttttgtagcactatttatactcattttctaaagagaaaataatacaccaataatgcaaaatgtgtcaaatttagcctgtatacttataaatatttaaataaataggattctcctttattcaaattatgatcttgtagagtaattttttttaaaaaaaaaaaggaaatctctccgaataatcaaaatcaattgtaaattgttattgattaccaagaaaattatattgcactaggcaggtgttaccaattacaaccaccaatccaaccaacaatcccaaaagggattaaaaaaaaacaaagcagctaaaggctatataattaaagctatcatctaatctttttctatatcactaattttcttttactttactaattttcttttactttagcattacatttcgtactttccagatgagcattgttatgctggtgcccagaacttttcataagtgtcaccctatgattagttagcgatatttcttaaaatttattttcctaagttatatgagacccgctatttaactacaccaatagcggtatgacactaaggaaagtgctacgcacctatagtgccctttagcaattctctttccaaatctagtaaacaagagcaactaaacttgccacaaacacacctcttttaaagacaactccttcccatgccccaaccatctcagtaaagtggtataatttattgctgaaatgttccaatctaaccattgcttaatctgaaactaacacaactgactatatctacaagaaaaaaatatattaaaaaataataataaatgagcagaatcttctctttcataaccacaaatcaaacaatttggagcctcaataactctaaacttaaacaatctatgacaagtcttcaacttgtccaatttagccaaccataagatgaaagaatgtttggagatactcataatctttttaaacaacttgatgatatataatactaatgtgatgcaaatgtagtgtagtacaagagtggagacaagttttgaaataaatatctacattcttactagaaataatagttgtatgtttagtgctcataaattgaattttgactaaagttataaatagattcttcattaatattcacatgtggcctatgatggtataatatattgttttttttgaaaaaatgaataaagtttttctaaaaatgaataaaatatagctataaggagacatttacaagaatttttttggttcgagatttttttaaaaataaaaaatgaaagacaaaaatctagctgagtaataatttatgaaagaaaaaaaaaatattttctttattgtggtttgtattaattaaatttttatttatttaaaacttcttttatatccttttaataattagtaagtatgattaaattgacattctagtttaaatgtggaaactgttttttttaacgaaagatagtaaattgactcagacttagagcatattcttaacatatgagctaaaatagctccttagctaaaattttaaagaatttgctaaaattgaacctccaacaagtgatatttagtgatgtaaatagtgagctaaa

SEQ ID NO: 18899 - DNA, 2657 bp, Cannabis sativa
aaaccatgacgctctgttcatgtggaaacattggagttgcttagagaaatgttggagattttattacaatggaagaagacattacaactctattgcaatataatacaaggaccaataaagagattaaataaatattacagcaacatatactacaggatatacaataagaaaggtagaataagaatatatatagaaacacttactcacaatcttgagtgtaaattagtggggatcactatgacttgatcaaggtatttccccctatctctaagcactaaaggaactctgtagaaaatagttttgagaaatatcaagccttgtgttttatagcaagtgcttgttgatagaaaactaagtgtcataaaatgagcactttagacctctatttatagtgtttgaggatcactttagaaaatcaaattcccttcacctcatggttgttaccaacactttaaatagtgtttagacaagatagttagaaacatgctcaattaatttatgtatgtttatggacgttttgaaaattggttccaagtattcaaaaaacaaccataaaacgacatattatgatacgaatgggaggcctcctattagatttacttatgctagaaggggtaagcaaggtaaaaccaatgatgtattggcttaggaatgggtattttagtaattgtacttagtggtgagcttccttttgtatggggagggaatgttatttttcggttatgcaatttgtaaaggaataattctcttctgcatcagtagagagcttccttggctctctaccttttgtggaattatctccatttttcagtttattcaataacagctcccacaatctcttctaactttcattgttactgttctattactgtcattctgctggtatttgtggctggttatttgtgattgcagcagcaggtgctcatcatattatcagtaataaaacaacagttttcaaaaaacacaatattgaatttttgtaactcctctccgaatcaaatttttctccaacatcccaagactcaaataaataatataaataagtattgtaacaatttctaaccgctaaaagcttatttcattaattttataatttctatatgtaataattcacttaattacatattattaattgtaatccttgaattataaattatttttaatttataactcctcgtatattataatttttatgtgtattattatactatatataatataatacaacctccaatacatattatacattaatctcatactaatatataatatgtcacattttgatctttactatataattgttaaataacaaatatatgacatttccctattaaattaaaatttataacacattattataatatttatttaatcaatcaaataaatattatattaaaatataacaagaaatgcaggaaattgaatgttaagtcaaacttatatactatggtcttgctcttcaaaaattaagtctcaatcttgataactatgttgaaaatgacattgacccgcgacccttaagaaaaccatgtccaaaaatcaaacactacagtctagtctacaaaatgtattttactttgattaaataaagaggactagttgcgtaaatttcttattataattttttagttaatttttgtgttcgaaaatatatatcataatattttttttcatagcggtattcgttatatataaattttttgaaaaatttcgaatagtttatcgtgtcgaaaatacgtttaaaaatttttgaactttcgtggtaaactggatcatgaactctgttttcaggattctaaactactcaaaaaaattcaaaaatttatagggatgataatgtaactataacgaatactgttatgaaaaaaaaaaattaaaaaaaaaatatttcaacacgtgattttaaacataaaaattaactaactaaaatgttgtaataaaaaattataattcacgctcctattaaataaataattcaatttgaatgagtcctaaattatgtggccttcattcaatcaccctttttttcctatcatcattgactattccaataacataagacaaattttattgacaccaaagtctttcaatgaaactagaaaagtagaaaatctcatatcactactcatgttatgctactctagttatcccagtaaccaaaaatctcataaaatattattatagcaaaaatggctctgttttttgagttctgttttcttatttttcttcttattcttctaccaaacacagccttatctcaaacaaccaacaacataacagtaggcacaacactcacagcaacagacaactcatcaccatggctctcaccctcaaccgaattcgcttttggttttcgaaaaatcgaaaaccaaaatgatctcttcttactctccatatggtacgcaaacataccagacaaaacaattgtctggtatgctactgcaacaaccaatacaacctcctcggctgcagtgctgagggggtcccgggtcagcctgacagctgaccggggactagtattggttgatcctcaaggaaaagaggtatggagttcggagatagtaagcggagaagcttcacacgcggttatggaggacaaagggaactttgtgatctatgaagggaatagtgaatctgaaaagctttgggagagcttt

SEQ ID NO: 18900 - DNA, 3065 bp, Cannabis sativa
tatgcataacccccaaagagtggcaggcttctacaacaccaactatagtctttgttagctgagctgcctttctctcagtgtaatgtcctctcttgacaatcctatcaaagagttcacccccagaacataactccatcacaacatgaacagcaacagcatcttcataggcccctttgattgaaacaacattcgaactccctgccaagtggtgcattatctgaatttctctcttcacatcatccacatcatcttctgtgagcaactttcttttggctaaggatttgcaagcatactcttttcctgttgttttctccacacaaaggaaagttgttccaaattgaccatttccaagcttgtgtcccaaattgtagtactccttcaaatggcccgttttcgtctgcaaaaccgagtctgcttgaagccctgcacttactgctctcttaacattatgagccttctttggctttgtttgcatattggtcttttcttggggattaacagtagctggttcagtctcttccttggggttttcaggcttttctggttgagtattatcttgctttggctcaaattgatgttcattcaccatttttaatggtttcggggcaatgttttgagcgagtttaccaggctctgagtcatgattcttgttcaaagtagaacctttacaagtagtgatgtgtttactggtatggaaaaccaaacaatctgaggtactaggccaccatattgaattggaaatcgattgaaagagtccctctttgaaaacccttgagttgacacaattatttcccatctggggcttaaagtctacaaagttatccttaatgaacatctaatgaaacacaacaaaactctcatacatacaaaccccccaaaaaaaccctgctttctcttttcctctgaaaagaaaattgccaaataaaacacttaaacgaccaagaacaagagtgttacattaaaatctttagaacgaaaacgaaaaagtcatcaaagataaattaaaataagcatcctaaaatcttctcaaaaacgccattgttgaaccatttcaaataccaaacataaatagggaaagaaaagaaacccaaaagagaaaaactcaaaaaaaaaaaaaaaaaagtagaaatctacccttatgatccaaaatggaaactttgacaaaacccaccaataaaatccaaatatattgacaatatcccgccaactgattgaattttcctctgttctagttttttttattcaatgaagaaaaattcagagcatggaaatggttagaaaatgacagaacaaataccaactaagaaagaagaagcggtcgtcgtcgacagtgtttgaaattctatctttttgtttcccatttatataatgaaaacaataacggaaggtataactatatgattattgaaaacatggaaacgcggaaaagagaagaaagaagaagagaatggttgcaacaatacaggtttttccgttttaaatgtttcaaaatatagatttgcagttgcagaggagggcgacgcgtaaaactaaaacctttattctcatatgtcaccacaccactttaacacccttgccactcgtgttgtataatatatatatactaatgttgacctcaaatatttatacaatatagtatgattgtgatggctatacttacttgttacaagatcttctcaatataaatataattaatgtgacaatatcatattagctctatagacaaaaaaatatttttttatacattggattataatattaatatggtatggtattaactggatcctagtgtcaatgattttttttatatttttattttttaaaataattgtgacttatatatatatatattttagtaattttacaatttataagttcaacttctgttgtaaatatataattaagtttaatttttaacaggaataatatttaaattatatttttagaattccataaataattggccgttaaatatcaaatcatttttcacgtgttattttttttattaatatatttaaactaactttttttaaaaaaaaaataaaaaattaatgaccgtcagtcaagttcctacacaaattttaaaattataattaaaattaaatatttatttataactgaaaattaaatttaaatatttatacaataaattattctttttttttttcctttgtcttaggatgatttgagtcatttgaccgccatagtaaagttcgtcgggcttttatactgtcggcgtaagcctttttgtattttggtatgatgttcgaaaggaacaaattcttcacctaaaaaaaggttgtatcatttggaccaataaaagtgtgtccaaactattattgcttttactcaaaatgtcaaatctatactgttctcaatccaatggttgacatttattttatgagtattgctattaggcataagtggtgtttagtattttctcgacatattgcgttacgattgactagcgatacttcctaaaagctattatattaaattatatgagacccgatatttagttggacataggaaagtactaggcaccactagtgccctttagcaattctcttattttataccattattcatgggaatttaacacataagggcaactccaataaactcaaatttagtgttaaatcaacattaaaaggatactatttcaacacttaattttttttttaattccaattacaatactaaaaaatatattctttattattatattgttttattaaattatctcacactataatatgtatataaatataaaaatttaatcataaaaatattattttaatgttaaaaaaagaagaaaaaaaattggtgtagtctataatgtcccactaaaaatagtgggacactcacatatataggacaacatttagtgtttcattagagcaattttgtgttcaagctctactattttaaaaattttagtgtatcattggagaagccttaagtaatggatgttatattgttgttcttagctttaacatcatgtattaacttagggttcgtttggaacgtcgtattagatcgtattgtattgtattaaattggat

SEQ ID NO: 18901 - DNA, 5023 bp, Cannabis sativa
acttgaccttccctaggcagtgtgggattgcacaacttacccggtatttccctttacggatcacgggactattgactgtcacaggttcccttcaaacaagtcattatccaactgatgaaacgagagggaaaacaaaagagcttcaacaaatcttcaacaaacaaccagtcaaccgtatcataggccttgcttaggtcaatcttcataatgcatctcgctgaaatgtttttcctcgagtaacctttaaggagatcttgaaaaatcataatgttatgtgcaagaagtctgtttttcacaaaagccccttggttgctttggacaagagaagcgagcacttccgaaagccttgtacaaataatttttgaaatgcatttgtatattgtattacagcaggcaattggcctataatcactagctgacttcgggttggccacctttagaattaaagaaatcattgttccattcaagctcttaggcattcttccattttgaaagaaataaaaaacaaccttagatatatcatcaccaatatccctccaaagatctttaaaaaaattcgacccaatccatccaaaccagggcttttagaggagtgaatgctaaagatagctttcttcacataactcttactaaaaggcctgatgagattcacttgctgcatcaaattgagacaagtaccctgttttatactctctttatctattctgctggtagccaaacttctgctacccatgaattgcttaaaatgagatataaaatgattcctcaccttgtcaaaatcatcttcaatagtgttacctttagtaaaggtagttattctgttttcgagcttccttttcctcatggcaacatggaagaaacttgaattttcgtcacaaaacttgacccaaattatcttactctgctgaatgacaaaactggagtaattcttctgcaactgttgaagctgctgcaactggtctgaggcagcctgctgaaggtttacatcagttggattcgaggcagcttctccttgaattctactgtaattctccttagcttcacggtatttctatcacccacctcatacctgctgattttttttaacccctgtataacacgagaaagatgctgtattattccatctaatcctttcctcgttgttggaatactccaggtgcttaacacacaatgcttgaaattaggaatattagcccaatagttacaaaatctaaagactttatatcccacattgttgtgttcatggctacggataatacagtagctatgatccgaagcattatcccacttaaaataagcatcagttttaggaaaaacatccagccaatttctaacaaagatcctatcaagtttagaaaaataagttcaccaacctcatgcttgtttgaacacgtaaaatagactcccgaacaattatattccccgacttggcccatggctagccaattttgagcatcctctatgtctttggttgaatttgtcttcccccgtttctgccttgctacgagaacatggcattaaagtcacctaatatgacccaaggcaagttcggttacctaccttctcccaccgatccaaaacaacctttttgttgtattctaaaacaagtgacctttttttttttgaccttgttgttgtatcatccctaataaaaataaaaaacgacatcagggtttggaaaacgacatcgtttttggcataatttggcaagggttttagaatcccagaccagaatttggggcttggctttctcagattcaccaccatgctttcccgtcttctccctaaaccctctcatcttcgaaccctaaccctaatttcctcaaacttcacttctcatctcaaacctcaaatctcatcatctccatccaattccaaaaccccaactttcatttccactcccagattcttctcctcctcatcctccaatcgcaacaacaatggcggggatcaatccgagaccaatgtctggaagctttctcaggaaactgaaggaaagttcgaccctttgtttgaagataattctaagaccgtcggaattgaacccggagaggctgattcgtggttgaaaaccggggacggtgagtgggaaactgcggaagggtataagccgtggagcttagaggaagaggagaaaaccgatttgtttgatactggggattatgtgagtagtgttggtgaagctgagattgaggttagtaatgagaaggatagagatgaagagttgcagatgcttcaagaagaggaacaacaactctctgttataatcaaaggtattgccattgaattttctttaaaccaggatatttgtgttgaatattgtaatttttctccaaatttatgaactttctatgaaaatgtactttatttggcttattggacttgttagtatagtaaattaatggaaacaaaaccttacaaatacaaacaagcatgttgtaagtttttgttgagaattctgtgtttggaattcagtttctaacttcataagaatatgggttatgattaattataccaataaaactttgcattttcttaaggctgcgtttggttgggagtaaggaaatggaatggaatagaaatcaatcagttttcattctattccattgtttgattgcattttaaagttttcgaatgtcatttggaatgactttttcaccattttggtattccattttgaaatgtaaagaaagatcattcctatgcagtgttttttaatatattttaaattttattcaattcaattctattcctatttttgtgttttcattcctcccaactggtggcacttggttggagggaatgaaaacattggaataggaaagagaatggaatagaatcaaaattaaaatatcttaaccgaacaaaagaatgaaataaaaattgtttcttttccattctaattcattaactccaaccaaacgccacctcaatttccttatgtaagtcttactagttatcattagattgtatactgattcaatatgcttgattacaggtccaaatcgtgcttttggtgatcttattgctgcatctgggatcacaaatgacatgcttgacagtttgattgctctaaaggatttggaaggagttgagggattgccccctttaagtgaactagaagatttgagatatgagaaaactacaaggaaatcttcaagagcagaaatagagcgtcagaagcaggaggaagctgctaaagctagagtcaggcaagtagatgacaaaggaaggtcttatggtacaggaagaaggaaatgcagtgttgcccgtgtttggattgaacctggtgatggtaaattccttgttaatgaaaaggaatttgatgtctattttccaatgctcgatcatcgtgctgccctccttcggcctttctctgagacaaaaactttggggctttgggatgttacttgtactgtcaaaggaggtggtacaacaggttggtctaattctgctctggtttcacatgcttgattactttatcatgttagcaatagaaatgtgattttagtttaaagaaatgagggctgagccgcacaattaggaagcacaaaattaaatcttatttgcttatttgtcatggtttgagcactatataccttcttagctttgaagggtaagttctttggttttttcttttgtatgtggtgctgtcacggattataatttaatttctgactatgctgatggtacgagttctcgatgtccattcattagtttggttgcactattttctaatcataggaaaatctataatgtttgatgacaggccaagttggagctgttcttttggggatcagtagggcgctgcaaaactgggaaccagatttgcgccctccgctaagagatggtacatttcattttcccttatatgatatgcatgctgtagtatgggccatggcctagaaaatgggtactgactactgaagaggttttgagtggaatatgggattgtttgaggatcgttgatttctagtgttaaggatatgcaatttgattttaggtatcttttcgttatggacacaaaaaaaggcatctctagtatttgcatctaaaaaaatttctggggttcttgattagagatcacatcacaatagcattatcgaaatacagtatcgattagttgaccacatttttctgctcgacttttcttttctttccttgatccttgtattgcttctttaagggtttttggctaaactagttggtttgtatgaacagccggtttcttgacgagggaccctcgaatggtggaaaggaaaaaaccaggaaaagcaaaggcaagaaagagctaccaatgggtcaagcgttgatcagtcttcactttccaacattttttgttattttattttttgttatccaagttttgtattatatggtatttcagtttagcctagttgcatctctgttttaccaaatggaaatttgaggctttatggttttttatacccataattgaaaagatatgccaagtttaataattattgacaaattaagaaatagacaattgtcactcccaaacattcttgacttaaagcttcactagttaatctccactctatgtttctcatttttattttcaaaatggtatggatctcttcaagatgaagatacaaagtaattgtatttttttttaacagaaaatattattttggaaattttactgttcaccatcaaaaagtggtacactaatacaccttttcatgtttttgacatctaaattttaattttattttttttgtatgatagttattcaagataaaatactataggctgtaaataaagtttaaataatttattatgcgtacttttttttgtttcgtttacttgtttgaactttactttttatattgtgaaatattcttaacttcttgaagttttataaaatattttaaataactacaatttacactaaaaaattaaaattataattactcagtattagaaacacgatgtaaaaagtattaacctcttaatttattttttattcaatccaaacataattcaaagttcaaacaagcct

SEQ ID NO: 18902 - DNA, 11039 bp, Cannabis sativa
tgttgaggtcagtgaaatcaatatgtactcgccattttttatcaggcttgggtaccagtatgtggttagctaaccgagctaagaagaaagcttcgatgatgaactcatttttgcacagtctttctatcttctctttcaatgcttgcgcccgttctttgtccagtagtcttcttttttgttgaacggggcaaaagttagggtcaatgtttagggtgtgagacattatagaagggtcaatacggaccatatcctcatgtgactaggtaaaaacatccaggttttctcttagaaattttattaaggctaattttacttcgagcaacaaacccttaccaattttgagtttcttggttgggatatttgggtcgattccacctcttccaattcctcaaccgaccctacatttgtgtttgattccccaagtcggggatccatgtcctcatccttaccttgggtgacttcctattgggcaatactttttcctttgcctgaactctggccggaggtactttcctttttgaccttagttagggcaaggttatagcattctcgtgctattctttggttccctctgaggcaccctaccccattctttgttgggaacttgacacacaaatggaaaactgacgtgacaacttttaagtcatagagggctgatcagcctaacatgacattgaaagctgatgggacatcaattattgaaaattgtgtcgtcacagttatgctcctcagagcttgtccaacagtgaggggtagatagatttgtcctagaagggcaatgctctagctggagaaaccatatacgagctgggtgtaggggattagatctttcagttgaagccccatcttctcataggttgttttaaacaaaatgtttgaagaggatccattgtctaccatggtccgtgccactgtcgtattcgtaatctatacttcaaaaaccaagggatcgttgtgtgggaagtggacatgattagtgtctgcttcagtgaaagttattgtgggttcccctacccgtggtatttttgtctttctctcctctatggcaaaaattgttcccttttgttcatactacaaggctcaagcatacttttctcaagctttgcccgagtctccaccaggatgtggacccccaataataacttgtaaatgctcgtccactggcggaggcatcaatttggtctagttattgtctgcttggccaaccctctgattctggtcagccttgacatacttttgcaagtacaggttattcttcctgttcgaaaattcaatttcccacttcaagttattgcattcatttgtgtcatggctagtctacgttaaaatggtagaacttggacatgtctcttttattcacgtccttcttcatgggagagggtttcttgtatgggaccgtagactgagttattggatatattgtccttaggtcatctgttaggatagaaaaagaagtaaactttgaggcattgtctctagtgtgctattagacatttccaatgaacttgcctttcctttctgttgccctgcctgctatcattattagacctcttcccattcgagtttaaactgccaggatactgtggactctgagcggactctccttctgaggtggtatatggctggctcttcttttatccaacggtgtctacacaccgaatagcttctttaagcttaataaatccatctactcggtccaaaaattcagccattaaacccatggtcagcctcttaatatccttccatagttctctaagtggctcaattcccctcagtatagcggtgaaccttccttcttcggtcaaccccttaaccttggtagcctctgtcataaatctgtttatataagctctgagaggttcccctagcatccgttttaccttgaccagatcttctagatccgagggaagttgacaagaggaggaaaactaagcgtggaattttgtggagaaagcattccatgaattgaacctccacggaggcagcttgaagtacaattggtgagcagcttctacaagggttactgggaatactctccatcagacatcacctcgtaccccttttagatccatctgtattttgaaatattttagatgttataagggatcctctttctttcctttccctatatatacatcttccaggttggcatcttgaactttgggggtagttcaaggacttcaatctcaggggaaagggtgatctacacgccctgtcaagttcgagatcggtgagttttggtcccatcaggccttgtaccatgtttttaagttggtccaattatgcttgcatcaatggatgaactagtttagcttgttgaccgacctgtgtcacgttaggttctctttgaactggattctggatgcaaatatctggctggatagctggtgggacgtactattcatccagaccccttcttctatttaagtcagtcttgaggtcatgtgtggcacccaacctattaaataccaatgacaaggtggtcttggcgtctgacttatttggccggtaggttggccagagatgttagtcggggtgaagttgttaagtataactccacccaaaggacggtcaggaaggatatggccatctaccgtatggcccacaggttggacctgtggccgtggattggacggctgaccattaggcggtatgcccagtagcatactcttttgtatcgcccatagggatactagatgcggtagttggctattgattggtgacttggtaggccctccttatctgtacggtggcctgccttgtacgatcatcaatagctgcttgttgagcccttaaggtttccatctccctatccttccattccataagttgacatatttgctcgtcaaatgcaagatttatagcaacgcagagatcttcctgatcatggtgcaaagcgttattgtgaccctacatgagtccaagggctgctcgggggttttggattttagtatcgtctcttagtgtccttaaacattagtggtggacgggacttcagtgttgggagtggattgattgaatgctaaactggtgtgcccagtctcttgcacgcctggtgtgatcccagcgagaggggaagtcacaccatgacccacagtaggtggttgtgtattggcatgttcggggtttgtccctggtggtcctcttatgttcccaggggtctacacattaggatatgtcactatcaggtcgcccttatcagctaggcctctacgagtttatagcacactcatgtacgcctgttaaaacttaagataaaaagaaaacttgggtttttactctcaatgaaaacacaaaaatgtggacctcacttttagtcaacaaaaatgagtcaattaataagcgatcaagaatgtaattaaaatagagcaaaaaccataatgtaataaagaacaccagattttaaagaagtttggccccgtgagtgtggaatagcctactcctcttgaattgtattaacttgagagaaagaataaagtgtttttctctctgaaagctctaacaatgaatctctgagtaattctcttaaatctctctctaaagaaattctttcgatccctttcactgtgaggctaagtcactatttatagggccttaatgcatgagggaaggtttcccttttgcttacaatctataaaataggaaattatatttattacataattatgatacatgaagtaggaaactagaacaggttgccatatttccctaattcaatcccaatattgtagggattgccttcgtgtcttggcatcgcaggattactctgaagtgattaactctttggaggtagtttgacaagccagacttatacttgcccggaggatctatctttcatcctactcgggtaatcaaaggttatacatgctgatgtacaatatagagtctgttcaaaatattcacctccgccaaggtaaaaaaaatgcaagacacgtgtcacctgattcttctgccacgtcaatgtgcaaaaaaatagataacaatggtgaatatgaaatgaagagaatgagaaaagttagggtatgggtgaaggctgagaagaaattgagcttttgagatttattttgtttgaactaacattttctttcctttccatttaattgattgatcttttaattgaatttttattgaaactttaataaagatattgatttgaattttgtttgtattttttgcaggtggattttttttatttgcatgttgcattaatggtaaagatgttgattataattgtatttgatattttattttatcttttaatttattttttttatattatatattgtacatggtatataaatataaaaaaagttatatacagtatattgaatgtgtatttttttaaatgaatatttaatattgcttttgagttcattatattgtatttgaatgtatatagaatattgtaatagtttattttattaggaatatagattttgagtgaaactaaaataccatctaagtataataaattaatatatataatattcaaatttttttttttattttttatttttttgaaaaaaatagatattcatgtgtgataagtatgagaattcatcttttggcacaagtagtactgatggtacacagtaagctcaagggatgatagctgcactggtccccaatcaattttattatgattattagggatatcaatatttgtaaaatattgttataagaaaattcttcacttatttctatatagatattttcgtgatagttgtaatagagcctaacgacttcattattcttgtaatggtatggtgcctataaataaaattataccatttcattttatttttgagctgagaattacaattaaaatactatcaatattctctgaattttatcttagtatcagagcatattagccccatggaaactcttggtaattgcaaccaaactcctccagcagaccatacatcaagctctcttgaaatagctctgttgttataggaattgttgctagcagagttgatgcttctactttctagctccccaatccatatccataacacttatgtaccctcaatcaaccatttttcctcaaacttgttagtaataactacacctgatagaaaaaaaatgattttcaccattatttgatgtcatctcttagatgattttttgattgtaataaatccttgtcctaatgaatttcttcctgtaggtattacaataagagaagatggatctaaagtttctgtgattcaagttagtccagagtttgagcattaaattattaacaaccaattactcttaggttggttatacagctccatgacggaatcaattgctacagaagtcatgagagcaactatggatagctcttgagagtctctatggtgcatacttaagagctcaaatgaatgagttttgaaccctgattcaaacaataagaaaatagtctgctataatggcagagtgcttatgaaaaaagaagatatggtcttacatcctggctgtagtaggagaccaatatcttgaatcccatctagtggcaaatgtccttttaggacttgatgcagagcatatttctattgtggttcagattgaagctagaatcaaaacaacctagtaagaactacaagacattttgttaagcttcgatagtaagatcgaatgacttcaaacactagctaacaatagcaagataatcaattcatctattgcaaatcctcaggcaaacatggctttaaaacctcacaatctaagaagaggaagaggctcctttaataattccaactctaaccaaaaggtggcaaattcaatgaaaatagaggatgatatggtggtagacctcatggtcgtgattgtacaaatggagcttaaccaactcgccaagtgtgtggcaagtttagacattcaactttaatttgttactataaatatgatgagagctattctggatgtgaccaagttggtggtcaatctcagttcaaagctaatcctaatgcctttattgcaacaccagatgttgtggacagtgatgcttactttgccaatagtggtgccagtaaccacatcacttcagatgctacaaacttatgccagaaataggaagatggttgtaaggatactgttaaagtatgtaatggtgatgaatcaactatttcatatattggtgttggctatttatagaatgattatggtagattattaaaattaaataaaatgctccatgtgcctaatagagttaagaatctcataagtgtttctaagcttgttgctgacaataatttgcttattaaattttatcatgattgttgtgttctaaggacaatgtagcaacgaaagctctattcatatgggtggttaaagatggaccatataaactttcatatctccacaaagcatgtgaccaccacagtgtcatctcagtttagccactcatcattttccttttcaataaacaaaatatttttactagtttagcagtcactggtaacagtcatgtagaacaacctagagttaatagtcttttaaattctaaaatagatgtttggcacaaacatcttggccatccttcatctaaaattttaagccatattttaaaatccaacagtaaatttttcaatcaatgaaaataatttcttctatgatgcctgtcaatatgggaaatcccatgatttttcctttagattgtctcaaaatagagttaaaaatgtccttgatattgttcacactgacttgtggggtcctgtcccaattgcatccaatatcaacaacagatattatatctattttgttgatgacttcaataggtttacatgaatttatccattgaaattcaaatatgaagtacttaatgcctttcttaaatttaaagcacttgctgaaaccaaatttgaaaggaaaataaaatgtctcatgtcaaattggagtggagaattcaaggctttcattgatcttgtcaacactcattgaatagaattccatcgctcatgtccacatacatcagctcaaatggtcgagctagacgtaagcacagacacatagttgagatgggactcattttgcttgcccaagcaagtatgcctcttaaattttggcgtgatgcttttcccttagtagtgtacctaatcagtatgttacgtactgtttttctctcatataaatctccctatgaaattcttttctcacaaaaactagattatgatttcctaaagacttttggcttagcttgttttccttgtcttaggcccaatcactctcacacatttaaattttactccatcaagtgtgtgaatttagggtttagtgaatcctacttcaaaggatacaaatatctcactcccgcgggcaaaatctacatttatcgaaatgttgtttttaatgaccttgaatttcccgtgaatgatagttttcttaacatttatcgatctacctcattagtaattattcatagctctacatggtcatctctgcctgttgctaccttttcttctcagtcaaccactggtaccactgaaagcacccttggaactatagatgcctcactgtacctcaaataacacaagttcatactttccctatcaaacctgatctgtttcatgttttgagaggggcagtcttgtagctgataccacatatatgttcccttttagaacacctaaatatgattacaatgctcctgattatgaatttccagctattgtagaactcaaatcatcacctcttccacaacctgctcttttgcaggttgtgcatcctatgataaccagggctaagacaggtatattcaaacctcaaaccttcttaagtcacatccagtttaagtttgctactggtgatgcaaatggtgtggaagaaatcctggaacacaaaggctggaatgcaacaatgggctctaaaatttatgctcttaatcaaacaacgcctcaattcaagtaccactattacctcactataatctcatagaaacaaatgagtttctagggaaaagctcaatctcgatggcttatttcaaagatttaaagccagacttattgctaaaggtttcaaccagagacctggagtagactttgataaaacctttagccctataatcaagccttattctacggtaaaaaaaaatactcaaattgctgtctctagaggattggaaatcaagctacttgatttaaataatgtcttcctaaatggagtattggaagaagacgtttacatgtcacaactccaaggatttagagaaaaagaaaaagaaaacttttttaaacattgaacaagtccctatatggcctaaagtaagcacctcctggctggtttgatcaactcaaaactaccttgctaaaatgggaatttcaacactctagagatgaaacttcattgttctactataaaattgacaaagacatcattcttatgttaatttatgtcgacgactacattgtaacaaggaatagaaacaaagttgacggttttattactcaatagaagaaggaattcactcaaaaagaccttggttcttgacacttcttccttggtatgaagttcatagagatgacacaaggctatacttaacgcaaacaaggtacataaaagctctattgaagcaggctaagatgacgaatgtcagcctatgtcctactcctagcactgcaagaaaactaatgtctcttcatgaggaagagccaatgcaccatcccactatctccagaagcatcagatgagctctacaacatagcctatgctgtgaataagattagtgaatttctcgaagtcccctacaacagttcattgcagtggagcaataagagtcctaagtatcttaaaggcacattgaatattggcctgcatattagctaatgtgataaactaaacataataggcttctcaatgtggattgggcctattgcccaaataacaaaaggtctgtagcaggttactatgtgtacttggaagaaacttaagtgtcttggtcctcaaagaaacaagctatggtgtcaaaagtaagcactaaatcataatatagagtattgactcatgtaggagcagaaatttcctcaattgaatccttgctgagagaattaaaatttcccttgacatcactctttgttacatggtgtaataatctcagtgcaagtgaattagccacaaatcttgtgccatgctagaacaaaacatattgaaatagacattcactttgtgagggacaaggtattacaaaagttgcttgaggtaagatacattctatctcacgatgaaattgtcggttgttcaaccaaaggactacccactactaaaaaacccaaaattcccaatagttttacactgttaggtaaaaaattctcgacggtctataaaactgttgcctatatgagcatcgtaaatacttggtagaatgggtgagagtggaaaaatatcggtataaaagaattcctgacggtttaaaactgtcggctatagtcgatacagtaggctacaatttaaaactgtcggttatactatagtggacagttttaaaccgtggtcgtcgatatagtggattgctacaagaaaaattatcgtgttcctcctcctcaaaactacttctcgcatatgtcgcagccactccaagacctttacaagcttcaccttcatccaccgtaattgtgctcgtttttatcctcctcaaaattttctttcacaagtttcagattacttttaacttgatgatccttgaaactttctttaatttacaagcttcgaatttattttgaacacacgcaaatcaagattaacaaactaaataatggctaatagaaatttaaacaacaaataagagaatattgtgcttaccttgtgctgccaagagagagcagaggagagggacatagctagagagagagagagtggaggagagggacaatgtgggtcgtggtcacgaaggagagagagtcaagaaatgaaataaaatttacaaatgcctttggaaaaatgagatatgattttttttttggaggagatttatatcttaagaggagggaaatgaaatttaagatggcttgggaaaataaaaatttgaaatttaagatgcgggaaatgaaatttcagatctaaaacgcatgaaatagaagcatgggaatcgtcgttggtttaaaaccgtcggctatactacaagctacggtttaaaaccgttgcctatagtatagtcgacgattttcaaccgtcagcaattcccttttacaaatgcacgggaatttttaggcacgtttaaaaatcattgtctatacctcccgacaatttaaaaccattaggaatatcctatttttttttttaatggttttaaacactcgatttttttcagcgacggttctccaaaaaaaatctttttttagaaccgtcgtgaatacccctttttgtaatagtggccgcattcgaaatttgagtttctcatcaccaaactcgagctaagaccatcactcctttacttgataggggatgttaagaatgagaattcatcctctgcctcagatagtgatggtacgtataagctcaaaggatgacaactgcaatagtcccttagcaattctattatgatgattgggcatagtaataattgcaaaatatatagtagtagtgcttggagatttgttagataggttaaggataaggaataagtgaccagacttgctccgcattattgaaaccatgatttattggttgtagaaagtgagaaatagggcttacaagtatttatatatatatatatatatatatacatatttatacatataaatatataaattttatatacttacttaaatatcacacaaagttgtaggaaaatgggaaatttgcaatatcatattagcctacagattattcctcttagacacgcattaaataaaaaaaactcaggcgacaccactatcgattgaataggagattagcattatgaagtaatcattccaagtttgaccaaatctattatatgtaaaatatctaatattatgttaatcttattccaagtttgaccaaatcttattccaagtaaacattgtcaagtaatcatttgaagtttgatcatatattttaatagtttttaaattaaa

SEQ ID NO: 18903 - DNA, 4426 bp, Cannabis sativa
aataaagtaccaaattactattaggttacaaattaattattatttatttttattaaatttctaaatgtatcacaacaattcaataataatctaatgattaaaaaaaataaatgtaaccattattgttacagaaataatgtaactattaaaatctcctatatataaataaataaaaaccaatatataggattttttttcaaaacaatatataaatcattacatatatcttaagacatcttccaaacaatccattgaaaaatgatttgggagcaaaagctgctcatcaagcgaaatattggcactctgacctccatctttggcatcatcaaaataattaaaattacttgtgtttgtatcatccacaagagaattatcttcagcctcgagagtagcattggaactaatatggtcatcaaaatgaagcatttccatgctctgttggcactccgcttcctccaaaaggtcttcaacattataactagtaatactattaatattatcatcaatacttggtgtgcaacaaaaattaggagaagaatagtccatagtacgatgttcaaccccatctcgagcaccaccgctacaaccactgcccattccaatgattgtaccgagatttatctgattgagtttagaagcaattttgttgagtagtgccctgctggaagccgaagctgtagaacttgtagttctagacacatttagatgatcatccccacaagcctttatagaagtactaacactgctactagctgtatcagtagaaatacctttgttcatttgtaaagaatttgacgaaatttcagtgtctaaggatgtacttatggtggctaaaccttttgaattagttgtagttgtagtagtaatagaaattggcttcatgagattttggagacctctgttgagtacataatcagtagtagaagaagatgatgatggtgatgatgttgatgcctctttggtcacattgtcactattactatagttattaatgatgttttcttcagaaattgcggtcgaattaataataatattaccattatcactactgtcatcatcattagttttatgtcggactggagaatctttactattgatttctgttgttcctcgtttcttcaaccgagtattccaataattctttacttcattatcggttcgtctatacaggtgtctcgatataattgaccacctgccccagaaattatataagatcacatagaacttatcaaaagaaaatataagatcacatagaataatataaaacattagacatggcaataaatgccgaaatatatataaataataatatttaaattaagtgtgttcattcattttttcagtgccattgcttttcgaataaataatgaacaagagtttaagtgcctgaccatatatttttattatatatatctatgacatccataatgtcataataaaaccaaaaaaacgacttgtccatgtcctttacttccttttctttttcacttttttttttttatttttatatactactattttgttttttttaaataatatactactatactactattttgttggtaaataattttttgtacttaatatttgcatcttaacatattcaatgccataacgaaggggtactcaataattggttagtaattctttttatttatttttattttttaatattttttatttttgtaaataatttttttgtactattattgctatgtggtaccttaaagtacttaatactataccgattcacatacacaataattagttagcagttttctaaatcatattaaatcaaaatttgtggtaattgatattgagatacaccaataacgatatattagctttagtggtgtttgacaccttaatgtgcctcttaacctttttgttattattatgtacatatctttattaactttgattacaattttatttttttgttattattatatataagtttgtaagaacatcatctgtaacgggatatgtaaaaattgtattatatttgaaaaaaaaaataacttgtaatatatttgcatcactttttagtattatgctccaaagtttatttgcaaaacttgatgtaattttttttttgttacgaatggttgttaatttttgtttttataatttttttttacaacaactttttttggtattttttgtataatatttttttttctgatcaattatttttattattgttaatagaatattattatttgccactttaagatgcctaatactatacaaatatatgacaataattattagttcgcagttcccatattataaataaaaaaatttgagactcgattttgaaatacaccaataacgatatgccgtaatttatggtgtttaccacctcccttagaattttctttatcatctccaatatataatgtataatttaagctaaaaaagatgagccaatattaattttgactcaaattttataataatgctccaatgtatttaggttgaaattattcctttttttttatagaaatatggtaaaaaaatgtcaataaaaccattaaattttgattaaaagtatataaatattctattaaatatacaaataaaatctaaaaaatgattaattaaagtaattagtggcaaaagagtaaataaaaatgtaatatttattctgtctaaattttggtccattttatatttgtggcaaatttgacacaatttttagaatatgtacatatccatgacacaatattaaatatgtacatatccttattcactttagtttgaattttaactttttttttcaattatacataactttgtatgttttttttacttgttacgcaccggctagctgagatttttctatggtcttttctctgatgtattttctcaaactaaataagatttttagtaatttgtggctttttttttatcatgattagagttgtgtgttttgttttgtttataccaattattgatatttatatttttcttaaacatcacattttttttctattttccaaaaaaaaaaaaaaaaactcattgttttatactatttcactttttaaaatattgtttaagtcttttctacatttttttatcattttttttcaatattttttttttaatattttttcatatttctttattagtaaatatataatattatagaagagtatacgagcatgttttttgtgttagtatatattttattttattaatttttgtgaattattattttatttttcttataaattttaattattatttgataatattagagcaaattacaatatttaaatatgttatcatactatgtctttgattaaatataattttttttcaataattatttgaatataattaatgaaaggaagatgattatatatagagaagagtgattggacgatctattagatgaagtatatatatatagagaaatagatagatagatatatacttgttgccaagaattgcatggagtcgaataatggtctgttcttcctcagggctgaactctcctctcttaatacctggcctcagataattagcccatctcaatctgcagctcttaccacatctcgaaagacctttattttaagtagaaagccaaacaaacaacagtaccaccaaaatgaatcaataaccattcagtggaaatatatataaaaaaatggacatgttttatatttatttaccagctttctggggcaggtgacgccagccaccttcgccatgttgtttgatgtaagaaaagagtatttggtcttcttcggcagtccaagcacctttcctaagtcctttttggtcacagcatggagtcctacccatctcaattcaaaacacttaatttcactggaaaaatactagtagagtgttggtttactcgtgtctcgaaagcactgtaactgctccttaattcaaaacaatgtactgtattatattatattatacgtgacacgcgcagagcttttcacgaggccgtgtgtggcccacacgactttaagttatgtccctatccaccctcataatatatatacatacaattattacagcagaatggggtagactgggtagactgggtagacgggttatggtagtgtaatattattattattatcagtgtaattatgtataggttttatataaattataaacaataaattttaataaatattcttagccaatcgttacttagaaaaagtaattcacacttacaaaaaagcccatctttcaaattctacctcatgttttatttttgttggtcttcatgtgtccacacaaaatttattgttatttttattttattttaaaagaaatatttgttacaaaagtcatacacttagttatttaatattcatatcaattattttaggaagagattgtgttcggtcttctgtctccacatttgacacactggtgatgaataatgtgtttagtttgt

SEQ ID NO: 18904 - DNA, 6477 bp, Cannabis sativa
gggatagtcttcattctgttcccctttgagttaaggtccataatacacccttactcaaacaaagtgagcaattggcctcattgatagccacaaaccttttctgttggaggttgataaactctctcttaaggaaacttggggaccctattttagggtacgagttatgtttaatgtgtccaaacatgttgcaaaaagcatctctatcgaattccaaagcatcaaaaagatagtttggctcaccttaaaatatgaattactccctaatatttatttcttttgtggtcgaatgggacatagctataacaaggcttgttttgattacatgaaagcatgtgatgaatcaccaacccctccatatctcttatatgacgagaatattaagggaaaggtttgggctttcactgaccccctccttgggagcacaaattagctagaaaattgggctcttaatgtccgctaatctcaccactgaacttggccaataacagtggagccaaagtaaccctttttctcgagtctacaactcattttcctcaaagtccatcctccctcccatctttcatagctctactcaatgctaccatgagtaaccactcgggcaaaaaattccttacagctttggtatctggtctctcctctcattcaagtgctttgggacactcagccacagttgtctcaagccattgcactgtcccactttcggaaatcatccatttccttgatacaagttagacgttgaaaggcttgcctactactttctcaatgggaatctcagccatgcccccaaacaaaaccataaaaagaaggtgagtggtggcacataagacacattcaaaaggaaatccatcatagttgatggggttactcacaccatggtcaagcatgctcgctcaggttccactttaggaaacactaattcttttccagaggagggtcctaattaggagcaggcctgcctagcaccatgaagattgtcaactagaatgcacgaggtcttaggagcgaccatgaatttcgcaacctcttcggccttataattatttgtaaatgtgatattttatttgtaatagaatctagacttgctcatggttctttagatggggttagtataggcttaggttttttgatggtcttgaaattggtagaataggtagtggagggggtcttatgttattatggaagtcagatgtaacatttactcttatcaatcaatctattaatcattttaactaccatgtttgctcttcccttttacatatctcctcttttcatttgacttgtttttatagtgcaccaaatgctaccaataggcctcacacctggcattttcttaaatatattagacaaaaaaccccctggacccctgaattataattggggattttgatgcttttattagtaataacaacaaatctgggagaaatatttgctcttttcatgataaaccgggttcttgcaaagatggatgaatgactggctatctaaatacacagtcactcctcctctcagttgttttaattcaaaaaaaattcccctaagccataacgctttcttaaaagcttttgtggtagccataaattctgcttccgtggtggaaagggcaaccagggactgtaactgggctttccaacatatgcagttctgatttgtcataaaaacgtaggaagtggggactgtaactgggcttttcagcatatgtagttctggattgtcatgaaaacgttggaagtagttgattttctcgtatctctgttcgaggcatagtcagcatccacaaacccttttaactccagttctccttttgcttctgcataggtcagaccataatatcaagtgctctttaagtaccttaatgaccatttgaaggccttccaatgttcaatgctcggattggacatcagccggcttaggatgcttagagcatgagctatgtctggtctggtgctcaccatcacatacattaagcatcctaaaaccactacatagggcacatccttcatttcctctttctctttcgtattgtttggacattgttccttcgacaaaaaaaattgtctgtctatcgaaatggatgtactctttgcatctcccatgttgaacttttgaataactttcttgatatatccagaatgctttaagctaattgtcccttcatcttgttcctttaaacttcaataccaatgatcttttgaattggtccaagctctttcatctcaaattctctcttgagcttggctttgattcttttcatcactgattgatctatgctcattataagcatgtcatccacataaagcaatgagaacacgactgtagattgctccaaattcttgaaatataagcattgatcatatgcagattgtttgaacgtgatttattgcatataagtatcaaattttttgttccattatcttggagattatttcagaccatataaggacctgttgagcttgcaaactaactcgactcctttcttttccacctgaaactcaggtgattgcttcatgtagctctcttcatccaagaatccattcagataggaagtcttgacatcaagttgttcaacttcaaactccatttaagctgccaaagacaacatcaatcttattgacttgtactttaccacaggtgaaaatatttcagtgtagtctattccttccacctgagtaaagcccttagccattaacctagttttgaattgcattggttcattcttattgattccctctttcaccttgagaatattttcactccacaatatttttgttctctggctttggtacaactacccaattcttgatctttcggagtgactccatctccttatccatggcctggaccattttgacttgctttgaccttaaattgcctcttcgtagcttctgggcttttcaattttagttttgtgtgctacagccagtggaaacgcaatcaggtttgcctcaacaaacctttaggttgaatctctctcctagttctatcatgcgccaactgataatcttctagacccgcctgcctgaatccttttggaacctctgtttggtcttcgttatcttccagctcagcattagctttcatttgcttactttgatctagttccataatcgcttctcaatgcgaactctcttctggatgttttgttatgtattccatttccatgcatgtagtgttcttgttttctattttttctacatcacacgaagacacacaacttttcctggatgtaaagtgaggatattccaactcattgaaaaaaacatatctagattcataacctttggtccacctttcttggaaatgaaaattctataccccttggtacctaaggcaaacttaggaaagttcccttaactgatctaggttccaactgtcaatagattggtgtacataagctatacactcaaaggttcttaagtgtgttaggtttgggattatgttgtaccacatttcataaggggttttaaagcctataactctgtttggacttctatttttaagataggttctaagttgctagagcctctcccaaaatggtttctctaatctgaaattgaacagcaaacatctaactttattcaagagggctcagttcatcctttgagtaacaccactttgctatggggtcttcactatggttctacgcttagtgatcccatactcttgacacaacatatcaaattcagagttaataaactctaacccattgtctgtcctaaggttcttaacttttagatcggtttggttttctacctgagttttctaaattttaagctgttctaggcactcattcttagttgctagtaaataagtccaatcacacttactataatcatcaactacagaaagaaaatattgcttgctggagtgagtaggaactttgtatggcccccaaagatcgacatgcacatattcaagtttcttcttatttgtgtgtcttgccggagtgaattatgttgttttcctaaaatacaagcttcacaaatggtaaggcataagatttaaaattttcaattataccttgtttgtgtagttctttgaggccttgttcaccgatatgcccaagtctatgatgccacaactgcatatctaattcttgccctttcaccaaacttacttctctgactggcatagtttctccttagagaacgtataaaccgttgatctttttacttttcattactatcaacgaacttttaatgatcctcaagcttccgtgcatggacttgtatctgtaaccctcatctttaagcgcacccagggatataaggtttgtcttaactttgaaatgtgtcttacgtttgtcaacactttaattccaccatcatattatttgatggaaacctttccagttccaatgaccttgcatgaatagtcatttcccattagaactttacctccatcaactaatttataatcaaaaaatgattctcgacttggacacatgtgataagtgcatctggagtcaagaatccactccctatttattgaagatttagagatagaaaacaattctccatccgttgagcattcatcactatcctccgtaattgcagccgaatctttcatgtggtgatgatgactatttcccttcctatctttattgtgagatttgttgaagccttgctgcttcttgtacttcttgcaaaatctttgcaagtattcagacattctacaaaagtaacactttcaagtttccttctctctggacttcgatcttgattgagagtgatggtgtttactcttcaaacttactttcttgggtgatctctctcttgccaaatacacttcttccttctcggattctttttccaattataattcaaaaaccttcaatttgagtgtggcaagaccatcatccaatacaatcacatctctgccatatttgatggtagccttgagtttttgatatgagattgggagagacctcaacctggctttcttcatcaaccttataatttacattagtcaatcctacaataatctcattaaacttgtcaatattatcatctaaagaaagagaagaaaccattctaaaaccatataacctttctagcaaattaatcttgctagcaattgatgacttcatatagagtcttcaagcttgttccaaattcctttagccgtcttttctgtaataagctttctcctcacactgttggacaagtacatgatgattgtgcaataagccatctcttttattttttttgttttttcttctggtttcttttcagccagtaatttctcatctccaagaattttggagaccttctggtgcactaggatcccttttaaactctctccatggcgcaaagtcccatgttccatcgaatttttccaattcgaatctttccattgatgacaatgatttgttttttcaagaatttcagtggaaatgatcttgattctacgttcttgatcgatttccatgctctaatgtgtggaaaaaattacaactgatgtgcaaaatcaaatcaattaaaacttaattaacaagcaattaggaatgacaagattaataagtcacaaacaatacttggagataaaaacagggatgaatagagtatttaaacaaaaaataattaaagcagtaaaataataaaattaacaccaagatatatactggttcaagtcctataggtcgatgtgattcatgtctctactccagttttaaaacattaccaaaagcttctttattgattgagcaagaacatggtacaatacagtcgagatcgattctcttttggattctctcaaagtgtttactttcacactcttacccaaaaattttctttatatacagaagattctccatacaaaactcaaactcaatctatctcttttctctgtacctctctctctctctacctctcaaactttctctcttaagatcattcctctcgaaactcatatgttgatcacatcttgtaaatgatggtggtatttatagattagggatatggatcccaaagtcggttgttgcaaatgataagttgttaagttagctacaaattaacaaactcaacaaattcctcgtagaagtatctctacgtcaacacaagttaaagtacttccagatgaagtgtaaacttctaggactaagaagtgaagcacacacgctaaaggatcttcccagctgataggaatagagatagctggagtccactatccgaggactcccttattggagagaacaactagccatctagaacttctttccggaggaggactagctttcttgaagactcctttaaggtggacatgatagacatccgagaatgcccttccggatgacatctatcattccacaagacttctccggatggataagttagacttccaggaacgtccttctgaatgacatctaactttacataactagaacaatttttttggagatctttacatttagaggaattataggaagaggtttcaatggttacatcaaatatgtaaccatcatggttacatttattttta

SEQ ID NO: 18905 - DNA, 6173 bp, Cannabis sativa
  modified_base (3894)..(3909): a, c, t, g, unknown or other
ttcattcaaagcttaacaaaccaatatatattagccatttagagctattttcagtttacttcatttgcaacaatctcttcccctcataattgtacttctaaaatggcaaacaatgtcgctcagtctgctcttgaccaaaggttggccatggctaaacattgttctcatggtatgttattttaaaaaaaaaaaaattatacaaaaacacacattctatgtttttggtactttctcttttttcttttcaattatggttttgagtttgggctaaaagttgtattagtatcatgtggctcttcatgatatcaagtatcatcatggttacctaaagatatttcttgcatcggttaaatccaaaatctatgagatagataccatgtgttacaattatttgattagatttggtgtttgatggccccaaccaccaagtgaaatcataaagatttttgtattttgggataaaaagttgaggaaagtacgctgtagtgaaggcccatactaaaatggttttagttttagatatgtgtgatgagaacttggaagtcgtcataaaaaatcattacaaggttattatgaatgaaaatgattattttcctcaatgaacaatgactcagagcaatattgaagaatcattgtgataacatgttatgatgttttaccttttaccatcccctctaatttcttttttctttttaacacaataacagaaggtgtgaaagcaggagctaaggcagctattgttgctagtattgttactgccattccaactgtaagtccctacatcttttgaaaatctatactagctcatgcatacaaatttaaatatatataacaaaataaaaattgaaaaagaagacgaattctcagatggcaccaaatattatttaaaggaactttttttttgggggggtagcaatttaaaagggaattttactataagattgacttacaatatgcttcttaacttgcagcttgctagtgcgaggatgctgccttgggcaaaagcccatctcaaccccactgctcaggccctcattatctccacaggttaccatcttcatcatactaaataagtatttctttttgtatgtcaagtatttggtttattaaagagattttaatctgatggcagcggctggggcggcatatttcatagttgctgacaagactgtcctggctacagcaagaaagaactccttcaagcaagcctcaaacatagaagcatagactcaaaatactgtcacaacggattttaatatccaattgtacttgagcgaaaatcagtgatctaaggaaacattttaattatgtaatcccatctcgataaataaataaaaagatagggtgcttttcttagaccaagagagatttgaaacttataatcagcttaaaatcatgctctaccgctctaccttagttgaacctcagctcaatatgtaccagcaatgaagatacatatatttatatatttatgttttcaatttatatttctatgaagaaacagctttagaacatgatatacattcgtagtagtgtgtgtgcttacatatccaaatcttacccttttctaagttttcggtttcaccaatagtcgttacatgagcaagaaccatctttaaagtggtggaaacgatttcgatctctggctataatttccctcttgaagatcttggatattagctttgtagcagaatgacaatttccacatacacgaagattcttaacaattctaatagttgtccctggttttgtactaatcaaaccaaaagcgatggccaacttttcactgtgatggctcaaagctccttctttcaaatcatcatccacatcagagagaacctcagaagtatctggcttaaagccagacatgtccaaaagcctatctacttcattcaacattttataaatatctttgcttaagggatgtactttgtcgcctacaaggaactcatgaacaacattgtctacctcaattgaggtacaacctggaactttcttcaaccctttatcatgtagtctagtccttatctttgctacatcatcccacctaccagctgctgcatatatgttcgataacagcacataagcgccaggattttcaggttctaattcaaagaggtgttgggcaacatattcgcccaattctacgcgattatggactttgcaagctccaagtagagaaccccaaatagcaccatccggcttcatctccatattttttatcagagactcagcttcatcaaacaacttggcttggccaagaagatctatcataattccatagtgttgcagtttaggtgaaatgttgtaatcttgaatcattgaactgaaatagtgacgtccaaggtctacaagaccagcatggttgcaagcagataaaacaccaacaaatgttatatcatccggcatgaatcccaagtccaccattttcgaaaaaagctcaaacgccatacttgcatgaccgtgtattgctaacccagatatcattgcattccaagaagccaggcttctaacttccataccatcaaagacttgttgtgctgccttaatatttccacatttggcatacatgtcaatgaggcttgtacaaagggatttatttgtataagtcaagaagtttttgtctatataagaatgaatccatttaccaaggtcaagtgcacccaagtgtgcacatgcaggaagaacgcataataatgtgacatcgttaggctctatatctgatctaagcatgacacgaaagagagacagtgcttctttatagttgctcatctgagtatatccacctatcatggcattccatgatacaacattcttttgatttagaccattgaataaatctctagccttatctagattcccacactttgagtacatatcaattagtgcattaacaacccgaagatttgaaccaaggtcatggtcctcaacccaagaccgaacccaattccctaattcaagagaccctgactgagcacaagaagaaagcacagtgacaatagtactctcatttggcttcacatttgctttcagcatctccttaaaaaataacaaggcttctccaaaccggccactatgaccataacccgaaatcatagcattccaagacaccgcatctctaatgggtattttgtcaaaaaggcatcgagcctccgccatgcgacctcttgaagcataaccagttattaaggccgtaaatgaaacctcatttcgaacgacacttttatcaaacactaaacgtgcattatctaactcactacattgagcatacatattgataagagaagagttcacaaaaacatcagaaccaagcccaagcttcaaaatttgtccgtggagttgtttccctacatgggtaaccgccattttcgcacaagtcttcaaaagaatcgggaaagtataagaattcggctcaattccagaaagaatcattcgattgtagaaaacgattgccagagcagggtcagagctcaatgaaaggccacgaatgatggtgttccacatgaactggttggggtcttgaatagtttcgagtatagagatagcataagagagatctccagagggagaaactgcgcaaaactcaatgagcttgctcagggcgaaatgggtattgtggagaccagtcttgatgatgtgggcgtgaacttgtttgagagtgtggatgttgttgcatcgagagaggagggtcagagatgaatgcttttgcagaagtttgtatggaggatcagagtaaggttgggcatggaaggtggcaggtgaaatagggaaggaagatgatgatgaaatgaacgccatgatcttgaagttcgtggtgccaaatttgtactatagccagtccacagcgataaaaactcttcatatagatacagattttattattattattattannnnnnnnnnnnnnnntattattattatttttaaaagaaaaacgtccaaattaaaactgaaattaaatgagaaaaaatttcaagaagaaaaagaatgtgtaaagtatcattaattaattaataagagagtttgcctgtagttatttacttggaaactcaccttgattacataaacatcaatatttgataagttggtgagaaggaaaatattgatggagttaaatgccccgcgtcataacagtcaactctatatttggattttgtcaagttgtttctaaatcaccatcttttagtagtctgaaccaactagtcaagaagactccaaatctgaagcctgagaattgaaaaatgtcgaattggcatcctagaagctaacccgagctcctagggtttcacccagtacctaggttgacatcttgggctagagtttcagttttaaagcctgtcttagtgaagattgctaaaaccttgcacttgaacatgaataagacctgtcacaacatgctagaggcacccaagtcataatcggaacacttcccatttgagacacctaggcagctgatgcccaagccaacctggttgtgcacccagtgccgaggttgactttttgtcaacctagggttcttccaaaaaaatttctaaagatgtttctcgggcattcccttcgccttcatccaaaatgaggaaagggtgctttcaggaaagaaaaggatcaacttggaggccaaacaggtgacccaatgccaaggttgacactaagcctggtcacttgcgcccaggttgacacattgtcaaccttggccatttccaatgacgattttgacgaagtcttaagcatattctctgttttcatcaccaattaagatatgggtgcttttgggaaagaaacagagccatctgggagctagaacatggactcagtgctgaggttgacactttgtcaacctgggctagttccaagcatttttcttaggaagtctcctaggaattttctccgttttcatcaattagaaagatataagtgttgtcagggagcaaacgagaccatttgggggccaaaacagggacccaatgcccaggttgacattggtgctgggctctatgcccaggttgacattcaacctggttcgtatgatttcgctcctcaaacataaattttgctccagacattcttcttatcttggtctaaaatagggtaggagatctcattcgcaatctcgaatgccatagaagtaccaaaacgagttccaagaagctcatcaaagagcactcatcgccctggttgacatgtgacctggtgcactgggttctgcttatctaattctagtttttcctcgagcatctaactattttttgtagtaaacgagagctacgacttgtgacaagtcaaattcacacttgatatttcaccttttcggcaaagcaaaatattggcaaaccagtcgcaaatcgtgaagttttgagtttgcccgtttcacaaaaagcaacatctcgaagagttagtgaacaacttcacaaaaactaagaaattgactaagtgatgttataatatcacttaggcataaaaaaaaatacaagtttgacatattttctcattcatacatcatccaggttgacgtcgaaatgtcaacctcgggactggatgtcaacttgggcgatggatgtcaacttgggtacctgttactaaacaacctttagtaaaacagtcgtaacacactcaatatttatttgattggtgttaatcgagttatgtttgaaagctattttcaagttctttctaaacatatcgcatactaataatgcatttctaaatatatcaagtcaaaaattcttccccaagtgaagtgcaaatttatactacaaaaagcttaaaaacaatcaaacgaacacgatttgagctccaaaaattaatgataactctacaaaataataatagagttattttaccatagttataagtaaaaaaaaattagttcttgactttttaattattaatttattaagtttttaagtatttttaaattagccaacaacaccgagtcaatcaatgcaaggagataatggataataaataatataattaagcaaataagaatacatgatttataaaggtcgaccacgtgatcatggaaatagcctactctcatttatcttgtattatttcaaagaattaataagatcacaaggagctgaccaagtgcgtttcttaataattctcaaaaaaaagcttacaattgtttgatagtataagagctatctaaaacaatataattttgggtc

SEQ ID NO: 18906 - DNA, 3498 bp, Cannabis sativa
aaaacataagggggtttcgccgcaaattgctctattaatattaatgtttccaacccaattgtcttctttctctataaaaaaaaattgtttttcacctcatctttttaagattttagctcaatttttccgggtattacttatgttgttacttttatttaccatattaaacaaaacatgcaattcatacttcatgaattttctattctaagttatcttaattctcattgcagtgtaataaggttccatagttagaaagcaacacaataaagggtgtgattctttttcgaagattactaacactacttagatatatagtatattgtaaataaataatgacatctcataatagcttttaaattaaattatgagagatttaatacttaacataacattataaatagtagtagatatcaatggtacattttaacacactatggagtttggaattgggtgaataatgggttagaaaaattgatggacataaaagtcagtccaaatgtatgaaatgaatcacaccattcgtccaaactccatagttgacttatctttctccaactcagtccaccattaattatttgtgtttttttcttgcaagaatatgattgtaatgtaagataattatcattattatgtgaaaccatattaagacaatattttaaattggtaattagttaaataaccttgaatgacaatgagcttgttatactaatgggatttaaaaattcaatgcatttatcattaagttttttatacatgatagttttttttactacggaatttacacgtgtaaggtgctatctgtcaattagagccttatattctcataagttgacttaaatagtatgtttgaggaagctccattatcgatcatgcacttgacaactgtcgtgttccctatctaagcagttatgaccaatggtcattacgagggaatttgactttggcaacatctccctctgtgaaggagatggtaagctcttcaagcattagctgtttggaaaatctttcctccacagctaggttgttgcagttttgctcgtgacagagagactgagtgtagcgctctatagctttacttgtttcccctacaatatgggatccaccaatgatgacccctaaatgaccgaccacagacagtggcattggatcattgttttgggcaccttgtgcctgtgtctagtcatcttgcaagtaacgatgcaggtggggattgttcctcctaattaggaactcaatttttaactttaagtgcttgcacttgttggtattatggccaaaataattgtaaaattggcagaatttagaggtgtccctcttacttatgtctttcttcaagggaggaggctttttgtatagaactatagattgtagttgtgtaaactgttttaggagtttctattaggagagtaaagcatgtaaacctttcctccttcctttgagtcttgtggtgtacggagattgttaaattttccctttttgccatttcctcaaccatagttattgttgttatgcttgcctccattattttaacttttggaggactgtctgatattgtccatgctggcaggtgtgctgagtagaaatgagggttgtctgccactgtgagcttgttcagcacctgcctgtctcccagtttgggcttgtcgaatagctttttcaagcttaataaagccttctagccaatcaaggaagtcggccatgttttgagttgagtgtcgatagatatctttccataactcactcaaaggcattatgtcactcatgatggttgtgtaccttccgttcttcattaaattcttgactttggtaactttagtcatgaatctttggaggtagtcttttataggttcctcaggtctctgtttgacttcaactaggtcttccaacctatacggtgtttgtctggaaaacaagaattgggtatagaactctgctatgaaagagttccacaaatcaaacctcccagcagctagtttgaagaaccactattgtgcggttttaaacaaggttgctgagaaaatcctacaacaggtatcaatctccacattttacaaatctatttggatttcaaaatatttgatgtgagccaagggatcttcttttcttgtatacatattcaaagtttgcatcttgaacttggttggtatgggcaacacattgatgtgtgcagagaaaggcaatcctctagttctattgagctctaggtcagacagctttgggccagataggccttgtatcatgctcttgagttgatccagtttgtgcttgcactacaagatcaaccctggcggacctttgtccagcgagctcctcccttgtgttgacaggtggtacccttttagggttggcatgatttggcctgtcctatcccattggttgtatgttatggggcgggtaagtacccatcctgaacacttcttcttcagttcaagccagtctgaaagtctactctaaggcctattttgtcaaatacataatccatgggtctcaggtcagaccatgtttgagcattctgaggtggaacgccattattgcacccagtattttaagttctccaattagtgtgctcaccacttaggtgactagtggcactatcttcatttggattgaggtaggactccccactgcgagacttgcttcggtcttgccttggtggcacatcttcctttctttcttcgtttttgggcaagccctagaattggtcagtcctaccatatgctctttcagacaagatctgatcatcattaggctgataggatggtgaccttatttgggatacggtaggtctccctggccgtgaggtttgtctatgatccatagggcgctgagttccctttgggacataatgacctttttcccaaaggggatctcttatgaggggtggcacttcaacctgagattcaactctctcattgaaccgcctgatgggcttagaggatcacggcttgtcgatccatctattcttgaaatttgcgtctctactggcgaaagcattgtccatagcaacacttgcttcttcttggttaagataaaggaaattcatgtgatcttgcacttgccctacaccctctctcagccttgcaagttcagagtcatccccatgtcaacatggggttcatcgatgctagggttgccattggccatgggtctcaacggggttgggggagtcatgagggtgtcagagcacattggcggagttgtagggggtcgagggtcgagttctctcaaatttatggttgccttcattcgaagtcagtattcttggtgtcaacatcggttaaggtgattttggacatgttggtgtcgactgtggcagtggtgatttgaggttttcggtgtcggctggggcaaatgagatttgggttgtggtgatttagggttgttcgtgtacaacaaaagaggaaaggagtgagatagtgagataggtgaaaaaataacaagtgtatttgtggtactaagaaaaacattagcatatttttcatagtgttattatgtggt

SEQ ID NO: 18907 - DNA, 4196 bp, Cannabis sativa
aatatattgcattcagtatttaataataatctcactttcaaataacatagaaaaaacctagcataaaatttagtacgtagttttttgctagtatatgaaataaatatgtatatatataatataaaggacagaaaaatcataatcaaaatttgtacgtagtaagtataagaattgatgatagcattgcagatggacggtgggagaaattgatgaaaaagattgatagattgcttttttatatttgcaaaaagcaaggttaggttattagctaggaatcaatatatttatagtgcagattttctttgccaaatggctaacaatccaaaccaatctatatatattatatatataaagatctgtagggtcaaataataaacttgggtctaatttggagctttatattatcgtgtataaaaggttgttgggtaacaattatgttttattactatttataatatttttagtattttcatttctcaatacataataaattataatttttggttgggaactgctctctctcatgggatctgaaattaggatttccacaatgtatttatatgaaatattattactaatgagtagtgcaaaagtggaaggtaggttataattctctcgaatatacctataagctttttcataatttaattttgtatatatttaaaaagcctaattcgtactaattgatgttatatatatagccaccaaaattttacatataactatagtattaatgtaataatatatatattttttataaatttaaattaaattttttcattaatatcctgtgaagacagttgctatagcaactactaactaatttttcgttagtttagctctaattaacttcagttaattagttaatcgttttttcaactcaattcagttggcctaactaatttctattattgcattcggttgctcttaatcgtgtatatattttactcttttttcctcccttctctgatttctttctctctccttttaaactcattttttacgatatatgttatctgatagtggagaggtgagtggtgggtagttatgagttagtggagagaaaagtggggatgaattattaattaatcattttttttcaattgaatgattctttctcatttttattattattatttttattattttaataataaataaaagaagaagaaaaaaaaatgcattcaacactatggtatcagagcaattactccctttaatggctaatgtagtttttggaagaactggtcactctggatcaaaagacaacactagaaatggaagcaatacaggtggttctcactcagtctctcaatttagttgaatgatcataattttttgctatggaaacaacaagtttgagctgcaattcgtggaaacaaattaacatcctacatcaagggtgaaccaccagcttaatttctgtctgaagcagattgtgttgctggaacttttaatttggtgtatcttgattaggaagtgcaagatcaattactcatgtcatggcttctttcttccaagacagatagtttacttacgtgcatggttggatgtgagactttgagagaaatctagacaatattagagcaatactttactttgcaagtgtctgcagaaggtcttgagtttcgaactaaactccaaaacttgaagaaaggatccttaacactatctcagtacctgttgaaagttaaacatctggttgatcttcttgcatccgttggagaaatgtacactctaaagatcatgttgctattatattcaaagagctcttgagtgagtatgatacttttgtcatctcaacaaatactagattggaaacctattctgttgcactaatcaaatctctactttcttgctttagaatcgagaatagagaaaatatatcgtgaagttgagatcagtgctcagagtaaaagacattaatcatccagaggccaatcttgttaatttcaatcacaattttggtaattacagacagtaaccttcgtatccaagattcaataacccactcagttctatcctacaaatcatggagttttcagaggaggatacactcaaggtggtggtaacaacaactctaattcctttcaagaggatcatttggcaaaaaagctcaatccaattatggcagaggtgaagacagatcgagcaatcctggaaacaagcttcagtgccagttatgttttaaatttagtcatactgttcaagattatttctacaggtttgataagagtttcaatggaactgttaacaatcaagctagttcatcaaactcaacccaagcaaatctcacctccaccatttctagtcaggacaataattggtatcctgaatcaaggggccacaaaccattgcactcttgacaatcatcaccttattcatggagcaggatatgatggtgctaaaaaactgtttgtaggtaatggtgcaggtttactaatacaacatattggtcattatttcttttctacaccaaattcatctaagtcattcatgttaaataaccttttgcatgtttttgatattacaaagaatatattaagtgtgcctaaatttactaaagatagcaagattttctttaaatttcatgattacttttgttttgtttaggacaaggtgactcgttctattttattgatggggacacatcagaatgacttgtattcgtttgatgcctcccaatacttgcaatttcattctccacagtcttatcaatctatacctcaaagctttcctcattcaatttcaaacaatggtgtcaagtttgtggcaaatacttgttccaattgtaatattaacaatttttttttgaattttccatttggcacaggttaggacacccttcctttagggttgttcagactattcttaatcattgtaatgtgtctataaataacattgacagtaataaaaattgcactgcttgttgccttggaaagattcataaactcccttttcccaaaatatctgaaactgaattattgtaatgtgtctataaataaccttgacaataataaaaattgcaatgcttgttgcctttgaaagattcataaactcccttttcccaaaatgtttgaaactgaatacttctcctcttcaacttgttgtatctgacttgtgaggaccctcacacaccctttcacttaatggctataaatattatatttattttatggatgtgtactctaaattcattttgttgtacttaaaaataagtttgatgctttcaaagtctttcaaaacattaaagctgagagtgaactacaattaggtaccaagttaaaagtcttacaaacagattggggagaagtatagatttaaatatttttaaatattttatctctttgaaataggacaattaacttaaatattaggaaaaaaagagagtacgaacgacgcgcgtatgtggtggatcaagtgtgtgagtcctcatcattcgcaaaaaactgggtattacttggagcccaaactcaagtgccaaagttgcaccctataccttgtaaacaagtattcatattacatgtgagacttttagacacttttatattttgttaaaatattcatcaaagttccaacagtgagtaccacttgtattatgttaaggctaagactttgaaaaagcttgattgtcacaatgcttttttggaaaactatggttatgagttgagtaatagtggctttgttgataattgtttgtattgggtagtgaggaggaggtcaaaaagtggtgtaaacttcattatttttgcctttgatcttaagactgaaaaacacagtacttttgccatttcaaagtaagggttatgtgtttggagctgtggaatttgaaggcttcgtttgtgtagtcaaaactattcatggtccatggtgttatgagatatgggtgatgaaagatcataataaagaaatttgtagctgtaattggagcatgttgttcttaattaggcctaaactttatgattatcacctcagtgttgtacctttgaaatattgcaagactagtaatcagattctcttgaaggttggcttccacaaattagttgtttgtgatttgaaaacaagcacagttatcaaaactcttagagctaagagcatgttttgtattattttctgttttttattttcaaaaaattatttttagaaatgagaacaaaaaataatttttgaagtttttaaaacacaagtcatgtttg

SEQ ID NO: 18908 - DNA, 4761 bp, Cannabis sativa
tttaacatagtattatataaaaatatgatatatatatattccaattcaatataatacaatataatacaatacaacttaatacggcgtttctaaattggtttaattattaaactagtcatggctctatttagcttggtatatatgattctaaactgtatttcgtaaagttgatttttctttgagtttgactgtagaggattacgtgtatggtgtaaactgtaaataatgggaaagctgattattttgaccgctctttgtctccaccccaaacaagatttcattggcaaggtcaattgctggctagctagaaagttaaacctatatattattgatgaagcaccatcccaagagcacaaaacgacatatatgtgggtgtgagtctcctttcctgtaccaaaaaacaaaacccattaggttgattagttagtttaaatgttttgaaacaactctaacgtgtaaaatgaggtgaaacaaatatcaattctcatagccgtgtgaaagatgttattaccaaatgttgatttgtattcatttgattcgtttaacagtacattacgtctccaatacaaggtatcatagtatcaacatcgatactaaatttagaataaaaattgatattctaacattatgcatgcttccatttaaattcttaaaataaaaatttgatcagtggtgaaaattggtgaacttgtgctctagggtctcatctcccagctagggtgttttattagggtctatttgtttgtacttaggacgtaaatctgattcagttagatattgtaaatattaagaccattcattttttattttgttcaattttcactcttaatatctcttctcgaataagaggtaacccagtgtttgttgttttacttatgtgttatccaaatgctctttgagacttggaagtagctcgtgtaagtaggatcctgtcttcccttttagattgctcatggtactacattcgattatggtaaaaccgttagctcgatatgaagtctcttgagtttggtatcttcatgtttcaatgtttgatactttgtttaacaatattccttgacatggcatcatggtgttaaatttgatactatagtatgaaccgaagagtttcaaaaaatattgtcttgagaaagctattgaaattaattctcgaactgaacttgaagttacacttcaagaattttgagggataaagaaaacaataacatggtgtagaggcaataacatcttttctaaaagaaaacttaacttgacgaaacaaaactaagctaaacaacaaaagtatcacataatctcgaaagacattaaaagcttgcacgtagtggcaacctcaatttcattagaatggaagtaagaaatgtaagagagatgatgtactcccaagtcccgagtaggagatcaggaataaacatttgggtgtcatctttgatccagttagctactaaaaataacagaacagtgaagctgtgtttttttttccttttttttacagtttttttttttttacatttttttgggtttcatttatgtacatgaataacaaatgatgctaaagtaaatatactatatagatattgtggaatagaacacaaaaggtcaacttctccaggcaggcatgctacttgaagatggccctgtacttgataccggccctgtacttgataccgtcaagccacggtcgtacattcgttggatctcttctctgtactcagtcagagacttgtgtggtatagccggagtgagctctaccacatctcccatattcagcttgcacattggatcactaacaggcttatggttcagtcttggcctcagttcttccttcaatgggaacccatatggggaccatctcaagctcccccgaccagatgtttccaaaagatccataattgttgagtttgctggaacctcctgcactgacatctgcagtcattttaaaacaaaacaacatacatacatcgttagaaactaaaagatggaactgttaaacaaaaagactaaaacaagttctaaattctgaacatctttataagatggagcaactcaaatggttaaagattctgaagctaaccttctcattctcgattatgatgacaaaaaccagaccatcagacccacagtgaggtttgtaaaagtatgggcaatcctcattatgagaagggaacgagcatggtggtttgactgaatcgggataatcaatgcatgactgatctctgctcattgcctcgcactgccaagtaacaacccatcgggcccactcgaccatctgaagcacgaaagaagagtgcttacagtcaccttctttgtatcgccaatgagctgcaaatccaaactctgcttgcaaatgcatctctttcgttcggatttggacttcaagtggaactgttccttcactcataactactgtgtgaagagatcggtacctaaacagtataaaacaacagttagaaacttcatagaaataaagaagccttgttaataaacatagtgctagcttcaagggtgtcatacccattaaacttgggtttagttatgtagtctttgaacttttcaggcacctcagaccatagtctgtgaacaacttccaatgccttgtaacagtcttcctctttttcaacaatcaaacgcagcccgtgaatatcatgaatttcatccatgttaagcttcttcctgcagattaaagcaagaaccattcgttaaataaaaattaacgaaagtatacaatcaatgtcaccccttaaacatccaaattctaattgtgttcaagagaggtagaggctacgcacttcaacatttttgcatagatgctatacaagctcttatgccggccagagatataatggtaagaaatggcattatccttgagagatttctctagtttctttgtggcggaaataatcattgtctcatcaaaagactcgagaagcttagaggatagctcttcgtgctgatccgggttaaggtgtttgaagcataaattttcaagttgctccttccaagtagagattcctaaacggtttgccaatggaacaaaaatctccaaagtctcctttgcaaatctctgctgtttctcatagggaagtgcatccagtgtcatcatgttatgtagtcgatctgccaatttaatgaggacagctcttgcatcttccattgcaagaaacatagtatgtagacgatctgcttctattttcttactagctgtattgttatcacgcgcaagcttactcaactgacttagcttagatacctaaaaacaattggcagttgcacagatcagacgctataagggaaaacaaagaagccttgaaaacatattttctctagaaagaaacaggcaaacaagaaaaacacagtaattccaacataatttctctcaaaaagctatatcacaataaatattcacacaatgattaacaaacgagttctgaagattcagatgcttactcctccaactaaatcagcaacccctgatccaaatgccctgcgaatatcatcataagtcatagaagaatcatcaagcgtatcatgtaaaagccctgcagcaactactgtggaattagcaccaatcaatgccagcatcaccgctgtttccacacaatgctgcaaatatggatcgccactcaatcgcatctacaacacaacaaaccaaacaatgcaaatacaaaattaatcaacaaacacaaccaatatcctagaatagaagaaatctcataaccaatatcctaaaaaggaagaaatctcatgacatttaaatcaaactcacctgtcctttatgggctttttcgacctcgtgaaaggccttcacaacaaattcatcgtggaatatcttgtgccgcaactgtgcatccagaagcaaatctttggcgtaaggctcggaattactttccgtaaacccatcctctatattgaatgttaattcgtccaaaagcgcagctgatgaacccacatccaaatcatcccctccgattccaacactcctcgaatcgtaatctacacatgacgatcccaaagctcccctcacaaacccgttagaaaagccaaatgagttctgagaattcgtttccccactactaatcttttcgcgggaaatcctcatcggcgggcttctagcggacccagtaaccccgctactgttatacgaaatcgggccctgaaacaccgagaccgggctgtgatcattactcaaagaaaccccattaattttactcgaggaatagcgaaaagagctactcaattcttcgcttctatcatgccatagagaacccaattcttctcctccacccgagaaactcgacgatgacgaagcatgcttcaccgagtgagaagaaaacatacacgaaagcccgccaacgactggcttctgagacgtggatgcagtcgacgcagacgttgaagatcgagagcttaactcgaaatcatgagtgatatgaccattgatttggcaaggatgcgtcgtcgagcacacactgctcggcggactagcgtaaagtgctattgtcgggaccgacatggctttcttcgattcttcttcaaaaaattaaagcctcagatctacacaaaacctttaggctaattccaaaaagccacgccaatttctattcaaaaacccaattggtttccaaaaataaacacagaaataatcacgatcaataccgaattcccgaaatacccgaacaaacttttggctataaatatatcgaatttctttcaagacccagtttttcttcttctttgtttttttttttttttactttaattttt

SEQ ID NO: 18909 - DNA, 6710 bp, Cannabis sativa
gtaggggtggtaatttgtgtttgtgggttgtatttttgtcatgtcgagatctatgtattatatgtacatgctctatccgaatacgtcatgtttaataatcgtatcaaaaaataaaacacaaacacaatccatttataaacgagttgacacgatacggccgtgtaactccattaatatagtaattacatatttaacacatttgtgactcatttatggcttgataaagtattaaaataactttaaaaggttattaacgagacacttttgtgttaatagtgacaacctgaacatgacacctatttattaataaattttatttaattacatgtcaccctattaatatattaattacatgtttaacacgtttatgatcatttatggcttgataaagtatattaaaatagttttaaataagttattaactatgtttttaaaattaattagtggtaagtaaagttgctcaaattcttatatatagctcaatattttattatttatttaatgtgagatattatcccacaatatatattaattatgagtttttctattttttgttctattatcatttataaatactattattttatatatatttttttaaatattgataatatatattataaccatttttcatacttttgatatttactcatatgtatattgttttagctattaatattaacatagatttacatatattattaaatatttataattagatgtcaaataaaagataatagtaatataaatattaaaatatttatattttacagaaattaatattataagattaataaatatgctcagaatatatacatatatagaaaaaaaaaataagaatataagaatgagttaattaatacatatcgtaaataatattatacatgtgaagaatttattgtaatttttctaaattttgaggtaaaatatagcagccggtagaagtcactttaaagttcattctttatttttttaaggatttaattcttataaaggaactgattggaggtgctcaattgggtggcttgtaacaatagaagaattaaaatccttaataaaaaataattaaatccacatgttgttcatttttattggattgagaaattcatgcacaatgaactctcttcttaatatggctcaaaaaggagagatggacatcatcttttcatgtaataaaaatgtaaatatgactaggatgtacttgtagtgattactataagaggacaatattgcttattttaggattgtgggcttgtttaatatagtaatgttcttgtcattgatacaaaaatattgatagggactataagaatgaggtgggcttacttgttaagaaagtaaagagttgatttttctttcttttttttttcatatatttgcttcacttccaatattggaatgatatatattcttattctactgatattttctgcaccaacttaagcctcaagctcaatttcataatccaaaaatatagaatggacaaggagaacaaatattcttgtttttcttttaaaaaaaatcagtacattcattaaatggatgagatgtgccatacataaattgcatgtagaccacatcaaatgatgtaagacccattacaaaatagaatttttttttttattatttactgtattagtattatcatagcaacatttgtgtagttcataattttgctgtatttttggaagttgtaatatataatttatttaaatttatgaaaagaaaaagaaaaaaaaaaaagtttgatgttgtcaacttgtcatgttgatcctcttttcaagtatgaaaaaattcaagaattataatttacttaaactttaaggagccatatgcaatttttaaaattgtacgatgaaaaaaatgtaactaaagctgaactgaatagacctttcctttttttataataaataaacaaaaccaacacaattgaaaaaggaaaaataaaaataaacaaataagaacttattttttataagtactaattaaaaaatggtataattttctcattcctcaaaactcaaatcacaaaaatcaacaaacctaaaaatggaacaaaatcaagaccatttcaaacccaaccaaactgagactattttgataactgttcagttttcaacttgaccatactggaaagttagaaacaatccacacaaactcataacacacaagtcaaaaaccaacttaaaaaatgggaaaacacacacaaaaatatgacagtaatatctcttactgacatctcattttgtaaaacaaaaaaagcccagtaatataaagacaacacagcttggtactcaaagaaagtctctcacttgctttgatatttagttaaagaaaagaattaaccaaagcaaaagtgagcgcgtgacactgaaaaaacaataccaaaaattaaaaatgaaaactttagacaatgacaaacagctcactcttttttgacagttacctctttccctttctcattgcaatttatttttgcttttgtgtctgtcctatctgttaagtcaaaacactcgtcaaaatcaatctgggaaaagactggttcagaacttggccaacacagcatttcatgatgatgatgatgctattctatacctatatttgtgtatatatttatttatttatttattaatctataaagaaccctatacaccaaaagtctcaatgtcccatttgtaattatgtaccatacacactcaaaacatttgaatgaaaacaagggagggtcatatttcatttacattacaaaacccacaaaagagaaagccatagattacaagagaaaggaaaaagttggttcttttaattttagtagataagagaatttataaaaaaaacctatatctatgcaaaaaggaaacaaaagtaaaatttggggttgtaaagaataaggagaaaaagggaaaaagaatacttttcttttgcttatatactttcttaacacttttttttttggtttttgtttttatcttggacctgatagctccatagcataagaatccaaggaatgatcatcatcatcatcttccattgttgttccaaacatgcttgaacgatcatgttcactgcaatcatgttttaaggcagtgggggtggcggtagtagtagttgttgtagggcgggaagtgcttttgttgtgaggattatgaaagaggttcatgctgggattagtatgattatgtgaagctgcccacttctcggctaggccatcgccttcgagcatccgaacaacctctgacatcttcggccggtgggccggtaggtattgagtgcaaagtaaggccacttgtagcatctcccctacttcaatccgatcataattattcactagctccctatccactaatagctccactttcttttcttgttgtattttcttgacctgtaacaacagtgacatctctgttactttagtattgaaataaacacttgctattattggattaggcctaaatagatattttggctcaaaagcaaaggcatcatactaacccactcaagcatggctcccttctgattggtggtcttgccaaactcaagagctctcattccagttatgagctctaacaaaagaataccgaatccaaaaacatcagtcttctcagatgattggcctgtagagagatactcgggagctatgtggccaacagtgccacggacagcagtagtgacatgggaatcagcgtggtcgaggagctttgcaagaccaaaatcaccaacaacagcctcacagtaatcatccaagagcacatttgcagccttgacatccctgtgaattatcttcggatcacattgttcgtgtagataaagtaggccccttgcagctcctatggctatcctcttccttgtattccaatctagtgctggttttcctgagaaaatgagaaacaagatttgaggttaagttaacatgaaaattttagtaactaatttaaaaaattaaaattaaaagaaagttgttctctagctcatatgattttattaataagagaaaagaaaagacgaaatttatcaaataaaaacatacaattttagaattgaaagtaaaatctatggcatcctattaattttgaagtttatatagtcataacatattgattataactgcaaaatagagcaatcaaactaacctctaagtcgagatgccacgctgccattagacatgtacgggtacaccaaaagcttctcgttagatgtagcacaatacccaatcaaacgaagcaaatgcctatgaaccgcaaggcttatcatctcaagttctgttcggaactgagactccccagctgttcccgtcacatcctttaatcgtttcacagctaccaaagttccatctccaatttttcccttgtacacatttccaaaacctccagccccaagtatgtttttggagctaaaattgtcggtagcatgttgcagttccttgaaagtgaagcttttgaggtttcctaaacttatcaacccctcttcttggttgtctacaacaagtacacaaaccccatcttcaactaacattctatcaatgttgattataacattaagtgggattacaaatactaaccattgatgttcaagatggttaggctgtgttgcttccttctatgccaaagaataccaaatgataatattatgaggaaaacacagcttagactaaccccaagtgcaattgctaatttcttaggcttttgttgaccttaatcatagaaaaaagtcaaagaaaaagttaggcaaaggaaaatgagaagatggtttagttaaagtaaataaaaaagaaaggactaaaaaggtcaccaggtgatgagtctaatgagaagctaagaggaattggggtcactgttccagaacaaccctcagctgaggtgcttccacaaatcaatggatttcccacaatgctaacaaaaagaaaattataaataaataaatgggcaagaaatatatatatacactattttcatatgtagacagaggagagattacttgaaagttctggccggaaattttgggactggtccactgagattgttgtaagacaagtccctgagtgaaaaacaggttcaccaatagaacaaaaaccaattgtcagattctgaacaaagagcatagcaagtaaaagaagtaattcaaaattgttacaacttgttctcttttttcaagataataatagctagcaagcaaacaaagtttaacaaattagtgaaactgagaaagtttatacttacaagaaagcaagctgaggacttcttgatagagataaaggaaatggcccagacaagctattgttgttcagcctcctaatctcattacatgacaaaaataaacacagttaaatacaatattatagaatcattacagggcttatatataatatacagaagacaaaggcttcttctgcagctatacataatagctatattgagctaagtgatcagtttcaatattaaatgaataaaacactatggtacagaaagaaactcattagttttcttcctttttcttagtcaccaaacaaccaagtaatccaaatacaaatattattatattaacttacaaatacaagagaccgttcagttgacccagtgagtcaggaaccactccggagaatcggttattagagagatccaatgtctgaagcttctgaagtttaccaagctcgggtggtattttgccagaaatattgttgttttgcagtaaacttcaaattcatagcaaaaacaaaccaaaattagaaatggaacaaaataattccaagtttcaaagagagaagcagaacaagtttgtttatttatttattacttccattaaggaagaaaaatacttaaatgggttcttacacttggcgaagatttgtgagatttcctattgcaccagacaaaaatccagacagagactgacttggagctcccctgcaaaaacccataaagaaacaaaaaaaaaaagacattaaagctcacattcaattcaactcaaaagaataaatactccattaatgaaggaggttgaaggaggcaactcacaggccaattacaaagttttcaggtgagcaagtgatcatagcccaactacatgggtcaacagagtcaccatcccagttgttcaaagctccatgaggatcatgcaaaccatctcttaagttaatcaaagcttccactacaaaaaaaaataacaaaaaaacaaaaacccatatcaccaaaaacagaacagaattttctctctttcttattttaccaaaaaagcttgaaacttaccttcatggttgcgaggttcgtatgagaaacaaacggtagcagaggaaagaaagaatatgaagaagaagagaggaagagcttccatggctaaccaagctatacaaaattagctaatctatgtatatctacctacctaagtggctccttcttcttcctctttcaaaaaaggttgtgtctttgtgtgtgtgtgttctctcactctctacttttctttcctctggtctcttccttttcagtgtctcttaccaccccactctctgctttttacaaataaaataacaaactttgaagaaaaacaaaaaaataaataataaaaaaaagtaaagggtgttacagagagagagagagagaaaaagagtcaggggtgatacgagttgtcaggagagagaaagagctggtgctggtgatggtggtagaagaaggagagtgagtgaggagagtgtgtagagagagaaagagagagattgt

SEQ ID NO: 18910 - DNA, 3696 bp, Cannabis sativa
aatgcaaagcagttagactattattgagaacagtaaaccataaaaaaaatgtttaataataccttgatcataatgttcttgaattgcaaccttttcccactgcccacatatattatagcctccgtgctgggtgctgtgagattgaatccttgcctatcttttaaatacagtattccaccaccaccatcataaacaaaatgatcatatcgctcatcgtcaactactaaaggtctttgaggggagaaagagaatttggcagatggttgcttataaactggctcattgagaatcaatgtatcaattacttgacaagattgtgtgccttcttcattattcatcacactaccaagtgttggaacaaaaaattcaacaacagccagcaggaaatcaagtgcaacaagcaactgtggcctttgaatgcataacgaaacaaatgttgaacgttggttaaacttaacgtcaagaataagcatcgtaaaatcaagttttgcatcaatgtccttcgcaacattctgatcatttgtcagctgtatttcatcaccaccattgccagtggacaaatgcaaaggactagaaccaatattatcaggctttcctattgccaatctgaattcttgttcagttccttcacgatcatcacaaacagtgaaacccttcagtgtcgctgagagaaaaccttcttcaactgaactagacttgtagagtagccatgcaccgctaacctgcatggtagagtggtcagctatcaagtacaacaagtattgttggatcgtccaataataataataataatacaaagtaaaacaaatataatgcagcaatatctccttctagttttaacctagaggccaggtaaagggtgaaacagaaacaataatgttatagctaatgaccggaacacctcaagaagaatctaaagagaactcacagaaagagatacacctggttagaataataaaatactgcttaggacatgctcaaaatctcaaactatctttagagaaaaaaaaaaacatgctacaaagttaagaaaataatacaaaaccaatttgcattaatactttaagagctgtaatatttctatcgaaaaatgatgcagaatccttatgtctggcactggcagctgtaattttatttgtttggcatgcccaaatttgctcataattttttcgcaagaaacgagaccaggtttattaagattgttaagacaatactaaaacaatttccaaggatctacaagttcaatgaaaatagagggaaaataatgtgcaattaatttagaaatagatttaagtcctcaaaaaaaacggaaacaaatctattagttcaatttacctgcactgtggccagcggtgcatctcttgccattgctgtatataaccgcaattcaacaagaccaatgaatacagatacttttgtcacaatccaggcttctccatttgcattttgagattcaagaacacttgtatcatgaggaatgataggttctgcttctactacatcaacagtagttatagaatcattatttaactgaggaatagcacgtggggtctcggagatattggacactgcacattcagaaataatgtggtattccttgtttgagagagctgctttcagttcctcaatctgagagaacataagtttaaaagtggtcaggtaaatcctttattcatatatacacacactacacacactcacatatacttgtaatttttttttttttttttgaaacaatacagagacacttgtattatttgatagaagagaaatagtacaaggaatgaagaagggtgcaggaaacgtgcaccaaaaaaaccaaaagaaaacatgaaaaggaaaacaattttcctgctaacaaaacagacagaagatatctaaatttgagaaagggaaaaacattcagcagaaaactatggctatctgctggtctatttggttggaaaaaaatagaaggatccttttttcgaagaagaggcatgttaggtttgcgtacacaaagagtttgtgtagagtagctacttcaaatgagaacagactacttagctttgtgatacttatcacaagcaaaatgaatgttgacataaattgggaatgatctcaaataagcatgacaatcacaaaggaaacaacaaaaattattgcttcaaaatcagcacaaataatatgcaaggtaaactacatcaccttaattttgatttctgtgttgggtatttgatgtaacagatctcgaagggacctctggattacaatagagatccccttcacatcatgaataatgctttctcctagatctgtaccagtgccaacattcagatgaatgtcctctacctgcatcccaaatcaaagaagatcaacatgagaattagatatgacttttgtttatgaagaccaacatgagagagagatattactttcgtgtatgactaattaatgtttacctgaattgttaatatttccaaatgcacagcattaatatcagttttacttccaaaacaccacttaaaggtattctgtactgttatatgaacaatgtccagcttcaagtagctgttaatcagaaatttaaagcaaaacgcagcatgagtatattgaaaaaccatccacagcaatcagaaaagaagttactatattctaatcatcaacttactcaaggctgtcggttctccgaggcattaatataatgggctgtctaagagaaatatccagcttcactgcaggtgatccttcaatttcactagttgtaaaccacttctctgaatttgttagctggtcttttagtttggcaactccttttgaatcgttgggaacgaggcccataaagtaactaacaacctgtatagcgtttcagatacaaaacaaaactttaaattcgtatcatggatagaggttaacacaatagaactgaagaataagacgatgaaatgtatgactattttacctcctgtataaagcgattcaagtatacaattcgtacttctgacagctctccaaagaaactatactcataacctttatagtcttcgtccccaacactaaatgaagtaaaaaccaactgcacgatagcaaacaaaacatgctagacaaaacccaaaaaataaaggaaagagaccagaacacaacaaaacaggctacatgaaccatgtcaaacaaaattgtggtaatttattatgttttgggttattgttttttccgtttactggcttttgtttcggctctggtatagttttcaatgttgtctctctttctgttttgagatataatgttcctatccacggttttcctccaccacaagtgaggctttcaatattatattcgggggaggggtcagtagacaagtgacctgtttctcttttttcaaaaaaaaaattatggaactatcctacagccttcatgtacactgcactgcaattctccacccatttcagattttctactactatcttcaaaatagctcaaaacatagctatatacattacaattaacaggatttgatttttcttgcaaagtggacatttttcttttttttttttttgagaatttagagtttccattttaccaactttcgtaagagagagagagagagagagagagagagagagaatacctcgacaaatgaactgcctccaggattcctcatatcacaagcccaaaaatacatatgattttctggaagactgtcatcagtaattctaa

SEQ ID NO: 18911 - DNA, 4297 bp, Cannabis sativa
aatttagtattgttataatttcttcgtggtatataattttattactactgtatattaattttcagtgatacgatatattaaatactgttgtatatattcaacgatgtaatatatttatttatttttgttacaatataataatatgtaatattaaaaaaattatataatctaattattatatatattttttaagaaaataatatgtaataaatgtatttttataatttttattagctaattattatatttgaccattttcttattttttttttagaacagaaacattgaaacatttactaatttatagtttctagtttccaaatttagggtcattttgcatcttaaccctttggtatactagcattcaaaaattttatttagttgaattttttctgtgatagtgtaagttttaaatatttagaaatatttattaattttaaaaaacttcaataattaattacagtattaaaatgaaaatttaatattttattgcatgtataattatttttttattctagagaactataagtaggtcattttgaaaaaaaaaattaaataactctcataaatattaaaacaaaaaaaaagtattccaaaaataatcttttaaaagaatgtactttaaatttttccgttctacaagttacaaatcacatttccacttaaaattgttgcataatactcttcaatagaattaactttgaatttcacaaatttttaattgagaatagtgtttttactttttacataatctaaccatttttaataggagatgataaaaatgatatatttgatataaaagtaattttggaattattatttcaaagtttgcacgtctaacatggcatttacacgtggtatagtctagctaacctttgacatgacagggaactttcgggcagaagtatgcttgacaggttccatataaagctgacatccatgagttgttgattgccttccaagaaggatctagtcgggccattaatgtatcaaccagagaagggaagtttgactcacattgcaggaatgttccacaaaaaaaaaaaaaacaagtctcgaaaaaggcctggctgcgtaaccaatatgccgaccaaaagaaatgatgtcaggagtttcgggcaaggttacacgatacttgatttcttcttcaacaagcttccacaaatatctcaaattgaaatctacaaactcagatccagccaatctatctgagaatataagagtttcaatagatcgtaactgcaccttagaatataggatatttactctttgatcactccttttacggagccaattgtaacaactttttctctataaatagtgaatgaattcgcaaggggaaaggacctaaaatcatactcacgcatctaagagcactttgttgaaagatattctccgtaaacactttgagagttgtagctagaattcactttgtctatcttagtgatctgcacgacattatctcacaatcaatacaactaaaaagagagtaggtcattacccatatacaagggggttgaacctctataattattgtgtgttcttatttactttttattcttaactccttattggtgattaataagtgattatttgactctaagtcagttggctacttttccagtcaacatttttagtgcttttattgagagcttcaacattcttataaaaatctcatcttttttcacccagtattcaccatggtcctgacaaggagaagcatgtccactgagccccgagatccaatggctatggatcctaatgttcaagttccaccaactggtgacaacccttctaaccttgcctgaccaccttggacaaatccatcttcagggttcagacccaaaggcccagtcaatgtcgagcaagatctaacaagtatctggtaagtcccggtcaatgctggacaacttgcccaaagtaccacgggggttcctgtaacaaggcctaccctccaggtatatgctggagaaattgggcttggggttagccaacctagcatcaatgaaccccatgttgacttggaggatgattccgagctagccaggctaagagaggtcatatggcaagtttacggtcatacaaacatcctccatcatgaataaaaagaaacacgcgttgctatgagtgatgcttttgcttagtagagatacgaattctaggaatggatggatcgacatgccacgatccttcaagccatcaggtagagctaaacctccgaaatagggaggcaaatgaactcattagacggttcaacaaaagagctgggtccatagtggaagagccaccactcataagggaccctctttagggaaaaggtccctatgtcttggaggaaactcaactccccaaggattgtgggcaaactttgaacccagtagacctaactatttcccaaacaaggccacatcccattcaaccgaatgatgaacaaatcctacctgaaagggcatatggtgggaccaaccagttctaagaccttcccagggatgaaggaaaggggaagatatcccacccaagcaaggccaaagtagatctcacagtggggaatcttaccccaatgaggatggtgccacaagccaccctattgatgagcgtactaattggaggactaataataattatgggcgcaatagcgacgttcttccccagaatgctcaaacacgttttgacccaaggcccaaggattctgtgtttgataggacaggccctgggtaggagaagatcttaagactaagttaaaacgaagaagaaataatcaggacaggtacgtcctaccccaaaacaatccactaagggtgcaagataagccaattcctatagacccgtgtcaaccagagagtggagctggctagacaaagggcgaccagagttgatcctgacgtgcaggcacaatgggatcaactcaagagccttgtacaaggcatgtccagcccaaagctttctgacctggaattgtataggactcaagggtcacattactctggacgcattaatgcgttgcctttaccaaccaagttcaagatgccaatttagaaaatgtatactgggaaagaagatcattttgtccatatcaaatactttgagatctagatggatctgcaagtggtgatagacgaaattcgttggaggatttttccagcaaccttgtctgacatcgcacatcaatggtattttaagctatccccaggaagaattaattcctggaatgctttcaccgttgagttttacacacagttctcgtcttctagaaaaataccttcctaaatggagaagttggttgacataaagaaaaggtcagaagaaccattgaaagtctatatccaaagtttcatgatcgaggccataaaggttaaaggcttgacggaagaagggcaacatacaaccattctagggggtatccagcctctgattgacctttagagggacatcaaaaaaagattaaccaacattatgagagagtttttagacagaccagacagttttataaaacttggagaaactgtccgacaagtgcaaattggcaggcaaaaaatagctaattcctgcaacacacctgccttagttagggccaatattaccacctagccccaaaccaacaacaatcatggagggaaacagaacaataatggttctggccaaggaaatggcaagaaggggaaattcaataatcccctgcacatgacagcaggggtgttcaacaaaatttacaaaccgcccaacccgaataaattgcctaaactaaaccgaataatcgacaaaaaatacaacctgaaatagtataataaaaatccaaatcgcccaatgaatatattgggtagttttcaaattattctaaaccgccctgttatctctaacaaaatccaagataattgtgcatgctatttcttctagatatggaagtccaacaaatggaacactttggccaaaagggagcactttggtcacagaggagcactttggccaaaaagggagcactttggtcaaagaggatcactttggccaaaatggagcactttgggcgtactaagctcccggctctgtcagttgctaaggcgcaaagagctccttagctgctgaattacctcaaggacttgatgggcacgaaccgactcaattggctccccttgtgtgcccatgaccatctgggtcctctaaatatgagagacacgtgctcttgaggctatctcgaaaacatagtcaaaaaatgataagtgaagagatatttatttttttaaatgattattttattattattattttgtatcttgaatctaacccaactatagttacggga

SEQ ID NO: 18912 - DNA, 3183 bp, Cannabis sativa
tctcttgctctgttttcctttgtatcagtgtataaatacttgtattcattttccagtaatgaattgagctttctttttcatttctctcttttctctgctttccttctctacaacatttactagcaactccattgaaattacactaataattaggtgtgttcacggattggtttagtccgaatttttaattttttcaaactaaaccactattatggtattttaaaaagtcaaaaccaaaccgaaatgatcaaatgaaaccactaaaaaataaattggtttagttcgaaccatgatttgtatttcgtagttgctctaatttttttttacaataattgttcactttttcagtattttttttacttttaataagtttataatacataaataataataataaattattatcgtaacaatgtaaactcaatatcaatattctaattaagattgttctcaaatatcaacattttgtctaaaaaaatatattaagtaaatatatatataataattatacatattggtttggtttaaattgctaccgagttttctaaaaccgtgaccgaatcagagaatttaaaacggtccgaattgatcaaatgattcacgccaaattcatttggtccggtctcaaatagtttagtccggattagttggggtttaaaaccacagattgagaattatatgaacaccccttactaataatacatctttgagttgattaggcctagaatatgagaaaagaaagataatgctgactagacaaagatcttaacagaataaatctttgtactgatatgttagttatatctggtcttagttattttggtcttaacacttgagttttagtcttcagatatacaaaggagagcaaagaaagattacatctgtagttagttatgacagctaagacataactgaactaaccaaaaaatctaaccgactaaccaaaagcaatctaaacagaatacaactaacttcactgaacaacactcctaagaggcaatgttatgagccacctaattgcatgttctgaggacccacaaatgaagctccaaaatagtcctgaaagagccatgatcgccttctttgaatcactttacataataacattcatgtaagaacaatcttactgatgtgtattgcactgtgcacccttgtaaattctcccttatgattcctcaacacaacaccaatagtagtatttcagtactacaagtataccaatttaaggcttcataagcagccaaaccagatggctttactatattcacacttccaaagtagatggaagtaatcttcaatttcagagttgtatagttagcacaaacaccaattaatgtggagaaatggagtttagttttggtgagggcttcctttagaatttgccaccaaagaaatttagtaacaggttacctgtcgtttcttgtttttggagttttagtaactaattgttgttttattactacgaatattaatatttggttatcatacaatacactctaaaattggaaaaattggtaactcgttgctataactttttctttcaaaatgttaataattgattaccatatactttgaacctgagaaaagctgcagctaaatacttctttttcatattaaaaaatcaacaatttcatgtaaaaacttcaaccaagtggccaactataaattaccatatactgagaaagttaataacacattattgtgataccattaccaaatttaataaaattaaaataaaaagtaacttttacactcaaactttaatcagtgttttgttaattaatgctaattaaccggccaagaaattggtaactagtgtttaaaaacttggaaaaatttcactaactacttttcaattttgtttggtatgaactaaaagtattagttctaattaacactccttggcatagatactgaagtgaatggaattcaaattgtaccaaacaaattaagcttcatttacttgagtaaccatatgagtatacttaactcacatatgtaaacacataattttttattttgttttttgacattacaagtgtattagtactcttaattagcttatgttataaggcaaagggagaataaaaaagaacagtttacatatctctcttgttccaacattaaaaattgcacttaacaaacaatattacactatttttgttgattgatatccaaatatgagcctaaatgtacttgtagaaattgccctttaataataacaaccgatcacacaaaattgaaatgatgaaaaacacaaaaggcagagttatgagtacaaattattaggcttgatcatcatcaataatcaacacaaaaagtactattaatcaataatacatgatcttgaaggagaataacataacaccaacctacgaaacttagacaatgcctctttcactcctacattaggcgtcatttcgtggcggtgcttaggtgtcgccttcctattcgtccttttcctcggcctcctaatgtcctgaaaacctctccctttaagccgaaagagcactaatactcttcctagacactttttggttttctcagaaaaactttctttcctggaaaatgtgtaactcctcaaaaacatttgcctacatgacacactatccaccaccttaggctgcttcaatgcccttattccaccgccttcgggccgccccactagcagcctcgccgattcgccaccgtctgattcggacacctgccacttgtacagcctccctattgatcttgttggtatggtaccggaggctgccatattggttatatgatatatatattatacatatatatgtaaatgaattttggttgtgtatttatataggaataagaaggaaagcaataggtgttgtcattaaaattatctttgatatgagctaatgatttggtgtgcataaatatattgtgatggaattataaatgttacagctactcagaattaatttatcatatatacataatattattatgttgaagaaattaaatgtttcattggttaaaaatatttaatttttaaacaaataatataaatttgagggtcatatatagaatttttgggacaaatgataatttaaaaaattaggttggttgttgaatgaaatagctatattaacgacggtcgaatatttataatattgaaaattaattaactttaagagctgactttacaatatatatata

SEQ ID NO: 18913 - DNA, 3734 bp, Cannabis sativa
agatacccgccccgatatgatatatgtatatatttaaattttaaaatcataactactacaattaaaataacttaattatatattttttttttactacacaaattattccacgtttttttaattgttttactaagtttttatgattattattttttaattctctttaagacatcatttttttcttcaaaaatatatatgtaatgagtacccgatgggaacccttctcccgttgggtaatacccgtcccgcccccgctttaatttaaacgggtattagagtgggtatggggtgaatttaagaagcgggtattggggtgggggagcaatcctcgcacccaccgcgccccgtttacatccctaattgggcgggttgaaaattgacccaaaccgcccaattaaaccgcccaacccggtttttactttttttttttttatatatatattaaaaaaagtctcaaattctaaaattctttctcagcctctcaaaaaaattctttctcacatatattgtgtattttacattttttttttaattggacaggttgcatgcagaattttacaaaccgatttttacgttgggttagaaaatatatagtataaactgactaaaccgaccgatgtacagtcctatgttttactataatctaatcactacccttctatctgaaaacgattgttgtatacccttcaaaacagagttttagtctaattttataattatttattatttatttttataactctaattatttagaattacttataaatttttaagataatttataatgtcaaaaataatatttaattaaatacttatcaaagctataataaaagatagaaattatttaacaaaatacacaaaaaaaaaaattacaaaaacagctgtacggaactttaaatatttttacaatttttataattttatttacagaaaatataattttttatgtgatacctttgttaatttattgttaattttttgttatctctatgttattttttattattattatttttgatgttttttttaatattattttactgttatttttttgttgttttttatttttatcaaaaattgtaaaaaaaaatttaaaaaaaaattaaaaatagtgtttgatgtaatacctaaaaaaaattatatatttattactatgtcaatattatttcctaataaaagaaaaatgcaggggcccaattgaaagggccatggcccatgagagtagtgtatgtgtcattaattgctggtatttttacataatatatataggtacatatatctttggttggagaagaccaaatgagagtatcatggataacaaaggggtcagattcagaagcaagagtagattatggtgtatctcctggggtatatgggtttaccaagacaggaacaacttcttcttacaggtatgtaacgtacgagtcaggttccattcatgatgttgtgattggccctttaaccccaaacactatatattactatcgttgtggtggtgcctcttctccttcggctgagctcactctcaaaactccaccagctgccttccccatcaaatttgcacttgcaggtaccttataacctatttattaactttcattattttatttgtttagaagtaataatttttgattaatgataatatattattatgatattatcttagctactgtatttatataactttaatttactgtgattaatttcaccaatggcgtaatattttaatatcacaatcttttttttttttctaaatattaaaattgtactgtatatatgtgtctaattctttttaggaattatttcataattacataaaatttacgtctttagttacgaggctatatttttttacggataattattaatatttgtttatataaaaatacagaaagttctctctttcttttttcttaaaaaaatagagttaattttaattttgaattttgtattttacaaaaattatatattagactctctattttgataaatgataaatgaaattatatatttttttaaaatagtactataacaaaaatgattacgtttactgtacttgtttgtattaagaattgtcttctagtttgttatattaaaaaaaaaagggttgaaaattgagtttaaaatttatactattttaaaaaatacaaaattaattttattattcaataattaacaaaatataaagtttaaaataatattaatataaaaaaaaaaatattattaaaatattatttttacgctgctgcaatattatactataattatgtaacttgaaaacaaatgtccttttccacaaaaaaataaataaataaataaataaataacactccatctttgtaaaaataaaataaaagaaaaaatccataaaaaaagtacttaggtaagttgtttaaattttcttttctttttattgggttatatatagagagagctactcaagtttatttgtcaaattatactaatttttggacatttaagcttcttaaatattattgttattgtttactacaaaaaattttacttttagttacaacaaaatttataattaaaaagttgtgactaattataaattattatttatattttgtgattacaaagtccgtgattaaaagaattagtcacaaaaatcacaatttattgtaactaaatgtgtttttagtcataatacttattatgactaaaattaaattagtgacaatttgtgtttaaatactatgtttagtcacaaataatttttttgttgtaactaaaaattacatttagttacaaaaaaaattttgttacgattaaaaaattgtcactaaaatgattttttttttttttgttgtggtggttattgttattgttattgttattaacaggcatatgaactgaagcaataccattgattttgtaatactttcatgttttttttttttttacgaaaagatgataaaatgtaagatggctaagtttaattgtagaccaatccagtatatagtacttaaatatttgataaattataaatgcatgtatctacatatatataggtgatcttggacaaactgattggacaacttcaacactagatcacatatcaaaatcaaactacgacatattgttactaccgggggacctgtcctacgccgacgcgatccagccgaggtgggattccttcgggcgtctggtcgagcaactcgcaagccagcgcccgtggatggtcacccaaggcaatcacgaggtggagaaaattcccctcgtacacaccacccctttcactgcctacaactcacgctggccaatgcccttccagcaaagcgcatccgaatccaacctctactattcctttgacgctgctgcgcgtggcatccacgtcatcatgttggggtcctacactgatttcagccatgactccgcccagtacaagtggcttgaggctgacttgaggaaggtgaatagaaccaagacgccttggttagtggttgttgtccacgcgccttggtacaactcgaatactgctcatcagggtgagcccgagtcaaacgacatgaaagccgctatggaggaacttctctatagtgcccgcgttgatgtcgttttttctggtcacgtgcatgcctacgaacgttttgtacgtatatttcttttcctattcctatctatttttttctctcatacaacaaaatgcagaaaatatttttttagttgataaaaatatgaataatttgtagcatagattagtttaactctca

SEQ ID NO: 18914 - DNA, 5954 bp, Cannabis sativa
ctaacaaaacaaactaacttttaattaccatcaattagttggttatcaaccagcaacaatttttgtttgttacaattctgttattagttgtaactgcttttctgttatttgtttcttgtttcttgcttttatatcgagatactatatatacctcctttgctggttctttttgtatcaatgaaaatcattcactcaaaatctctattgtgtttcttttagttctttctctgtgtttgaaagttcaactaagagcatcaaaacgtttgtgaactaactgagagagtaatcaaatacttaagtcatttcttctgttcttttggaataaacaaaaacaattactaaaaggatgaccatttagttttaaattaattgtaatactaaagaattttgttcgtgaagcaaatattttcgttagtagactagacagacactagtgacactagtgacaccaaatgcactagcccatgtgaatcagatgctctctcaacttgcctccaaagtagtccttttagaatctaagatgcccttttcgaaaattcgttggcacaatctttatatttatattagatttcaaataataacaatttaccagatcttaaaacatctacatatttggaaactttgcaactaagatttggtataaagatgctaactaataatggcctataacagctctggaacatgattggagctgagaatacagatacacgttacctttgattttaagcagaaagagaaaaaccaattataccaactaaaacaagtagtattctatatataaagagtgcattaaaagataagagaagaactagagcagcactaaacaccaagtagattattatgatgagcatgcctgatttcaaactcttttgtctataatacaaaagaaaagagagatcagtttactcagtgatgtgctggggcggggcgcggtgggggcggggctttcggtgcacactggtagcacttggcaaatagcccgaatgtgtcaacttgcttgatgaagttagtcatgctagcccacccgccgaatccaaacccaacaacgaaaacccaaacaactacaaatgcgttgaacaagtacactgctgtccagcttggtaggaaaaagggcagcttctcagcggcattctgtcgaacaggtacaaaacaaaaatattaattgataaaagaactacataaatacatgctgaataaagatattaaatgtgtatatacatgtatagtacttcatgatttgatatttgtgatgagtagggtcaagtgtcaactctgagatcaagcttgggtcccagctagatagttcttaagatatggcttttattacttgacaagttgaaatgtttaagatatcatacacagaaatgacaaggaagtccaccaatctcattgctgtgtggtgtgggcaaagggcaattaagttcaaatcaatatcaacttttataggactggtggggtaaaatcagatccaaagacaatataagtgttaataatagactgttaaaacagttggtgttcaaggggctaaccaaaattattaataaggttttggtttaatccaaaacagaaaaggtcatggtgtagtagctagacgaagctagttggtcaatatcaaaaaggaataatatataatagggtagaaatgaagataagaataaggaagagaatggtggggattatttacctgtctagcagaagcagatctgaaagtgagcatatgggctaaagaaggaatgatgtagactgtgaaactgactaaaagagccccaacagctgagttaatgggcccaaagaaagggaatataatggccaagaaccatattggtatcaccactggtaatctagcaagtgcccttaagcatatactttttgtgtcatgcattcctataactttctcccacacaaagtacaatggtgtacaagcaaacccaaatgtaatgaactgccaataattcaaaatcaaaacaaaacccatcatcagcacactattactcccattgaatttggtaaataaggattgatgtgtatgtaagcatgcacctggtggatgagcattaaaatgacaccggcatcgcgccacgcagtccggggaaggagtgaaaaggcatttgaatgagtcaggagttggtcaccaaaggcccaatatacagcagtagcagatggaattgtcaaggtgaatacataaagtgtagctagcaaataaatgtatttaaacttctgaggcttccacatagcatgcataatttccctgaaaataagtaaatatgtatatataaccatcaaccgttattagtaaagttaatatttgataaatacttgtatctaatcaaatgtgtttttaggtagtgaggaagaatatgtatcattgaaaaaggtagtcaatttctccaattatattaaaataaatcaccactaaggtctaacataattagaacccaacttatagtggaagagataccaaacttgataagaaaagatgaatattaataatagaaaaagtgtgagtaacatgagtagcaatcagcaagggataaagtattgactaaattagagaagcttatatgtgcaacagtaggatgagtcgaagtaatctttacgcatttccctaccaatttcatgcctgttaggttcccataaagtcatgtcaagaataagatagagacccatcactatatagattccaattattagataaactggcaaagaaggcacgaaatcatcaacttttttttttttttgaggggagtgattgtttgggaagagtggattggctgtcccacttttataactggagatgcattagttcatataaaactatgcaaatccttttattagtaggaagtcacatctttaattttggtctattaggatgggtatggtttagataaacatttttctttttcaaaaaaataaaaataaaaagaatgagaaaaaggaacaagaatatcacgctggcaaattattcattcttatttggagagcattgagttgagcatgtatgatatcccaaaagttaattaattatgcttttctcttttttattaaacttttcatcaaagaaaaaagaattttagaaacgacaaaccccaaaaccaaacttcattatttatcaccatgcaaataaacaaattggactcgaatagtttttacacagttgatgtgatttagtaccagtatttataaatttgtattttaatctaacagttttttggtctgttctttctcgtatatatgttctaagataatccgtacaatatatcaagtccataaaaaagcttctgacgtgtgaatatcatattctaacattaaattatattttttctttactttgacttgtcgcagacaataagaaagctaaatagaaacaaacatacacttaaaaatattattcacatctacaaaacaattaagagcaaaaaactaaacaaaattttccaaaccagtcaaacatctatataaagcaatacattaggataagcatcatacacaacacatacagatcatccagtcatttcaataaatatttttaatgattttcttttttttggtaaggtttttcaaaaatgtaatatagatactacgttttaacttcaaaacggtaaagagcacgaaattaatgctccttcattttctttttgtaattaatgttttttcaaaattaataattttggttttctacctataaagaaaaaaaatgtagagttaagtggcaacccaaaagctgaagaccgaaaccaaaaactcaaaagccatatttgtttctttttttttttttgttatataatgagtcttgaccatttttaatgagtaaaatatatataaaaaaattagaaaattgattgtaactcacacagtaacggcgtgtccgccgaaagtgtacagtatattggtggcgcctgtaaaatacaaaaccaattgagtagggccagagtgttttacaccttccacctgccaaaatttaatttcacagtaacaataaattaaatcaaaataaaatcaatgtgacttaaaactagatgaaatgaaaaatcaggagccgttgattaggattaagtcagtatattatgaaagattacctggccatgaacaagagccgcaatggccatataccaagctgtgtaagtggtcattccaagaccaagaaatgaccaaatccggtagttgtggaacgagggaatgaacactgtagtcgcacagcaagcgccgaatatgtacgtccacgttctcttgtccaaattgtcatttatgtaatatatattactggaacaatcaaaatcaaaccaaacccgtttcccttttatgcatgtaaaatagaaatttattcaacagaaataaagtgagagagagcaagagagagagaccttgcacaagctataagctggataacggatccaaagaggagaaaagtacagttgaaggccaatccagctgctttccagtatggacccagtaaaccatccaagacttcaaaccactgccaacaattttttttttattttttaaaatcatacgaataatactcaaggtttcagcttaatttgtccgttattttggatattctcatgaaactgtttctgtttctttttatatgtatatataaatataataatagattgttgggttgggttggaatgctaacctggattacatggtttttgaagctgacattctctttctcttttcggcttcggtactcgacatagagaatactgattaaataagcagtccagctcccaagaatgccgtaaaagatttgtagaattatgccagaaatcatacccagctgtgaaaatgagtaaggcagagtcaacagaacctgagcaacctgtaataacaaacacaaaaactcagaaaatagataccaaattgtgaaaattctgtatattattatgtatgtatacctgattggaagcgcagctaaaccaagcatcataaacagagccaccatgccagagaaaggtcttgaagctaaaaccagcagactgatctttttctctctcttcgtcctctctgtctctatcacctgactcaatctggtcgaaggttgaaaccatggcttcttcggcttgtttctgaggtagcatttttgtttctccaatcaaactagatctgaaaagcacttcaaaggaggacttttaaatatatgcaaataaaaatacaagtatggcaacccaaaaaaaaggaaagaagtaaatataatagttgccaaaatatggatttcggttaccttttgtagggaaaggtttaatggtaaaaatatattgaaaaataaatagcaatgaagaaatatcggacaaatgtaagaatctccggaaatcagctgactttccttataactccacttgagagaagagagacaaaaaagaagggaaggaagatggttgtggtgagtgagtgccttgaatcgttttcaagtgggggtgtttgtccttgtgacataaattgtgggagttacaattttgcaaaaaagagaatactactaaacaaaaaggtttgaaagcttagaattccaagactgcctctggcacactgctactgtcttgatggtaataaatttcggttacatacgaaggaattgacagaaattgatagtctcaaagacgatactaggtgtaacccagcaagtaaaaaaaggtaactctgctcacttttggtggtttcaacactctaaagagagaaagtgagagagagaggtctgacaattaggaacagctgaattaaaagagggagagaataagggactatagtctaaaacagaggagtggaggcttttgcagtgttattaagaaagtgagctctctttatattctcataaatacaccaacaaatcaaacaagttttcgtctttctttatttttttattatttttttaatagctgactgactatggctgtagcttttatatcattcccctctctctctctctctctcatgaagaaaatagagaaatccct

SEQ ID NO: 18915 - DNA, 4725 bp, Cannabis sativa
tttaaatcgtaatatacaatcctttgttttttttttttttttgtcaaaataatatataatccaatttaaattcaactattcatgataaaatatcacaacttcacaagcaatgttaaaaagtttatagtgacttatgaaatgatgatagttaagtgttaactctttttcttccgtttacaagtctttcaagaaagaaaaatgaaagataattttaccaaagtgtttgtgacatataatatttgtgacataaaaatgtaaaaataataaaattaagaaaataactaaataaaattatgagtcgacaaatattgactcagcacaatttttatttggaaagtacaaattagttttgattttgaagtttccaagttctaatttcaaattcaccaaaataccacaaatctcaccatagttttttctctttttttcttggaaggtatttgtagtagtttgacattttcaattttaaccacattattaactatcacatgttcctaagtttttgtgtatactttttccaaaaacaaatagtttcgtaagtgtttttatgtaatgtaagtaaggatttacaatgttccttacagaaaggaacagaacccaagttgctaatgcttcactttaaatttaagcataaaagaataaataataaataaataaaagaataaaaaaaaaatgaaaatacaaactagccgagatttttcataagtcttaaccattcttttccttttctttgctttgattctttgaatgtaactgccctattttatcccaattcaagttcaaccctcctaactgttctccaaccgccgtctctttagctagaaatgcttatcacccatttctaattccaaaacatatttaaagattagacctttcagatagaagaaaaacaagaagaagaagaagaaggatatatatcatatggtcatccaaccatttggtgtatttttctaagccaaagatttgtggggaccagaaaaaacaaatcttttgagtccttggtcccaaaccaagagtaaagtatcgattttgagtaagtttctgatgtgggttttcataaattggttctgggtgtcttggttttcttccttttttggctaaaaatgaggtcttttgcagagaggaattgtagttagactgtgacatggatatttagtagtagtggttgtggtggtgggagagatctgggtggaaaaagatggaacctccgaaaggaattttggcttctgtctggaactttatttgctttcttccttacttcattgggcttttgctccttgggggcattaaaggtcagttctgttttaagtttttcctgttctggaatttttagcttccttagcctttttcaatttttcttttttcattatttgttatgtagttttaaagattctttctgactgagtgctatttgaggagggaaagaatctcaacattttggcttaaagaaactctagtgtttgaatagattattacccaactatttttcttttatcctataccataatcaaagtagttgatattcaaagtttatatcatgtgttatggaacattttcaatattttatgcataagccttcatttgtttttactcaaacatttaattcattttcttttgcttgaaaagggcttgtattgattgatttggtatattgagttacttactgttattaatacctattgatattgtttgctgattagagttaacacagaattgagtggcaatttcaggtttaacactagagtattagaatagatttatctaaatatgaatagccagttcacttgttttgtttcaggtatcatattatgccccatcatatgtcttatcatgtcaattggaaactcagctgtcatactggtttactggcttccccaatgttactgggcctattattgcattttgtggtacttttcttggaggattttcatctcttcattctcatattcaacttaaattaacagagtacttttctagcatttcttacccttctctttgttttttctttttttattggtagggctaaaaaattgggaccagttctaaagcttttcctctgcatatccgtactaccagtgagtttgattttgtggcctttggttggtattcttggtagtattgtgggtggagctgcttatggcttgttttcgccgatacttgctacttttgaagctgttggagaagggaggacaaaccgattatatcattgcttttacgtatgtcttttctcgacattctagtgtatattcttatgtgaacaatcactgtgctgttattgagttcgatgaagtgatatttacaacgttttcaggatggaactgtgagcaccttcaaaggatgttttactgttatcagggattttaaagatgtttgtgtccattcatatttctcaattttggatgacttaagaaaacaagggcctcctaatgggaaatattatgagatcaggtttgcagagtttacaaattgttttctgttcaagtcccttcaatattggtctattattcaaagtaaaaccatttacctagtcaacaatagactttatatagcatgtaattcacgagactagtatgcataataggcttaagttttctttagtagctcatataataaacatgtagtagaaaagtatttcatttatgttagaattttattttgcattatttgctcttgtggtcaattgagtgatatttgtgctgatctgcatgatgatgaagatgagcattatttccttcacaaaactttcttacactacattttgcagattgctctatcttcctggtgctcttatagcaggagtccttggtttcatgatcgatatgccagtgatatcaatgcttgccctattcaaaagcatttacatgctctttaaggggtggcatcgtttgtttcatgaccttatcggtcgggaaggtcctttcttggaaacaatatgtgtgccatttgctggccttgctatcctactttggccattggctgttgttggagcagtaatggcttccattttggccagtgtctttattggtgcttttgccggggttgttgtttatcaggtcattcttttatctcttatatggttttttggtactctctttatctcagttcaaactacgataatagtttctacttttgctactaatgttcaagaagacattagctgactatatggattttggactgcaggaatcctctctctggttcgggcttcgctatattgttgcatcgctggcaatatacgatgaatacagcaatgatattcttgatatgccagaagggtcctgttttccaaggtcctcctaataagcacccccagatatttttttaatgtttataatgtattatgtacttgattgactgaaatgaatgagcattatttcacaaattttttcgttctgatagacctcactaccgaaaggagtcttcatcacacaatgctgcccgcacctcatccttatctagggagagtggctctttcaaaaatccaccctctcgaacagcttcattcaataatcccatggtcgagttaaagccacttgaggtaatgtcactttttctcaattcggtgcaaccttatttagtctcatttcgtgctttaggtgctcaaataatgtgtgttttttgttcttttaaccgccacagcttctcgatagcttattcaaggagtgtcgacatcatggggagattttgttttctgatggagtaataacccttaaagacgtcgaagaagctaggtctagcaaggatagcagaattatcggtgttggcttaccggcttattgccttcttcagacactactgcggtctgcaaagtcaaattctgtcggtcttttgttaagtaagtcaaactcttctcttttcatatcagctttcacttcagttgtttttcacaagatataaacaagggatattctgttaatataggtgacaataccgagctaacgagcagaaacagaccaaaagacgccgtctttgattggtttttcaatccattaatgatcattaaggaacagattaaagcagaaaatctttctgaaacagaagagaactacttttgcaaattggttctattgagcggtgacccttcgaggttaaaagatgcaaatattggtcccccaccagaaccagagcgtaagcgagctgaattggatgcattagcaagaaggtaaagctggaaaaagccgtcttttaacaaatcattctgatcttgtgtcactttcattatggttcttcactatcatatctttctttccaggcttcaaggaatcacaaaatcaatctcaaggtatccaacttttaggcgtcgctttgagagtttagtcaaatcattatcgaacgagcttgatacgaatggaaagcagttaacgatccaaagatcgaagagtgccttcgcgagaatgtttagccaaaagtcctttaagaaaacaagcaacgacgtgtctgatcaagagtcgcaaatagttgccagagatgtggaaatcgcatgactgaaaaacatagaaatcatcacaattgtttcacttccaaattttgtattcttagtgctttttgattgtttacattagatactgatatgatttaacttcttgttggcgatgatgctagctaagaagaatgtatttgtatgcaatatcttgtataaaactctaatttgtatcaccaattcaccatcatagaagaaaaaaaaaaaaaaaaaaaaaagcaaagttgcttacccttgtaacatca

SEQ ID NO: 18916 - DNA, 3252 bp, Cannabis sativa
tatatatatatatatcttttctttcataaatgtagtttatagtttgttgtattaagaacatattaatcttattatttaaacaaaatttaataatcttcgtcattatacaaaaatccaccagtcaaactcattttgaaactatgaatttttttaacaataagacataaagaaaatcactcagatattaattattccatgaggaaattaaaacatgaataatcttttttatggaaaattaaaactccaattttgaagagcaagaactaaaaaaaattaagaaagaaaatatctaacatcaataaggatacactcacactcatttgatacactcaaaatatacattataataatataatttgcattttgcaccttaaatcatatataaaaataagaggtcgtttattttttatttagttttgaattttttttatttaattttgagtgtaaatgatttttaaaatccctttaattaattaacgtaccgcatcagcaatcttagtggcatattctaatataatgccacgtgtcaaatcacactggactaatgctcttttgaaacagatttggacacgttaagtgatgtgaagtagcaaatagtggatcccacactctcaccctattatattgactttttttttcacgacaaacagttgactttgtcaataaaacactgttcttcttctcaggttaataatttcctgtgctcaaccccaccgtaaagtgaactcaaacaaaaaatacgctgctaattagattttcagtcctggtaccaaattatatgctgaattttttatttgaattattaaaatttttattaaggtgtcgtttgataatattttatttttaattttttaattataaaaatattctataactgtttttattttttcaattttaaaaacaaaaaataaaaaatatattttgtaaagtttaattttattttttaattttatttaagtagggtctgggtccgagatcgagtttgagtttggatcagggaccgagttcagtgctaggattagagtcgagtttaggtccaatttgtgtctaaaatattaattaaaaacattgttcaaaaaatattaaaaatatttcttttacttttaaaattttaaaattttaatttctaattaaaaaattaaaaataattttattatatataattaaaaaagtgttacactacttaatatttttgtctaattttatttatggtaatctaaagtgaacgaaaatcaaagactaaaattttatacgttaaatttggggacttagtaaaattaataatcgtaaagtttaacggaattgaatataattaattaagcaaagtagaaacataccgtgattcgacccgtttggagaaacggagcacccgcaatctcctccacgcgctaagcaatctctgcaatttgggtcgacccaccaaagttggatatctccagttgtaccaggccaaaaaaacgggttgtacggacgcggaaccatagcggtcgaaatctcagaacaagagcctaacggcgattctgacggtgacggtgaaaatgactgtgaatctaccgtcatcgaacctctgttatagtaataaaacatagtcggaacggcgaaaacggagaattcgccgttatcgtcactgagacaagaaatagggttgagatcgtacttcatcttcgcgatgaaatccttggagcaattgagaaacgtgtaattttcgactcgatcgattacgaatggaaaagtgttgaagaaatctaattctcgattcatgaattgtttgggtaagcaaccgctagggtcgttgatgaagagactctgttcttcgtaattgatttggtgaacggcgaattcgcctgaactgagcctgatgattgtctggttttggttgttgcaggagagatcgaagcctgttcggtagctgcatcgatttggttgcgatgagtttctggttgtcaatcggaatgggaagtgaactggtggtggattagttgctccggtacaggttaaagaatcgcagttgttgttgatgttctgtgctgttgttagttgagaaagagagaagtgaaggaggaagaagaagagtaggaagattgtgtgagacaccattgatggagctttggttagttgcagagtaaacaagagagagaagaagaaggagttggtgtgttgttgggtcttataaggaaggttttgattgggtgtatcgcggagggacttggttaagtacaaccggttagaggttttgttttgtctaatttgttttactacaacgtaatgattaaataaattagactaagtgtacaatacacccattagaataggtgtttagatagactaataataatttgtaaacttttataaatttttgggtagtccaaaaataagtttttacatattttattgtatgggcaattttaaatttatttttgttacggtaaattatttaaatttttttaaaaatttatatgttatcttaaataattaattacaagtttacgagatcataaaaaaataaagtaaaagaaacaaataagaatctatcaaaataacaatttaatttaagaggtgtagaaatttctaataaattatatggtctttgattaatattagattgttgtttgggtaagaaatgtttctcattcattcattctttctttctttctttcttttttaattaaagagcttaactatagataaacattaatcgtttttcactcattcttaagtcttactaattttgtcgtaggattatttatgaataataatatgtatatacaccttcaaaataattgatattataatttattattatctttttaacaattataactggttgatataattaacaataattttgttcaaaaataaacaacaacaacaacaacaattgattttagttggtttagcttttaatttttttttaaagatgattgatttttatattttatgattttaataaaaatgaaccaaaattatcgaataaaaatttaattgagtcacagactacgtagattattagcttaattttcagttaaacttaattatttatatctacactatatatacatttaaaaataagtattttcaaacagactaatcacaaaatatatatatattttttaataattcataaaaatgttccaacaatttatattttttattttttgtacagtaattacaattatataaatcaaaataggttaatattagctgccataaaaccttatagtggcatgtatatattattagctgcaatgattt

SEQ ID NO: 18917 - DNA, 3933 bp, Cannabis sativa
tgtggtaatatggtttggaactttggatatattatagcaaaatacttttttttataaattaatttttaaactacaataggtaatataaaatttatttagttaactttttatttattattttaaaatttaaaacaactaattaataaaaatattataaaatatatttgtttatggcaaaaatgtataagtgccttaatttaaagaatattttggacaaaataattccaatggcaaaagacatagtctccaagtgcgataattctagagtaagccaacactttctataagtggcaccctcacgattggttaacaatattacctaaaaactatttttctaagttataccagacccgatacttaattacactaatagtaatataacacaccgagaaagatgctaaacaccaataatactttttagcaattctccaaaactttttatctaggactaatacataatatatatttgattgtttcaattcaatactattaggacttttaatgtatacataaatataaataaccccaaaattaatacatgaacaatccatttattaaatcaaaacctgaaattaaagcatacatttatagcttaaaataatggtccaaacaaaaaaaagaacagaaagaaaacttatggccatcaaaaaaagacacctcaatttccaaccatctaatttaagaaacacaattttctttcttttgttgtaattgatgaaagttggaaagtagcatttcataattaaaggaatgtttttttccagttaaagaaccccaaagaaggggtttttaattgcagagtcgagctcggaaccagcagaacgaagaaccggaaagtcaaccttgtcccggggaagaaacaagaactcgccaccttcaattttttcaaatccacacagctcaagaaactctatgcctccctttacagctccaactctttcctgtaaatcccaacaatttcaacatcacaaaacagaacaaatgaaacccccgggaaaccagaagcaaatagctcttaatacccgaaatttggaaatgataggccttaatagtaattgacactctttttcagtagtgtttttggtgcaaattcagtatagtaacgctactgaaaaccgcttgtgaataatctttactgataagagcaaattcagtgttcggtcacaatagctcttcatacccgaaatttggatttgacgggccttcttatagtctttaacactgcttttaagtagtgttttttggtacaaaattcaaaggtttgattagaataatcttcaaactggtaagcataacctattcacctacgctggactgttcggtcaggatagctatgctcttaatgcccgaaatttggatatgacaggacttatagtccttaacactctttttaagtagtgtttttggtaaaaattctaaggaatatttaaaaaatcttaatagatataagcacaatttattcacctatgcctatttaagtgggctcttcagtcgctcggtcaagaattccaagcatctctcgaaaggattgtgtttcgggagaattttgtaaaaaagatgatataacaaggcaactcaactaatgaattgaagctatagtgtgatgcttaagactgaaaataatggttatttcatcgagcaatgtgaaataagaaccgtccattacctgaaacgattggttgctgagtctaatttttctgaatttttcctcgtcgggacttttgacaacattccctagataagttagaagtgtctggaaagctctcttcactttggcatcatcctcctaatttgttccataagaaaacacatcatgtcattccaaatgaaaatcttataaaacgatactcaaaaatcaacatcaacgatcttcatactttgttggaacaaacatatgatgatgtttcctttcgagttacaacattttacactactttctgaccaacacttaactcgagcactcatacagttgggaaattttcattttttaaaaactatagaataagattgcaatagctatcatttcgttttgcacattattgatgtttgtgaattataatttttaccttgtgattctgtttgagagaacgtaaacactccctcattcgttccactttggtgacaggcttaataggcaacatgggctgcaatttggacacaaagagaagatttttaaacgtattaaacgcaaatgacattcaattggacagataattcattcattcgataccatacctttttctcttctacaactggcggaggaggttttgcagttgaaggatcttccggtggcaatccaagttttcgccttctttcagcctatcaagataaatagatgaattgagaatatatagaaaacttaccgcaaactagtgactaaatattgcatgtccagcgtgcgcataaattggcgaggccatttccatcattagaatttatagaaaacgaaaaatggacggttatcactattcgatttttgtggtattaaatagcttcccggttcattcacacactaaaactacaataatttcattgcagtgtagctttttatcggcataataagagttgactaatgaaacgtactttacaaaaaccgaacaatatttggacgacaaaaaggtgctaatatctctataccttgtcttcttccaatttttgacgaattttttcccgagctcttttctcttcctccttctcagctttgcgtaaggccattattctgtcagataaaaatagataataataataataaaaaaggggttttttgatgtccaacaagaataaaaggggagcagaagacataaaataggtgagaatgggaatataccgctttctttcattatcttcctcgattctttttgcttctaacagttctcttcccacacggatcctctcctacaatggagaaaagaaaataagaaggaacgttttattccattggaagaaacaactcccgaatttggaaagtgaaccgtcctactatataacgtcagtaacaaagcaaaagcacagaatgaggataaccgagttcttatttcatcacacaaaaaataccttttctctttctctttccattctcttctcttcctcttctttcttcttgcgagccttctcccttaaagtgagcaaatatcaaagtaataagcgttcctcaaatgcaccttatacttccccaaaataactagagaagatcgcattgataaaacacacaaatggtaaacaatgacggtcactattcaacgcaccttagctcttgttgtttggctttcaattgctctggtgtaagggaaggttttggagcctcgattttggtattggctggtacctgtaaatacataagcagatcagaattcatccttaatgtggtatagaaccgcaagagaaaaacaaatgaccagacatccaaaaaccattcatataattaatcgaggagtttcgtatttgtgacagacattgcagttctaagggaatagaactctagaaaaaccgatcgatcaataaaaaagagataactttaagcaagaaaggttcaccaatttatcataccataggcatctggtctatgtcagaatcattctcgtgttccactacccaatttatcgcagcctccaagctaccattacctgaccaaattattttaataaggaacaacatcgatacagatacaaacattattttctttctcatgacatatacatacattgatacatatataagaacttactacatggagaaagaaagagaaaaaaaaccgagtggtttcctaagaatcataatattcataaaacattcaaacatacttatatcattgtaacgagctcaccagaataatgaagtgcacgggttgctcgagcagttggaaaacccatcgcttcaagctcctcaagtatctttttgtcgacctcaggaacaatcaattctaaacaagaagag

SEQ ID NO: 18918 - DNA, 2811 bp, Cannabis sativa
gtctctttgtcatagtttcttgtcacacggtccctcatgatggactcttgccatgtcatctttagtgtcaatggtcatctttatcggcgcgtcattgcttcatgtaagtgggagttgcatgttgtcgagcatgtggttgtatgggcgacttggtctatttttccatgactttaggaatacacatgggctccaccaaatacaataatgacacttttttcctttttttccaagaaaaaaataaataaccatattgtcatggtttccttcttgggtcctaaccttcattttgtttttgttgaactttttcaggaacaaaaagtgagttgcgggacccaaggctatgtcgttgctgatcacctcgcgaatatagaggaatccgctaccaaccaaccttttactaggacaaggtggcccgctcgacagactagggccaagcctgcgatggtgtactttgaggcgagccacatcacttcttcattcgaaagtatatcccaaatatgcgattatcttagcgctcatgggcttagctttggcagagaggggctatgtagagccccgactcccaccgagcgaaattgttttcctccccatgagagcatattcgcgtggggcccctctttgcttatggcggggggtgcgctccctctcgcctcttactattgggacgtccttggagccttgggattggctcctttccagctatcttccaacagttatcccattctggcgggacttaaatccctgtaccacatgctagagcttggagattcgacacccgcggaggtgttgtatatgtatcagtcgaaggtcagtcctgctaggagagggaaacacagcgacgactgttactatctgagttgtgttacctctccaatgatttttgagggtctccacaagaaggcgtctgacaaaaagagtgagttcttttgggtgtggggcccatctgacaggagtcaccatcacttcaatcgcatatgtgatacacattgcactttggcttcattcaatgattgttgtttactgtatttcttttgtaagtgctgacttgtatttttatctctctctttttttagagaccatctctatttcatcatctgactggttgaaagagagggtgagtcttctgcaaggtgttgacattcgcaagcgaaatctttgcttccttctccacgacaaccacctcagggcatgtggtttattaaaagagtcgagaatgactaaagatgattcctttagaaaagtagccaattgggaagatttacccgacccgactcgcccttctaggaaacgacgagctaagttggtgtcggcccttgatactcctgtccaagacttgtgctcttagcataatgggtgcgagactagtaacccgggaggtaaagtgtgcgacttgtaccttaggctttcaagtagagctgggtggtcccccacacttctttcttcagaccttactatttacacccatgataagtataaatattcattgcttctttatatggaagtagatgggaaagttcatagatgagaccattggttgatgagtggggagctgctttatgcgagcagtcccatctttaatgtattgtacgcgtcagggttggatcaatatggctccaaccttatgtctaaaaaagatagtactttagtgctccccacggagagagcgcacatagctttaggacaaggtctttccttcattgctttgtttgactttcctgacttgacttagatacatgcttgtggttacacctcatatttatgttattctccataatcatatcttgtagtacatttgtcttttaacaatgactgatgtgtaaattttcttttgactttttggaatcaagttaagattagtataaagatatgcatgtatacatagttagtgtacatgttagaatatcagctagagtactgagaatatcggccaaagtaccgagtatatcagctagagtaccgagaatattgactaaattaccaagtatatcggccgaagtactgagaacatcggttagagtaccgagaaaggatcatggttaggtgaacggacacctaattattatctggttatttatttatatttatgcttcttactgagtctatcgactcacaattattacatccatgtgcaggtaggagccagaactgaatcgaaatgagtctacagctgaatgaatattgtacatatcaagatggttagacttggagtgtttaggtcttcgggatagtttaggctcatattttgatagtcgctaggggataacttttgtagtaaatgtattttgaaaccagctgcaaacttttaacgggatcctagaattatgtagttatatgtatttatttaagtttaagtttatttaagaaagttttaattattcacgtttttcaaataaatcctttgattagcaaaaaagtgcacaatagttaagaaaacatcgtgacatgcttaaattagtagggtgttacacttgctactagggaaaaggtttcctcataataaattccttcctcggtattataaccttgggccgctaatctagcctttgttatgcacaataaccccatgctcatccaccttgtttctatatacctattttgttccaatcactgattgatgtgacagtcttagaactaactcccaaacattatttcttataaattaatttattttttcttgcataattagaagcttaaattcatcaaatttggcctctttaaaattctttggttcaattttagaaataaaagcaataaaattatacaagtttctaagggagtttctagtagtgacaccttgtgaaggatctgttg

SEQ ID NO: 18919 - DNA, 8133 bp, Cannabis sativa
ttggtgaaaatgctttaaaattaaaatgattaaagaataaaaataaggtaagatctcaccgcatataaaaatcaaagacaacaagcacatcaccatgtcgacatatttaaagcttcaaaggggaaaacgaaaacaacacttgacttacacgcttttaccaaattttgatcacttcgccgggaaatcaatcagagctctggcactcactttcggagaacacgatgaagatcaacgtcaactccatagctcggaaagtagaggtcgataatcggattcctcttcgctactactatcgaatcgctgataatctcctcagacaggttcgcttgcttttcgatttccctctcttttcagttcgcttcttgtctgtatttgcaattaggtttttattacttgattcttagcattgtttccgcttagaatttgaattttcttatcaccgattaccgaacgaaaacctatgccttcaatatcaaattatgcttatgcttttttcttcttttagagtaataatattagcacaactctgttttttatgatcaggctactgtataccgggaggagaataatattgttgatttgtatatcatgcttttaagattttcaaggtatggaaattatgaattttgtaatagctggttatctgaagttttaaagttagttcatttttacaaatttggtattctgttatgatcgtagtttggtggctgaaactataccatgtcatcgagattaccaggctgttcttccaaaagaaagaggattatataagaaggtgagttataccattttttgttccaatatttgatattagggttatcatggatcaattttgactgtccttgtgtctgttgcagaaactgttgaatgtaatggatgagcttgaaaaaataaagccagaagccgattgcagagtgagagaacttaatgagagacattccagagctcagttggctcagattgatggcccagaaaggactttgtatggttcccagacctctctacaagtaccttctggaaacaaacaattgccgactatcaatgttaagcaggtaactatgatcatgttggttgctggcttagtgatagggtggttactggttaaggagattattgatacataactgtgcttttattctatgctcattggtcttctgtggttatgaagttagtggaatttcatttgtttcagtttgttctgttgtttaattttgcttcatgctgtcaattttaatctatcttgacaaattactgcagtctacaagcatggcctcaccgtcttcctggaattataacaatgattatcccttggtttcatccaatgatatgccaattgaaaagcagttccaaaagctgtgagtacatattttcatttgaaagtcatagaacataaatgtaatatcccgtgcacattaggtgtaggcttgtagctccttcgaattcgtatgtacatctgatttgtagcatgtggcaactggcaactgataagtatataggtgtttattctagcaattttctccttagagtacaagtttttacaactgacttcatagttttgatgctcctgaactaccttttaattcgtccactggcagggtctttctttgggttcccatcaagtaattaataacttttcttttttcacagatctattaaagttggtcgtccaaataaggaaactttgtcaagacattcatttttaggtccaaatggtcttcgaggccagtggcttggaccaagtacagggactaaggtaaatttatgtggcattaaactagttttttaataaatttttcctacttaaattgttccaacttttccgactgtaatgatgagccaagatgtttctccaatacaggttcagtatcccagcagtacagatttaacgcttgctgaaattcctatagattcagggttaggatttctgcaacctctacctttaagtttatctgctttaattgctttctgcttgatgtgttgtcttttttacaaatttctaagcaaagaagtgtaacaaaaattccaaagataacaccctttagttattgtgtggttttctcaagtacaatttgtggctgcttgtaacatgttctactttttgtcatcctatgttaaaaaggctgaatcaggctggacaaaatgatttggcagtaaaagatgacaattcaggtggaattcaatcttcaatggatgcagtgctctctttaaacgatggaagatggccgcatccaactgaggaattacgtcctcgtctgtttaatgaagtgagcgaggatatttttcagctgagtaatatccatcaaccatgcccacccccagttcttgctcaagtacagcagaacattgcacctattcctccatcaaaagttgcagatccaagacctggtccttcaaaaccttctgaagatgggatacccaattctaattcatttcgacagctacatgttgtaagccttgattttctttatacacttacaaaaatcttatttttgactgtgatggttatgctcttcatgacattctctatttcatttcaaatatatcctgcttctaactattggtgccgttgtgattatatgtgtacttcacagcctgtaaggttgatggaggacttcttgagattagctcgagcgaatacagcaaaaaacctagagacttgtggtattcttgcaggttcattggtaagaagcagctatttttttccccattttactctcaggatgattctgttcctgatagaagtataatggttttgggagcacaaaaataatgtcttttggatcttacattctcatatttctgtgcctgcagcaaaagaatgttttctacattactacattaatagttcctaagcaagagtcaacttctgattcggtaagaatgttcacatctaaatttatgctttgctcttttacgtatgaaaatatttttccctctacaacatctttttcgttatagatacgtacctatttgaccacattccagccttaagccttcaaaccttactattgttttattctcataagaagtgagtagatgtattttttctgtattgaataaatcatatctaaaaattacaataattctaatagtatagagaaaaattgttgtgtaaattattttgtctacagtggtatgcaaaaagctctgtttacaagtttttataaaaattcgtgcatttctctatgtatagttgacaagctgatatatttttttttccagtgtgaaacattgaacgaggaagaaatttttgaagttcaagagagattaggtctttttcctcttggatggattcatgtaagtttcattaggcccgagtggaactaaagttatattatttattctctctctaataaatatatagatacatgtaaacaggtagatacacattatgtaatatgtatgttcatatgtagttagttttatatgcacacaaagcctgatgaagcagactatttcccttttcccttttccctttttatatttaggcaaagatagagacttgtattattgatataataagagcaatgacacaagtaagaatgaagaggatctttggattggatttcaaaatgtttgatctcctcgaggaaattactaaaaacaataatatatagtatggtcatctcgttagttttcacttatttaagtgtctcctttttttgaggaaaattctacagaatttgcatagtcatcttccatcattattctgtgattattatttatttacacagctgtgtttctttgcgtattaactctttctctctcgattttcatttttcagacacatccaacacaaacatgttttatgtcatctgttgatctgcacactcattactcataccaggtaataaattctttttggtttatttgtgtactttgatagtaaaaaagagagttaaaaagtttgtgtattttgttactcactataaactgaaagagatggttactttttactagcagtaatgaaatattacactttgcattttgcttttttgctttgtgcgtgtttgggtatgcgtgtgagtctgcattaatttgacaataatgcggcagataactagtgtggtaacttgtcttaatacattattatttggaaggcttggagacgtgtgtagggccatagagaattgtggaaactaggaatgttcaatttatataaaaagaatctacttttcagttttttgtgaaataagccgactgttattatgttattgatgagatatttggataagcaatccaagttctttgctgatttgattttctgttctgtcattcttttttaatatgtattaaatatcatttagtaatctgttaattaaagtttttgcttttacatcttcaggttatgttaccagaatcagttgctattgttatggctcccacagatgaatctaggcaagttttctttctgcctgctatcgtttgctgaactgggtttgtgattgggaagttgggaattgaatcttatattaataccaataccaataccaataccattgtctgtcatacaccatcttcataactctgcagcctacagtgttttcctgctaccttttcacccttcaatttattacaacaagcactctttttaagactaaggtggcatttggttgggaggaatgaaaatataagaataggaatagaatcaaatctcaaatgcataacaaaaattgataaaaaaattattgcaatttttctcatcttgcattggaatgatcattctttccatttcaaaatagaatagtcattttactaaaatgatggaaaaatcatcccattagaatgacattgcaatacttcaaaatataaccaaacaaataaatggaataaaaattgtttcctttctattcaatttcatttcattacctccaaccaaacgccacctaagggtagtataattgcgccactaatccgtagcaataagcaacctttacactgttgtattagaggaaagatagatcaatttaacagttcttataaatatagatggagaagcttgaacatgtgggggtttgatatggtgaacactgagactttgtgtgttggcaaatgaagttgtcaaataaaagtattctaagatatcaagctgatagaatttgaaaaagcatatatatcatttagtcacttgctataaatatatagttatcatcctaacatattttccattccattgcagtccacatggcatattccacttgtcggacccaggtggcgtgtcagtaattcgcaactgcgaccaacgtggttttcatcctcatgaggagccaacagatggaacttcaatatacgagcattgctctcacgtcttaatgaatccgagtatgaagcatgatgttcttgatctccggtgaatttttgaaaaatacaataaaaaaccaaaattgaagattattttcagaaaagagaaggtaaatatttatgaacatcagtgatagaatgtgttttttactctacgaatactgtaaattcaatggagatgttacacttaatcccttgtgaatattaattaccagattgttattaccattcggctttgacaaacatacatcatgatgagattcgagaatttaatattaattttatactttgtaagtttgttttgaggttctttcttagggttcgaatttacatttgctgacaacatttggaaattatttcacttggtggccaatctttcgagtagtctagacttcatactagattagtggttgttgagcaaataaatgaaattatgaaggaaggagatggagtcatttggtgttgcggtactcatacataggaccacattgggttttatagaaataaggaaatttcgttagaacattgatgatatcccaattaccatgctgcaagttggtgaccaaatatagaggggtctaccttagaatttgtgacatttttgaataatttgtttttcacaaacctttaggtgagtttgaaaagtaataagatgaccaatagttgtaggttaaaaaagaggatcttaattacactctaagaatctagtgtaattgttattattttaaaaatgaattattataaagaatattaatttttagtgtaatcactattttgtcgaacataacatgaaaattcatacatagttatcattttacgactaaatataacttgttttttaatcactaccctaatgcttttgtatgcatacatataggtgtgtgtgtgtgtttaagccacgcatgataaacccacttatatggttaatatgaacaattccaattttggatgacaagaagggaagtggggttttaagtgataacaaattatgttcacaagattactcgtatactagagagagaaaaataaaaaaaaaaaaaaaaacaaaagaattaaatacaaaaggggttatgcttttatgggtattgaatgtagtaaggggcagggcggcattaagtggtggttggtcctcggacccctcctcaccttttgcttttatttgtaaaatgtaataagtatggaaagcaattacttctctctctctctctctctccaagtgatgatagtggtgcctgcaactgcctatgcttcattcatggccattccctcctctctgtctaaacaacttgacctttcgtatttatcaataggtatatttgtacatgtatgaatgtatatatgtttgtatgtacgtatattattaagtaagcaagttgggaattggggtactaaatatttgctgtcttaaaccgtgcatgtgatccaattcaatgttcgatgagaatgacattgacaatttaactttcacgagacgatatacttattagcttttttttttaatatcggtgttctcaatagtgttaagtcaataattcttattataatctcttagtcaatttatgtatataaaaacacatgttggaatatttttttttaattttttttttcatgacggtattcgttatgcttacaacatcatccctataaattttttaaaattttcgaatagtttacagtgccgaaaatacgtttgaagttttttgaatatacgcagtaaactgaaatattaaaaactttgttttcggcattgtaaactattcaaaaaattttaaaaatttacagtaatgatactgtaagtttgtaactataacgaataacgctataaaaaaattgaaacatgtgatttcgggcatagaggttgactaagaggttgtaattagcacttttatgagatgatgtcttataattaaggtaacatgcttatagcactattatgaaatgatgtcttataattttttttttttttggataattatgatttttggtcattgaactttgacatgtatcaaattatgctttctgaacttttcatgtcgttaaaaatttcttttcaattattgaaattgttgaatttaaagagttgcatctaatttcatttaattttgctaatgtggcgaatgtttatatactaaattgtgctcccgaactttgatatctacaaaattatgccccttgaattttaacatgtataaaattgtgctcctaaattttcatccacggcagactttctttagtaaaattagacaaaagtatttaaatctaataatctcaatagttcaaagagaatttttaacgactaaagggacaaaaatctaaattagcaatttttttatattggggaatgtagaattcgaacttggaacttcctctttatgaagagaggtgtgaaactattaggctatgtctataaccacttatgatgtcatataattagttaacaattttttataatcttttattaaaataaaataaataggatctgatattaaattatatccataataatataacaactcatacaaatattagacaggactactttttagcatttctcagtaaaaagttcaccaacttacaacgttcggttaagtaaaaaaagctaaatcatactccaccaagtggaactacactggttatgggttatgtggaggcacatgactagttaatttttatagatttttttttttaaaaaaaaatatatatttttacttttgcttttataaattttaatttattttttttttaaattttatccatgtatattttaatttttgaaattatatatatatttttactaatatttttaattattttgtccctttaaaaattatt

SEQ ID NO: 18920 - DNA, 5436 bp, Cannabis sativa
aaaaaaattgttaagtacaaaacaaaagaaactgatgaaagtaataattgatgagtatgtcaattcaatatgtatccccatgaccatattaccagcagccaaatatatgaaattcattgactcgtgtgataagttaacttgtcacttaaaccccaagatctagcggactctttcattagcagctgaagttctgtatgagatgtttacaatgataagcttcatattgagtttataaaagaattcgaagaaccatatcaagcttcgatacgggtagagcattgattgacactaagatttttgtacaaaaaatctacatgtattggtggctaatgcatacacaaaatcaactagcctgctaatataaagtctccaacattgccccaacaaatgtaatctaaaacgcagaaccctacggtgcaggacatcatgaatgggaacatgaaccagtgcttgtaacatttcagaaacacacatggaagaatctctcttgcaaaatatgatggagaccggtttcaaataagaaaggagtatgaacaggccaaagacaataatgtacacctggatatactttgccaaaatcccgagcctagattcggtagaaaatgattatggtatctaattttaccctaccaaccaccaaagtgaaccgtgctttgccaaacaattgatctactttaactgtctcctaaacaaatatgagacattgcctgttgcaatgtatggttgaataagtgatatggaagacacatttattttcaatgctgttacataagtaagccaaaaaatgtctaatcctgtcaagtgtaagagaatggggctttgttgccaccatcggctgtccccgcagtctaactgcatggcgtacattttaaagtccaacaggacaaaagaagagtaatattcaactacggctgtatgtatggaaatcactacatatcctgtcctaaactgaaatatggttaacttcaaaagaactagacaggttattttatctaaatatcttttgactttcagtagttaaacataaaatcagtcattccaaagatttcaaaaatagaaatatctctcttatgttattagaggtgacagtatcaaccttattttatagcccttctgtttcagtgcaatgcctacaagaacttatccaaatgaaggaccgaaaaatctatatccatttttagtctacaacgtaaaacatgttaacagaacaaccatttgacctttctcgcatgacataacaggcaataaaacagaaacttatttttatagagtatgagactggataaaggttgtagaaagttgtaacgaatgttaactaaaaggcgagatgaaaagttttaccaaagaatttgcaccaatcttacacattcctctaatgtttggcttccactactaataaaacattcaattatagaaaataaattcccaaactgtcattagcgggcagtgattcatattccaacacaactaaaaagcataaagtaagttctctatgattctttcatcataataatttttactacgaatgggctctaacttgtatcaataaacttggaaaaaaaaaaaagatgactaatcagagacttagatggagggcaggaagaccttgtttggggttaacaaccatttgatcttactcccaagaaagataacaaaaaccccttttcatagagcaaaatactatcaaaaaaggaagttgaataaactaaggaatttgcaactatctcacacaaagttcctcctatgtttggcttccaccaacaccaccaccactgaaatgagttatcccaataaagaaaaaaaattcccaaactgttattagtggctagtgattcaaattccaatataactaacaagcacaaagaaagttctctatagctcttacatcattagaatatatactttcaaatgtagtaaacttcaaacacaaatcaaaatgttacctgaattcaattctaccaatttaatagtcaactccttagattcattgctatcaaagatcattaaagcctttgataaaaaaaaacaatgaagaaatttcaaaaattatttttcctgaacatcacataattcctaaaaatttactaaccaaccaaaaatgaatgagcttgagattaccctaattgatactaatagcatttatactaaatcaaaagtttgataatgaaattacaaaggatacccaacaaaaattatactgataaacataatagaaaggaacatctttttccccaaattgaagaaaaagaattctttaattaatcaaggaaacctgtttgtcgccatatcgcattccgaacctgacgaagatccctacctttcagggttcttcccacgccttcaagaaccgaataagcaagcatcggagattgcgtggagcttcttgccacaatctcgtgaggtggcaacatttcggcttcgccgtcatcatcaccgacatcagcatctacagcaaagaagtccctgggtttggacatggccttggacatcataggaacgttcaccggaacagattggtggtacttcaccgaagaagaaggaacaggcattatgcgttcttgcggaggcttcggaatcactggaatcaaacgcgaagaggaagacgaagaagaagacgaagacgaaatcgaagccttattgtaaaaattggaatggtcccgtagtttaggtgacgaagtctcgttctcgggaagagcggcgaggattccaaatccttcgggttgagccgcgaagcccttgggttgaagaagacgattattgttgagaacacgagaagcagacgttgaggaaggagaggcggagatgttgttgtggttggattcggcagagaaatcaccggtccaaaagatatcgtcctcgttgagctcgtcaccgtcgccggcgctggtgctggttacagcattatcagacggcgagtgggagaacgcgccgacgaggaagcgttcggtggatgtggatggcctgtggcgggcacggttcttcccgggtatgtccataacgggtcgggtcgggcaaggattatccgattagaattggagcttctttttttttttttaattaaaaaacgtgtttttggttttctagagagaaagagaaggcggctaatggggttgggtgatttatatataaaggagagaaaaagcggtggaaatggaaggagtgacgtggccgcattgggggagttttggataaggaccgttcgttgctttgctaatcaacggtccattattattattatttgtttgtttaaaaggttttcattttattttatttttgctttgctttgctaatcaactcatctgttgttgtttaagattcatgaatcgattatcaaaatatacgaagtacagaatcgagtacaatctttttttgcagataaatttgtttggaattttattttactaattaattagtattttcaaaggactgtcccataccatgatgagttgaaattttagacaaatcaaaaacatagtgcgtacattcttaaaaaaaaaaggacagtgcgtacaaatacaattaataatattttctctaaactattattattattatattttattaaaatataattcatcttataaaatatttgctctaatagaatgttaaaattggaaatgtaaaaattgtgtatatttggcgtaaaaaaacttttgtaatatatttacatttgatgtacaattataaaacttaatccaaaatttaatatttttattaaaagtataaaaaaaattataaaataaaaaaatagaaagaacaaaatccacaacacgaagaaaaatagtcaagaaagctctgctagggtttgcccctatttctctgtgtgaattcctccacttgctctgaatcccccaacctttttgggttatgctcttgttccgtcgaagagccttctagtgtatactcctacagtgtgactgagatgtactacctttttggagaaaataaaaaatttgaatgtcatggtagaagacgattgggagattgataactcgagtgtggcggttgtaggcaaactctacctccttggtcgattgtgtacctagcatgaatatctacaagtcatttcttaaaactattctatgtcgaatctggaaattgactaagaaagaatggaattttaagttcaaagagaaaacaaatcaggtaattttcctcatactttcttggaagaacccacaacaattggatcgtgtgttagctaaaatgatatgagtctttcaaaatgggttcttgattctcgaacggatggagcaaattgcaatatgttgggggtttaaattatcgttgttccctttcgaatggcaggtttagaacctccttatttcctcaatgacaaagaataatttggcttggttagaaggtgtggcaggaatggtgatttcggtccaagaacttgatgttcctaaaatggccaccaatagatacttttggttcaaggtcttgatctccattcgatccaagatttatcctgaattctcgttcccctttaatggtggtagaatctagttccaaattcaatataaataatcaccatttaggtgttttaattatgggatggtaggacatgagggtaagcaatgtttagaaccagtggctatggtctagaaataaatagggaatttgacttaggcatatgagacttggctggagatagatcctcttctcagtattcacgggattagttcagtaggtgacattagctaaatatcatcgagttctctacaggaaaatgtgtctgggaaggggaagaccttgacagtggatacatgtggtcattacagcatacatttcaagcatcccgtatgaatataaccaattctccttttggtccatctcccatctcccagatggagttgttgaatttttaagcaggaggtggaactttggtcttccctttccctctatattttttgggtgtcctggacggagtggcctctaggatggtctcaaggacaacattcgagtgaggttcccctataaaaacctctccctgagtggcctctgggatggtctcaaggacaacaactgatgcgtcctctttgatttccactgcatcgagatggaactcctagttcaaatccatcattggaaagatgaaaagaaaaggaaagccatgcaattagaaacctactatccaaatgacaaattgggtattgggaaacgcctcccctaagatttcttgaagaggtccctgctggacctatcactcctaaaaatatatttttcctagacaactcaaagcaatagattgagaacccaaggaaagctactagaacaaagtttaattaatgcagaaatctagaaagtaagatcccctcgaattccttataactctaaatgcatgtgtgcgaagataatacactggttttgtaacgtcccctcttcaagcctccattgggtccttacacgcacggaatgaatggctcttataca

SEQ ID NO: 18921 - DNA, 2539 bp, Cannabis sativa
tgtatatattaataattgggttccgtcattttgaattttcttagtctcaaaatggctctagacttctagtgtgcaacaaaaagaaaaagaaagacccagtataaatatatattttcacttagttatcatgacttatagcatttctcaactataaatatatattttcacttattaatcatgactttttttaataaagaataaacaactatggtggctctgtatatattaataattgggttccatcattttgaattttcttagtctcaaaaatggctctagacttctagtgtgcaacaaaaagaaaaagaaagacccagtatatattaaatccattttgctgccagatatccctgaagtttccactaaaaaaaggtcttatttaggttatatgatctcattgcttatggactaatgaaaacaataacctttgaaaatcatgtttagaatatgaaaatggagcagtggattatgacctcaatgcttacatattgatgtaaacgataatatttaaaagggaacagttgacaaaagtagtaatactattaataacaaactctccatgcttgaatcagtagtagagcaatcttttgacaagaacacagacacaatggaagaagcagtacaaaagaggttgttaatggccaaacatttatcttcatgatcttttacatttccctaaaatcccctaaccagagtagttaattccttttcttccctttgatcagatatgcagtagttacaggttccaacaaaggaattggatttgggacagtgaaggagttggcttcaaatgggacagtggtggtgttgactgctagagatgagaaaaggggtcttgaagctgttgaaaaattagcagaggctggcctctctcaactagtcattttccatcagcttgatgtgactgatccttcttccatttctgctcttgctgattttgtcaaaacaaaatttggaaaacttgatatcttggtatcatatctttgaaacttaatttatattctgcttatcccctagttaatacaagtcaacaatagaaaaatgttgcctgaggcttgaacaaaaagaacttaatgtaaaactactttgatatgattccaatttagtaacatgtaaaaggccaaaaatgttacaacaatattcggtttgcaacttcattattgtgatactttcaactttcttcacattttaatgaataatgaaagttttacagataaacaatgcaggggtacctgcaggcaaactaaaccctgaagcttttaaggctgcccaaatagaaaaggtacatgttcaatcaaatgtatagtttatttcttggcaaaaaatgttcaatttcaatatttgataaccatgctttttatatatttcattttctcagcttattctagaaggttaaaagataatgagcttaataaactttcttttaggtttaatgtttgtagaaggaattacaatagaagtaaacacaaattatgtctgaacttctataaaataaaaataaatgatttgaactttgaattacatgctgtcatatagcacaccaaccagtgatttgaacatttaaagcaatgtacatgtatcatttttcttcaacttaagaggatcacagtttttaatgtttgatgcagaaaggggcagatattaaaagttggggtaaacttttgacagaaacttatgaattaactacggaatgtgtcaaaaccaatttctatggtgccaaagcagtgacagaagcacttcttcctctcctccagcaatctgattcacccaggattgtgaatgtttcttcctatgtcggaaagttaacagtaagagcaacaataattcttttgaacacaaatttcaagttaaccaacattttagcacagcataaaagcttgtgaaacacttgcttattagtgaaaacagtgaaagagattttcttaaacaaacaaaatggaaataatgtcttaaatgtagcacgattcctgtatttgtttcagtttataccaggtgaatgggtcaaaggggtgcttagcgatgttgaaaaccttactgaggataaaattgatcaagtgttgaacgagtttacaaaagattacaaagaagattctctagagagcaaaggttggccaacttctttttcttcatacatagtctccaaggcttgtttgaatgcttacacaagaataatggccaaaaagtatcccaacttttgcatcaattgtgtaagtcctggttatgtgaagacagacataaattgcaatgctggggtgttgactgttgaagaaggtgcacaaagtgtagtgagcttagctttgctccctaacgccggtccaaatggcttgtttttcaatcgacatgaagttattcctttttagttattgtatgaagtatgaatattgtctcctctttctttcataatgaataatttcctattacaacaagattgtggtaatttagtttcgctttttattttagtgttttcataattataattaggttacctttcctaattaccttaagcagatgggactagagtggtgttctcgatatacct

SEQ ID NO: 18922 - DNA, 1637 bp, Cannabis sativa
tttttttttttttttgttaatttgatagtaatatctagcaccaatatcttatattattattgataaattaaatatcatgtttcatataatttatttaataattattcaaaaaaacatcacctcgtaaacctaataagaaaaagttaatagtaattaaattagagtaattttgctatgtatctagaaatattccaatatcattatctatttattgaatgctctattgaccttcctcaagggcaattaatatatattgcaaaatgtagtaataacattagttgggaccaaatgcagtacaaaatcattaaaatcatcatcatgtaagtcatatattgagacaacaatatgacacacaaaggcaaggtcttgaaattctaattaatatatatacctcaataagaaaaaaatataataacagattatttttatttacataacataatcaaatagtaagtaccatttcttacacaccattttctcaaattaattattaatgattctcttgactatgttcataaacttcgaaaccatatacttatatctctcataaatgaaaatcatacacatgtttaaaagaaaagaataaaaagaattgtctgttaggtgccttaataaattttaattttttatatattaaaaaaagaatttaaaaaaaaaaaaaaaagcacacatgtcacatgtggcaacaacattacatgggtacgccaactttatcaatcacaactatatatcacacaacaatatatataatatttaaagacctgaggtattggcagaatgtcttatatgtataaatatatttcttttcaccgaagtcgctatatatatatatatatatattatatattgaagtaaagtaaaaacttacctaaatacataattaaaaaaaatatatatataggaaaaatatatatatatatatagtatatcaataatccatctttaaaaacagttgattctaaattcaaatccttttctatagtgtcaatattaaaaaaaaaaaaatctttaaaatatatattcatccttcacttaattataatatacacaaagtttaaatttacaagtgttagaaaatcttacattgataatgtgttaaaattaaatataatatactgccaattaattttaagatagaatctcatacatcttaccatacagtcatctattcttacttctttcaccgaaaagaccaccaaatattattaagtattattatctcgataagagccttaatataaaaggacctcaatatcttacggtctcatttttgcctttatgctatgaaattatttaatctaagtattttgtaggtgtagagatttgaccacacacgtttttatgtgtaacatatgtttggcatgcatatgcctttaattaagtccaaaagaagtgtaggtctttattgattattcattcataagttgaaacaagggctagcatttgttcaaagcaaaactatatataacaaaggacccaaggattccatgcatatatataatatagattcattgcatttacattactattgatgaaaatagttttatgtacaaatatatatatatttattctatataaagtgtgcctatataacataattcttggtttatgaaaaatttatgggtaattttttattt

SEQ ID NO: 18923 - DNA, 4212 bp, Cannabis sativa
atatatatatatttcctaatattcctatatataatatgaatatgatatagtgtatttactaattactattgtaaacataatttcatttactaattaattgtatattcttcatgttttgatcctctgtctgccttaaatataatgtttatatatataccagccctagatgcttgaattgcataccaaggcagcacaaattaataaaaggcaaaatgatgtttgactttttcattgacccaccaaaaaacatcaaacacacagcacatacacaattccaactgtctattactcacttttaaacatactttacccttttcttttctctatctccttcctctacaattgaatgaatttagaatatttggaatcaaatatgccaatttacagattggaatgttattaaatttcaacatttaattgctgcaaaaaaaaaaaaaaatcaacaattaattcattaattaatatattttttttgaaagtttgttcttttttttcatattgtaataatagatataactaaatttgatattatttatttatttattttcatgtgtagccatcgccatcttcatcttctaaaatttatagtcatgtttgagacaaatctaacgtgtaaatgcataaattttcaacaaatgttcattaacttgatgaaaataaatacaaataaataaaaaaataaaaagcatacaatacacgagaagcatttgatctaagctgtcactcccttaatcaaacctcaaaggacactttggtaaatacaaacaatctttgaacggttatcattgttttcttgtaatttattatacatgtatcaaaatttctcattttagttataaataataaacaatgaaaagcaaaagggtttttttttttttaataaaatgtaaaatgtaaattgtaagttgtaatgtttgctttcttggtagattataaacactcctattttaccaatgccaataattacaatgtttaaggtctataaaattaaaaaagttgtaatgatgaccagttaggtaattatattaatatatatataaatatatattagaaactgtatttggattaattgagccattttcattttcatttgcccccacactacattggccaagcaagcgttaaggagtgacagcagctgttgctgagtcgtcctaattctttccttttcctttcaaaaattgctaagagacacctaataatattatatgtagagtaagtaaattttatatatataaattctattaactatagtaaatgtggtaaatattagaattataatttatttaaatatacaggaaaatacagtggtgggacttggtaccttataataatgctctttgtcttttgacctttcttttacttattttacacaatcccaaggccaagaccaaggccaagccgcatatttgttgtagttggaacagtacttaaatcttcctataggcattttctaggagccaaaacacattatataaacaccccaaaaaaaacacataacacttccaaggcctttttagagcagagaaagaaggaagagaggccttgttatattaataataatataacattttcttttctttctgtttcatcttctcttctcccattctttctttctgtttttgtgttcatgggcttggttggattgagatctaagatgggtttattctaagttttgttttttttatgtacttttgttttggggttcttgcgggtgtttgaagtaatacttgttggattttaagctcttcttcactgacatttctgctctgccatttcttccattgtttctttcttctctcctttttttgtatgtgtgttttgcttatcaaagaagcaaaagccaccctataaatatattcttactctttaaacaaaggaaggttctttaaagtccatatagatctactgagcaaaataaacgacaatcttcactacttgtacactctttctctcgttttgtttttctttgctctgtttttttcattttcaatagctgaaaatggaacggttgagtgggacaagtattcttccagacacatttgaaggtaccagagatgacattgtaagtcaaatgggattaatttggggtcagatcaaagctccattgatagttcctttgctacaacttgctgtcgttttgtgcttaatcatgtcgttgatgcttttcatcgagagagtttacatgggcattgtgattgttcttgtcaaactctttggtcaaaaaccagaaaaacgttacaaatgggaacccattagagatgatgttgagcttggtaacttagcttatcccatggttttggtacaaatcccaatgtacaacgaaagagaggtcattttcatatttcatatttcatttttcataccattattgttttgtctctgttttcattttattttttttttatttgtaggtttatcaactctctatcggagctgcatgtgggctttcatggccatctgatagaatcatagtacaagtactagatgactcaacagacccaacaatcaaggtacccagaaaaaaaaaacatttgtcatatttgattaaaaatctaatttttttttatgtaattatggttaatgggaaattcaggatttggttgagttagaatgccaaagatgggctagcaaaggtataaacattaagtacgaaataagagacaatagaaatggttacaaagctggtgctttaaaagaaggcatgaaacgaagctatgtcaaagactgcgactacgtagccattttcgatgcagattttcagcccgaaccagactttttatggcgaaccattccttttcttgttcacaactctgaattgggtctggttcaggctcgttggaaatttggtaatacatcttaatctcatataataccttaaccttagattatatatgcactttgactaaaataatattattcttatgtttaatgctaatactacttggttggtgttttcttcttcttaagttcttagtatatttttattattattaaaattaacaaaaatcagtgtcttttgttagaactgtcggtgagccttatttttacaagtatacaaacattgagaaacttgtgtatagaaaatgagtgtgaccccactttttttttgctttttagtcatttttaatctttagctcaagacacctataatcaaattatagtccttgttggcttcttataatttggccacgtttggatctcttatcagcttttttcttttttgggttgggtccaacactctaaaatcaaaaccacatgtgtgtgaattctataccaagtattcaactcgtagctatttcaagctgctttttttttaattaaaaccttaatggaggttgatagagatattcaattcttgttgtttatgtttttctgttttagcttcaaagggtcaaaaaaaatggaccctcgtctattgatattctgtttttacttagttttactttaatgtaagattgaattggtggtgatggtgatatagtaagtagtaaccaacttttcattaatgaaaaggcaaccaatatcagaactcatttattataattaagaaagccaaagttttttttttttgtggctatataatgcgaacaaaatggtcctctttttcaacatacacttagcaatgagtaatgtaaaggcttaaataagttattactagaatattatagggcatcttccttttcttcatggaacaatcttattgattttgctccatataaattaagtaaatgaagtaaaccctttaaaagtcaaaacaatatatactgaatgtaaaaactaaataaaaacaaagactagtatatatatatagtccaaagaattttaaggtttggtttctagtgttatactattatttttataactatatgactatttttaagtgctatatatcataaacacgtgtgccatcataaagggtgtgtttggatttggatcatattgtcaggggtatattggtctcttcaaaaaaaaaagaaaaaagaatgggattgttgttctttcttttcccaagtccggcagtagcatgtgctttgtttatggtggacctctttccctagtcagtgtcaatgctctgttaaccgacaattcaagtcatttcctctgtttcaaattattattttttatttatatacgtatatataataattgtgaaacatctcatttgtaacattgactatgctaatagttattgtatttcataattataat

SEQ ID NO: 18924 - DNA, 1793 bp, Cannabis sativa
aaaatctccgatcttgattcgcatttgatattttgttcttgttatttataccatgaaaatattattgaattcttttgtttcaagaatcatgtattataatataagttgttctttttggttgatatatcaattgaatcaattttaattttagaaaagacagaagatttagatcaattaatttcttctagtggtcttaatgtactctttatgtagttaaattagtttatttgtcaaaatgaaagagtaggattctttaaattgagttaattgattatatatatattatgaattatctggttgcattggtatcaagattcataggttcttaatgggtaacctagaataaaataattatatatgtatattcaattattcttccgccttcatcaactatatttgtcaaataaagattttttttttctttgaaggacagaaatttaacaattattattagtttattttttggtaagaaaataagatgtttctttactcgagttaattgtttattaatggatttaaattcaatgcttgcattttggaatcaagattcatagttttgtaatgtataacttataataattacataggttataatgttgaattataatatgttaccaaattcagatattataacaaagtttacgtgcatgttttggaatgtttgctcagtcatgacagtatctctttgtattgtcattttcagcacttcaggctattacaacgaaaaatcacagcttgctgaatgggaaacagatcagagttatgtgggcaaatcgtgatcctggttcaagaaagagtgggatagggaatgtgtttgtgaaggtacataatttattcctatataataagaaattaccaattatatataatattgtataaaggtcatctctgctaatgaaaactactcacttttgtattctattggcagaacttgtgcgagtccattgataacgtgcgtcttcaagacttgtttagcaaatttggatacattttaagttgtaaagtgaacaagtatgatgatggaaaaagcaaaggacatggctttgttcaattcgacaatgaggactctgcagttgctgctattcagagcatgaatggaaccactattggcgataagcaactgtaagtgctatatattactacttaattgaatgaatattaaaataaaaatcaaagatggatgatcatgaacaacttattttgttattgaattaattgctgaattacaatacttcttttcatggtgtacagatttgtatccaagtttatcgggaagtatgaaagaatgaagaccagtgatgttaaatttacaaatctgtacgttaaaaacttggacccatctgttaatgaagagcttctgagagagaaattctcagtatttggaaatattagtagcttggctattgcaaagaatgagagtgggaagcccagaggctttgtttttgtgaattacgataacccagatgatgctaaacgagcggtagaaggcatgaatggttcagaattaggtaaattacttgcaattttctgcaatccagctctgcaaaatgcattttatatttaactcttttctgttttacattgaaaaggctcccagattctgtatgttgcaagagcacagaaagcagtagagcgcaagcaaattttgaaacatcaatacgaggaaaaacgcaaagagaaaattaagaagtacaaggtaatagctgttctctcttaccccagttgtactcatttcttacctatttatagctttgttctaatgcatgttatttctgtaaacagaactctaacgt

SEQ ID NO: 18925 - DNA, 4824 bp, Cannabis sativa
ctacatgccattccatcacattcaattgtttattatacatcacctatgtttatttcacctactattacttccaagagttgtcgaaatggtttcacttttctaactaacctctgcagtagtttaataaataatatcatgtgttgggaacacttaaataacattaattttgccttataacaagacagtaaataatatcatgtattgtaaccccatagatttatgagaaatgttaaaaaaacacttgtggtgtctagtaccctcctatgtgtaagtattattattggtccaactaagtatcgggtgccatataatttaatataatagcttttaagaagtatgactaaccaatcgcaatgcgacatgtcgaaaaagtactaggcaccactagtacctaataacaataccctaaatttatttgtcgataataaattgaataaagagaacaaaaaagttctgtaagcaatgcaaaagaccatgctctgataaattgaacaaataaaataatgaccacacaacacagccacggagcggacggactcactgcactctgcatactgcacactcatggccgaccgccttcttatgttcacatatttgtcacatttatcctctattattatcatttcttactgtcctttacttttcatcatctcattttgtttcttcctttttaccttttctttattttccttactattctcaattcaagaacacacattttttatcaagaaagatttagtttacaagttacaaaacatctcgaggaaaaatgggatgcattattaatatgccaaatcagattaaacaaattgaaagtttatggtaagagtatcaccgccatatatatagatgatgaatgatgatatattataactataacttaactacatcagtcgctagtctgctttctgtatacatatttatttatttattttgggaagaataataatactaaaataataatagagccatttggtaaaagacaccttgcttggtagtggggacctctctccaatgcacgtataataataagttaataacaatataagaaagaggcgaaaatcaaagactacaaaaagggctttcgctactctgttttcccacaaattagtcatcaccattcacgccttcctcttctcttttctccttcttctcttctctctctctcacaggtgagtgctaagaccacgattcttcacagacttgactaacaataacactaacaaagactaaacctttccacatttttctttattaaatattcataagctctcaaactcatgctctaagtcttgtttgcgttttaccatttctctttctttgtcttttttctcacaaataaaataaagttgcttttttttttctttcttctacagtagacaacatgggcagtcatctgcattggacgatgcttctgggtttgcttctaatggtgtccggaactatgggagctccccccaagagaccagtgaatgtgccatttggcagaaactatatgcctacatgggctttcgatcacataaagtacttcaatggaggctcagacattcagctccatctggataaatacactggtttgtttttgcacgttcctatatatatttgtttttatatatatacacacacttttgtacatataacatttctctgatcaacaataaatgttgggttttttcgcataaaggtactggctttcaatccaaaggttcttatttgtttgggcacttcagtatgcaaataaaacttgtcccgggtgactcagctggaacagtcactgcgttttatgtgagtgaatggcttctcatttctcattgtttgattagataaacgattgttaatcttgttttccattttggtatggtgtgtagttatcttctcaaaactcggagcatgatgaaatagactttgagttcttgggaaacagaacagggcaaccctacattttacagactaatgttttcacgggaggaaagggagacagagagcaaaggatttatctctggtttgaccctaccaaagattaccactcctactctgttctttggaatatgtatcagattgtgtgagtacccttcaaacataaacacacttcatttattttctcatttaaaaactgcactagtattagaattactattaggtggtggggggtgtatgtttgatcaaatgaaaaattgaatctttatacttttgaaaatataaaagagaagaaaaaaaaacctcttttctattgtctgtaatcatagtacatgttcctctgttctaataatgaaatgaacccgtgagatagttttctttccttttccctattttggagggtcccactggattgaacaactggttcatgggagataccgacaaaacattgaaaaggagaaaaagcagaattcttttcaaacaaaatcattggaatggggaaatccacttttgaattttagccagtcttttgtttgttttgctattatcatattcatatcattcacagtgtgtagtagtagtagtgggtgcgtgtcagtaatgtgacacagatcaacagacatgtctagtaatgtgtgtacttttttatatatcatcatctttattctgataaatatttatttttgggtgtgggggtaatttcaataatcagattcttcgtggacgccgtgccaatccgtgtgttcaagaactgcaaagacttaggagtgaaattcccattcaaccagcccatgaaaatatactcgagcctttggaacgcggacgattgggccacaagaggtgggcttgagaagactgactggtccaaggccccattcatagcggcctacagagggttccacatcgatgggtgcgagtcatcggttcaagccaagtactgtgccacccaaggaaagaggtggtgggatggtaaagagttccaggaccttgaccagagccagtggaggtatctcaggtgggtcagacaaaagtacaccatttacaactattgcactgatcgtgtcagataccccaacatgtcacctgagtgcaaacgtgacagagatgtttgattgattaatattatttccatcatgatcactctctcaactccattttaggcttgtgttttattaatcgtcaaacatcattattatcatcatacatcaaacacaaaacaagccataatatttatgttgtatctattattctctactatgattgaagattgaagattgaagattgaagattgatatgtatcctaagcttttagtttatcattcattttcgaatatgctcttctactgctactctacctagtataatgattatggttgtattattggatctttatatattttatatatgatttactttacataaagttgatatttatgtgcatctcatcacgttctctcatacatctttttcttattcaaaaacgcaaagaacatttttcctcttgtcatttgagatgaggcctaatttgtttattacgtcccaagattttgatttttgtcgtttacattatatttgtcgatgaaaaaagtaaagggaaaccaacttaaaagtagaaatggtcgtatagtagataatagatagatagatatgggtggacctagctgtccttggcgtaatagatttgtctgtacatcattattgattcttaaataataaagataattttcggtgatgggtttttacaacttcaacttcctcaatcaatttttgtggcccaactacgaaattctccaattcgtttggatttttattaggctaattatgatttttatccttcgaacaaatcatgtctctgaatttttaatgtcgttaaaattgtttagaactattgaaattgttaaatttaagaatttttgtccaattttaataaaaaaaatttaacatagatgaaagttcaggaggcataatttagtatatgtaaaagtttgaggggtacgatttgacagatatcaaagtcggggagcatggtttagtacataaataatcactaaaatactaaaattaaataaaattagataaaagtctttaaatctaacaatctcaataattcagtgagaatttttaacggccagaaaaatttaagagacatgatttcgtacatgttaaaatttagggagtaaaaattctatttagtttttttttattatgtgacatatttttttactatgtgataataaatttatttgaaatatcttttttcctagaatagagttttttagaggtagatttcacatgctaaattttaacctaaacgaataaagttctattgactatgatgcaaaacttaagtgccctttttatgttgcaataaattttatatgatgccaattaccacatcttatcaactatgtctttactggttctacttttaagctgacaaactattattatgccataaaatttcaactttcttaatgaatcctctgcaacttttatttacatacaaccaaactctcatcagtcattgttccgctagataaaaaaaaagtcattgatattgttttctacttttcgtatatttttaaatgatgactctactcttatcttagcttgaaaagtagtattatagggtctttattttaagatagcattttagcttcaaaataaatattaaaacactaagattgtttttttaggtaaataacatgtcaaaatgaactctgtaaatattagagaacaatgtttatgtgactactagtagatgttacattgtttatgtaaggtcaagtatttttgttatgataaattatgttcagtttatgtctaaggtctcaagtttattgtacacgttagcttaatttagatcaagtatgttatatctgttatctagtaatttacctaatacaa

SEQ ID NO: 18926 - DNA, 4864 bp, Cannabis sativa
ctgtgccaaactggcccttaatatcagtaaaactataatttttgttcattgtacaaatttcattaatgtcttaaacttataatcaaacttatttgaaaatcacttatactactccatctcgtccttactcgatgatttaaaatttggaatttacatgtgtctaatttaaaaaccaacagacaaagttatatttttattatcattggatattgaactaaaaaaaccattgactttatactcatcacaatctcaaaactttgagtaaaaaatgaggaatattattcaataaaaaagtgaaaattaggaattggattatcataataacaaagtcaacatttaagactgggttgtcaatagcagccacgaatctgcaagaactagatagattttcaaaaatatccataaacagtgattccattaaaaattaggattagaatcactatttcagaagtaaaattgacaggaatggtgattctatttcaaaaaagaaaaaaaaaagaattagaatcaccatttctaaaataaataattagaaagggaatcatcattccaaaacatatttaagaatggtgacttcatgctaattaataagaaaacaacatcagtagctttttgatcaaaaatcattttaaaaaaaggaacataaagtatgtacacatacagattacaggactcacaagcacaaacaatcttggcaatctcatatttcaaactcaaatcaatgctaagctaaatttaaatctgcttatattatcaaatagtgttttatcccaagatagctaaactacaataatatttccactctttttaaattttccattgttagaaacacgtctacatcctacacaaaactactccaaccttagtttccactctttcttgaggtagcattaggaagaccaacaggaggttgatcagctagcttgatcttcaattcgatctccccggattcgacatcacacagccttaaccaaacaccctgcaccacctcaccattgacacaagtgatggagctctctctgaccaaacagttatcgccatccgggacaaccttccttaacactgtctccccattgaagttctgcagaatctgcctgagtctagctgcagagacaagtggttgaaggctgagttgtgcatgtcccattttgtcatctgtctttaataggtctttatcaaacacttcctaaggggaaaaagcactttagtcatataacatactaatcattaattatgtcttcagtgaaatacatggagaatattacaaatagaaagacaaaaacaatagttggcttgagtaagaaagaaatataacaattgaaatgttgtaatacttcaagttaagactaataaacgcaagaaaaataagcttgtttaagtggcgttttgttaaaggtaatgaaataatatgtcattccaataaaattactttttcatcatttggatggaatgactattccatttgaattccattctattttaggatttatgcattttaaatttgattcaattctattcctatttctacgttttcattccttccaaccaaacgctacttaaagtctacctaaaacaaagttgtatatgaagcctttaacaatgtgcaacttcaatggctaaccaaaatacaggttcaggatttttacatagcagaagcagagatgagtgctaaaccaaaatatatcttgaaattgaaactatgtggcagtgatatagatagctagacattcaaaatcttcggaacttaccaaatttaaaaccccattaggttctttgagggagaaagtcagctcttcattccagactggattaaggcagctatttataacctttgtttttgctgtctgttacagaaataaattcaaagaagaaaaaacataagtaaacaaacattaaagtcactattgtgcttaagagtccaaagaactgtatcaatctcatcaagatacaattgtaggtacaaaacaaaagtataaaaaccagtaaaagagaccatgtaggccccccttatgttgtcatctccaaaatgaatgaagaatttgtggagttcagccaagattgagggggaatatcatatcaacatcctaggactactgacaaagtgtaccacgttgggaatgaatcaaaagaagagctcacctgattgcctaacttgactacaacgtaaggatcactactcttgaaatcccggatgaccagtttcttcccttgcacaacaacaacttttagcagccccaattgcccctccataatctgcttgattaaaaaaaaaaaaacttcaacttaaccaaagattcaaccagattattgcaaaaaaaaaagggggggttgttgagaacagagtctgtttgtaaatatcactccccaatatatttaaccaatgccacattgacttgtaaatttgggtaagcgtattaccatcagacaatcatatcattacctaccaatacatatatcaaatatattcggttatacttatacatatatcaagggagagtgagaaaaccttaatgagttcaaagcaaagaaaaaaaggaagttaatttacaaaatcagccaactgattatgcaggaacaagcttaaattagatcaaagctctgtgatttttccgtgaaaacaagaaaagaaagtagtcccaattaactttgcaatgaattatataaaaagaaaaagctttatatcacaactcaaaagctacaaaatatcggattgttactcaacataagatctaaagtaataacaataaaaggcaacagattgagaagaacgagccccagcatatataaattttttttttaaaagcaactttttgaagagaaaagaagagaaacatacaagttaaagatggaaacttacaaccaagaaaaaggttttgttgatagttttgaatttgatatatggtctgggaagttggtaatgtagttttgctcagccaaaccaagaaaaggtatgtgatatttggttcgctaccatagagtgtgtgagctataccagagttttggatttgagtggcttggctaccggcaacaacaggttgctggtgaggatgtaaatttccaacaaaagcaagtgagaactaatgtacttgtaaccggcatttaccggtcaatggtcataaggatgatattatcatagctttgactagaccagttcattcatttactttggtttcaaaccagaccagtcagtaagtaccagtgcggtccactccacactaactccccccttgtctggactacgtctatttattattattattttcaggaaaaaaaaaatgaaattggtgatcacattttcttttaagagaaaacgaaaaacaacatagaagacaggttgtaaaagtagaaaggtgaaaaataattgtagtttggtgggggtacccctcttttgttggacttacatatactgtgatttagcagatatgagtatatgaccctattcctttgtaacgaataaatgaaatcccttttctaaagaaaaaagaaaagaagcatctgaattctgaataggccttgaaactgacaaatttaaaaaggtgaaagaaccaaaaagtaaagaaaaaaaatagtaataattgattggcaccagtataatttcattgatggagtagctcctcctcttggaaaagaaaaggaaaaaaattatttaagtatggtcggtggacaaagctcgtgtgatttaaaacttaagtttcttattttatgtattaataatttatttactttttgctgaatacttaagtttattgtttaaaggtgaagaaaagaagaaaggtagggtagcataataacattacagcttattcagatttccatttcggatcaagaagttaaataggaattttaaagttgataagtcaagcttttcgaaccaagtgttgttgaccaaagaataattagtaaagattacgtttgaacgttgaacgaagcgtggtacataatgtggaacatcaaaattcagaatggtacactattttattaaattattttgatatttctcactatttaactctaatgataaaataaattttggagcgtcataaaattttttggtggtgtatcctatttagtgcccttcctgtccatgattattcagtgcccttcctgtccatgattaggaaaagattccacagctgccctctttgtaggatggaagaggactctcttgaacatttatttctgtcttgtgatgtggcttttcatttatggcaatcttctccctggggtatttatcctatctgtaataccggtattcgcctgtaggactggatcaaattcatctggaacctcaattataggggtattcgtgttgaggatgtcttcctttatacatccatttttattgacactatctggaggactcgcaatgacaaggtatacaataactattctgtagatgtgaagaagtgtattgactctatttgtacttcctttgcagatatacatgcatctttgctcccttgccatgctccgtgcttgccagaggtctggtctcctcctcaggactggattaaactgaattgtgatgttaaagtgagtttggatagcatgtgcattgcagtagttgcaaggaatcacctatgcggttcggatttaactttgaggctaaactttttttatgctttatgaggagaaacggcagcctgctgtttggcggtgacggttgctcttgagctcggatccaagtttattatcgttgagaatgactcgagggtagttatcaatgctcttaatgggaatgagtctcattgggcacttgagaactataccactttttgtaccaagtcttctccttcgtttattagttatatttttgattatattagtagaacttgtaattttgtcgcccataatgtggctaagt

SEQ ID NO: 18927 - DNA, 3285 bp, Cannabis sativa
caagattaaacacaatagcctgagcttcaaaccaatcacaaatggaatcataattccatcctagagaaacaaaactaacaaacagcttcccaaacaccttaagcaaaccaacacttaatcaaatagtagttaatagatttagcaaaagcatcatagaaagagcacacttctaccatatcaacatgcttttctcttaaattaattcgtgtaggaatgaagcattgagaaagagcacgccataataggtggacgttgaattttggaggaacttaagctaccaaagttttttcacaaagccaaagtttgcctcagtcacattacttatcaaggataacagatgcatcatcatgcgaaaaaaatcttccacaacctccttgtcccaagcctgacaatccacctgaaataagttgctaaccaaaaattatcaagaccaagagtaattggaactggtactgaccaagaatccaaaggcacacattgatcactagtgatctgaataaagttaccattccccaccatcttcattaaaccttctaccaaaacccctttagccttcaaaataaaatttattcattgcaatcaatcatattctataaaatataaaacatgaatagttaattttaaagaagctttaaaatgaagaagaagtgagcatctgatgtagtgtgttattagtaatgttctttcaatattttaaagtttttctattttagagaagtagttgtgggtgctttaaacttattttattattttttaaatttgttttatatatgtataagtgtatatgtataaattaatattagaaatatagactaaaaatttgaaaaaatttacaaaaatacatcaacacgaaaaaaatttcattttagtctttgaatttttttatttataaaaaatatctgttcagtgaaaataataaacagttttttagttgttttatacttaatttatagttatcgtgaagttgatatttcacgttattttttattttatttttttaactttttgctgaacaaagtttattttagtaatttcaaaactttacaagagtatatttgtaattaaaagttttaggctgtaaaattgtaaataaaatatagaaaaaaaatatttttaaaaattctccttaacattatatatttaaaataaataaatatatattttaaaatataatattttagtgatgtacaagaaatagagactcgggtatagtataatataaaaatttaaggtaaaatagacaaaatgtaattttaaggatatattttaataaatagagtagagaaccagtgttcgaaataccaatgctttttaatgacatattattattattattattattattattattggtattgaatctcatatatattatattaaattagaaataagaaatctgattgtatcaaagatgatatttcattttataaggtgtttagactgtaaaagaatgtcctttagcaaattcttcgagaaaagttgagaaaagagagaataaagaaagaaaaagagggagatgttttgtatcaaaaacagaagtggagagaagaaaaaagaaaatggaaagtggaaagaatttttttacaagaaagtaagtgtgagattacggtctaaattattttttaaaagtatatatagacgcatattaataattaatttacgttcatactaatatatttttagtaaatcgaattttttccaacataccaaacaattaaaacacaaatatatctttatttccatctttttttaatgctttattctcttatatttctttcagctctattttctaataaaccttgagttattttataattttctaattatgatcataaaatgcacatattatatacatgtcatgaatattgtatcataagcaattttggtacgaagacgaaattcatctaaatagatgcattttattagattatcttttattataaataattacatatagacaagagaatagagatgcttaatcagtcacatgagccagtaaaagatccatgtgtttgtatcattttaatccaacaaggcatagattgtcttcttttgctgtaaagagaatggtttcgctcatcattatagaatagagacagttatgtctatatatatacatacaatacaaaaaatatttatatacgataaagactcataacagatattagtaaataattaatataaacaaagaatattatacacacaaactgttacctattttaaaattaattattggcgaaaccctacatagcaaaatccacaaaccaaatgcattaatttattattgtatattcacactaatcatactagacgtacggctatgacttcttttttaaatcactatcgaaagaggcatatatatacatatacaattattttagtctgataataaattaaatattaaattcaacatttctcaatcaatacctttttttgttatactttccattatttaccaacaaaactcttcatgctcgctttgctatatatatcaggctaattgttgcacttataatttcaaacttattatattatttacagttaaatatttgtgcataaaaaataaggatttatggattttttatttatttatttgctttgattgacgtatatattttgtaataactactgttcttaaatattttagggagtctttttgttaaaaattatagcatcggtctaatctgaataatctcagttgaccactgcatattaaaatttgatattagttttgtcatctcattttgctcctcacattgacggaaaaacaatagttttattggctcttaattttatttaatttttattttgactgttctttgatttttggtgggggagtggaccaccatatttttaatattagaagattcagtaaaatatattggcaactttaaaaaattaattttcaaaaaataaactttgaaacaataataaattgtgattttctcgctttaatttaaactttatcttgaacttgtatatagcaacaaaaagcggatgcagtaaaatacatatcttttggtaatcaattaattaactgttaataaaaataaatttgttctcttgccagaaaagaaaaaattagtgcacatttactgttagacaaaacacattagatccatataggactcttctgcgttgaattaaaaaaagttctcctgagatttattttaagactaatgagaatttttatctcctaaattttaacatgtatcaaatcatgtttttgaattttttttttgccgttaaaaattttctctcatctattgagattgttagatttaa

SEQ ID NO: 18928 - DNA, 5637 bp, Cannabis sativa
  modified_base (5593)..(5596): a, c, t, g, unknown or other
ttggccaccttattaaggggaagtacacccaagatggaactaagtacaaggctaaatacatatataaggacatgtttgacatctatggtatccaaatgagttatgtgaaggcgtggagttacagggagaaggcacttacatatgttggaggtacgccggagttttcgtacatgaagttacttaaatacttgtacatgctgcaacggaagaatctaggtaccattactgacttgtatgtagaggatgagcggttcaagtactattttatatcactcggtgcatgtagaaggggatttactttctgtcgtcctattctgagtatcaatggcacattcttaaagacaaagtatggcggtataatgttagttgttgtggcatacgatgccaacaaccaatagttttcgattgcttttggtattgttgacagtgagagtaacgactcttggacgtatttcttaaaaaggttgaggaaagcaattggggtggttaagaacttagagtttgtgtcagataggcatcaaagcattgaccatattgttgaacttattttcccaaagcagtccactgtgcatgctatcaccacattgttatgaacgtgaactccaagttcaagactaatgtttttcacaaccaaatatataatgttgcttactcatcattaactactgaatgtgacagacaatttgagaagcttagaaagatgaatcctaccattagtgcatatgtggagagtatagggtttgagaagtgggctcacccttattgtttgggcgatcgatacaacatcatgaccagcaatgttgtcaaaagcttcaacggtgcgacaaaagagttcaggaaatatccaataagtactttggttgaatttatcaggttcacactacaatcttggttcactgattgtctcaaaaatacagacaaatgtacaatccctttagttacgctatttgaaaaaatcttggcaaaaaatcataatgaaggaaggtccaggcgcgtccaacgaaatggagccaatttgtataacgttggtaagggacctaacggtgaagaggtggtgctgtaaacctagttaaaaagaatgcacctgcggcttgtttaccttgttgaaactcttttgcactcatacatgttccacgacattgaaaataaatatgagtgtgtacacgttgtgctctccttattattcgaaagatacatggagtaagatttacgatgataccatcaattttgctggtgatgaggatgattgggttctcccagagcacaccaagaacatgaaggttagggtacctatggagaagaaaccaataggtcgtccaaggaaaagtaaggctggaaaaagacgggagaatcgtttcccgtctggtgataaaagagtcacgataccttgaaactgcgacaactgtggtggtttaggccaacagagcaacatgcaaagcctatatttgaggagtagtctactattagttgtaataatattttttttgaactggattcgttattcaaaaattcttattttgttctgctttctgctttaaaatcaagttgttagcaggtgggtttttatatttagaaaaattggtgtttttcattttattgatggtttatcgatgatttatcaatattttatcgatattttattgatgtaaaggccaacgttttgtgattcttgcatgttgagattttttgacattatatcaacattttgtcaatatgatgtcgatgggaatgtatgcatttaagattcatgcatcttgagattttgtcgacatcttatcaacatattatcgacatttttttgatggaaaggcccatgttttttgattcttgcttgctaagatttgttgacgtaatatcaacatattgtcaacattttatcgatattcttatttgatgtaaaggcctgtattttttttacatgttatgatttgtcgacattatattgacatgttatcgatatattgtcgatgcaaaggtctgtatataagattcatgcatcttgagatttaatcgatatattatcgatatagattgtatttattcactataaaaacttaaaagtcatataaatatttttcatatctataaaagaatgagtagtagatgcagacttgtaaccaaaaattaataaataagaaaagtattcatatgacacataattacatcaaccattgtcaaaatattaccaatcaaataccacaattatttcaaaaaatatatatacatgaaaataataaaatatatcaactaagattttggtagaaaagatccacacaccactgctcccaaaacgtcatgaggttgttatcgcaaacatcaaccagggggcattgcatcataagatgttgcacatactcaatggagtaaacgccacaatcacaattgcatcaaaaaagctatgagtaatacgtagaaaagaatagagattttaattaacatatttaagatttttatctcatttttacctttgggacaatgttgtgactagctcgggcgtattgaattctcgggatctggctatcgtcattcaaatctactgccaatatttggttgttaagtgggaactcgctagatgcatgtatcaaagaaggcagcaggtcctcccagggcttcatgatggcatttaactcacttttactgcaaatggtggaatcacagtcgtacactgttattttccacaactcgatgtcgaccttaactgtatctaatgtctttattcttgaagattcaaaacaaagtacaagaagtcattccttgctcatcttggatagaactcgatctttgcaaataaaacatcaacataaatatttaatagactatcgacaaaattacaagttacaaaaaaaggatcttaatctaatttttttgaaaacatttgtaccattgcacccttgcactacatgaggatatcatcactccaaataaaatcattccttggacccttgtgtgcatttcaaatattgtgcattatatcagctacatatgtggacagaataatacctctatggcagaatgtgtttgaaaagaagtggtgtcgcctcctaatcatatgggcacaagcatctacatgttgcagataatggtaaaagaaagctgtcaagaaattaaattaaattagcaacaaatatgtagttgtaataaaatattgtaagttaacttacacaatcttgaatccattctcgtagtgatagcaatctaaaaaaccaagtaggaccgtaatcaccagtcttgacgtctccaagacgttggttggggatggccccacacaaccacctacgaagctatccaacagcctctcatctggtagactgaagggatcaaacgacacagaagaaggcctaggatttttcttcatctcggtatagtccttgaaccaagtaggagggactctcttcctcttcccaaattgtatccccactggtggcttctttaagggcaatacatctacatcatcatgtgactagccataactcgataattggatatcacccttgtgactggctatcatatatgggaataatggcggcatccacaagagtacaaggtccatcatcaacaaaaggatcataatcgtcggggtacacatcagcatcttcttccatggaaggttctggtgctgggtctattggcctattatgtagtgtagtaatgatagatcttagttgctccatcataaggtattggccagcctccaattttaggtggctacgcgtatatgcatctttcaactctgtctcataagtgtaaaaaatttacatcttcctatatcctattcaacctctcaaccacatcactattgtcagcatgatcgacgccttaagatgatgcagtaggttgagtctcgagagtagcagtagattttacatgttctatggctcttttagctaggctagcaaaaaattgagggtcttgggtattgtctttagcctgcgtctcttcagcacccatctcaaccaggacctcagcatcattgtatgtgatggtccgggcatacgactcttcatccgggcgaggatgtagccccttcatgactaccaatgtctgtttaacaaagaaatgaaaataaatgttaataataataaaaaagtcgataaaaaaatatgtaaaaacatcaaaaattatcgacaaaatgtcgataatatgtcaaaaaaatattaacgacaacaacaactatcgacaaatatcgataatacgtcgataagatatcgacaaacttaaccataacataaactacacaaaatgtcggcaatatgtcaatatcatgtcgataaacaaaaaatctttaaaaattaaaatagtataaacctaaagcaattatcgacaaaattgtcgagaaaatatcgataacatatcgataaactcacgatacttttaaaaattacacgaaaaagcaaataatcaacaaatcatcaacattatgttgatttcatgtagacaaataaaaaatctttaaaaattaaaatagtataaaccctaattaatttattgacaaaattgtcgataatatgttgataacatatcgagaaactcatgatactttaaaaaattaaacagaaaactaaataattgacaaagcatcgacattatgtcgacaaaaataagattcctttccaaattaaaaccaagcaaattatcgatatcttatacataaactatggataaacataagacttaaaaaaattaaatgatcatacccattttgaaaataatgaactgagtaccttctttctattcttagccctgctggtccagcttagcaacctgagaaaatgagtcccctgacacgaaccatacttttttccatcctctagaatggcctcataggcccaatactataatgcaggtgcaaagccatagggtgtgtacttgtattcgtgctgaacatccatctttagctttttcttataatttgccttctgtttcaataagtttttttgtagggtgtgcatcagtttggcaaatgagtagttcccccatggaatcttgaaaaaaaatcaagatcttcaacatattttagtatgttagtcgtaatacatgcatttttctctcggcctagtaagacagtctccataaacaagcacaaccctagcttgtacgcatcttttgggacctcgcaggctaggaacttattctgaagtagttctgtcttcacattatctaaccggttgaaatagagatttattaattggtttgaccctaacatggcttctttctcatggtttgtaggcccctttgtgaagttgaggcctgtaaatagagcaagctcgaccacaccaaatttcatctcgtttcgtgcaatgtaaaattgcatttcgtcatccttctcaacattcaccatcattttatgcagcatcagttggtggaatattactaaggagaaggatagagcaccagcctgtcaaaattgaccaaaagggcttgcctttgccctatcagtaaaaccgtgtttatcaaattttggtttgataaacttgctaaaaataccactacctctacaggtcacacgacctgtaatatgcttatagaatgtgtaacgccctaatgctaaggcacgctacattgctttttttttttcaattacagtgcaatcttnnnnaatcaaagaattttcttgaaaaacatgtcaaattaaaactt

SEQ ID NO: 18929 - DNA, 6921 bp, Cannabis sativa
ccaatcctagtcatagcagcttttaataataggtacttccggcactcttgaagtgcttttttctccattatatatatactttcctatgtatatgaagaaaaatatctatgtattttttaatatatttggtttagtagtcatcatctatttcaagttttgagtataaggatatatatatatatatgtttcatttgattaatcacctttatactaatggagatactacctattagtgcatgtatatatatctaggttaattgaaaatcattcttgaaaagtgtccaattgtagtctaactcttggtataatttcttggattaataaatgtttttaataattattcccttcccttgtaaagaaagaagaaaaaaaaattgggaaattaatatgattgcatttgaaggtatttttgttggatttataaatgtttttaataattattattattccttttcttcataaagaaagagaaaaactaaaaaatattgggaaattaacatgattgcatttgaaggtttccttgtttgtgaagcttaatggaatattcatgtataaaaccatgcataattgcttatatttgtttgatatgaagaattgttattaattaattttatttatgcttatagaatattaggcaccatttattttaaaaatactctataagtatttataatgtgctggctattatttgctttacaattttagatacaacatatatattatgaactgaaattatttgactaatattattataaaagtcttactataactcattccacaaacaaatttgataataaacacatttaatttcatgtaatggtatgagtgacaacactaaaaagattttaaagtgtagtactgtaattaacatataatctttaacctgttaaaatctagtgtttggatattgtaatgatctctttagaaattagaaatatatatcttttgggtaggtgtaaattgtgtggtctcaagttccaatgagcattggaaatggtctagtttgctgacttgatgtcatagagttagattattgatacagccatataatatatctattgctatcatggataataaaatatgtatagatataatccatgctatatataaaagcatttcacttttggtattatttagcttcatcaatactgtgtcatcaaatataatgtatagctctagaagatttggtattggaatcttactaattatcacatgagagctatataaaaatgatcatttttgtgctttgtgtcctgctgtttatttggttcttcaatatccattttcttgctttgattgagctcttattaattaatcatctttatccaattcgatccatagttatctccactgaaatgaaataaaagaaaaaattaaattacttaattttatagtagtgttacaaattaatgacatttgtttataatactaattaataagtacatcttcttttgctggtttgtttgcttttttagaaagcatttgtattctattagaatatataaggctgctattgtttccattttgcacaagtgtggagggtttgcatgttgtgcaaatattaaaattggttttgcagctttttagtttcgaagtagtgatgattagcttttatcaatttaaattagtatatagatttgttaaggatattatatatgtgtaatcactgtaattatcatgttggttaaggttggcaactaataattttttttatgttggaagtacataataccttttcaaccagatgtgctttacttacatgtatatgctttctaactggcattgtttgattcttgttttccttgatcttctctagtaaatcacttctattaaaatagatttgtggccaatccaaaaaaaaaaaaagagaaagaataagaaaaccaataatccttaattatatatatttatataaaaaaattgttaagtagtttcaaaagatttttcacaaattttcatctgtttagataattaaggtgttaaaattatgattcaaataattaattacatgcataatatttgttttaatacttacatgtgtgttgattcgctattttaatattttaaattatatacaagaaacgtcacttttgccaatatatttttgtgctgacaaaagtttagtattgcatttggtaaaatggaatttacttcagtagtgttggttaatcaatattggtattagaacttttgccagcacaaaatgaaaagtactagcaaaaatgacttttcttagcgtataaatgtactggtaaaagttagattttagtcactgcaaatgtgtgcaggtaaaactttgacctttttgtcagcatagtaacttttactagcgcagtagcgaacatgcgctagtaaaaatgatatttcttgtagtgaattttattatgaatttcttatagtttgacaagttcagtgtaattatatatattacatattttaagtaacaaaaatacttattagtagtagtattacagtgatactatactacatgtataaaaatatatggtaaattagtatatttataagcgtggcatatattcacgtggtttgatggtggtgtttgaagatttggatttggtatttgcgtaaacattgttttgttatatatatagcctaattaattagctgattaattagcgtatctttgaggagtagtagtactgctagtgttgttgtctctgcatattctcttggtctctctacttaataataatgcaatcttaatcccttcttttcagtccattgtctccctcttttgtacttatttattctaatgctttttcttattctatataattccattaaacaaattggttttctctatatgggaaaagttatctttatattcccatataatatcttccattatcaatttatatttgattccttcgtatcttgtacatctatatagtttatgccaaagaatcctggttttggataaaattttgtttaagcctcaacttcatgcatgttaatttgtaataggtaacttctcttaattttacacatatttatattcctttcagctaaatatgataaggaaaaactgttgttatggcttcttagtgtgatctgttttaatttctctcataaaaatacatgatttcaattcatgtcccactttttatttgcaaaaaatacaaacatgcatatatgtatatatatatatgcaagattgcacgtgcaaatcaccttgtttgaacattttttagtattgaaaatttgttataagttgttaactaaattgttttgtttgtgctgactatatacgttgacctatcgacccttaaattgttatcatgtttgattttatttaaaagtgtgacattatacgtttaattttatgtgatgtgaatcatggagtattgatctaataagagcacaatacctaactagctagctattagtacagaaattagtgaaatgctaactgtattttggtgtcttaaattgaaatttctgttaaaaagtagtgtacatgtcaattaatttaatttatattaaatattttaattatttttattgactcgttaaacacaattactttttagatcattaaattatagtattaaggggtttaaagtgtcaaatagtaatctttatgatattatttacgttgcaaacttttgtgtgtggtggagtgagtcatgtagagttaactcaaggtggttaaggtggttgtgtgtgtattttttttttcttcagaagaaaaataatgaaaaagaaaagagtcccgggtagagcgggtggtggtgggaggtgagattgtttgatgtctcatctctcacatggactcccgcagttttaggtgtggagcagctttttcagtgcagtgtattgtaagtatatgtgtgtctcttctataataacatcccaacctaattaatattattaatattatattaataataaccctataaatattattaatttcgaaaaaagaaaaaactccacttgactagttgtggtttttattaaacacacagacacaaaacatatggggtctgatctctgagtagagagactgtgtatctgtgtgtgtgtgtgtgaactgtggtctctctctctctggtattaagtagtgcttgtcatattttccatgggatcgatcagttctctgtcgtgggtctccatgcttcatcattgcgtgcacgtgtctgttacctatctcccgttttactctctatatgggtcccaatttcttacataattctactcatttgattaaattttcaaaaccatttcatcaattttagtgttgcaaaccaatttatttatttttaatttggggaatcctatatctctcttaaatagatgcctaaacaagatttactcatttttgttttctttgtcaaatagagataattaaaaaaaataaaataaataaaaggggaagagaggggcggtgggggacgtgcctggattcacgccaagtcttaatcactttctgtctgagatatgagttaattatatgatttgatttgattggtttgcccgtaccgtcttgtcgattctgaccaaaagaaaagaaaaaaaaaagagtgtcactctcaatactctgacttgacaaacgacgggaccagacactgagagtgagtgactcactgagtttagtaagtgtgtgtctaaattctcatctcttatgaatcaatcgttctaaagtgggcccatattttttctataattgggccccggaccgggcctagcatgggccttttatagctttgtgcgcccacgaatggcattactagtagtactactactactactacttctactgcctttgtctgccatttcagtttgctttattttctaatgtattctcttatgagtacgaactatcaattaccactaacaaagctaatgatgcttgtttttaagttttctttatacgaggaatcttatagctagatcatatctttttcttaattgtatataatactactcatgtttggattgtgatgaattaagtatgatgacttactccttatcaattagttttaagatagaaccatgattctcaacatggtattagaattgctttcgatccacacctattagatagttagctagctgcaaacgagcaaaatggtactcccagttgcgagctaaaggaatatataaaaaatatagactgctctactctttttatttgtggtcacttatcttttaataataatatattatgctctatatgatgggtttaaagtttgaaaccattttcttttgatttgttaacacgttaatttattcattatatcattgatgtttgttgtacctgatcttcatcatttcatttccatgaaacattggagaatggggtgaccccatatttagttgttgtacgtaatatctatataattcttttaatttagaattttgtgctctattttataataatatatatatatatacatatacagatgaaggtggtgcatcttcggaagaagagttaagtggaggagaggtagaaggaggacaacaacaacaacaagagtgtcaactcagaagtgaagatcgtgatcttaaagataagcttttaagaaggtatggcagccatatcggtacgttaaaactcgaattttctaagaaaaaaaagaaaggaaagctaccaagagaagctaggcaaacccttcttgactggtggaatcttcactataaatggccttatccaacggtacgtacgtatacgtaacctaatcaaatttattaccttatcttatattattttgcatggtttacatataatcatgtagaattaatttttttttaatataattattcatgataaataggaagcggataagaatgcacttgctgagacaacaggattagatcagaagcaaatcaacaactggtttatcaaccaaagaaagcgccattggaagccttcggagaacatgcaattcgcggtcatggataatctttctggacaattttacagggatgactgatctgatgatcgatctgaggtccaatatttttgtacattcttatcttatttgaactttatattagacctctctcatccccattctatatctatatatatatatatatatatatatttaaactaaaaaaaaaactatgaaactataaagaaaaattaatgtttatatacgctagctaattaagccttcatgacttgttctgtatccattgtgacattattgaatgaattattgcttcttaatttccctcaaaagaaaaagaaaattggtgggaaatataagcctgaacgaatattttgaaaatgtgatatttttcatgggagctcattttaattgttgtgcccaatttcaagttaaaactccctaaaaattcttaatttttattaaaatccaaacaaatgcaaataatcaatatccactttggtgagtctaccacttactacttcaatcaattctactacttaatacaatcaataataaattttttcatttcattttaattaataataattttattataaatttcattatgttagaaactgtaggaaagaaaattacagttatgcctacaccaactaaaaattatatcaatattaattaggggtggcaagatagatttcggcacatgaattttatgggttagggtttgtaaataaatgacccaatacctcgggcccaccgattcctgagttgacttccacatccaagccaactttattcaattgcatatcttctaaaacaagaacaggaaagctaactttccatgttcaagaccttaattatttgtatattatgattaaaaagagggaggaagacgaaagaggaagaaatagcagaggcagaggcaaacattgtcttgatgtatcacgcaaaatagaagaggcagctgctaggcctcaacactgtacagtgaagagtggcagaccacattgttagaagacatgtcctttgtccaacttcacgtacgact

SEQ ID NO: 18930 - DNA, 5862 bp, Cannabis sativa
  modified_base (5817)..(5831): a, c, t, g, unknown or other
taattggatatccaactttttataattggattggattggatcggttcagttcaattggattggattggatcggttcagttcaattggattggatgatgcccacccccatgtaaaactgtataataaactagaaattaatctattatttgatagatgaattatctagagattattatatgtgaaaaaatttaaataataacaaaaatagcaagaaagacaataatgtgaaacataatttaaagaagatgagaagacattgggaaaaagaaatcgcaataatgacaataatgtgtaagctcgaaagtaaaatttgtctggtaagatcactactacttttctaattattgcttttgttgtgaaaaactctgttatcaagaatttgagatccaattttgatgaatttgagggaatatgtgcactttggtggtgtaaaagtagagatggaaggcattattgatgagattttttgggggaatcagctatgttttgggggcaaatttaccaataaatttttttgaaggtttcgtcttgagggtgtgaaaggataagggtatagataaaattaaaaataaaaaaaaaaattaaaaagagaacacatgatactaattaaaaagattttaaaattaaatatatggatatagatattttgtcactacaaaatttacataaaaatttaaatgcacaaaataaattacataacaaatttttcctaaaaaatgagtaattttttttttctttttgctcaagaaaaatgagtattttttttgtttaactaattatcaaaaacttaccttccatctgtaattagaaaaaaaaaatgaccttgttaaaaatccagtgaaataaagaagaagaaatagtcttgcaccaaatatataagcagaatagggtttggttctgggattttcaagagcctttggaaagagattggggcggatgtttctaagcaccaagtgtttataaaaataaaattagagacagaacaattggcattaaaaaaaaaagcttgcaaagatgatagataagtaattttgcaaaaactttattctacttcaaatggaagaaaggccatctttcaaatcttaaaaagtcctaatgcatatatttttcaaaaatataggaaaaagtgaaaattaattaataaataacataaaattaaatatatttttaaaaggcacattcttatttcttatttttgtaaaaactagtaagtataaaataccacatagtgtaagagcaaacctcatgtatctcctaagagctatttatgaaatatatatgtaataaaataatgattttaaaaatgtctaacactaaaacttaataataataataataaataataaattaaatgataaaaataatgttatatgtctttgtagtttccataagtataataaaaacattataatagtgtataagtgatctatatataactataatatatacaaatatattcacataaaaaaaatataataccttcttgatttaaaggttgagagtgagagtggatataatgaagatggcgtagacaaagaagaccacagcgttggtgtagccatcattgatggccaaaaaagaaaaactatattgaagaagagaatggagaaaatttttaagtttcaagaagagaacagaatagaaaaaacgtatatataatgatacgttataatataggtttaggtatatataatgataatttttttagaaaaaaacaaagtttgaatttaagtatttataaaataatattataaattagttatattattatttgaaatcaaatatattgttttcaaaaaaaaatcaaatatatattaaaaattacttttaaaatatatataacattaaaaataattttttctatgccatactaaaaaatatctattagatattatattaattttattaattaaccaaatttaaatattatctattaactttattttgaaaaaaactgtatgcatgttaactatactaggctgattttgtatatgcatatttgttaattttaataaatatttccatacaaaacaaatgaatagaatgaaaattatttccattctatttcattatcttcaactaaatgccaccttaataaaaagaggtcaattttttagtcatgtcctctgacatgggattagtctctattctttagagttttgttcttttgtttcattatttcttttctctatggcttcaagcagccgattaccaaccggtttggaacagcagtggaaacacatttgtctagaagaagaagaagaaaatgaagtgacttacgaggaggaggaaatcgaagagattgaatttgatgattgttggtgtctcgttggacgattattaactgggaaagtttctgattttcagatattccaaaacatgatagttgatctatggaaaccggggaaaggcatgtatgttaagattcttgaacaaaactggtttttatttcaattttaccctgaaatagatatacagcgtgttattacgggcagtccgtggacgtatgatcgcaagcaacttattattgaacgactcaaacaaggagaaaacccgagaactattcctctgaacaaactcgatatatgggtgcaggtccatgatttacagactagtttcaaaactgaaagggttgtttgtcaagcagataattacattggaatgtttcacgaatcggatcctaacaattttcaaggtatttggcgtgaatatttacgtgtccgtgttcgattgaatgttggaaaaccgctaaagaggcgtatgaagttcaagaagaaaaatggtgatgtgttcaacgccaatttcaaatacgagagagttcccaccttctgttttatttgcggcatcatgggacattcggagagattctgcagtacgtcgtatgacatgatcacaaaaccgtacagtaatgaaatgcgtgctccttcaaaacgtcaaagcttcctcacagctttcccctggctttgcaccgaaaaacttgctccttcctctgctggtagcaataatttgccacaatctcctaccttcaatgccatgcctcaattccaggctgaaatcacgagtccaaccaggcaaagcaatcaaacacctgcaacaaaagtgattttccagcaatctatccttaattctaggcacacgggtcaatcaagttcgaaaaacattgatgaggcacctttgaatattcatgagaatgattccacatttatgtccgaggatgatatgaatctttatgatttgaagaggaaaatggttgacattctctccaataaagagtcggctatatcagtggaagatgatgtggattgtatttctgagccaaataattttcataatattgatgttattgggcttctagaaaaatggggaataggtgggtcctaatgtccaggcccaccaatcattatgaatactattagctgaaattgtcacgggcttgggaacccacgggccattcaactccttgttgatatctgcattcaaaagaagcccaattttatcctttgtgaaactttatgcaacaatgaaattgtggataggctcaaaattcggttgggctttgaaaattattttactgtgccagcccaaggtagaaaaggaggattagcttttttatggaaaatctcttctgatgctcatttactcaagttctctgcccaccatatagacatggaagtccatatcccacgttacgatcactggcgtctcactggattttacggtgaaccaaatcgctctctacgtcatacaacttgggagctcctgcgtgacctggccgatgattcgaacttgccatggtgcattatcggtgacttcaacaacatcactactcatgaagacaagaaagggggtcggctctatccagaatcactaatcaatggctttaacgcagctctccatgactgccgactgtgtgagcttcagttacgtggtcacagatatacttgggaacgtggtagagggactcaaaatcacattgaaataaggttagacaaagcttttgctacccaatcttggctaactatttttaatgaggctagtttgttaaattttgatttttcgtcctccgatcatacacctatctttcttgaacctgctcctgctgttatgagtaaaccgatcactattttacgctataaaaacgcttggtcccgtgagcctttatgtggtcaaattgtccgaaactgttgggaggcaaatgtccatctctctcttgttgataaaacaaaactatgccttgaaactttgattgattggggtcgtgatcttaccgggcattttaagaagaggctgtcaaatagtaagaaaagattagcaagactctagataagtgacaatccgggttcaaatgaagattttttgagtgaacaatgtaactattttgagattttagctcagcaagaaatctattggaagcaacggtccaaatagttttggttaaatggaggggataagaatagcaaatatttttacgccaccgcaagctcacgcaaacgaaataatcaaattgtgcagctccaagatagtgatggagtttggaaaggctggaacacagggctagaccaggtaattgttgattatttcttagctctttatgctactgatcgtgctatttgcggctttgtagtcaatggtatttgccgctcggttacagctgaacaaaatgacagtctactctgtccaattacagccgaagaagtcaagcaagccatcttccaaatgcatcccgacaaagcccccggtcctaatggcatgaaccctgacttttatcaaaaacattgggatacggttggtactgacattacccaacttgttactgattttttcaataatgaatacatgccgacaggactcaatgacactcatctagtgttgatcccaaaaaaagaagaatttatccactatgggtgatttgcggcctattgctccttgcaatgtatcctataagattctttctaaggtccttgccaataggatgagagttttaattgatcatgttatttctccaactcaaagtgcgtttattccaggcaggcttatctcggataatataatgattggctttgaaattatgcattatctcaagcggaaaacaaagggcaagaaaggtttcatggctatgaaactagatatgagcaaggcttatgatcgagttgaatgggactacttgtatgcggtcatgcaccgtatggggtttgctggaaaatggatcaatcttattatgaaatgtgttacttctgtttgatactctatctttcatgatgggcatatgttggggccgataattactgcccgtggaatccgccaaggtgatcctttattaacttatttgttcattatttgtgctgaaggcttttcttccttgatcaagaagtttgaagatgaccatgtcattcaaggttgttgtgttgccaaaggagcccctcctataacacacatgctatttgctgatgatagctacctcttttgtcaagcaagtcctaatacggctgtcaaaatcaagcaaatgcttcactccgttgaattagcatctggtcagaaagtgaatgtatcaaagtcctctatcttcttcagccccaacaatgaagcaaaccatcgaaatcaaatctgcattgttcttgtcatgacagaagctactgatggctctctttatttgggattaccaaacattattggtagaaagaaaactgttatccttggttttctcaaaaataagattattaattgtctcaacagttggaatggaaaatttctatcccgtgcaggaaaggaagttctgttgggttttatgccctaaatataactcatttcaatataatnnnnnnnnnnnnnnnataaagattagaaataacatttaatgttgca

SEQ ID NO: 18931 - DNA, 1820 bp, Cannabis sativa
tttagcgtcacccggaacagcgtcggtagcgaatttcgccaataccgacgctgaaagcccttaaaaaccgcctctaaagcccaattttgtagtagtgaaagctaaatctcaagacacacaatgacggtcgtgtgacactacatgtgtgacgtttatactattcaatgagtacaaatgttcctttttagagaaaaaacccaaaaatttaaattttaaagtactttcagcccttttaaccacctacattagggataaaaattagctttacactcctttagctaattttattcttgcataataagagtaattttcattttctccctggaatcttcgaagaaaattttgcttgaagctcgattttcaaaatctgtctaggcgcatttaatagttgtcaatctgtgagttagttttcttttctttatgcaattaattttctttaaatacatacattattttttgaatttcttactataaaattttaggttcttaaatttgttcttgactgatctgagattaggagatattaggaatttttactttgattgatgtacgcacaggtcttttaagcttttaatttcttaccattttggccaaaaataatttgaattttcccaaacgtgaatttctaaaaaatttcaagatatccatcgtgtttcaaacttttaaacttaagaatttcattattgtaataaaattaattcttccccttttccctttgaatcgacccggtttacatattagatatgttttccttttgtatctccgtccatcgctcacattttgtcttccttcttttatagattaactctcgtgagttttggggatcatcacatcgacccgaatctcctatgtctcctggccataagctttttacgtgaactatttcatgatccaactttctataaaaataatattgaatctctgcaatacctcacattgagaaagccaaatctatcttatgtcataaataaatatagtcaatatatgcaacaatcaacaaatacacactagacttcttgcaaacgagtcccaagatatatcaaaagaaccattcatctcggcattatcttcaaatcaacacaacatcttacattggaaggttattgtgatacagattgagcctgcaatttagatgataaaaaatctactacttgatattgtgttatgcttggatccaatctaaataacatatgggggcaaacaactaaacagcagttgctcgctcaagtacagaatctgaatatcaatcttaatttgccttctactgctactgaagtagtttggacatcttctgttctaaaagaacttggcattacacctcctactacctctaccatttagtgtgataattaggatacccaacaacttgcctctaatcttgtttttcactcaaaaggacgaaagcacattaaagtagatgttcactatgttcaggacttagtctctctcagcataaaataacaatttcccccataccaatagaggaacaatcagctgatcttctcactaaacctctaacttttgcaaagttttatttcctattgttggaaattatttgttctaactaacacacttaaagaagcaaaattaatattatatgcaaattggtatttttctaaaatttattattttatgtgtccacaaaataatagtgtcaattttataaactaatacaattttgcaatctttgtttcagcccaaacacaaaaggttcgacccactaagcttcagcccaagagaacttttctctctccaatcaacacttgcacccttttctttgaggaaattacacactatactctttttatattgtcctcttt

SEQ ID NO: 18932 - DNA, 5553 bp, Cannabis sativa
  modified_base (2396)..(2397): a, c, t, g, unknown or other
  modified_base (5488)..(5522): a, c, t, g, unknown or other
aagagttttttttttcttttcactgtctcaccattttttgaacattttcctttcaggctagttcatgataactcattcttttcttctttcttgattctgatcgttccagatttgggtcacaacagattagacccaaagttctttcaagttctgatatagagaataaggttataattggggaggcagaaattataggggtatgatattttgaagggtggggatctcgatgcccttttattctataataaaatatcaaactgcatttgcaaatttgggaatggaaaggaaagacagattaagtaaaagaaaagagacatgatctgcaaataatcttgctccttaatttgtctaatggaaatactgacaaagccacttaatcactgaaataacattacaatttctatcaatctaatttcttccaaaattctatttatatttcttaaaaattaatatgaattatgtcacatactctgttaagatggagaaacaccgaaggttattgtgaaggagacataaagagactgacagagaggtcggatgagggtgagatgatcatcacacgcagagctaggttgtggtcgttcgcctggggtcgcttggttctcatctactgtaaccctaaaattgcttaaaaatttaatttatacaaagaaaatatattaattaatataaatattatttaaaaagaaataataaaataattacggggaggtttgtttgctaatcaataaatgaatctgtatctatatatataagaaaaaagaagaagataattctgaaacaggataattatgtatgattcgttcacccttttatctttatctttaactaataagtctaacaatttgtttcattctcttctcctaatttttagcataattggttatttttgggatgttaacggaatgtgtatttttttttttaataaaataatgttatgttaacggaatgtgtatttttttgactaaacttttgttaaaaaaataatataaattaattgggaaaattgggaatattctgttaaagttaacggaggaaacaaaacaacatcgttaaaccaagaattaccgttagatagacacttttaatatataaagatatattttaaaacagatgaaggtatagatattatactacataaataaatattataaaaattcttgattgtatagtcttacatcccatttgatttggtgtaatcaattttggaatggaatggaagtttcaattttaatgtaatgtatattacactacttattagagttaattttacattgttaatgtgtgaaaataaattgtcatatataagatgaatgaactagtcttcccattacttagttttgagatggaacctcgaagggcggaaccagaatcaaatattagggatagtcttcccattgcttggttttgagatggaacctcgaagggcggaaccaggatcaaatattaggggtggccaaaactatattaaaatttaagtaacaaattttttgaaaagtactgttaattaatacttaaaattaaaatataagcgtctcttttttatatcaagaatgtcatctataaatgattattttacaaattctttcaagaatttgtttttttaatatagactatagcaaaaattcacttaagaatttatatttcatgttgttataaaatgtagtcttcactatattcatgattgaaaaagattattttgtggtaattgtaaaaattattagtataagaataaaaattatcactttatatataagaaatttttttttttttttctatttttaccaaccactatcttaagttaaaaataattgccaaaactataaaatagaaagtttttgcaagtattaaaattgttcttaactttttatttaatattaaaatttttaatatttgccatatcattacatttttatatacagatactaatatcatatatgtgtatattatatacatgcagctattttacactcaacgtttgttttaatatttactttcaaattgttttatatttagttttggtttgactaacaacagccaaagaaaactatgaataaaatagtgtacatatatatttggggtggggggtcagggccacccttggctacaatatacctccgcccctgggaacctcattcatcttatctcaaattctaacatggtatcagagtcacttgtgattcgttgtgagcccaaattgtcactggtccaaaaaactgtttgtgattcgttgtgagctaaagtactgtcggtccaaaaaaaatacttctgctatctcccctttaacctctatttgggaccttttcgccaatacgttcgaccctgtggtctcttaaagatcgtttattatacccatactttccagacccaaacgtgaggagagtgtattagagttnntcccacattgctaatgtgtagaaataaattatcatatataagatgaataagctactcctcctattgtcaattggttttgagatggaaccacattcaccatatctcaaattctaatactacttattagaatcctaattacatagctatatatgacgaataaaaattacaatttgattaaatgattattcgacctttctatcttttactatacctttttttgtcctttctcatctcatattattactcttttatgtttatttgctaagtcttgttttattgtataaataaaaattcacaccattgaaataaacgagtagaaattattatttactttcactttctccctttttttcttctctatattatattgttcataataatctttatgaaaatttgcagcaaaagtcatcaaattattcactttgttgcagattagtccctaatcttaagaattatcaataataatacttaagctcgcttatcttgtaagttcattcattccctttctgttagtgtaagttaacttacacgtatacacctctagtttaaatttcaatcccctttttttgttttattgctttctcttcaataataaaatgaaaacataaaataaattacaaagttaaaaattaaacctacaactaattaatcaaatacttattaaaccctttgataaaaaaaaaaaaagccctttattaaacccaaacctttatagaaaaacataagcctaattcctaaatcgagaggaagctttgaagggaaggttctcatagtagccaaaggtaaaatcgaagtgtgggttcttacagtagcggtggttggaagggaaaatcgagaggaagcttataagattcaaatcgtggtaggagaagaatggacgtggagggttcttacaatagcttggtcgtggaaggtcgaaaggagtgattggttccgtcaatgaaaggggtcctcaaaattgttactatggcattttgtggattgcaagaacatcttagacagaagtaaacccgggacatcgttttaggaagtgcatgcttgcatatgtaagcccttgatttttatcccaatcttttgttattattattactgttgttgttgttgttattgttgtttttgcctagaatttctcccaaaatatgtggcaattcaggagcgaggcaggtagcaatgggacccacactacgggacacgccacctaaattactccgggagtctaatatttcaaaagaataatgacagattagtaatctccgagagggtctaactagagaacggatatctcttgtctttttctctccgtgagtgaattcgactaggagagggataagagaggacaggtggagtgtaacacactgctcaaggctaaaactactgtacacacatttaatgcggtatggggaagagcatctgacaccttatgttgaacaaacatgcttaagggtttaaatccataatttcctgacttcacgagaccccatacatcaaatgatggctgcataaatgagttttcaaatcataaataagggataagtcaagtctcaccaaatacctatagacggccccaatttaccataagcagtaggtaatcatgtcctaagattaaatttaggaaattgtgcaaagtatggttcatacaaacacgacaatggtggtcttttaccaccattaagagcctataaatactccaatgatgtatagcaaaggggataaggaaattctctataataaatactctcattaatacaatgactcgtggactaaggctcattaataccccaaccacgtaaaaatcctctcttctaacatttattaattacttcacacaactttaattaatagttgctgaaaacctcggtcaatattttagtactttcattgagagttgtagaaagcttaccaaaagaggaaatcataaatagcctcatggtacaatggtggtgacaaggaacacttcgttccacaacaacctaattacccaaaggatccagaagaagaagaggcagcttctagggtgaatgttgaaggtgaaggagacaccaatgaccccgaggatacaaactaagaatcaaatccaagataactgtggtaaaaaccatttacatggagcaaccataagttttctattgcaaggacaagaagagaaattctgataataagtctattcaatatacttaagcaaacttctcgatcctagtatcataggtttgggactatctgaacctatagcttgtggtataccttataatttacttactctggtacaagcaacttacttcagtaagatgctgaagcatttttgtaatggctaactctaaaagaattcttttggctctcaaaaatagagtttatttatctaaggaacaatttcaaccattccaaaaaagataaaggccaaggaaatatttccttaagcatcaataatgagaggtctcatgtatacttctgtatacattagaccagacacatgttgttgagtgagagttatgagtaggtatcagtttaatccaggaaaagaacattgaaaaataatcaaataaatcttaagattaaagtaggacctatatggtagtttataagggtgattttttgaaactctttacactacattgactaagatttctagatttgtattaatgctagaaagtctaaatttaggattgtgattactctgggggtggagcagtaattttaggagaagtgtaaaaacctatccaaagtctttaattctactagtgagactgaatgttaaagtggcccagaaggctaccagatacttattcagcctatggaaagttctatataatttttggcattatttcagtcatggattaactactagtgttactttctgataacacatatagttgccaaatagtaaagaatccaataccctaagaggagtaaacatatagatagaaatttcacaacatcaagaattttgtgactaaggaggatgtaatggtggagaagattgatactgaatacaatctgtcagatcctattacaaagataatactacatactatacttgatttggacatgaaggagataatattaattgaaatgtacttttagttttatattagtnnnnnnnnnnnnnnnnnnnnnnnnnnnnnnnnnnntaaaactcattttaatataatcagttttact

SEQ ID NO: 18933 - DNA, 5528 bp, Cannabis sativa
tagtactttcacgctcattagaactagtttttaatgatttttattagttattaattttttttttttatttattttattttatgcactttagaatatttggaggagtgaaaaaggcatccactcttgacttaagagtagaaaatgaagcttttttgtaattaaaatatactgtgtagcaatattagtagcattagatagaattttttctacaaaatttgttgtacatgctcattattttaactcattagaagttgtgtccgcttttgaataaagattttttttttttttttttcagtgatctaggattatagtttatagcaagtatattactcaaatttctaagagtgtttctgatctatatatattggacaactaatgtgagtgtatatagattaggtgtatatgctcttcggatgcattgacatattatttggctagataattttttattcttttctttgctaggtataattatttagacattatttggttttcaattatatcagtcattgctttataaaaaatagttaataccaaaaaatatgattttatgaaaacagtgcaaaaaaaattatttctcaaaaacatggttcaaatgagtatttagtgaaaatagaaggtacaaaatagaatttatgtcttttgggttatgatactgtgcgactaccggggtttagggttttaacatttgcagagatgagtggagctggagctccagattttttctacagagaagctcaacgcctgggctatgtcgctcgttctgcttttaaggtaccgtcttctttctttcattaccatttgtgtgtgtgagtgtatgtgtatttgatatctgtatatttgtgtgttcagtgttctattgctctgtttctaagttcttcctttggttcttttaaatacagttacttcagatacagaagcagtacaagctcataacatcgggatcatcagttctcgatcttggttgtgctcctggtgcttggcttcaggtcccttcagcttcatccacccacccctttcaattgccgctatttcatttttattttgattaaattttaagggatttcctttattgttgttgatttttattatggcatttcttccaaaactatgcaattcccaggtagcttgtcaaagcttgggtcccctaaataaaggtggcgttgttgtgggcattgatgttaaggtctggttgcctccatttaagttgttttaattcatttattaatttctttataagcaaagttgaaacatttggtggtcacgtaagagcttttgctgataatctaaactgttttgaagatattgatgagtaaaagaaaaaaatggaatatgcagaacagaaggtgaaggttcctcagcttcactgtgattcaagagctcaaactgtttgtgctgatgttatgaacctacccagaaatcgaattcgggcactttctcctcaggttcgtctttagatgagttttctttttcaataatggaattaatcacttgaaggcattttactctagaagatttcatcttagtctcaaaaatgtgggactggaaaaataatatgatatgcttgtgctatggcttggagcagagaggcttttctgtgatcctgtctgatatgtgtcccccagtttctggaatcactaccaaggattcggctttatcagttgaattaggtatgcgagctttggaaatcgctgtgggtagaacctccttagagcagacagaggctaatttggaagatttagttactggtgtggatgatgatgatgttaatggtctactacaaaggggtggtcaccttgtaattaagcttttagagagtgaagatgggcaaggtatcatctctgttttgtacttttctttgataaataatatatggttcttttagttctggtatctttgagtgtaatttcttgtgaatgcagaattcagcaggatttgcaaaccattgtttagaaaagcgtcatggttgagacctaaagctacaagatcttcatcaagggagatttatttgatttgtcaaggtctacagtcacaagcgaagaagtagagtgtcacacaaccattaatcaaatatttttatttagcctatgaacatgaacaacattaataatttcagtattttctcctctgtagctcagtattctcctcctttagttttcttttaataataaaacttattacattcccggtcaaaaaatgaaatgagaacttataaaaaaaaattaaggttactatacaaaattcgtagtaatatatcagaaaaacactctttgtccccatttacatttgtcttcacattcaagaaagatcaccgaatctgggttcgtccttttgaccaaagaccaatatctttaaccggtgtctgaaaaacagttatggaattgagttagtcaatcatatatcatcaacatagtcaatcatatatcactgcaatttaacaaaaaacatagtccaatccagtcatgcttaccggtgttttcatggatgggaagatattccagaatctcagtgtttcatctccagcaccagttactatggtctgcagcattgtgatgaccattttaattagattcttattaataaaggaaagggtaattataaacatagtacatgcaagatttgctctgagggaaattcgatattacctgaccatcaggtgacattgcaagatatagcactcgcatgttatggccagttagagtggctacctataaataaagaaaagaaaaagagaaatcattttgagaattctgttgacaggttaaaaattctaaacgaaaagtattacagagtttattatactatacatacctttcccattgatggatacttccaaaccataatttgattctgggaataaccatgagtgctgactatctcattaacgttcttactccatgcaaggttgcatacctgcataatagttcaaaccttagttatcatagagctgcagatatgtacagatagataaaaaaacatgaaactcatataagaaaaccaacctggcttcctgtgtcgacattgttcagttggtggccgtttgtggtgttccaaaagcgaatacatctgtcggccgtcccgcctccagatgcaagaaggccactctggtgaggtgaccaagcaatggccttaacagctgctgtatgttctgtcaattttagaattggttgttggctgtgctgattccacaccaatagctggccgataacaaaagcccaaaaaagttagcaaattgtgtagagataaaagataccaaaaacttagccatgagatgtaccagcatacctgattatcattgccacctgaagcgagttccctgtcatcatgagaccacttaagcccacatacctataagaatttgataactaaacacgttaacttagttaattgtgaaaaatctttcctataaggagaatgttttgtatagttatattgcacacacctcagacttatggccaacaagcttgctgatgtagtcactggagacccgaagatcatgttgaaatatgttcctgtctctgcttccagaagctaaaatgcgtgagttccatgccaaaacacctgttcttgtttgatgaccacccattgttcgtacccttttgcattgtgttccgtcccaaacctgtacttggccaaggcttgtaccgaccgctatgtaagatccctcccgggtccactggacagagcatactccatcattaggtcccaaatcgcacaattttgttacctgagggaaaaataagagagtaagaaaacaagtaacgttactgactcgatatagttggacacaacaacataccactacaagggtatttttttaccttgctattagatgcactccatagataaacacaggttcccaatccaacggcaagcatattttgtgaggaccaatcaacaaggttcaaatagaagtcatcttgcagagatggagcatctaaaacctgcaacaaaattcataataagccaccaaaaatttttttaaaaaaaagtagagcgtattctatcaaaaggcaaatatgccacaaaattcattgctgcagaaacatatcatatcaaaagacaaatacatatgaatggcggttgtaatttttatcaaaacagaaattgaattacttaccttatggggagttttagggaccttccgtggtggcttgggaggggtagaaatttcagaagagaaaccggagtcgtggcccaaaatggaaggggaaaatggagagctaggacccgaatgatcggtcttaaacctcaacatgtttttactgggactactcatcggggaagacccgagaacttggttaccacctgcaggagaaaaagacgcaaagtcagacccgaaaagttcagatttcaacaatctcgagtaggcctcattgctgccttctttaaccggtgaggccttctctattaacccaaaagtgtggagcctagacgaagatcgacaaggaatgaatcgatcactacaggtggaagatttggatggtgaagataagcttgaaaggccccgaaaggaacccgaaaaggtctcgagacgaagagatgtctcggacatcccagatgggaggtttaaccctgttttcttcgtctgaggtggggaatccattgttgagagcttgtaatagtgagaaagatggttatggagtttgaatgaaaaagaaagaaagagagaaatatggggatatcggaaaggccactctctgcaaccaaagaggccttttttttcactaagtgtgagctcttttgtgtagccgaaggatctgtaacggtcgaattttggtagggtttataggcgcgggtttggaccttttttaatataataattaatggaacatacgtagtaaataaataattataaaactaaagggaaaaaaaaggtaataaataaataattacaaaaaaaaaggtaattacttatttatttttgttattctcttccatgtaatactggatctaacggtcaattgtattgatcaagctaattttagtaatcttgggtatagttaacgaattatgtagccgttgctctttttttatttattttttaaatatatatatagagagaacattttgtaatgggcagtaccgattgatagtactttacatatacaaactcattcagaaaaataataacaattagtaacaaaatactatacctagtatatccaaaaaaaaaaaaaaaatactatacctaaatcttaaaatttattcttatatattggtattagagttagttcttaggaagaaaacgtagttgattaatatatcaaaagttaaacctcacggtcattacataatatgtttaaagggacggtggatagcggaatatcaccaaacaccttgtgggtaaatacccacttagccacattatgggcgacaaaattacaaattcttttaatattagagaaaatacaactataaaataaaaaagagtgactattacaaaatgagacgtagttgtcaataacccaacaggactccttcccattgagtgcattgatcattactctcgaatcactctcaacaat

SEQ ID NO: 18934 - DNA, 1637 bp, Cannabis sativa
ataaaatattctaaatatgatcaaaactatttagttgtccaaattagattgtggcaaagattttgatgagatgtgtcacctatataaatataaatatagggtctcagtttccaagctcattactcattctgtaaacacaataaatctatttaaagagagttgagagaatttggaagtccgattacctacactaataagttttttttttttttttcagatccaaaagaagttctatatttcattgtgttcctagtcttatacgatctagtattaattcggcatacctattcctgactgtacacttaccaatctggatagattgttctaccaaagatattaagtaaagtgtgttgataatcttaactaatatatataaaagttagctcccacttttaatattatcacagacaattaatttttgttattttcttaaattaaattctcttatatacataatctcatatatataaatatatatatatatatatttatacttaatatttacattaaataacaatagatctctttagataagaaatagtatgtaaaatactatataattatacgtaattctaaaaaatagggtttaaggtcaccattctcaacaaatatatctatctcgatataaagttctcagtagatcctcatcggtagaagcttacttatagatttttttaataccatatatacttttggattatctatataaagaccccgaccatctcctttaagtagagattttatgttgacgatcgactatgttattgatagactagaatattaattgtattgagtttttaatattgattataaaaaattgctaatacaatttataagtaatatcatctcattagagtgatgaacactatatatagtacctaacaatgtttctaaaataaaagcttggtggatccgtacggaggaaaagaaagggggtataaaatccaagtccaagagaatgaaatattgtttccaaagttacattaatacgtttgtcaacaaacatctaacccaaatgttctattcgttttaaatgcgtgtcactttatagatttttttgagttttgtttactttttttttcatgtaaagtctgccggccttttattcgctatgataaaaagatggaataatgaataatcgaagactccatttcaaaaaaaaaaaaaaagaagaagaatcaaagacccataaagttgcatctacaaaaagctctcaaaatttgtggcttccatgactttagtccacctctttagtctttcccacaattcgtggctcacaacataattcaccttcatgtttaataattaaaataaaaacacaattcaccttcattactttttctatcatgcaccatgaaactcttctttgcgtttgaaaagtgatggtagaattgaacttgtgttaattggagataattaaataatttctttagggcgtgtttggaaagtgataatagaattgaatttaggtgtaattagaagtgattacaaaatttagcatattagtttgattagtacgtaattacacagtaacgtataattgaggagtaattacacagtataattaaagataattaagagattataattatactctccaattcacataaccaaaatgagaatatagtgtaattgtt

SEQ ID NO: 18935 - DNA, 5279 bp, Cannabis sativa
aagaaacttgcagttacttttctgccaaacttggtacactctacatggctcaaattctcccggtaagttgatacattccttcccagcatggaaaacagagtagccagcagcagcagcagcagcagcagcacgtcatatcaatccaattgcattgtattctcctttaactcatacagctatagttatggctgccaacatatcttctcatctcttccacttagcttaatcaactctcttggatactaggcaattcggtaacagtttacaagtgttaaccagacgacaaaaaaagaattgtacacgtccagaatggtgtcagggcctactaaaggttgaacccaattattttctcaggaatggcttttggcaaacaagtagcctttggtcactgccattctgaagatcgatcacccttgcctcccatcggatttgcgcggcaagcgtgcgtgccatctctatcgttccaaccttatcagaaagtacaacccatccctggagcaaatcaaaactcatgctattattatatctatcaataatgtagcaagctattaaatcagagcaacagcaaaatatcctaggagattgtccaatccgaacaacatgaaatgtatgttcagatctcgagaaacgttccagcctcaccagctatatacatataaattaaatatacaagtacttgcctcagggcgcaaaatacgatccatctccaaaagtaagtccctcatggtgcacctctctgaagacatatgtgaaagtagcccacttgcatgaagcatatcgtatgttcggggatatgtagggaaaggatcacacctacacaacaaaatatgcattaaatctaagagactaacatcaagctatgtaccacaactagtaagcatccatttatttgaccaacatctttagaagaaaacattggagtatagaagttttgtaaaaatattcacaaacaaaaaatagcaatttcaaaatggcaactttgaaatggagacatttaaaatgacctaaattttgtcaagtgtattgatgccaaaagctggttccatctcatgaaaagttttatgatatgacgcaggcccatcaaaacaaatccttgatgagtaccattaatttacaagtcacactaaagaaactacgaccaaaacttaccaatcatgcaacacaccggcaaaaccttgttctaaaatgagaggaagtgtattttgagctctgactggcacaacattcataacccacactgatttcctttcctctaaaaatgcagaatttaaacctccataatgagcattcatatccatcacattgcgtatcatgttaaatggaggtaaagggtcttcatctcccggtctctttgggtgatctgagaaaatcaagggtgtaagcaaagaccaataattttttagagctgttctccagacctgggaatcctcaaagaaatcatcgggctgaactcctgaaaggacaaaagattgtcactttataaaataggtaaacttaagaagtccaatcaaaaaatcgttgtaacgacacttaccatgaacttcaagctcagtggagctcaattgggaactagaagacctgttctgaattggaatccaccgtttgatggaggttccactaatacatgatacaaggggtcgataataagacaaagtctcatggccttctttacaaagtggtatagcaccctgcttgctacaataaataaataaaaaaaattatataaataagaaattactaagattctgcagataattcagcaaaagagaaatgtaaatagagtactgcaggaaattgaaaagataatgcgattagaaaaaatattaagagatagacttccccgggaagaaaaaaagaatatcctcaccgattcatatagcaattagcatcggaagttttctgccaaataaaagtttcatcttgctgagctagaaggatccaacagatatcctcggtcaattcttctattggtgttaacatgtttcttttcttggtactagatgaacttccatatggcttgcttgtaggcgatgttaaaacaaagtagccacctggcttgagtactcggtcaacttctagaagtaacatcccatctgattcatgaattactaacagtaagttcatgcaggctattattggaagaaagaagactgaaccattacatttaataagtcaaaaatataacttgattttttcctaaaaaattgaagaagaagaagaagaagaaggcagaacccccttggctaccattacaacaaccaccttttaatgcatgctcataaaacatttcccaaaggaaagagaggaagaaactcatatgaaattaaatttcaaatattttgaatacttttatgacacccatctaatatgattacatttcataaagataatccaagaatcatattgttgtttggtaccattagaaggcactgtcctgaaactaaaatgcatgattactaatcaagcaaaacaacaacttcagaacttcacatacacattcgcaccctaacaaatagtatttgtaggaaatcaacttttatcatttgataaaaatctagtgaccataatttattttgaagttttacaaaccataaatgctaccatttaatattcctagaattgctgatgcaaaagaaaattcctagaattgcggtcgttagattaaaatcaaaggataaaattgatttatatatattaaaaaaaaaaaaaactccagtaacggttcacatattaaacatacttttgtaattgtagcctctccaaaaagaaaacctgccaatatcttaagaaattacctttttggtcccaaagaataccacactgagcgcaatgaaccatgtcaaatgacaatgatggatatggaagctgtctagcaatgaagttgccaatcattgctgggagacctctctctagggccaactgaacttggcttccagttgcctcatatgccgcaatgcaaacaggcattactttcagagacagtaaatgagctccaaagctaccaaaaccacaaccaatatctagtacagtacgcacctgtaattttagaagattcaatgtaaatctagtgctctctatttattataataaatataaacacacaaatatccacatcagaatgtgtatattaattagtaaaaacatgtgatgtatagttaacttaagcaacatgacagctcttatttggatgcagaccacttagattgaaatggacaagtaactgataaactctatctgaaacccataatcacttctgtatgatacaaatatgagttacaaagtaacaacaaaattcagcgatcttgtatgatacaaatatgacttacaccagcttggataaactcataatcacttcctaatcctatcatttctgcaatttgacgagaataatcctttacaccatcaaagatcaaaccatcctctgaatgaaacgcaatttggttctcttccagcaacatcaacctggacaatttttctcaagttagacaacaagtttagcacatttctcaagaaactaaatctacatacatgattaaaaggagataccagaattacatactcctacacttttcaatgtaataattttaccttttggtcatgcttccagatgaaagaaactggtctttggttatcttcacattcccactccatatcacatccctaccagccggccatctcagaggaatcttgtagtccttgggaggacgaatcagacattgctctccttcctttgataattcacaatgccgatcaaactcctctccatctttgtacccggccaacaaatttgctgaaacattataacaaggcacattattttctctttctttaccacaaaggtctatctctctttggcgagtaggcgccaaaaagagagacctcagctccagatagtcaactgctgcctgctccttgagccttctatagtttatataaatgtcaggaaccgcaataggagttgcagaatcaaaggcacccgaagaagatgatcctaacactgcaattagcgcaagaactgaaaccaggcacaatagtaaccagctcagaggcggtctaggacccagaatgacagatactttgttgaaccagggacttctcatatccaaatcgatcgtccaatccagtctcaaaatcaaatttcagcaaaaacgccagtaaatctccgagaacagagaaaaacacaaccaatcattacacaaatacgtctgtgtatgttaccatggatctcaacaactcctacaagcatcgaaacagtacacacttccttccaaacaacatgtgcagatcttcttccttcaattttaacattaaactcacagtttcatatatatacccatcagatacataacaagaaacacaaagcttagatgacaatgtacaatctttagtaccgaattatggatcagcaatcccaagaaaacaaaacagcacggaatacttcgtcagagtaacgcttcattcaaccgattgagcagaatctctggctgtcaaaatccagaaacgacaatttccaaaaaagaaaaggtaaccaaccaacaccaacctgtaaaaagtccaagatccaccaatcagtgaagttgccaagaaaacctgcaacaatgaatataatctccagattctacatataaagatcccaaaattcacaatgcacgtcatcattattcaaattttacaacactaagaacccagatcttaaaccaaaaactaaaacaagaacaacacaaaagaatacttctatatgcagatccaatttatgaaaaccaatcacaatgaaacaaaaagctcagaaacacagaaacaaaacttacagagaagaagataactctagggtttgtaggagcgaaaccacatttgttatggagtgagagattcaaagaactgatgagtaggaagaagaagaagaaagagaggagaatgagaatgatttttggagtgaaattgaaatccaaatttatcggattctcgtttctgttgtgtctctgctgctttgttgtaatataattaattatttatttatatatgtgatcgaaatcaaatcagatccagtccaggggctcgtaattttagacaaattaaaaattaaaaaaaaaacaaaaacaaaaacaaacaaactctacggcttggctcgtataattataaaaattttgtgtttgcgtaaaaattaattaagagaataattaaattaaattaaaagtaaagtgtgaatgagtgagagtgggagcataattgtaaagtaaaatatttattgtgttctgaacccggttttaatactgtcgttt

SEQ ID NO: 18936 - DNA, 4918 bp, Cannabis sativa
gccataggatagcaccttcactctgtcaactttgccctgccagattctatgaacaaataaaccatctaaaatatgcagagaagggtttactcctaacacatagcagacaattgatggcttccaaaaaaagatctcatcttcaatatcatctaaagtaatcctcactttattctccttatgctcaatgttcataaaagaattctcaaggttacgcacaacagaattggatcgtaaaacaagtagaattgagtttatacatgctgcaatgtcactgttacattgcttattcgcctggaggaagtgaacaaaatcactccgaacttcatattgcctctgaatcgcctccagttaagacttcggtgagagaggaggctgaaaaacatccctcagagctggaacatcctctgccagagcttcctcgtccgaaacctccagagcatcaatttctgagatctggtctatcgaaattgattgaatcgtatccctttttgatttcccccctttcttcttcaaaatcttagtggtagttttaggttttccatgaatttttgaccttgttttagccatggcaccagctggttcagctgtaagagcaagaacccagggagaaccctaattttgtataaaaaagttattattttaaaaaattctatctcatacaatatgtttttttaagagactactacaagtatttaaaaacataaacttatccaaggtgcaagtaaactacattgtagattatcatatcagttaaatcccgtgtactgataaatcattggaattcatttaataacataatcttgattactttccactatgttgacatcacaataaataagaatatcaatgtgataagaatttggattaatttataaatcaaacaaatgatcatgagataaacatgtgaaccaaataacacattaaagaagtaataaaataaatctatttctttattgataaaggaatattcaagattacattgaaatggagttttatttagggcacaaaacctaacaccataagcagtttacaatgctttagcaaattaacaaccctatggtggtcccttattttaatttccagtaaaaataagggtctccaaattaagcccattattgtagtagtgcttgaagatgatcgatcattcatcataagagcgtaagttgtacctttcaagcaaaccaaaacccaattagttaagcgggaagggaagcaaagacctttcataattgggtaagcaaaaatctatcttttgcaggtcgtgctcaactcattaactttgttttaatagaggttaggaacttttggatgagtttattcattttattccaaaaaaactaccgctgccatagacaaatgttgtagagatttcttatggggtgctactcgaaatcgtagtgaattccatcttccctcttgggagaaggtttgcttcctaaaatagtttggtggaatttaattcctagaaggaaggatgtagaatattgctatgaaggcaaagtttatttgagcaatttctagtaaacaattgggttaaatgagtaaataccttacagaatcatgattactggtatttgcctttcaaacaagacttgagctagtaatttaagaaattgtaattgtagctttgaagttgttgaagatcagagatgccgttaaagatagtctggaatggctgcaatggagctcaaaacttcttgccaagttacaagttacacgatcgtgtgctgaatactgtttatgacttctactatatactttttgtggaataatagagataagtgtgtttttgattcttcttgtaatactgttaagagtgttagctattgggagacacaagaatgttgtaaaacctagagacttaggtttgaatttgagtagacttaagaacacggatttccatgcctttatttttaatttttcaaatgtgaaattttttagtacgtaggagtattttagcacaaatttaactaaaaataaccaacgaaatttccaatcacaaatccataacattaagcaaaagctaggttcaaacatatataatttctgttttcaaacaccataaacgaaataaacataagcacaagcactatataaagtgcaacacactgacacacagatcacacatatatagatatatatatcataataagatttttaatttacttagtagtagtggtgttctttccaaaactacgaagaactttggaataaaaatcccagtctggatggttaggagttatagcaggttgcccaaatggatgcttttcaacataaccaggaatatcatcttctgctttcgacaattcatctaagtaaacacgaagctcactatttggacctatttgccaaaattaatatataaatatatacattgttaaaattaatataaaaaaatatcatatatagatataaatacatgataagttaattttaatcaaagcacttacctaaagccacatcatcaacatcaacagctttatattcatgatcaataaatatagcagtgtttgactggagcaaaatcaaaacaaaaatgtgttaaacaagaaatatagtacgtacccgtatattatatatacaaattaataaagattaaaatcaatagcacaaataaatattcatatatatatatatgttaataaaattaattactggatttagcagtgctttataaggcttgtcgtctatcaagagagtgttcgaagaagaaaacactcctttggaaaggtacttgttttgccacaattttttcaagtccttcaaaaacaaaggtttttctttattctccaatgtacggaaacctgaatcagtgcattgattttgatcctgaaaattaataaaatataaaatatataagaagacaaaattaattatcacaccaatttgaaaattcatgtaaacaaaaaaaatgagtatttttgaagtaagaacttgcccatgcaaatagcagtttgccccttaatcctttcattatgcaatccagggcattgttcatgtaccatctgataaagaaaataaaataacatataacacaattatactattatcaatacacaaaataatatatataataataataataaaagatacaatattaataactgactctctagcagaggaccatattccgacttcaaatctttccaagcagaacttcatgaattcttcacaataaggcctcttgtaaactgcaaattaaagacacaaacaaattattacatacacatatataatattagaaatgaattaatatatagttaattacgtaccgaagaaatttccataagaagtatcaggacgacgagattttaaagcactagacttgtcacggcggtagactctatggcaaagaagtccaccaagagcaagaacaataagctttttctttcgttgttgaccaaggttcagtttctccaacaagtctccaaaatccactacattattcttttcttcagtttctttagtttcagtttcacgtactattagtttttctttcattttatgaccctcaccaacccttatttcttctgccatagtccctttcttactctctaaactagtatattgttgtatatgatattattacttgagtttgtaatatggtatgggtatatataagggtgcatgcatgcatggtcagcttttccacttcttcatttttttttttggctttttgattgatattggttaaattctcaagattcattcactattagttatcttagacggttgctcttctcatgcatctattggattgggtttgggtgggagtaattagacatgccttttgggagttgatgagtatcttggaaaagctaaccatatttactaataaaacctttttttttaaaggagaatattaattcaaatgttttatttagaaattagaaatagtatttttagttattatatataattatttggaaaattctataatctatccccttaaaatgaaagtaccgatacatctctattcgttttggtatccgaaataattttttagtaaatttttttttatggtcctgtaatttataattattcaagacatcatgtaaaattttaagacatcaaaatgagtgtattgatgcaacccctaactgttttggcatctataagaatttttttcttagttcacaaggttgttatcacacactcagtcaggttgctaaagaccaaaggggctttggaccacgtatcgcaggcctcaaacaacacatgaactgttcaatcactaagggttggtcaacaacactagggtatgcataagaggatagctctataaacttcatgtaaaactcattcacaatcatatccctttgtcttaaaccatcaaatactccaatcagagccctcctatgagatggactaaaatattgttccctgaaatctctatcaaaatctcaccaagtcatcccaccaatctgctgcaccactctcaaacttggacacatcaaaagtaacttggtattcctcaagtgttcctattgtgttgaaatttttcttcatctgcctcaaccatgcacctttcagctaccatgggatcttcttcaccctcaaactcatgcacttggatccgattaaagatctgaaaatgatgactttgtcgagcggcaggatccatctgttgagcgggaactgcttttaaggcttcgagaatagcgttcatagggaattcaacttgtggaggttggacattagcttgaggggcatcttctccaaccgttctccttatcttccttcctttcggaggcattttcttaggtttgagaaccaaaagtcaatcagttagtgaagattagatgctaataatataactatacattatacatataaataccaagatacttattactattattatttaaaataaatctagattatttggtgacatactccgaggtaattaaactcggtg

SEQ ID NO: 18937 - DNA, 6356 bp, Cannabis sativa
  modified_base (281)..(282): a, c, t, g, unknown or other
taaataaatatataaataaaaatactcaatgtcatcatctaacctaatagaaagagaacaattcgattaaaaaaaaacctcaatagcacgagactaattaaaaaatctctcaagctaatttttaggaatcagttcaagactccataaataattaggaatgaaattgccatttaaaaaaaattgaaaaatgaaacgcaattccattaaaagaaaaattgggatgaaattaccattccaaaaataaaggaaaattatattatatactgttttttaattttttnntttttaaatttacggtttaagtttttaaagtagtttgcaataggagttttctatacgattttttgttgcaatttagattagtaattgcaataggagtttccatgtacgtagaatccttattttaaagtgtaaaaatgaaaaaaccctaaaataaattctttactaattgtgaagtgcttgttgcttgccactatgaacttgaaaatcccgaattagaagttgtcttcttcctttcttttattgttttctactttgaacttactcaattattaagtcttggaatgtgttttgggttccttggtcccgtaatcaagtggcccattgggttgcatcctgggttgggtggctgaaggccttgtttttcgttttctctcttttggggaggttgcagccatgattttttatttgttttgtgttgttttctaatggagtttttctcttggaaaaataataataataataaataattagaaatagaaccatctgaaaaaattaggattgggaccaccatttgctaaatcctaaatatgtgagactcaaatctttacaataaacactttttggtagtgattttaaagttaatatctttcatgaaattagtaaatgtggtaaaaaaaactacttatttaattttattctctcttaattaaaataaataattatgattccaagttggaacaagggatagagtaatttgtaatatggttttatattgtattcccttgaaagaagaaagaaattaaaactgatgctagactagtagttttaatttatttttgttttaattaatgagagatttaagagtagtcttgcttaaactttaacatgcatggtccatatcatgatgttacgttggttgacaagtagtttaaatgaaacaaaatcaaacactacttcccaaactaatatcattttaattgattattattattattattatgataaatataggtgatctaaccattttcattatgttagtgtcccaatcaaatatatatttttagtattgaccaaagcaaaaactaatcattcaaaacttgatttataagacttcccagttccaatcacataaagtaatcactttatttaaacctctttaattatcttttaaatttgtttatttttccatcagatgacatacttcgagttgcctcaatcaaataaaaacttaaaaaatattatggtactcgttatttgttattgaaactctgaatatataaccctagtcataagcatgtaaaaaataaataaacagttattgatatcctttattctctttccaaattccaccgaacatgtattaattctcagttatttttaattaaatattatttagttttataattgtttgttgcggtgaaagttagatatatagtttataataatattcattgacataaggtattcactttccttttatatgggaatattattgagtccatcattggttttaaaagaataatggacccaagtacggaacaattttcacagcaagaaaacaaaaagtataataaatgaagggaaatgtaccaaggcctattatagttgtgttgtagggaaatatagttgtagttgtgcattgagaaaaaataactacaattgcaaaaaaaaaaaaaaaaagttaaaatgtgtttgataaattataaattttataaagtggtataaattattaaaattctattgtaacggtaattataatactataatctaaaccattataatatgtaacatatgaaagtttatgtcatacaaaatcttgggttttttatatttttatttattatttttacttaaagtttaaaattatatgcatttgataaaaataatttacattttatcaattatatttttatcacttgtaaaacaactcaagtgtataaaaaattcttgattgacgtgatttgttaatataaaaaaaactatatatataaaatatattttaaaataaatattaagaaattaaaattttaaattattcataattttattataatttatttattgtaaatattttttttgtaatatattataaatatctaattatatttttatacaaataaatttatggtagattcttttaatcaatacaactttttttaataaattgagtttaacttggtgtagcttttttataaatttttcaataaattattttttaattgtttatcaaacaaccttatttttttaaaaaaaacaactttaacttttttaaaatttgtgcaaaacaaatcccaaaaaatttttagttttggatttgtttctccttctgcaagtacatcacatttttaaaaaaaaaaatatataattacatatgtaagaaaaatgatgacaatcatctttatttttgtttggtgtgcaatcaaaattttatatattgattaaaaataaaattgattatggatatataagaatcaacactactctattagtatgaaacattttaagaatatctcaaaaataaatatgtgaagaattaaactcaaagcagataatattatactatttaagtcaagttaaagaaatgattcaataagatggaaaaacaagaccaacaactctttagtgagaatgaatgtcaatatttgatgtcacaaaattagagaagggtacatattaataatctttgatttgtcgataaggtaagtattagattcatatgatataagcaatttattacaagtgacatgagaagagtgcttttaggtatacaagtgacacatgagacctttttcatgaattgttctaattatttgatttatcgtgaatccctttatcgtgttaattgggacatttttagtcccatacattttggttcaaagtcaacaggttcccaatttactcaccctctttatatatatatagctatgatttctaatacccattattgtcttattgactatttgatgaaagatatatgataatcgatcgatcgatatctaactttagcatatttttctcgacaataatgtgatcgtcaaaatcaatttggtatatacgtaccgactacggatgggtccgaattgagtcatagaaatataataattcaataacaatcaacacaaatatacataatctttatctaaaaaaatcaaagaaatagatcatataacatattctattattgttattgtttacggttactattgttatttgggattttatcatttatatgtttttttttatttatacggaaatatacaagtaattaacgaaacaacctaaattcacatagcaatcaactccaaaacaaccaaatcttaagaataaaaaaaaatgttaaaaaaataaaatatggagtgattccctttgttatttttagtcttttttaattaaaaataattattttaatatgtttatatgcactctttttttcaatttcctgataattttttttacacattttctaatatattttagagtaagttttgttaggggaaataaaaaaaaaacaacaatcaaaatgagaaatataaggaatgtataatggactaaaattaaatactcataatactttaaaatgtaatccaaaatagaattttagtaattagatatatactgtgattgaatttatctatatgtaaacctttaaaatgtaacaaaataataaatatgaataaaaattaattattgtccattctattatattttattacccctaaccaaacacactcttagtttaatttatcgattagcaaatactttttttttaagaaaaatgtttctacatttaaatcttatatatcattcaaaaaaatagttacatttttaattaattaaaatgccaaatacattatcccaaaattcaaatatattacacattattcattattcaatatattaattattttctaacataaaatttataacattataaaaaggttactaatatactacaaaaatactagattttataaaacaaccgtaaaataacaaaacagaagaattaaaacaacagtggaacaactaaaaaacaatcattgaataacagtgaaaacttaatacagtacatagtataaaacttacataatatttttttaaaaaattccgctttacgataaaaaaataaaaaaattaaaaatttcagtaagtggtgtaaaaaatttaaataaaataaaaaacatataaaacactgatgaaaaaaataaataaaatattaaatgggatcatgtcgccatggagagtgttatcctaccctcactccgtttaatataatgatatttatctccaacaagttctctatttagacaggatattcccacccattagggtaaagtcccacaacctatttgtataggcaaaatgtgtatctttatttccaataatttttatattatatcattcaaaatacatttaccaaagttagattttttttttcttttttacctcaattttttacatgagtttctctaaattattcaatatatttagagctgctaatgaaagtgtgcttagggtttttttttttttcatgcaaggataactagctaagtaacttatatattggcaaaatttaagttttgtgataattttgatgttatatacattttaaatacactttctcattgtatatgtcttggtacatgaaggatattttgcatttatcaataatgaagtttcttttttttttttaataaatgaagtttatttttaatgttatataaatgtaaatgtaaaatattgtttaatatgataggatggagtggagaaaaaaaagtagatcctaataaaagcaccaattgacttaaaataaatggtatgtcgtataaaatagatcttaagagctaggcaattttttaaaggcaaatcctttttttttattttttgggggggtggggagaacaaggcaaatctttatttcacttattttgtgtacaaattagctacaataataaatgaaattttaataagaagcgtaactcaggaggaaatataatagacctcatcattcattaaccaaatatggttctttattttcaataagtttattcaatattacacatgaaataaaatttgataaaagataagattgctctttctatatatttttttccttgatagtacttttttttattatttttttttttctaatcaaaacaactacgacagctaatgaagtcaataaggcatcagtactttcgtcagcctacctttgtcattagctatcaaatttgaataaaagggccatacgcatactgatgtgtccctaaatatagatatgatttaaagtctcttaccggcccaacctcatctcaaattttaaatgaatccgttacaactattcaattctaactcataagaaaacaaaatatgactctaatgggataagtttctataaggaaacaaaaattcagtgcacattaattaatcaatttctcaaaaatttcatttgacaagtattgtagtagctaatgaaattaaatgtattagaaatgggtgtaataataataaaaatttaattaatcaatatataatattcggctgcttataactattatactgctaccctctcttactatattattttaggatttttacactacagaaaattttaattttttatttttttttattgtaaggtggaatttttttcaaaaatactatatactttattaagcgtgccatatattataggcgacggttttaagccgtcacctatagtatagtgcacggtttaaatctgtcgattataccctattataggtgacggttttaaacctacaggcaacggttttaaaccgtcaagaatgtaaaaaaaaaatacatattttttttcctgcattagttttataattttacctaaataaaaataaaattactaatataattttattaaaataacaactaactttaaaacacattaaatttatacaataataaaataaaaaagtatataaataaataaatgtatttataccgagctcagagagagagggagacggacgggaggtggtggtggtttgacgtatgagacgaagatcgaggaacaccgacgggaggtggtggtggtctgacgtatgcgacggggagtagagggagactgacggaaggaaggatgggtggagatcgatggacga

SEQ ID NO: 18938 - DNA, 5740 bp, Cannabis sativa
  modified_base (2049)..(2063): a, c, t, g, unknown or other
aatccaatccaattcgcaaaagtgtagattggattggttattttgaattggttacttttcaatataaaattatttaatatttatgaaataatatttcttttcacaaaactagcaagaaaataaaataaattgttgttattttatatccccaataacaaattaaagtaaatataaaataacaaacaacaaattcaaaggaagaaaaaaaattgtatgtacaaagaaatgtttaattttattttaaattgtacgtaaaaaaaattatatataaaaatggaatatatatttgatctattatgttttgaaatatattatatgtattagctttttaaattactattttctttacattaaaatattaattgtatatataatattttaattttttttttataaatatgtggggattggattggatcggttacttttatatgtcaatcaacatctaatcatcacaagtgaagattttgaattttttaatccaatccaatccgcacaagtgtggatatccgtactttgcagattggattagatcgtgcgaattggattggatcgactattttatgaacactcctaacaacagttgcaacaaattcaaagaagaagtctttatttatataagttaatttggttttgtaattacttgagatttatctaataaatttcattttctagacgtgtccccgtaaattaggaacaattcgaaagaattactgataatacgtataaaatattgtgtatcattttagtttctatatttttactttttgtagtaaatttttattctgtcagattctatatctgatagaacgaagttaaattctcttcaaacaactttattatagttctgtattattttaattattcaataattttacttgataattatgaaaatgaaatttcattaacttttaaatcttaacatctaatctaatttaattataattaaatatctaatttttcataatttaattaaatttgattggctcagttctgaatttaatctttatccctcactatataagatataagataagattatgaataatgatagttccattttaataataataataataacaacgatagtgtctatacgtgttattcttctagtggcctttgtcatcagtacttttggggcaaagaagacttaaaacatgataagttatgactttattaaacttcatcacatacatactgttttgtagccttacatatatataactcattttacgttcaacctccttcaaaaggccacgttgcactattgaattttaacatttgtcttaactaagtgctttatatatatatatgtgtatatgaggatatttcatgtatgcattactggacataaaagcttcgttacaagcaaaagtctacatcaaggtgtgtttttctatctccacgttgggtagaaaaagaaaatctatatattaaacatcttttgttgatggaaaatttaggtatatattatacatcacaatcaaaagagttggagtaattgatgaggtccgtggttcgacagatatctttcatttcttttttgtgtgattatgcaggtgacgttgttttcgtgtatttaatttaacgagtggctgcaacctgcaacagctatatggccaagccaaccatatttgataaatgtaaatatcatatcttctcaataagtgagtattgttacgtgaagggtatagttagcataaagatgtaaaattattttacaaatagagaaggaataataaaaatgaattataattaggagtattcttattgagagattgctattgtctcaaaaatgtgtttcatttgtcctgtatataagagcatctttaatggtgctctttatttttctatttaaattttagctaaaatagttgaaaagaaattagaatagagagcattttaattattcttgctttttctactttaattaacatttgattatgttaataatattttataacttaaatttattaaatataaattaatttgttgaaataatgaaaaaaagtaagaggttttttcatttttatacttcaaaacagtttnnnnnnnnnnnnnnnatttttacagaattctacatagattctcctattgcaactggcgctgcaacttaaattgtaacaaaaactcgtacataaattcctattgcaactagcgttgcaactactttagaaattcaaaccgtaaatttaaaaaaaaaaagttaaaaaaaatatatatatggagtaattctctaaaaaataatagtatgtttttattaaaatgatactaaaaaatttagcaaaaaataagaatattattacatttagaaagttccttattcattttttattatagagttatttttttattttattttttatagttagagttcattttttttaatttcaatccttattttatttttaactaaaaaaaaatgagtttatagaacatagttattactctatcaattctcgccagccgactgagtcaagttaaatttttgaagaagttgagaataagaatagacatgaacaacttttattatatcttgtgttatcaattaatcatcaatttctcggtgtaatcaaatagcatcaccataaattaatttgagtcatgacactaatcatgtaagtgaggtcacagtacggacttaaaaatatttattttttgttaatatggataggtaaattagatattatttattgtaataagaagatgacattcatggagcaaaattattcaaattatgttcacctacctgtttacaataaaaataaaaaagtaaaaaaaaaaaaaaaattcaattaaagttcaataagcttgtcctccaacaagtatacatgctatattttcaaattaaatctattaataagtaataaaaaattcattacataaaattgaataactgaaaataataagcggtctagcatgtacaaaatgatcaacacaacacaagatatagaataactttttcaaaaaatataggataaccacaatatgagaccgaatttttagatattggtctgaaatttggcgggatccgttgcgggtaatttgaaacttattttcgtaactcccttaaaaataagatttgatgatgatagctttagaattacgattgaagtgtaagatatgacttgatagagcattgaattagcctcgaaacgcaagttgaattgcgtcaatcggatcaatattgagtgagttatgactatttactgaaggtacacgtatgttcacgaccaaacgccccacattgacatccagcgtccaggtcgacatcccagcgcccaagttgacatatgacgtcaacctggacgctgggtaagtataaaaacgtccaaagaatttactttaagatggctaagtgatattttgacatcacttaatctgtctttttgttctagcaaagctagtcaccagttctcagagatattactattctgcaaaaataagagactcgaaactcttcatttccaagtaagtatcccatcttggaaataagaaatgcaaagttgtgaatttagcttctctgacttcatggatctaagttattgttaagaactagatgaacggtcgaaacgaaatcaaaatcgataagcaacacctaacgcaccaggccatttgtcaatgggcgatgggtaccctattcccaagctcttgggatctcgttttgatacttctaaggttcttgagcttgaggacaaaatctcttaccctatttttgaccatttcggattcattggccgaattagatttggcatttgaataattgaaggcgctgttataggtagattgtcaacctgggcgctaggccctatttccaagggctccagttggtgattttctctccgagtttacttgaatcttcattattttttatgacggaaaaaattgttcagagcacttttttggtgaacttgattggaaatagcccagcactaggtgtcaaccttggcgctgggtcccagttatggccctttagaagttccgtttgatcctcgaaaatagttaaatctcaatcttttctaaaaatggagaagatgctctgaagagttctcagaaaacatcatcgaaataagcccaaattgagaaaaggtcaacctgggcgttgggccagtcctatgtgtcaacctaggggttgtgccttgtttcttgcagccaggaagtgttgtttcttctccaaaagaacctatttccctatttttgatgaagacaaaaaagatgtaaaagtcagattgtcgatctgatacttggaaggcgtctagattgactaattgtcaacttgggcgctagaggtgctcggggccccgaggccttgggtgctcaaaaatgaacttgctctgattttgattttgatgcctcaaatatgtctgtggtatgtctagttgatctcccaatgcaagttttgacctatttgcactaagaaggcccgggatactaaaatccaagttggtaatgtcaacctgggcgctaggtgaaaccctaggtgcctagattggattatgagttacatgttcgtataatttaagctcccgaggcttcgattatgctgctccatgtctttatggtacataatactagaagatagtgagttggattcaagttattaaagttcaaacttccatcttggagctcccgaagtcaatttggcgcagggctagggtcccctcctaggtcgattgctatgactcagatctactcaactccgtgacatcatccttcttgtcacgtgtcaaaatttcacatcaccagggaaagtttttgggttaacattttttaccaagtcaactttacacttgtgtggagttaacttgatgatgtgaatcgagcccgtttcgcttaaaactatcaaatgggcattaattttgacattcttagttaattgtatctattcttcaagtattctcaattgaactaggactttgaactcttttgcttagtccttggaaatttaaaaattaattaacaaagaaaaagagaaaaaaaacgtatcttttttttttcacttattgtttaccttttcctttaaaaatttgatttttcttttatttttgttatgacattaagattagatttgaatctgaatcctagttataaatgctattcgaaattagagagagaaagaagaaaaagaaagacttttgatcttttgcttatcatttctctttttcttttaaatctctatttttttttttcataatcttaatagcattagaaattagtgttacttttttaaatttggattactattcctatttatataggaattttaaaaactagcttgaaaagagaagggagaagatataattgtatcttttacttgttatttacctctttcttaaaagctttaaatttaaaagtattaacgcagatttttgttaaccaaatatatagtctttcacgtaataaatttactacagaatttaataataataaacaccagatagtttacgtagttttgtggttaaaatttacatattccacgagtatatattgttagggatatttattcgaatacagagtataaatctcaataataataaataataggattctctctctattttgccatccctttcttcatggattctgcccctatttatagatctataggtggcagttattaatattgggatcgatttatttacaactgctgatgaaaagtagacattccccgcgtttcatttatatgcacataggataatatctaataactacccaactactcattgtctttatccttaaa

SEQ ID NO: 18939 - DNA, 5346 bp, Cannabis sativa
ttttttattagacattggtatgtggcatcaccgtttttcaatccaaatggtgttacaatataaaaatatggacccatgtcaatagtaaagcttgtatgctcttcgtcaacaacattcatagaaatctagatatatctagaatatgcgtccatgaatgacatgagtttgtatctagtggtatcatcaactagctgatcaatgcatggtaggtgttatctacatttccagataagagacatgtgggatcctcaaggtttgtctggtctgcataattccaagcctaagccttcttgcgtacgaaggcccagtccaagtcggagatggcccgagcccttctaaactctaagagcctcacctctgaagacacaatctttccactctcgagagcccatcaggccttccaagagacgtagcaaacaaagtcctccagaaaatcaataaggcatattggaataggaagtctaagagatgcatctagaagcccttatagggtgacatggtttccctctaacgcttggtctcaccaaatcaaatcatgtcccctatgacaggacatggtattgcgcatactgaaaaaatgaatatattccttttgtccaaagacaaccatctgacattcctatctattgtaggagaaccctcacgtgacacctatccagaccgcgtgggccctcttccatacggaagtttccaccccacgaggcaaaatcttgttatgggcctcaaagtcatatattctatgtatttaccccaatagtggatccattttgcataaaaaccctaacaggtcacgagtatgcccgaatccaaatctaagccaagaaaaatccatttaccacttcatgtattctaagttctctctaagtttttttcttcttcttctaagacaaaccaagagagaaaaacattatagcaagaataagggttcttcaaattgtaagacccatttgtaacacatcaagcctttttaggccaatacattgactcatggactaaggttcattaatacctgaaccacataaaaatttccatctcattacttaattacttaattaattgtttaagctcttatttaatttagtttttaaaaatctccgtaaagagtagggaaaagtaatccttggggtatgctttgattagatgaaatatatgcatgtctaccacttcccatttgttttaggaaccaagattgggttttcagcccatatgagatagaaatttttggccaagatttttgtcaaccacttcttcccaaatgaaatttttggcccaagttttgtcaacctcttcttttagggtcacgtaccttgcctcatcaaagagtctctgtttatggtgctttttaagtatttttttcaaggttttttaacatgtggctaatgacatctggactaattcccaccatttcttaaggcacccaagcaaaaacataaggttcttacacaaaaattagataatagcctttttgatttccttgtagaggtatttccaaactttgaccgttttggacagttcattcgggttatgcattacctcttcaagttcatcaatggggtcgatattagctctgtcatcacctatacaagggtcaatctcttttacctttggggttttaaattcttcaatctcctcaataatggcaaagatttgtacctagtggagtttaacccatcactagggttttaagtagttgtgttattttgtgggattacaaaacaaccttcacgaatgtcatgtccagtgctcacaattgtctagggaagggtgagttgaggtatctagagcagtgacaaccttgtctttaattcaatgcacttaatgaaagtaccaaattattgacgtagtttttcatcaactaatctaaaaaatcataaacaagtaatttgaacaaaatactttaattgttgttaaaaacaaaccaattataagaatttttaataataatgacgaatgaatttggcagtggttcaccccctttcagcagtaactggctagtcaacttagtttttctttattgttttcaatgctcaagaacagtgctagggttattttcccaacgcagtagttcatgaatgattataatgagtacagattctctttctacgatttctaagtgtgattcagagttcaatgaattgaattgaatctatttatacgcttagattaaggatttttataaaactagagcatgacgtgtcattcccttacatttagggagatctttacatttgaatttggattcaagtttgaataacaagatatcacataccttagatttaaataataataaatataatatataaaatgcaactatctcttgattcacagagttagttatcatatgaaatatttctagaagctttcatttcttggaaaatgcaatgcatttgtttaataaggtcaaaaactctatatggtcctcacatacttgacaggagcaaaattcctatcatgttcgagtatatcacatatttctcttcagaaaatttccttaaacctttctaaatttctttagttcttgtacatgatcagtggcataacttgaccatgttcacatgctttatgaattactccccaccagggaccttgatgatgctttgattgaattcttgagacttggtccaagttttgatggccttgggcttctaactacccaaaaatcctaacccttattgatctacatgagcaaagacatgtctctagccttgctcatgtactagggtgtacacactcttcttttatcttcatgttacacgaccaagggtatcttggtgccttgactcgtgtaacttagcatttatcatcatgcttacatgagagagggtacatttgcgcatttactcgtgtaaattagctttttactccatttacttacacaagcaaggaggcattactaccttggctcgtgtaccttggtacacctagagtttaacactcgacaaggtcaaaataatgtctttgttcgagattattgcttatgtttcttaaatagggcacaagcaagggcatgcacaggccttggcttgtgtatctcctttataatttccttgacgtacttgagcaaggtaaccatagtgcctttgctcgagttctacatttgtttgacattggtaatgccattcttcatatcttgatattctaaccaagtaaggttttccacctttgtggaattatttattagttcttgaaccataccacacaagcaagattatgatgtgttacgttgtttgtggtcagttgtattagggtttccaaatggttgtcttgaacaaaggatttgagtcgactctgtttaaggtattggaaaaagggttcctaaggccaacactcagtttacacgagcaaggactgattttgaccctgctagtgcatgccttcttaacatgccatggcattcaaacaaggtgtcacttggcacatttttcaagtttggcttttattttgtcttttgtcgtttggtcaaagtcttaacattggcttttattacaaaaataaggtacaaaaccttcgattattaaattaaaaatatcaagttatcaaatataaattaagaaaattaaaaattatagttgatatttgataacttgaaattgtgcaacatataaattagtttctctagtttaaattctacattattaaattaatatatatattgttctttttcttacatctactttatttttcacttattcgttagtttgtttttataatttataatcatatattacagccggcttaacttctatagatgttttgttaggttatagatttttctcttttttttttaaaaaaagtcattccgaaggtgtttggataaaaattaaagtgaattatttttttaattttaaagtcgtttttattaacaacatatgttttcgctttctttatgattttaatttggctatgttgggtaaacaaactttggaggttcctaacccagcctggttcgttagtttctagagtgtacaaagcttgttactttaaaaatgagaacttttttttgagaacttaataatccaagttatatttgtagaagtcttattgcggtaaagaatttgattcgtaagggggtgtgaagggatattagtaatagagaggagactcttttatttaatgctttgtggcttccaaatgggtcaattccgagtcaaggtagtttggatcctagttaggataatgaaaaggttagtagttttttttgtggtgggtgagaaagcttaggatgtttatgctgtcaaagatttgtttgatgaggaagtggcgggcacgattccttgtattccccttctaattcaattactaaggattactggtattggggggttcaatcttctggtgagtatactgttaaagtgtgtttaaattattacaagcaaactatgagggtagtgttgacgaggagattgtggcgttttggaaattaaagcttcctccaaaggcaaaagattttgtatggggggcggttagtgggtgtcttcctatgagagtttagttgaagaataaacatgtggatgtctctttgttgtgtccgatttttcatgggacaggtgaattaatttttcactgtttagttacctgtgattttgtgtagaattatcggcaggtagcgagtttggctatgattccaattgatgcagggtcatttgggacctggtttctacatttgttctcacgattgggtgaggaacaaagtggttaggcggtgatgttaatttgggcgatttggaattcgttgtcaatttagcttgtatcactcttgatcagtggaggaaagcttaagaaagaagtttgtttcctgcgtttgatacttggtatctttcggatggagatgagctatggtctaaacgaggttatgaaaaactcaaggtgaatattgattctccattgtttgatgaggagggaagggatggttttggtggattgtttaggatcccaagggccaggtcgtggctgggattacgaaattacggattgggcaagtcttttcagagattgttgaagccatggctctcaaggaagtgttatcatggttgaagcacgattttctaggtgttagtatcattaaatctgtttgtctagtattggtacaagctgttagaaatttgaatgttttatcatccacttttggtagtgtcgttgaggattgtaaacaacttttatcttcttttagggatgtttctttacgttttgtcaaacactctactaatcaggcttctcatcttaaggttagagcatcttgcttatatgttgatcatatttttttgtagtataatctcttttttgatgttcttaatattgttgaggttgagttgatctagttgaatgaaatttacagctaaaaaaaaa

SEQ ID NO: 18940 - DNA, 6681 bp, Cannabis sativa
  modified_base (2670)..(2679): a, c, t, g, unknown or other
taatatttaatttagtatttataacaaaaaaaaaagtagttagttatgttagttgggaaggaaatagtccatgttgttgaaggaatggggactatttcacaatgttacctttccaatttgattgtgttccagccaatcaaagcgcgccactataagttcattaccaaactgacgcaagtacgcaaaggcgaaactacccctcattctttccaaatttgataacccctcaaactaattgacgaaaatacccttattaattaccggaaaataacaaccatatccatggatgttgacccgtgatccgatttgtgttgtcataatcaataaatatatctagttttctcaccggctgtgagtctattttacagaacccactatttctttttctttttttttctggagaaaaagaaaaatctaagaagaaaggttgtacaatatctcaaattccctctctttgagaagaagtgtgagtgaggagggaaaatgtgtgggatatttgcctacttgaatcacaacgtcaatagagagagaagctatattcttcaagtactctttaatggccttcgccgattggagtacagaggctatgactccgccgggatatctattgatcattcattttcttcccattcaaagcttcatcaccctctcggttttcgccaggaaggaaacatcgagtccctcgtcaaatcagtttatcaaggtcagtttttttttgggggggagggggatctaagggttgttcgtttccgggaaaatgttggggtaaaaatagtcaataaagtttgagcactcttggaaataaaagggttgatctgcccgctttgtctgagcaagttgcatgcctcttttttttttatctgccattttcttttcttcagttactccattgggggtggagtattgatccactcattggtgtagttaataaagtatattaccttctccaatgggggttataactttcttcaggaatcaagactacttttatatcgcccagggagactcaatgctaataagaataacttacttagcaaactgaagcacctgtttgtttattctgcaccaaaacaaagtcttacttcttttttgagttattgattgttttccatttttcttaacgatgtgattcaaatgtttgcccctctttgaaaaattgctattgggcaagtttcaaatggtagaaatagactaattttttataatctcaacttctttgtttctttcatcatcaactattgtacaattggatatagagttctgacaactatctaactgtttaactttggagtgcaattattcgcaagttttctttgtgtttgaacttcatttatctgataattaatttaaaggaatatggacagtaatatggttcaaagttggaacctcctgttgcactccaagcttttaataatgtcaaattttgttttcttcttttcttactgtgtatcacttcctcgcatgtcttatggcattctggttacagaatgatacttactagagtacttgcaatgctgttatttgcagaggttgctgaaacggaacttaagttggaggaatcttatgctggtatagcacatacccgttgggccactcatggagagccagctccaaggaatagccacccccagtcatcgggtcctgaaaatgaattcttggttgttcataatggagtcgttactaattatgaggtttgcataaaactttaacagaatgtctttcctcccccacttgtttttttttttttttttttgagcttttggcttttgtgtgaaatgaattttcttgatattattattgagtgctttattattaaagttaaatgttgatgaaattttttagtgtttagaatgttgtctatcatgtataccaaattagttctccattggctctttccaagatctttctctgattccgcatgttttcaggtcctaaagcaaacactagttcgacatgggttcacatttgaatctgagacagatactgaagtcattccaaaacttgccaagtatgtctttgaccaagcaaataaagaaggtagtgctcttggtttaagcatcgtttatgcaagtgtagatgacaatgtgaaacatgcccaacccgaagagcgagagaaatgaatattttctgctttagcacttgcatggcctgtactctcacaatggcctaattttttgaatagttcacttattactttccatgttcttggcattagatttgacttttgattaatagatcataattgtactgtgttttctctaatctttgagtgtcaattgtttctgtcacaggtgatcagactgtaacatttagtcaagttgtgcttgaagttatgaggcaccttgaaggggcctatgcacttattttcaaaagcaagcattatcctgatgagttgattgcttgcaaacggggcagtcctctgcttcttggtgttaaagtgagttacaggtttaaaaaaatggattttttcacattgccttaaatgttctctagcttcttgaacttatcaatgtttgagttttagtttattcagtggtgatccttctatatatagggtaattttgatttgcaaaagttaccaattggatcttcggttgtgttaaataacaaaatgaaccctgtattttccaaaattgtacaaataggactctgaactgattttttgtcaannnnnnnnnnaataataatctaatctaaagatgttatgacaaaactgattacattttctgtatctgttcgtgttctaaattgtcttaaagttgactacattaaaaaataaaattgttgaaaattaagctcagggtcctatttttaccatttttgaaaatataaagtccattttttatttaacaacacaaagggtccaattggtaacttttacaaaacacagggtccataatggtatttacccattttgattcatttcggatgtttacataatatggcattttttttggtaaacatgtgccactgttttaagggagttctgtctcttccatttgcacattacagaaatttatggaaaagctgaatataaagttcttttaaaaggctagaaagccagtggtgctattaataattgggatttgagtttgatctaaattatgcatgttatttatgtttatttgaataggtgaaaacacatcttagatgcatgagctgagtttttgatgatacagcttagatgtgcttctgcaggtttaattgactttctgatgtcatgtcagcaactgtccgaagatctaaatcatggatctgcaattcatgatgataatttcctctcaaagaatggatgtcctaaagaactcttcttatccagtgatgctaatgctgtcattgagcacacaaaaaaggttctggtgattgaggatggtgaagtagtacatcttaaggtattttgaacctccagggctcttttctttcttctataatttgtaaaataaataaaacaataggaataattgtttaatcgtttttagtacaatacttgggggacaatctagactatgattctgtggaatctgggagaatttttttcttttctctacttgcttgagatatttgctcacaaaatttctttgcttgcatatatgatgcgatgcctgatatttttaggatggaggtgtgttgatcctaaagtttgataaagaaaaaggagaacatgggggtgccctttcaagagttgcatccattcaacgtgcattgtccatacttgagatggaggtagaacaaataaagaaaggcaaatatgaacattatatgcagaaagagattcatgaacagccagcttctctgactaccacaatgagggggcggctcatccgaggaggttcgtgcaaagccaagactgttctccttggaggactgaaggatcatctgaaaacgatcaggcgaagcagaaggattgtatttattgggtgtggaacaagctataatgctgctttagctgcaagacccattctagaataactttatggtgcgtaagcctttcattttggtgaatggttttgctgtttacagaaaatgtatacctcattctttcttgtttatatcatttgaaccatgtaggtatccctgttaccatggaaattgctagtgatctattggatcgacagggtccaatatacagagaagatacagctgtctttgttagtcaatctggtgaaacagcagatacactgcaagcgttggaatatgctttggacaatggtgcattatgtgttggtataacaaatactgttggtagtataatagccaggaacacgcactgtggtgtgcatataaatgtcggttgcgagattggtgttgccagtaccaaggtaaacaattgtagccaaattctttatttgttcattcagatacttgcttaaccattacttatctaattattaggcatatacaagtcaaatagttgtgatggctatggtagcactagcaataggtggtgacataatgtcaaatcaagcaagaagagaggctataatagatggtctatttgacttgccaagtaagtactaattaatctatcatagcctgctgtacaatcaagttgatttttatgctttcttcatcaaaaaaaaaaagagatcaaaatcacatcttctgccttcaattaggtaactaattgataactgtttttcttttatgttatatttttgcagacaaagtcagcgaggtcctgaagctcgatgaagagatgagggaaaccgctaaacaactaattgccgagcagtcacttctagtttttgggagaggatacaattatgcaacagccctggaaggtgctctgaaagtaaaggaagtggcacttatgcatagtgaaggaatacttgctggtgaaatgaaacatggtccattggctttagttgatgaaaatcttcccattgttgtcattgctaatcgcgatgcttgtttcaggttggttcccttgttgacattgtagaggagtagagtagttacatttcaccatcatggtctgaagtaagttgcctactttgtaactaacaattttaatctctgtcagcaagcaacagtctgtcatccagcagcttcgtgctcgcaaaggccgattgatagtgatgtgttcaaaaggagatgccgactctgtgtgccccagtggttcttgtcgagtgattgaagttccacaagttgaggattgtcttcaaccagtagttaatatagttccactacaggtaatattcacactagaatctgatatatgctataatattgtgtgtttgtgttgctgtattatgtcttcacgagaattgttgaaaatattccataacttaaaacaataaattttgtcttcttttctgcagttgttggcctatcatctcactgttttaagaggtttcaacgtcgatcagcctcggaatcttgcaaagagtgtgacaacacaatagagaaattaagctgctgaaccagacataaaaaccccccatgaatgaacacacaccacctcatcttgagatgtagcgagttttaacactattgtacatcgttattgattcttgacccctttgatatgagcccattgtaaatgattaggcacacatcactactaactagtccttcgcttccctcgacccagagtgaagttgtgatattaagtatgtttctttttcttatttttcttaatcttggtttgattctaaactaatagattatttggaccagaatgtatgtttaaaaagaaaaattgtttggattctggtaaaaggcatgctttttttttctttgacaaaggattatgattcccttcataccctttttggtcaaggattatgattttattgtgattttggcaaggattatgattttattgctttttatttctttggcaaaggattatgattcccctcataccctttttggagatagttggccaaaattgtcccttttttaattgagtttttgaattctcaatttacttgcaattaacctttcaagtttaaattttggtgggaaaatattcaaattactgtttcgtttgtatttttaaggtgttcttcccacaccctattaatttatgattttgcctacgtggttagtgatatatcaccataagaggatccaactaggggtggtaaaatgggttttgataaggcacaaaaacacgacacgaattttatgggttaggattaggaatattagcgcgggtcgaaaatgggtctataggatgacacaaaataaaaacaggtcaaacacgatataaccctcttaacacaacttgggcacatttcttctttttttaacaaaataaaataaaaaattattaataatactataactatgtaaaaatatatatttagggtgattttggcacaactatactgtgggaaataacaattatagttgtgctgtgagaaaaagcaactgtagtagaactgtagaaaaaaattgagccaagtttttggtaaattataaatcttaatgtactgcgagttaataaagattctattataataataataataataatgttataatgtagttcattataatcacatatatatgtcatataaaatttttattttctatatatttttaatatttttttctttctttaaatttatatacatttgataaaactaattaatattttcatcacttgtaaaaaaatttgtagtttagaacaaacttttgattgatgttgtttattaataatgaaaatataaa

SEQ ID NO: 18941 - DNA, 5263 bp, Cannabis sativa
aaaaaaaaaaaaaaaaagagttcagtgatacattcacgagtgtcacactcaccgggtcacccgcttcattcgagcaccttcgtttcgtttcgtttggtttcaataaaagtaataatttctcatatttttataatttccctatttttccttttttgcatggccacgcttctctaaacccagcgccagtaatattgcgggtcccggaagctgaagttgcgccacgtgtagcagcgtgtcaaatattcgctctataaatacggtgtattggtgcaaaatgtaagatgcacaaggctcagcattgagatcgattcaacacctcacctcttttctgagcccctttttctaatctcttctttcaaagaaagctcttttcccttttccttttttttccatcactctatcgagaaaatgtttattgagagctttaaggtcgatagcccaaacgtaacgtactcagagagtgagattcattctgtgtacaactatgagaccactgagcttgcccatgaaaatagaaagggaacctatcagtggattgttaaacccaaaactgtcaaatatgaattcaagaccgaaacccatgtccctaaacttgggtctgtttttaaaacccctcaccattttatgcttgatttttgaaattaaaaataactcaaaaatgtttatctttcatgcaattgttagagttttagttgtttaatttatgagattatatttgacagggttatgcttgtgggatggggtggaaacaatggctcaactctcactggaggtgtcatagctaaccgagagtgagttttcttggttattttcaggctttcagcactaccaagatcgtagtcattttcaattttcatttcagtttttaattcctagttgctaagattttgattctctttttgatacctgtttgaagctattaatttaataaacagtgtttaacgttttgtttaatttgtctttttatatgatatgcttattataatgcttattttttgtccatttagtaatgttgtgagtaatttgggttcatcttaacattgggtactgattattttcagaggcatctcttgggcaaccaaggacaaagtgcaacaggccaactactttggctcactgacccaagcatcgtccattcgtgttgggtctttcaatggagaagaaatttatgccccatttaagagcctacttcccatggtatactaaataaataaatcatagtaagtagtaacagtgtaaagtgaaaagtgaaaaagttggatatgacttaatatgtttaatgaatacaggtgaacccagatgacattgtttttgggggatgggacataagtgacatgaacctagcagactccatggcaagggccaaagtcctagacattgaccttcaaaagcagttaaggccctacatggagtcaatggtcccacttcctggtatctatgaccctgattttattgctgctaatcaagggtcacgtgccaacaacgttatcaaagggaccaagaaggaacaggtcgaacaggtcattaaggatattaggtatttactacgtcaaagtgtgtttaattagtactttaaagtgtgtgtttagtatgcactctttttgtgttcttgtcttttgtgagaaaggacttatattggtgatgtttagtactaatatttttaggctcatcataacagagagttcaaggagaaaaacaaggttgataaagttgttgtgctatggacagccaacacagaaaggtacagcaatgtcattggaggcctaaacgacactacagagaaccttttggcttcagtggagaagaatgaagctgagatttctccttccaccttgtatgccatagcctgtatatttgaaaacgttcccttcattaatggaagcccacaaaacactttcgtcccaggttagtttcccgaccataacttgttattattgtctttttttttttttaatcacaaccagacataatgaactctaatattagttctgtatttttgtcttacttatttccagggcttattgatttggctattaagaacaacactttgattggtggggatgacttcaagagtggtcaaaccaagatgaaatctgtactgattgatttccttgttggggctggtatcaaggtactatcttgatcacataagtttcagtcctaccatgaattccagctcattagatgagtttggtatgatgaaagtcagtacaaatatctcataaaattttgtatttgcgatcatgatcttactgcagccaacctccatagtgagctacaaccatttgggaaacaatgacggtatgaacctctccgccccacaaaccttccgctctaaggagatttcaaagagcaacgttgtggatgacatggttgccagcaatggaatcctttacgagccaggcgagcatcctgaccatgtagttgtcattaaggtaaactccaagagaatatttactttctattacttttttgtaatttttaagactatgaacttatcaactgaattttgacactattgcaatgtgtggatggttttttggtttgggttgtagtatgtgccatatgtgggggacagcaagagagctatggacgaatatacatctgagatattcatgggagggacaaacactattgtgctccacaacacatgtgaggactcccttttggctgctcccatcattctggacttggttcttctcgctgagctcagcacccgtatacagttcaaggctgatggggaggtaaaaatactagaattattctattgagttgacttataattatagtgactataccaaatgtattgatttgatctttctttctgcgttaaaaaacagagcaagtttcactcatttcaccctgtggctacaattctcagttacctcaccaaggctcctcttgtaagtcaaagacacatatctttattaactaaattttataatacttgttgtgaccaagtaattaataaacaaaagaaaactggaaagctgtggggcatgctaaagtttgtgtcttataggaaaaaaatggaattgtaaaatgaattcatatgtataattgactgttctgtatttatatacacaaattaagacaaaaaagggaaaaaaataataattatgttataattgaatttacttaaggaaaagaccttaaatactatttttgtgtgattgtggctacaataaacaggtcccaccgggtaccccagtagtgaatgcactgtcaaagcagagggcaatgctggagaacataatgagggcttgtgttggattggctccagagaacaacatgattttggaatacaagtgaatttggttaggaggagagttagctttgattcataataagttgtagaaaaacagaaaaatctcctcttttcatgaatcttgtatgtatgctctgcttgaaattctccaccttgtatgagaaagttgtggttttctgtctttgtaattgcttttcttttctccctctctcttttgttcgggaaagccttttagcctatatgtaagttttagcgctgttgcaattgctcattcacaagccaaaaaaaaaaaaaaaaagaaatgcaactcttttgtgttaaaagtagatattagcttctatatataaagtgatgtggtgatgcagttgtagttacaaatttgcctctcttttcacaatggaacatatcaaatgtctatggcaatccttaatggatacatgaaattcactctttctgcaacataataaacaatcacccaacccacacacatgacacaattatacgtacaaaaaacgaagctgaatttattgtctttgttagaacttgtgaaaagtttaaacctttcttccacaaatatttctatgggtttagtttggcgtgccactttttctttttcttagaaaaataagatttctcttactcttgctgcggatctgtagtgattgtatttgttgaagtttactaattgcaatgaaaataatacattatttcagtaataaaagtccaagaggttccatttgaaaaaaaggagaatggggacacactaatgtaataatagaaacaaaaaagaaaaccttcttgaaaataataatggaaaatttcactaatgtaataatagaaacaaaaaagaaaaccttctcaaaaataataatgaaagctttgtccctgcaaatgaaaatcaccaattgagtttcaatcgaaacttgatgaattattaagagggtgataatgatgtgaaggaaacactacatttcatgtggtcctttgtcagtgttaatcaatctttttctctaaactctaaattttcatgtggtgcacattttgtgaacaaaaagagaagcccaatgggccatatctaaggaccataatagactctataattaataactggtagacacgactgtggtccttattggtgttattgagaattgaaatcacatgatcattaactatatattattacatgaatataaaataaatttcatttgtgtttgtgttatttagtaaccgttatgataagtaaaatttctcgttttcttcagcataaaagaaagttgtcgttttccaacaacaatagctataaaatgaccttcaatttattgactgtactatatcgatattcgatcctataattattgtgagtatccatatccatttatatataaggatgtcgttattcaataagctttcattcaatctctctttctcttacaattggtctttcatgtaattacagtgggaaagagtatcataatcctgtgacaaatgaataattgtttgtttttagtgaagatttgttagtttctatatataaaaaaaaaaagaaactaagtaaatattgggaaacacatgttagtattagtagtactgtggtaggatccacgtagaacagattcaaaattattgaactgcacgtgagtttttatcagagaggacaatggacataattgagtttttgttgggccatccatggaaacagtcttttccactttttgcctctttggagttatacgtggaggagagaagcatcaacatgtgattactgattatttctcttaaataatttcatttttgtaattttattgaaatcatgttgtacttcaatttgtatgaaagagaaaaattattacaatgaaagacattaaaacaaaatgaactgacactctgcttcaaaatagttctcgatttaagctctcaaaaaattccacacataatttagtttaggggtgtacaatataaccaatctaattggattaaatttgatgttaaaatttt

SEQ ID NO: 18942 - DNA, 2678 bp, Cannabis sativa
  modified_base (2106)..(2134): a, c, t, g, unknown or other
  modified_base (2227)..(2236): a, c, t, g, unknown or other
  modified_base (2301)..(2306): a, c, t, g, unknown or other
  modified_base (2401)..(2406): a, c, t, g, unknown or other
aaatagtatataagataattcaaaatataaaaaaaaaatatattaatataaaaaatgtaatagtaaaagtaaattcaaaaaaaaaaccattaggtcatgaattttatttataaaagatgggttgagtttgaaatttttattccaagggagcctaacctcatgtcaaacccatgataattgtgccaaagaaaaggtaaaaatatgtgcgagagtttatttttatttttgtgaataaatatgatttttactattgaaatatgtggaatttttcctttaattttattttaagataatattatggactctatattttgtataagttattggactctctattttgtcaaataataattcatatcttgtgtttttcaaatgctacaaaatagactatgaacctaattttcatcaaattaaaacttaataataacttaacgtagatgtgttatgatcagactgattatattttttgcatatgctcgtgctagaaaatagtttcagtttaattatattaaaaaaacaaataacgaaaagtgtctatgttgtactattttgcaaaacataaggtctaaattattatttaacaaaataaatggttcaatcaataacttttgtaaaatacagtatccaaaattataattatcctctattttaatattattattattattttttaaaaaaaaaaatcctacttcactgcttgcacaaccattgtaatatatttcataatcctctttcccacaactgaaattctcaatcctactctcaaaataatatgaattactaaattctttttctctttttttttttttttgaaatactaaatttattatgttaagaaaacataaaggttaatatatttgtggagcccaataaataaaaagattaactaaagacgcaagatcggtaaagtatatgaggcccaaagcaaaattaaattttagagcctctatatatatggtttaattattgtagaaattacactaagaaaaaaatttaagagaacttttttatgacataattaaataatgctttggggtattagctttttgttttgttacatttctataagttttttatgtcatatttttgtaataaaaaataaatgagtacgaaaaaacgtgaattgctctggaactctttagggactctttccctctttccttctagtacttccagactttaatctcttccttcgtgatgcacaaccaccgttcctcctctttctcttccttccatcaatgctttctcctcatgattacaaaacatttaatgctttccactcccctccaaaaccgagaatcccatttaatgcattttcagagaacccttggctatactcctccatgggatcaaatccagcatttaatcctcgtcgccattttcaggtggatacgaatcatcatcacgattctgagcaggcgtagatttgggctagtgatggctacgattgatctagcatctctccagcttctacccacttctctctctaggtattctttctatttttttcatctatttatggttaaactggttgttcatgtgttatcccatctctggtttattctctttgccttcctttattctcttgtcttgcatgtcttccaccatgaatgtcgtcttagatgaccctagccactttgttcaactcacagctgaggaggcactgattcctgacttcgatcatgtctccattcaccttaaaccccaatctgattccttttgtcttcttgtcaaagtcctatccattaaacctctcaaacctgattggatttgtaatgccatgaaagaggcctgagtggcctgttactctttcaccttctctgaatatcactcaggaatgttccttgtttgttttggatgtgacggtgacacaagaagggttatggaaggccagccttggcatttcgaccactctttaatgatctttgccatccttgatggattcgacaccatcgttcctaaccagcttcgtttcattcctctctgggttcaagttcactacatcccctttggctccaaatcctacggccttgctcattgctgacaccatcagggatctcatagaggtgtatcttgttggggattattttaccaagatctagattnnnnnnnnnnnnnnnnnnnnnnnnnnnnnaatatgaatttctaaaacaatagaatttaaacatgcataaagttcaagaaaccttatattggttgtagccgaattaaatgactccttccactnnnnnnnnnnacccttgtatcttttctgtagcagagtattatcaagatctgagccttacacactatgattgagtnnnnnnttgctatgtgtgggcatgtactctatcactataaaggttcgaattttgtagagagaaagagagaaggattcaaaaattagagagagagagagagnnnnnnagagagagagatagagaaagagaagactcaattttgactgaaaggctagtgaaacttaagctgtcaatcatctgtcagtttgagtttatcactatctatttataggaatccttctaggtttaggtttgaattatttagcattaaaaaattgataaattaatggtaaaatagagcttaagtggccggtcataggatgtgggcccaccacttgcaattttgttatttttcaactatttatcttattcttccacaaataccatattttccaattc

SEQ ID NO: 18943 - DNA, 3692 bp, Cannabis sativa
  modified_base (1659)..(1662): a, c, t, g, unknown or other
tgcacagtgtgtttaaaaatcacgtaatacgcctatgcttgttagggtgttacatgcttcctcatcttatttctcaatcccaaggaggatttgtccatggtaagcatatttttcacaatataatagtttgtcaagacctagtgcgacactatgggacaagtaagtgtaaaccatcgtgtatgattaagatagatttaaagaagtcatatgacactattgagtggagatttgtggaggaaatgctgccagccttaaagttcccaaaccaaattataaagctcattatggtatatattcgaattctaaaattctccatcttttctaatggatccttaaatgggttcttttctttcgaaagaggcttatgacagggtgaccccatatatcaccacttttatttgttttaggaatggagtacttatttagaatatcggtgaaagttactgctaaagaaagttttaagtaccatcatagatgtggagctttaaaattaacatacttatgttttattgatgatcttttgctcttttataatggtgatttgcaatccataatgtggctgcttagaagtttcaaaagattctcttcaacatttggacttcaagcgaatgcaagtaaaactttaattttttgcacaagaatggagagtcaagatgttcaacaaatccttgatgcctcgagattcaagcaatgtaagttacctttcaattatcttggtatcctgatttgttcaaaaagagtctcgatggatgattgtgaaattattattgagaagatggttgcaagaatctgagtttggagtattaggcacctttcatacgctggtaaagcagtgttagtcatctctgttttagtagtaatacacacatattggtctcaagttatgatattacccaaaaggtgcttttttccatttatagaatatgcaggattatctttgtaatggttcagcagcctataaatcccctagattgatagcttggaaggatgtttgcaagccgaaaaaattgggaggcttaggattttgatgttttgaagattggaataatgttagccattggtaaatatgtttgggctatagctcaaaaacaagacaatctatgggtaaaatagatccatgaggtttatatgaaagactcagattggtgggagtatcagctacgtcatgatagtagctggtaatggaaacaaatagtgaatgtgagagaccaacttaaaacatgctacacaaagaaacaactctagcaaatgacttattttattcattcagcatgagacactatatttcaaaggcaagaatgacaaaggtggtttgttagaaaaatctgggaaatgtatagcttacctaagcatcaaatggtggcttggttatcaacttggatcaaattaaaaataggtgacagactggaaaagcaaggtattcaaggaccaatcaactgctacatctgtggaagggagcaaaaaacgcatgatcatttgtttttcaagtgtcactacaaaaaagtcacttttagtgacaaccttttagtcataacataaattttttgtgactagatgtgacttttagtcacaataaaaagtcacctgtgactaaaacatagtatttagatacaatttgtcactaatttagttttagtcataacaagtattgtgactaannnnacatttagtcacaataaattgtaacttttgtgactaatacttttaaccacataccttttagccacaacatagaaatgataatttataattagtcacaatttttttacttttaacgtagaattttttgaataatgatgagttttattaaatcaaatcatctgaaactaaggatgcaattaccgtaggtaaaacatccctagaaaaattacaatcagcctaagaaagagaagatcgcggaagaacatgcgcaaccttattagcatatcattttacaaagttaaaagaaacaccaaaaatatccgaacacaaagtcatacaatccgagataatatggtcataaggagaagccatatgtttaaacttttgtaaatctctgatgactctcaagcaatctgactcaaccacaacatttttccattcatttgctttaatccaacttaaagcttcctttatgccaatagcctcaaccacatgtggcttcaaaatacacacttttcttatcctctttgcttgtaagactatcccagcaaccgaacaccaccaaaccaataccaaaacgcctttcatttgtgaaaattgctccatcaacattaacttttattgtaggaaatttgggaggggtccaatgctccaaatccatatcaaccgaacaatttacttcttgagtatgcagggtattcttttgagcattataccaatcaaaaaagtttagtttagctagtgtcacaacatcactaacctcatgcattttagagttccataccagctcgttcttgtgtttcaaaatcgacaaacacaacatagcagcctccaacctctcggacatagtccaaacacccaaaccttcctcgaaccaagctgtaaaagtcattgcagcagctgccacaccaggaacccgagacaaacaccagtagctttgagcaaacgcacatcgaaccaggacatgcaatggtgtttcaggagctgcatcacagaagggacattgagtgttgataggcacatgttttgtcatcagttgaaaccgagtgggtaggaaattagttgagactctccacaaaaaattaaggacctttggaggaagcttcaattgccatagttgctttcaaaacccaaaattagccgccataacattactgccattaatctcttgtttagtgcataggcgcttttgaccgtgaataaaccattgtcttccttcatccaataccaattatcattgccatagccatttgagagagggattttccaaaccaaggcctgatctctctcgttgtaatttagcaaattctatctcagacaacttttgaattggatctgtataagcaccaatcaataccaatttaaagggctgttgaacttgataggcagatgcaaacatagtaaatcgcgaaagaatatatgtattctcgtttttaatgcttgtacatacagatacatgatatggaggactagaaacaaggctctttgggatagggaagttacaagagtaaagaattttgtaaagttaatttgttcaaataattgtaactattagaatccaaagcttagaaataaagaacataagagggaatgatagagtttgatttaaggaattatatagaggctgattagtttaatacgagttgtattagctattcatgtaatagctctggttgtacaagttttgttgacataatataaagtatatttacttacaaatatatatctctttagagagtgtattgtaaacttttttttagtgtagcctaatagaattttataatcaattaatagcttaaaactttaaaaatcttgagtttcaaatctctccttttttctcatccctctttcattactaaattaactttaattttagtcacatgttttattgtgactaaaagtaaatttttttttttatagtgtttagtagcttgtactataaatttactaagtaatatatattataatatatattgaaaccaaatatattattaaatatttttctattaaaaacaaaatataaattgttatatatttatgcttcaaatact

SEQ ID NO: 18944 - DNA, 4665 bp, Cannabis sativa
  modified_base (1909)..(1922): a, c, t, g, unknown or other
gctcattaccttgaaggctgcagcgtatgctgcttgtagattcgacatgccttcaaaaggcaacttattatggacgagctcccataaaacaatggcaaagctgtatgcatccaccttgtgattgtaatgcttcttctcgccatgccttaatgtgaccgtgctgtaaagctgccattggatcatatgtaaacagccttcagatgacagattaagacagagagtgagagaatcacaatggtagaatcgaatttcatttttacctctggtgccatccaccgataagtcccagtttcagcagtcatcatctctgtgagtgtctcttctctagctaagccaaagtcggcgagtttaaccgttttatggtctgcagtcaaaatcaagttctctggataggaaaaagaaaacaaaatcattagaattttagtagaattcaatgaaaaggggtgcaaaattatgagattctaaagtaaactcaatcactgatccttactagaaatgccaagagccaaaagaggcacattgtctatccacttactagaagaacctataacaatcaattctggtgacttttatacaatccatctcatggattaagctaatatactcaaaagacaaggccttagaaatcaaatgcaaaatgactcataaactgagacaacacacagtttgtaaaaaggttgtaaataatgtcaccattcaaccgaaaaggaaataagaacacaccgggtttgaggtcacggtgaatgatcccatgagagtgcaagcattccattgcacgagcaatatcaagcgcaaacccgactgccacacgcgtatccaagcatcttggccgcatattaaacaagtatttccgcaatgtcccacctaacagaagctctgtcactatgaccatgacaggttccttgcaagctccaataaactgattgataacaggcaaaacacaaatcaaaaaccctcttacacattacacatatccaacattataactatcattgaaacataatcacacagtaagtttgttgataaaacaaaccttcactaaatttttgtgctgaactttagacagcattgcaacctctcttgcaaaccttccttctctcttggcaatttcttctggtgtatctcctctatgaacaattttaacagcaacagtctgattcttatatctgaaaagagatgaagatacttaaactcaagaaaatcaatgttataatcaaaacccagaaagagatcatatgcaaaatttgtgcttgtcatttctattgaaaaaccccaattgaccaagaaaacaaaaagcaaggctttataacattaaggagttctgaaactaattgggtcagtgagattaagaaagatgggccctttagaagctgggactaggagaggagagactgtgggggcagtggtgttaactatggaaaaacaaaatctaattaaatgaaagatcagaggtgagtgagaacaaatctggaaaatcccacagtagtaggccagacagagaggagaaaatcctcaagtacaaagtaaatgtgtaaaaaggtttgagatttgttcaaagatccaaaacaaaggacagaaaaaacagagagaagtgaagtttggcttgttgacttactttccttcgtacactttggcgtgtgcaccttccccaatcctcggtccaacaaaaagatgttttggatcgatcaaccacttggcatctaaactaaactcgtcaaccgagtaaaccccattaccagatcccatacttttctctgtgctaaacccaaaccaaaccaagccaaccagtacttaacaaaccataccctttttcaagtaaactcaaattcttacccaagttccaatttttattcaaaaaataaaacaaacactactatgttttaggacagaagagagagagagagagagnnnnnnnnnnnnnnagagagagagagagatttgagctagatgtagagaaagaaaatatatatgttgtgaggtttgtacacatggcaagacttacaacacagacccatccccaaaatcacgctataaaaaaagctataaaatatctgccatgtgccttcattcggaggcagagaacatcactcggaggccacccaccaacaaaagccagaaaatttattaaaaaaaccaaaatcaaaaccaactcaaacaaaaaataaagctctgtcagaaagagcagagtagtgaagctaatttatgggggaagaaaagaaaaaaaacaaaaaccagagggggaagaagctctgaaaatcaatcaatggtggccgaaactcgatgacccagatgaagatttgagaagatggtggtgtaatgagaggtgggtttgtgttgaaaatgaaaaaaaaaatgatctttttggtttatttttcacgcgttggaaggaatgaactgctctgttctcgatctgtagataaagccgcggtgagggaattgtccttgtcagaaacagtgtgctctcttacaaatttttaataattatttaattttaatatttatatatataaaaaataataataaaataggtattagagcctagagagacagaatgtgagttgaagaaaatcttgtgagagagagagagagagagcttttggtgcttatcatataattggataattgagtggtttatttattttgtgtgtacttgtgttgtgattaatttaatttaattacttaaacaatattatgtgaactaaaatgtaatagcacttagcagtagcaccacatgattatcgattaccaattgaatcaaaatgactaacttgttattctatcattcttgtctttaaaagaagaagaaaaaaaacttaataacaaaaattaattttaataatcttttaagaactgagttattgatgtcttatcaatatgagtaatagagtaacaaataaatgtctttttttttttttggtttgcataaaggtatactaatcaaatcagaaagcactgataattgactaagtctctaataaatctttttgattagattagaaaaggtggagtttaaaaaaatgggatattagtaagtgtatttgcattaaaacatctctttggtagtattaactgtgtgatttattttagtttgttagatatcaaattaagactaactaatattttgattaaaacaaattgggaaacataagcattgatataaacaccatattttcattattattattattattattgaatataaaaaaaaaaaattacattcatgtttaatggattcaattcaatgaattagctatgggttaggagagcttagagtcataggaggtttctcaagcatttatggttgattttgtctaaagtgagtagtctttttcttaaatggtctattttgtctcattacataaaaagaaacacttctttaatcaacaaagtcattactcattagtatgtagggtgatgatgatggtgatgatgatgatccttggatttgtatgtctaagaaaaggaatcaaatatttgtgttgagtttctttcctcattgatcatcttggttgaatttaagggttcaattaatttggaaaaaagaaagaaaaaaaaagttatatgttgcttcttctactccttccaaattataaacaagttgttaattaaaatatttgagattatcttttgacctgaaagctacctgctccaaccaaattggtgccaaaagaaataatttattttagttaaggaactttctatgaatgaaatgaaaaagtatcatgtgaacctttaataatcccaaaaagtgtcaaattttatagagccaaatacatgcaaacttggttaaaatagtttctcacaaatattggtttttcactacaaaaccaaatttacactttagttttggaaacatgactaatatgttttctaattgtctaattacaaaaatagaaacttatttggaagctatagtgaagtaggagcgcatggcgggtggatttgcgcgggttttgagcggtttgtgccgtttttttatttggcgggtttggaatacaatggcaataactacctaataagtgaacagtttgcgctctttttaaatgacagtttattacagtttttttggcgggttggattgattaattaagaaaataaataaataaagtagacaaccttttattgaagtgataatttattaaaactatatttgcagaatatgataatatattttaacttatattgattttgtttcaaaagtagtatgtttacctaattttataatattttgaggatattaattttagaattctaaatctgaatgcatatctcaataataagatattatctatgaatttaaattttgaaatatttagacggtttattttttctacatttaaatatgttttctaatgttttttaattttataatattaaaaaatttattaaattatattttataaaaaaaatatccaaacaaaacataattaatatattaactttaaaaaaaattattgctataaaaaaaaactttaaaaaatttatgtttcaaatattttgaacacgtttaagtttcatatagataggcaaagaaataattatttattaaaaaaagtaaattaatagtatttaagttatatataaatttaaaggaatttttttatttttacacttcataacaatttttttatttttacacttcataaccgtttttttttttttttt

SEQ ID NO: 18945 - DNA, 5481 bp, Cannabis sativa
acacacacacacacacatgtataagcaagcacatatgggtgcatcatgtagtcttttactatatttgtccaaatgtagttttttaatctgcttatgtaattatgtctgatcacttggaagcttgtccttcttttgccttaaatacatttatttcataaccgtgctttaattttgaaagctgtgtcacgtttatgctctccttcctcttttggaacttcattgtgttaattctattgtgaaatgatgcatattatttatttttctattgcagatgggcgtgggtcccactgtctacccccaacgccctgggcaaatggagtgtgatgtaagcaatcttcattttccttgtctgttttttatacctttcaataaattcagtgataggttgcatcccaaacctggattctgcatagttaccatagaaatggaataactgttcactatctaaactgtccgttcagttcagcttatctgtttcttctagtagaattccttttgtgttgctgatttcctatgaaagtagtatctttaattttaggaaacaattgagttcttgtaatttttctgatgagataagtaaataaaatgtatttgaatattgtgacacatgcagctaaagtaattgtttgctttgtgtgcagtataagtagttgtttgctttgcttgtacatagaatctattaactgtcagctggctttactcctaagggagcggtagttaactgattatgtgccctgttaatgaattactgtactcatggtaactgtgaatgttaaaaactatttgctttttaatgctgtagcattacatgaagaccggagaatgtaagtttggtgagcgatgcaagttccatcacccaatcgaccgatcagcacctacacttgcaactattcaggctcaacaaatgagtgtcaaacttactctagccggactacctaggagggaggtatgatgtatgtgtacttagctatcctcattcactaattactgagatcatcactagtgttgctttacttaatctttgtccctctttgagatttaaagtctgtcgtgaaaactcattctagatccatgagtggtaggttgtgtgatctgctcattttatgaggtctaaggttcaatccttcaaatgactcttcttgctacactagatttctctgctttcgaaagatgatggacatgatacaagtactataatggcaccaaattcaaagccatacccttactttaggaatctaaaaaaggaattaaaatgacaatcgtttggtcttaaacaaaccgatgtttggtttaaaataaaataaatattaaattgatttgttaaaaaagaggactgtcttcaaaattcttaaactaagttatattgtttaggtagacttttgtttggatgtgatatttactatttgtctgccctagtgttttacttaccataatccatttggaactttgtgggtttatcaatgtctagtctgttgaaagtacaaacatataaaaaccattttactcatggaacctagtatcactattcagtcttctctgcacaaacattcaaaatcaaagcagtagcaattcaaacaaacaaccaaaaatctactgaacttgtaaccattcccttccacttcaaactgacagttaaatgtcaaaatttctaactcatttctacagctatctaattaaaacaccaaaaatgtacaaaaactagttctttccacttaaactgcctgctactattgaaatttcctaacccattgccaaaattttccattagctgagatcatctgtcatagtcttcctgcatgaagactttgtgctcaaaactaaatttattggcagatagaaaattttatcccaaggttattgtgttttctttaaattttaggcacatgaaaatggtgctctttgacttgttttgcaacaattcaactgttgggtcaatcgtgtatagtatgttctgaacattgaatctgaatattatgtctccaaactcgcttgttttcagtctgacttttagaaaaggtttaatgatgttggcaatttttttttcctcaaataatacaagtggctaattatctatgggtatgatttttcatgctaactcatgatttaaatatgttctcacacaaaaaaaatacatataaatgttgcaagtgttttggtttatattatgtgctttttattatattttaattgaaatattaacagcttgattgacatggataaattgagtgtgtcttgtattttatgtcatgatagttccttcggcatctcaagaattccttttgtattgtcttattgctctaataattttggaagacttgatactttccttaattagagtgagtattcatgagatcatgtatttcaacagggttccataatctgcccgtactatctgaaaaccggagcatgcaagtacggcccgacctgcaagtttgatcacccacctcccggtgaggttatgggacttggaggaacacaaggaacatcaacatctggaggagaggaaggaaaaggggatgaagaaaatggaggtgaatctgtccagtaacaacttcaatggcctctcctatagaataaattttattgagttattttcttgggatcatgtcatttttctgcttgtttgctaatatttttacttgctattgtaacttcatctgtattggaaagtttagaatgatctgatctgatctgattctgtacaagtcataatggttggtttgattaaagaatcttagtttgttgtaaggtaaaatttctttgcatggaactcaaaataggtctgacccagttactaaaactttcggcatacatttgatttgttgtaaaataaccaaatattctatctttcgaaagtttaaatttcctatgtggttagtatgtttctttttttcttcatatttgtgtggcgtaggtcttgttctgcagttgctcaagtgagaatcctcgagcctagcttaagggcttccttgcatggtaggaaaatgtacatagctacacgactcataaacttcaatttctgttgatagttgaatctacagcaagtagtacgtttaatcaaaatgagtcgaccagtttaccaaacgacaaagtttaatactaaaccacaaatattgaaaggtaggcagcaacgaatatagaaaggtggcgtaattttggattggggcatctcatattaataagaaccaaaattgcaagggtgctgatcgtataaattaaaaattgttttcagttttaaaaaataaaaaaatagtttttaaaaattaataggggttgtttggtaaattttttttaaaactaagttttaaaaaattagaaaatagaaaacattaaaatgttgttttcaattttcaaattttttttttttctctaacatattatattttatatttttgttcacatattcggattctagacttgaaaccaaacccgaacccgaatggattcatatcatggttatggtgttaaaatattgattttttttttagagataaaatataaaaatagttttaaaaaaacttgtgccaaacactattaaagtgttgacctggtgacttatgaagcaccttgtcactagcatgatagaggtccaactgtgtactccattgctctatcaaggccatataataataaaacgatgtttatccatacttcttgtgtatgcttctgtgttgcctatgtgatgactgtttgttgcctttgttaggccattgcgtgtcatttgtttgtttgtttacttgtggattgtgtgagactggtccttgaggacgattaatgtttgctttctcatgcttcttgtttgcactcaatatgtgtgaggcatgtatcacgcctaacctttgagcttatttgcctacaggtgcatttaggctaacttgctagcttgatgtgccagcaagtgtcccacgttccgcctacttgggagtgtccaaattagggctgaacatttagacccgaaaaacctaaaaatctgaccacccaccctgactcgctgccgaaaaaaccaagaaaaaaaacccaaattttcgggtcgggtctaacccgaaaatgtataaatcgggtatcgggttcgggttttgagaatactgctatataggattcgggtgtgaatccgagacccgaatactacataaactaaagtacaaaatatatatataaactgaagtacaaacattaaacacatataatattatatattcttttaatacttataatattatatattctttttaaatattattttatttttagttagttaaaagttaaaaccaaaaaacaaaaacttaaaaacctaaatcctatcgtatccctattcttctcagtttctaggtttcttccaaatcccagtcgtatccctcattccctcgtcgaccctcatctcctctccctttctcagttgccggtgagttcttctcatcacagcgggcgactcaatccgacgagttcttcttctccttgtttcctgctttgatggttgtaattgtaaaaggttttgtttctttcaaattgttttaatgaaatttctttctaaaaaaaagattttatatgtattgtatacatataactgaaagtctgaaagggccgaaacttattttcaaggtggtcttcctgggcaacttttcccattttattatgagccaattttatttagtaggtcttttgatgttttattctcatcacacaactttaatttttgtgtatttaatttcaggtaaatcttgatggaatgaaatttaatggtatttttaaaaacaaaatatcatttgggcccaaaaatccttcaatcggatctggcttattaaaatctgaactcgccctacaaaacccggtgcattcgagctgaaacgcgtatgaacccaaaaactgagaagtcgggtttggttaggcattttaaacacccgatacccgaaaacctgaacccgaccacccgaaaatccgacccgtgtgcagccctagtccaaatagttggcccgtgacaattggtattagagccaagagaaaaagaagcttggtaacacgttcctaatggtgagcaatactcaaagaattcaagagcttgagaagtgcatgggagaactcgtaagcttggtaacatgtttctaatggtgaacaattattaattttactagtatatcttcaaaaatatcttattatttttttaattctatttcttctctctcattaactaccttctttattatcactattattattatgagtaaataattagaataaaaccaattctttaaagaaagacaaagacaataataataaaatattatagctacctcctaaaacttagaaatctctctggccatgcactatttggctactttttttagttatttaagtcaacactacttgtgagtgtgaatagttgtttgtgttgacaatggccccactctcccaatcccatgtgttacgtttcccttggcttgtcggtatgccgcttgcacgagacgtggcctagatcctccaaga

SEQ ID NO: 18946 - DNA, 3979 bp, Cannabis sativa
aaaatggtagcaacatcttctagtggaaaagatgagacagatgacttcaacacatgtgcctttataggcctaccaaaccccctttcttttttccttgttcttccttgccaaacgtaccaaagagctttgagcagacatgctagaaaaataatgcaattttaagattagaaatatcattaataaagtacaacaattattattattattattattaagattgaaaataaactattaattaataatactaaatcttaatattaaaacttctgaaatttataagacgacatcatcatcgtaagcacaattgtcatttatatcattatctttgtctacaaattattcattattattatcgtcattatttgcccttatctttaaagttttcatcattaaccacaaaatcatctaaacttcaactattactaatatctaacattatatcatgaatgttggaaacttcaactgactcgacatcttctcgaatatattcaaaaattattcgattctaaagttgtacgactaattgaattctggatgacttgccatcttgaactattgaaatgtcatcatcatctctatctaaaaatctcccaatattatgtggagtgtaattgtctacaagctccccatcatcttcattcttcatatccttagcgtagtaaaccaattttacctgagatgcaaggatgaatggtttattttagtaccattggtgattaacacaaatactagtaaaaataagggcatttttcaatcctactcctagtagtgtttgtttcatgccatttacacttgaaaaataatactctacagtccttcaaataagtcaatttaattacttattctagtacgccataaaaattaacaccattttcataggtaccataacactgctactctatattttatgacttttatcttttttcccaactatataaattttataccattcacaatgcatccagaataaaagaagaatatgtcattttctttgttagcaatagcatacaactcatcaggtattttgtctagactagtgtgtcgaaataatctagtaatgaacaaatatattatgtcagctttattaaatataactagaaataaatgattcactctaaatttaacctagcttactcaatttttgacccattcaagaagctcatttttttgcctttcttccatattaggtataccacaccttatctcgttcatatgctcactacagaaaaattaattaatgattaggatgaaattacgtcaacgaattaaaattattataaagtaaagtttgatagcctgtcttacttgatataatgttcaatttcgacacaaatattcaaaatataccacttcgcacttcggttcgattcatcagtagtctgtcaatagttttttttatcgataggtcatccattgtgcttaaatatagagaactgtcgattgagcttgtttgagatgtcatcatcatcattccgttatgctttatgaaatttggttttaattccttgaaagtacctagagcagtgagttaatgcctcactaaaaatatatgcctcaacaattgaacctttcggacgagaccgatttctgacataatttttgtacatagacatgcatcgttggattgggtacatccacttatagtgcactagtctaccaagaatttcttccttaggtaaatgcatgcataaacatcacacaatatctttacaatatttgtcagcatactaatgagatgacattcaaagttcatcaacatagttgcttgaagaatacacacaactcaatgatcgtatcctgaacatctttcttcaaatacttttgaataccggtaggcatcaaatattgccagtaatgacaatcatgagatttgaggccaaatatcttgccctcgtgatctttactcacattttctccaaatttaaagcaaaactatctagaaaccttacaaacttaataaatctacaaaattcacgatgctcattaacactaagcgtgtaacttgtagatagcttcttccatatccctattttaccttcgtatattcataattcagaatgaatattcaaattagccaaatcaagtcttgctttgtacatatctttagatttcccctcaatactcaagagagtccccaatacattgtcacatatactttcttcgatatgcatcacataaagattatgtctaagtgttaaattcttccaatactctacttcgaaaaagatactctttttggactaatcactactaaaaaatagacttttggtgttggtttgagggacggtttttttagataatcgacactaaagacaactctttggtctcagtttataactgacaatgactttaagtgtcggttagtagaccgacactaaaagtataaccaagaccaaaaaagaagttaaaaaaatatacatataaattgagtataattgtcggtttataagtaattaacactaaaagatcctttagtctcggttaaaccgacacgtataaacactatttttttttataaaaaagtttcagaatgaaaaaaaggtatatatacaaagttatgaaacccttgtagaaaccctttcaacgctccatctctctctacgacctctcttttaatctctctttgatttatttcactcgaacaaaccctgtcgcccaaaccaaatctctctctaccgcctccatcatcttttctgatctctctttctctgatttatctcgttcgtccgcgaacccagttcatcccccctcttcttttcagttatctttctctagtttatctcattggagttgcgtttaaaggttggagatctctcactcatgctccctgatctctctctctctctctctcttggttcttgatctctctcgcttggggttcgatcgtcatgggttttgaaggccagttttcactaaaggattgctcatggtttcattattctgggcttctcccttggtctcagatctttcttagtctcggtttcaacatcaaagttcttccttcttgggcctttgatgccaacgaatcaccacgtagagatggtagtaactgtcgtaagaggaaaatgcattgttttttagatttcaattttcttattaattttttttagtgtgtaaatatttattattattatttctcttataaaacctgttatggaatgtttgttgaaatattgtgagaaaataatttatttatttgcttcaatgaatttattttgaataaaatttaaaaattattaattaattttgaataaaatcaaatctggtttaaggtaaatattttaaacttttatttaaataaaatctaaaaattattaattaatttttttggtctcagttctaaaccgagacatatagtgcaaaaataaattgcacacccataagtgtcagtttaaaactcacaccaatgcccaaaagtctcggtttagaaccaacaccaaagaatatactttttgtgactgtggaataggtgtcaattttatgaactgacacaaaaagtataagtgtcagtttaaaactaacaccaaaagtatattttgtagtagtgaatttagctcggcatcaaaacgtttccgtttgaaacctccaaaatccttgtatttccctggacatcaatattgaagacactataattgacttagaatatcagtcattgacaattctgtggggaaggaggggggagttcttctcttaagctttccatcaaattttttactccttctccttgagtcactaattttatgaaagcgacgatggccgacatacccaattttattacgtaagcaaatagaatgagtgtgttcattacatgtcggacatactttgtacccttttgtgatccaaccagacattaaagcatatgtagaaaaatcatttatagtccacataatagctgctctcatcatgaatgtgctgggatttatgccctaaataaaatctatttcaatataatctaatttgttatcaatagaagattaga

SEQ ID NO: 18947 - DNA, 2062 bp, Cannabis sativa
acacagttacagtgtaattatatggtcccaaattgtgtaattatctctaattacacacaaattcaattacattgtagctttccaaacgcaccctaaacttcttcctcttcttttttagttttaagaaaatgaacaaaatagtaacaagaatttaccttttcttccttaaaaaaaaaaattaccttctcatttaaagagttaatgaagagaaagagagagagagagagagctattacaatttagatgtagctattgtattgtagggagacaaaaagtgtgaagatgtattatattattgtataatatagttaatgcagaaggaagggtattaattaaagtttagggtattaaataatttggtaactaataataataaaaataataataaagtagagggaataaatatatatacataataattaagtatgtaagagactgttgtctgatgatgcaatcacgggcaattgtcatgttgctaaattccaaaaccccttttttgttttttgagagaattccaaaaccctatttctcactttatttaacaccaaagatttcatgtgtgtccatatgtgtatacatatatacacaatatatatacacttatgaatgatatatctgtgtatatatatatttctgaatttattataaagacgagggggtgtgtctaagtctagggctacaatcattgccaagtcaaatagatattacatttcatttttattgttttaaaaaaaaagtctttttttttataagtaaaaaaaatatatcttatttgatgttatattattagtgattagtttatgtgtgtatatatatagatgtaatttgttattagaatcattattatgagatgatatatatataattaacatcacttacatgcatgaatgaatgataattaattagttacgaacaatgtataagaacgtattttgaagttagtgtgtaattaataagtcatgtaattagtaaggtagtaattacgagattagtaattatattgtattttaaaataaaatgtatttttttttaatataaagtgatgattatatatagatttctaatgtctaaaacagttataaaataatattttttcatggttaatttttaaaattaaaagtttttagctaattgaaatttctcaattatattaaaattctaattacataattacaatactgtaattatatgatcgacaaacatgtcaaattatttaattacctctaattacaccaaaatcaaatttctccataactttccaaatacaccttaattatttttatttttatatatttttattatgatttagtgtattattatttataaataaaaataaatcgcacaatgattcatctaatctattttttttttaagtcttcaatcaaatcgtctgctagggtttctcttattaaatcattagccgccagagtttgtttttttcttcggctaggcccatcggcccttttttggcttaggcattgcttggtcaaggtctatgattctgctattgtgattagtcttgtctgtgtgacatggttttgaggagtgtcttttgttaattaacatactgcgattagtcttgtctctgtggcatgattttattttattttattttgttgttggttcgtcttctttttattcttcgatgcctcgccatcaaattgatactagtggttgggaataacaagttctctgtggctaaaagagttgttagtggtgcaatgttacttacacaatagttgagtgctcaaactaaagggttgaatgaacctactgttacagatctactgtcgtgtacttgtgaacggtggaagaaactaaatataattagtgttcttaaagttaactgtgatgctataatctttttttatctgattttattttagtttttttgtcaaacgatttagaaattaggtggccaattagttaattcattttttctaattttaatcctaattgtattttcaacgaaggagatgtccctattagattacagaatattattttaactgattgctattaataaaattacatgatttcttaaaaaaaaaaaaaaatacat

SEQ ID NO: 18948 - DNA, 5134 bp, Cannabis sativa
  modified_base (46)..(50): a, c, t, g, unknown or other
  modified_base (775)..(775): a, c, t, g, unknown or other
  modified_base (2793)..(2801): a, c, t, g, unknown or other
acttttctggccgttaaaaatccctcttgaactattgagattgttnnnnntaaggacttttgtctaatttcaatcaattttactatttcattgatttgttccccaaactttaatatttaccaaatcatgtcccttaaacattgacatgtactaaatcatactcctaaactttcatctatgttagattttttttttactaaaattggacaaaagtccttaaatctaaaaatctgcaataattcaaggggtatttttaacgacattaaaagttcaaatttaatacatgtcaaagttcggaagacaaaaaccttaattagtcttttacttaattactactatatatataacttcatcttcagacttatactgtgtctgtgtttgacatgttgtagtcattcttggttctaaagatgaaatttaggccaactaagttttttcgaattgtaacttggactacttatgttcgtcagtattattttttctttcttttttccttgttcaatgttgttcattaattttatttaattattctaatggataattaattaaatttgtttggttcattattattattatagatgcagcatttatttgttgcaatatcactccctttctttggtgagcttctcagttactttggaggctttgcctttgctcccacaacttactatataatcacttatttactaaataactagtatatatatttgtgtttaaaaaaatattaaaagtgatttttctttttgtttttaaaattgaaaagtaaaaacagttntataaaacatgtttttgaaaaatatttttacttttctacttttaaaaacagaaaactaattaaaaaagtattaccaaacgccgccttaattaattaatacactactaatttatttcctataatgtttacatctccattgcattatgtggcttgctgtttacaagccaagaaggtgtagcctatcatggtttgctaattgggtaaatactttatcattttgttggtttcatattattatgtctaatttttttattatgtttaatttgactctcctaattatttaaaatctatttttttttcagttttgcattattcaagctcagacattcaaattcttttcttagtgaatttttaattttaattgtagtttcgaatttatttgtttatatagttttcttttttctttttggaggtgtttacaatgttttcaatttcaccattttgtacggttggtttgtcaactttaaagaacaattaatttgcttgatggatatttatttatcatcatttaattcttattttacttatttaattcaaaaagtcagataaagatgcgcataattacttaatgagaaaagacaagtcaagtgttttatctagaaaaatgaacaagagtttaaggtagttacatattagatacatttaatttaacccattaatgaacataatatatataagactagctaggttgggccgggcactagtttagccctcaaattaaagtgtctcacgtaaaaaggataggtaatggtttgacaaatcatgcttaattggatcaattaccatacctaactcatcatatgctattattattggaatgactttgtccattacaattaataatcgcagtaaaaaaaaaaaaatagagtatcaaatttgtgattttttttttttatattaaaatgaataagagtactgaaacttgtattaaatttagcataataactaatgaacttatactattttttttataaaaaaaaaatactaaaagtaatggtatttagcagattatttaaaatattatatcttattagtataattaaatattatgtctcacataatttaatttaatagatattataaaaaatcactaattatttataaaatgtcaccctctaagtagtgctagataccattaatacctactagcaatgtttttttttgtaatattataatattattatttggtattaatgaatgatttcagtaccgatttttgaagaatgtcattatttaatttattaattattcttaataattattacttttaattattaattattatattcttattaatatataagaaatatatattcttactaattattgctttaatgtccgtttgtatcagctaaacaatgtactaaatatttattaattttttatgtcaaatttaatatatgttttacatcatacaatattgtagaaacatcaagttggtgcaactgcaaatcttgattttggtttagtatatcctgaaataaaaaattgttttagtataaaatagtaaactaatttgaacaattaaaacaaaattaattacaactattaaaataagtacaatgatatatgcataaattatacacaaatttaacatatacttataatatgggcggacctaaatagagagaaaagagaacaattgtcttttttgtatgtattttaattagtaagaatatatatttataaccatcaaaccaaaatatatttataactaaagttaatacttattcacaaaatgtaaactttactttaattttaatttctcagctgaaaataagattcaaattccaactagaaaataaaatacgtctccttaacaaaaaagaattaagaaaaattacttccttcaatttaaatcttgattcgctattaattgataaatcaaaatctccaattaaaaaattgaataattattaatatctaagttataattccagaactttggtaagtatttgactattatgtgttaagtaaattatcacgtggtaattcttgattggtcaaagtcattaaannnnnnnnnttttaaaaaaaattaatttaaatgtacaaataagaaaatgacacgtaaataatgatttaatatttaacggtcaagtaactatgtatttccaaaaatataactgaaatactgtcaaaaattaaacttaagtatttatttataactgaaagttaaatttaggtattcacaaattactctaaaaaataatctcttgtccaatttaaatttgacacgttaattaatttttaataaataaaaaagatagttaaaacttctcaaatttaaattaaaagaggaatttttaactgtggatgttgattcattaattgatgtaatgggtcttacatatattgtaaagtttgggaaatattatttttatttaataaatgctatgaaaaatgggtaatgtaataatagcaaagccatattggtattcttaaaataaaatgatataggacaaaaatttaaaacaaaaagtcaggagtagctgtaggagtaggagaactagtaatctccgccccgccattaaactagtctctctaggtcttccctcccctcccaattcctctctctctctctctctctcttctggcgactgtgctttcacatttctctcgcagattctcaatggccgcaactattgccttcaacgttgtcggagctccggctaaactttcagcctcatttcgctgctcttctcctctcctcggtggccttagatcgtcgactcagcttcatcctggtctttctttccaacgcacaccttcattatcattttcatcctctggtaaaatcctacattcttttaatccgagttacttcttttcaatctaaattggattttacacgattcaatgagtttttgttttctttctcaggtatcagggctcaggttgcagccgtagagcaatcgaatgctgcttctgtagctaagaatttggagggacctgtggttgttgtcactggggcttcgagagggatcggtagggcaattgctcttgctttgggcaaatctggttgtaaggtctctgatcattatctcttctctctctgttatttgctagcttttttttttttttaacattatttattactattattgttgttattattctgttcgttctaaatctgatctcttttatgtctgtaaaatgaccaatcttgcacccgattttcatagagtaactataaataacccattaagagcttggttgttaggccgtattaggttgtattatattaaattgaattatatatttatatatatatatcatgtttttatataatactatattaaaattaaattaatactaaaaaaattatatatttagttgctataccaggtatagttttttttataaaaagattgcataaaatacaattcaatataatactatacaatataatataatatggcataccgaacgaacactaagtgatgacttttaatgtctttcacttgaaactggcttatgttctgaatattctatggtctcttttacaattgcaatgcgtcatagtggcaattgaaatggattattatacattaaattcatgtgtttaaatttatatttggcttgttgaatatgaatacattaaaaaaaaagttgaataattaagaagatttaacttaacaaataacatcttgaagacttcttaccaaagtgtctgcaagcatatcctgagatatcaatatttttaatttttaaagttgtaatgtgcctgagtttgctatctaataggatctattgagtaaatacatgctctagggtctaaacttccttataagatatgtccatcatagaaaccttgtaaattttctagtgcatgctcctaatcttactttgttatgtacggtaatggaacattctctgttttaactttaacttgttagtgattataagcttcaattattgttacaggtacttgtaaattatgcgaggtcatcaaaggaggctgaagaagtttccaaggaggtgtgttaatagccattttgacatttgatagttactgagtcctggcgattcttttgttcaatcagtttcttctttcctttccatttcatttctgatgatattggtttatatatatatatatatatatataatgaatgaaagctcttccagaacactgatcatgtgagatagtattctgaaacttgactgtgttttctagattgaggcacatggcggtcaagctcttacctttggtggtgacgtctcaaaagaagaagatgtagagttgatgatcaaaactgtaagtaaacctcctttggctttactgtgaaagggaaaaaaaaatctatcttcaggtaccctcaccctcactttaatgtttacaggcagttgatgcat

SEQ ID NO: 18949 - DNA, 3738 bp, Cannabis sativa
  modified_base (48)..(53): a, c, t, g, unknown or other
  modified_base (3697)..(3708): a, c, t, g, unknown or other
ttctttattgatgttaaataaaatcgattacattgaaatggagttttnnnnnnggcataaaacccaacaaattttatatgacaaaagacaatttaagtaataaatatcaaatgtaacgacattaacagtaaacaatctttaatactattttatcacaaacttatttttgagtaattataatattagaggttattcttttttataaatcacaaaaattgagacttatgtttttttttttatataaaaagttagtggttattatcgaataaagtatttttagaggttatcctcatttataactcacacaaattaggacttaagtttttttaatataaaaaattagaggttattatttaatcaggtggggatgctcgcataaagcaaccccccgccataagcaaggaagtaccccgcatgaacatgctctcatgagaaggagaacagctacgttcagtggcattcggggctctgtgtagtcgtcccacaccaagttgagcttgtgagctctaaggcaatcgctaacttggaacatgctttgaaaagaagaagcgatacggctcgtctgaaaataaatccccatagatttggtccttgattacagagcaggtttactggtattagtggagggttgattagtagcatattcttgtatattctcgagatttttacgcaacaacatagttttgggttccacaactctctttttgttcctgaataaattaacaaaaataaaaaggagattgggacgtgaggaagaaatcatggcaaggaggttatttattttttcttcaaaaaaaaaaaaacatgcctattaaactaagagaaggcagtataaaaaaaaaaaaaaaaaagggaaaagtgtctttattgtgtttggtggatcccatgtgtagtcctaaagtcaaggaaaaatagactaagtcgcccatacaaccttattcccgaccacacgcaatatcaacttacgtggaacaatggcgcgcctaagaagatgaccatcggcactagaaatgacgtggcaatagtccatcatgagggacatgccactagaaaggaactttaataaggagacccaatcaatcaaaggtctcggccacataaactccgtcatagggacaagccaaatattcaatcaagacaacgacaattcaagatacaagtaatcaaacaatgaatttagaaaaaatttcatatgttcaagcacccaaagtgacaaaaaatacatgtttttctcacttgggaatttcatcaaacaaacacatggtaggacctattttccatagtcaaaacttgtaccaaaagttcgcaattcttgcccaaatttgctaattctacacccatttagccaaatttcatcatcaatatcacaaccaattcaaaataaattcaaaatccatccaaacactattcccacataacatatccaaacacattcaagaaaatacaaatataaacctaatttctatatccaaaacaatttcatccatgtaatttataccaaaatcaattacaaattgccaagaaagcctaaagaattagaaattacctttaatgttgcttgagttcctaaaaggcttgaaaattttaaaaaaagttatctccgttcaccaatgatggccatggctacaatagggaaaaatatggctttggtgaatttcaatcttaatgaaagggatgagaggagaggttgcattggaatgaaaaagaatgaaaataattttttttacctagaatgatgcttggaagtcctcggccgattggttcttgaagtagtgaggagttggaagtttgagctcttgaatggtttgtgtttgaattgagtgaggtgatttgaaaaagtgggaaaggttgcatttataaagaaaacaatgccttgtggtcgtgccccacttatggacaagggtttccaaaaattcccttggcctatttgtcatatgtaatttaattttaagaacaatgacattgcaattcttgtgacacttgtcatgtgtgtggataaaatttgtaatttaaacattgaattatgtgaaagaatagaaatttgtcgtctttagacaaattaaatttcttttcacgtaataaagtttaaattccacaaatttcgagagaagctaccaagaagacacaaccgactcgcaacgacgacagtctcaactgggtactccatgagacaacaaaataagcaaaaggtgacatgcttattattttcaagacaaaaagagtataataacaaaagtctttcccaaaactttttgacagacactttttggggcgaatgttatacccggtttttgaaaaataaaaaaagtcaaccttgcgactttgaccaagacttataaatgtcaaatgagttaagagttccttcctgagggccccatgacacttctagaggacacaaaaatatcaatcaactatttggtgccaggactcacacacccaagtgtgcccaaactagagttcataggcccgcgcgagtgttttcaccctagaatcctcaatccgccaaggaaaccaacaaggacatgactcatttgggcatgaatatgacttgggttcttgcataaattcaatatggcatcaaaccctcaagaaacaaggtatatgtgcccactgccttatggaatttgcagttctctttaattttgaagagcactgccacaaggaaatggcgatgctctttaattttgaagagcactgccataaatgaatggcagtggtagatccttacaaatcatgaagggaaactatttccctcaacaccaaggagttaaaaacaattgagagaaactatttcccacctaggactaaccctagccgaccactgccatatgaaaatggcaatgctcttcaattttgaagagcactaccataagggaatgggagtggtcgaccatgaagaggggatgtgagatttttttccaacaataaattttcaccaataatatgtcaaaatcaagtgagagatgccaccaagtggtatagcaaccactttgctgaccactaccataaggaaatgctagtgttattcaattttgaagagcacttccacaaaggaatggcagtggtcggccactacgcaaggaaaggagtttcattagctaagttgtatttccaatatctatgtatcaaataaaagtgagaaaaatcacccaaggctttatgaagcccttatcggaccattgctacttttcggctctaactgttggcaatggcctcccattagggtttttgacgtcgaaatgaggttttcgggtcccgacccccaaaatattactcaccataaaagaaaattcaaaacggagggatttgagaacatgcatggcggagcactgccatttggccatgttagtgcttgcaactagttgcagacaacataaactgcctttaataaaatgcacaaaactcactcaatttttatccaaatgacctggttcaactttcattagaaatataatttcaagatagatctacttgtgtctcataattatagccaaattatgaagttatcggatccaaaattggctcacagagcagacagttacattttacttgggacttgagtaatgtggttaagtgaggggtgatggaggacactactacaacccatgtggcaatgaatgctagcattgacacttgaaaacacatgttatcagtaatcatcagtaatatcatgaatttcatgttgggttttatgccnnnnnnnnnnnncatttcaatataatcagatttagatcggaa

SEQ ID NO: 18950 - DNA, 4572 bp, Cannabis sativa
ttttttttgtgtttttttttagttgggttatgtgatcctgtgtttgtggaattattatgaggtaatcctccagaatctatcttttcattcattcttctcccattaaatttaaacacccaattctctcccttttaataatctcttcctcttgttctgatttttataatcttttttaagtttgaaccaaagaaaaagtttaatcatttagtcctttttaagtgtttgggttaagaaaagtgtgatcttgggttgtttatataatctgggttttctcatgaaactgtgttttgtttatttataaagagctgattatatatatatgctatttggataagcctttttgggttttgaagttatccaaagagacaaacaaaagaacaaaagatatttgctttatttttttccaagtgggtatcttgaagggaacactaaaaaatcaaattcaacaaaagtgttgaacttgatttttgattgtgaggccattatagttttccccttctttctgggctcactcaatagttaaagaagatatttttatgaatttttaggggaaaaggtctaaacttttttgtgtgtttggaaaatttggggtgaagaagattatgagaggagtaggaggagagaaaattagtatgagtggtggtattatgtttcctaggcttcatgttaatgatgcagataaaggaggtccaagggcaccaccaaggaataaaatggctttgtatgaacagtttagtgttccttctcaaacatctctcactaaatcaccacctaaacaacataataacaataccaacaccacctttctttcttccatttcctcaccccaagtaagtctctaattcatcattcattgctatgtatatatgtatgtgtatatgtgtatatcaatcactgtatatgtataatgtttattgatgtaatgttttcaccttaatcagattcactgctatgctgttgtttagctcattttacatttactattgctgaattggatgagtgccttttttctttggtgtattacaatatgtttaggaattggagaattagtgtcttttgaaattaaactctttgttaataacaattagagtttaatacaataataagaaatgatagaaacttatccatccaagcctgttcagaattcatgatgagcaactttattggttgtacgagagacatgaattaggaatgtctcgggaaaaactggaaagtaaactatcatatgtttaggaattggagaattagtgtctttttgaaattaaactctctgttaacaacaattagagtttaatacaataataagaaatgatagaaaattatctatccgagtctgttcaccatccaccctaagttcatgtacagctaattcatgatgagtaatcttattggctatacgagagagacatgaactagggatgactcgggaaaactgaaaagtaaattagtcattaccgaaagtgaattagtatttagagactttagcattttacaacttattaccatttgcaatgatcaagcttgtcaatgtttgattgaaaagatttattatgtctaaactactacaacaccagtcatttttggtatgaacattgttattcttatgttctgatcatctgttatttatcggtttgaacaagataggacttatttaaaattaactgaacgaacaattcatataaatcttgtgtcaattttgagttcttacttatctagttattcaagtatatgtatgaatttcttgtaggctacttttacaccaactacttattgtgtttgaataattaattgatttcctaggcttcgggttttccaagttcattcaccccattccgcgattccaccgcaccttcaaatttggctacttcttctggcggtggtggaatgattaagttaaactatcaaaggtcagactcagatgcatctggtggaattaagtcgacagctaaatctgtttcgtcgtctcaaacttgcaattactctcaagttaagagcttttctttcaagatgcctggcaatgacaataatgctgttagatcttctatgtcgggtagtcaaagtaataaaatcccgcgtagttctagcactcaacaaagcaaagacagtaaaagattgcatcataaaagctcatgtgaaaacataaagtcatcaggacactcagtgagggaacattctgatcaaaacacaagaccatcatcatcgtcggtgaggattaggaaggagcatgtggaggtgctgaatcaagaaagtcataatagttcaaggaatgtttcttctagcaaattccttgctatgtgtgagaaagttatagttagagataacaatgtggtggaaccaaaggcaagagttggaataagtgaatcattttcgaggcaactacttacgacaaaagatgatgatggtggtatcgagtctgagaagaattgtaagaccccaacaacaggcagacatgttgatggtgatgatgttcgagaggtttccatggtcgatgctacattatcgatcttgaatgttcaccccgatgatgttgtacatgtgataggtgaaaagcaattttggaaagcaagaagaactattacctagtaagtatctacttactgctaaaatagagttgtttaagtctagtagtgaatcattgtgtagtagctggtgtatggaatagggtcaaaactaagaattgtgtatagggagtggaatagtttgttacctatattttctactgtttggcttttgttctattggttttctcgagtttagagtttcggttcttatcaatttgttgctcagcttattatctatagcagaatatgaagaatgaaacataataattcagtatattagtcactaaggagctgttgttgaaagttgttatggcttatcagacaaaaggtgccatggtaggaattgaaatatttgatcttattcatggtgtaacgattttatacatcaaatatttcgttatgacatatttgtgtaccattcttgcttgaatgttcttcattctgttttttgatctatttcagtcaacagaggatctttgcattgcaagtgttcgagttgcatagattgataaaggtgagaaatttgattgctgcttaggaagttttgacattttgaaaaaggaaaaggaaaagcaagttcataataatattaagtttggaacaggttcaaaggtcgattgctggatcgccagatgtattgctcaatcatagcgcctatttgcacaagtcacgagcaaaacaagcgtctcctcaagtgaagaaaacacaatctgaacacattaatgtgaagaagccaccagcagcagttgtcaagcacaaaaattgtcacgatcagaagctactcggtcaagaggatgatacagtagttaggaagcttcgtcttccttataaaggaggagtctttactaaacaatcgagttatgatgaatacttgagaaacccgacaccagcagcagcagctcctcgtcctcctcctgcagcgatgaacaattcagctgcgtggcctttccactctgcatcgggaaatcagtggttagttccagttatgacaccttctgaaggacttgtttacaagccttattcaactcccggctttgctgtaccaaattatgggagttgtggccctatgagcttaaacgctggaagtacttatggcggtccaggtccaggttcgggttcagcttgtaataataacactaatgatcataatcatgatcataatcagcaagcagttggagcacctgctatgatgggtaatcagacatactatcatcatcatcctcctcctccacctttcgggttaccagtaatgaatccttttgtaccgagttcaggtgtggaacagatggtaccatttggcataggccgaacgaatgaggcagaatacaataatcagtgttcatttgaggaagttaacttcacaaaaccgccgtcacacctgcagagttcatgtaacatatcgagtcaaatgagtcgagcaatgtcatatcctgctggcgaggcatttcaaggctcgaaagggatgagcgagttacaacaacagacaagtacagctagtagttcttcggaaaggagtagaggagatgctactcctcttccccttttccctatgggaccaaccccggctcttgatgagcgagttgatcaaaataccgacgatgaagaagaagaagaagaaagtagtaagcatcgtagtcaaactcgagttatcaaggttgttccacataatgcaacattagcaactgaatcagcagctcggatatttcgatccatacaagaagaaaggaagcatttgcagttaatctcatcttgaatcatatattaatttggaaactctaaaagttaagctaagctaactaacatgatatgataccttgtatgatgaatattttgtatttatttttacaaaatcaaaagttgataattttgtaaaagaaaagaaaaagaccaaaatcacaatgcttgactaaatctattgactcaattttttgggcaaattcttctcatatgaaattatgagaatggttttggtttgtgtgttataatggggttgattttgtttgtgtagaaa

SEQ ID NO: 18951 - DNA, 7361 bp, Cannabis sativa
ccattattgtactttcgagagttactaagtgttgtaccacatgcacgacgtatcccgtggtactcgtgttggtaacactgtaactaccctaaaaccctacactgtaccaacattaaaattatattttcgttagtattagtagtgtaaacaattaataacatgcatacattcacatatatatactttatgatatcttacctcgtttccgtgctcaggtgtaccggtcagcctgagtggaacaaaaacttcacgtttgacagggccctataatacaacattcataaatctgatgagagacacgctaaaacacttcccggggacttaaaatcaaaactagaaatatccctattgatgaataatatggcaataccctaaatatcacaataacgggaaaaactagggtttctaaaactgtcccaaccggtagaccggttccccaaccggaattccagtttgatggggttttcttggggaccaactggtcgaccggttgctacaggttcccttgaaccggttgactgattcagtgcaggaaccaccaaaaatgtccccaactgcacaattcaaccccaaacttcacaaaaatctccagaacacctttatatactccaataaactcaaatcaagcaagcaacataactcaccaataactaactcagaattcaaaaacaccattagagcttcaagttaagttctcaaactctaaattggctcaaacaacacaacactcccctaattcagcttaaaataacataaatgatcacaacctaacttcaaaatacataattaaacagtcctaaaacaaaaagcaactcaattctaaaatttcatactaaaacctaacttgaactctaagaaaaacaaagaaggagtggctaaggagggattccttgaattaacacacacaatcctgaagtaattctctaaaatgatctgagaaataatcaaaccctaacttgcttctacacaatttgagagagagaagaagagaagatagatgtgcttccttctaacttactcttttctaacttttcaagataaatatcaattcttaattaataaaatctaactcaagggaaaaattagatttcttaagctcataaaagacaaaagactcttctaacataatgaccatttcgccctcacacctaattcaaaggttaaaaggctaccaagggcaatttggtcattaacaattcccgctaatttcccaatactgctaatgtctaactatgttgcaccgatattaacattctaaaccatataaaacgtgactctctaacacagtgttaattagaattctcagttttttcatgagatttttctaaagctcataaatataactttacaatctaattaaatatattcgtatatcaaataaaatttaagaacacaaataaattatcgatgtttctagaatgagggcacgtaagtcaaaggtagtcaactgaaacccaaacacaggccatatagagttatttttaatgcctttaaactgaaattatcatgaaaagagtaatgaaagtgtgtttgtttgcttaattttaattagtttttatcttcattttctatttagtaagctagcttttaagtcttgtaaaaattattatttttagttgtgtttatttaattaaatgttgcttgtttgcagctgagaatgaagaactgaactgctagggaaaacgaaaggatgcaaggacaaagtgaaaatagaagctgaaactggactgaattgctaaagcattgctaaaacaggttcaacattatggacagtctgggcagtgacgtggaaaaagttgcaaaacaaatttcatccatccacatcagcacttatgtagcagccacttaaaatcatgccaactggctgttatggagggaggagacaaaacctagtgggccaagattggaaaggaatgagcttctattttagggtattacattgtaccctaattacctaccatttttaaccaagtacagccaccttcttcacaatgagatcagctaccatttttagagaaaattaaatgcagaagaaaaaaataccaaaaaggaagtgactgaaagagaaaattatccgaaaaagaaggaggaaacaaactttatttgtttgaatttctattatctttcttctattttcctcattcctttaaatacttgaagttttttttttttttgaaattgtaaagactaagtagcagccatgaaagaacacactttattttggatttgattttttggtttgaacatgagctaaactttttgaggcttgaatggctatgaacccctatatttggtatgattaaatttaagcatattttagcaactttgcctttgttcattcaagtaagcttgctgtttattgattgttatatattggctatgagtaacaatttactaagctagatctagtttggaaagactagatcaagtagttataacttggatgaagcaagtgaattcttaaatttaggtttttcttagtaaatggaataggaatatttcatttaccttgcataacttgagaattgatttttaaatgttgttctgcaatttggtttgatataggaatatatcaatctaagtggtagaacttaatttgtgaattctgaaaaattctcataaacataagaaaattatgttatctttgtgcgaaaatactgaagttatgctgtagcattcctgtagcaattgaaaaaatcctgactagggggattagttattcaagtcactttttaatatattacatttcttggaggcaattttctagtaatattagctttattttaagcaagtttaattacagtccttttaaatttgaatcattgctcaaccattctcatattcttccttttactttaagttgtaattagttggttttacatcaagtttgtttgcaattcctgtggagacgatcttatttatcactttattacttgtgtgactgtgtatacttacgtatattaattttcacaacagtaacagactggatccacgtgaagagatgggcctcaagtccctctggaatacaggctgcttacatcctaatctagacctctccagttccaggaaggcatcacgctaagaaaaaaggaaataacagagaccctcaaaacaaacttagtgactaaacaattatttgtatttgtgatgaaattgcaagcactagtactacttatttagcaaggttgtaataaaatgtgagtaagaataagtgtgaatcccatgattgtaaaccgggtggcttttcagccagatttgtatatgaaaactattgcaataagcaagtgtccttaatctaattccaaccaaatcttctttgctttcctactgaattaagttaaacaacaacttattaccattgatataaataaggcacgtgatcagtattttatatatagctaattccccgacatcatgtttcttttcctcttttgcaaatgaagatgaatttgaatgcaaacaataattgctggagtcgttcctagtaattatattaagtatagatcatcaaacaaattttttaaatctgttaatacttgtaggaataagaaaaagaaaaaagaaaattgggatgatcctacactgagactgagactgtatgtagtaagtactctactcataaaagaatgttagacatttatatgtataaactgaaatatatgtgtgtatataaaatacgaaataaataaatatatacactatatgttcccaattaacagtgttcctatagaattgatgtctattctgaagagcgattgctcaagttaataaagaacactttttattcaaaaaaaaaaaaaaaaacttaaaattgttttttttctcccgtaaagggttcattatgtggagtggacaatagttgcttcaactttcaattcacatcatgaagatactgaagagctgaccatagaaggcagagaagagggggtcgggttctgcttcgacaacagcgagttgtagtggaagaacaagatattttctactattttaatgcttatcattcaattttatggtgcaaacttttgttgaatttaaagtcattggaagagcatagttgcacccaacttgggatcggaattgtaatcaatctaatacaagcatcaacagaaggaaaaaaaaatggtagcagttttggtggtcaaatcaaattcaaatatattttttcctacttttttagacactaaaatttttaatactagcatgctcaacatcatgaacatgtagcttataacaaactccaagacacagccagagagcatagagattaatgatcttccgcttcttagaattagacgacttcatttttgctgctaaccaatctcaacaacaaaaccgtactataaaacttccattatagaagtgaagctcatagttcacacaaacttcatccaacaataaaagagataaaaatttcatgcctaaacgtagtacaattctccataaacttccatcaaaatagtaagcattaagattctctaactaaacaatctatctgaacagaaaaaaaatctaatgtttacattaaccatcttcaccattaagagagaggaagctccaaaatggagttgtgctaaggagctcttgctgtttcacgagccatagaaagctttgcaagaagaccacttaactgaagatatgaaccaactccatcgcagattctcatatgagcgaacccgctttcctgaaagcgcagatgagttaaggaaatgaaagagataatgacaaaactaaactctggaagaacattatgaatatgaaaaacttgagagcagcagaaggaccttcatgaattccaattttaaatactcagccatatcatagttcttaatgatacgaaaaatcgtagtgataatgtcagtgggagaataacccagatcatataactgcttgagaccaaagcaggcatcatcaaatttcccttcaagaacattacgcacaatattcttcacatgcaatggatgtggctggtcacaaacctgaaaaggccagcaaaaaactcactgagatttctgaaatacacagaaaatatacaaattcaaaggtcattttcgaggcatgaccttgaaaacattttcttggttgacaaaccggaaaccgctgtgtgttgcttgcaagttattcagtgcctgcctcatgtcaccatcagcagtgaaaataatggcttcaagaccttccggaacataaggaaccttcacttgttaaattttatcggtcaaatcatacacttccatcgaattgtaacaaacaaaatgagcagaattacataaaaacaaaatctgatttggggggaaataagcaactaaataacccaacaagtacaacagttgtttcatctcatttagtgaagatacagaatgaaaccacagcaaaagcatttttcttctgtctggctgataagtgttagtatagaaaatctaaatgtaaaataatttggatagggtatcaccttttctgcttcaacaaccaccatcagacgaccaagtatctgttgatcagataatcttgaaaaccgaacaagggcacatctactctgaatcggctcaataattttggaagaagtattgcacgcaagagcaaatcgggtggagttagaataaatttccattgtccgcctcaaagcttgttgtgctccagatgtcatgctggttttaggaataagcgcaattacttattaactttaagtttgagaaaagataaaatatacaaaataaaaaagaaaaacaagcatgaaatttgaccaccaaattcacaaaccattataatcagtccttacctgtcagcttcatccaatataactaccttgtgccgcccaggaggaagtgttacttttttctgtgcaaacattttaattttgttcctcacaacatctatgcctctaaaaaagaataaaacaattcagttaatgtggtatgcttttaagaattatgtgtggctaccaaaagtaacttcattgcgttatgccctcacctatcatctgaagcatttagctctagtacgccctctctataatttggtcccaacagttcatgtgctagagcaagtatactagtggttttaccagttccaggaggaccctgatgaaaatatcaaacagtaatctcaacagcagcaaaaatatttttatgtagaaacaagcatacaaaatttcttatgaaatgttaaacccaatttttccttagccttaatccagttagatactaaaacttggatttatacatatatttgtatgtgtgtgaattgataggcctactacatgcccagaaaagaataaatagatcaaaattcacattacaaataaatatacaaacatatacttacacaatacacacaaactctctcctagtcaacatgaattaacataaaaagctttatcttaaaaaaaataaaaataaaagaatcacacttacaacattccctaaatcaatccaaatttgagaatgaaaatccctaacaccgtgaaaacaaacaaatgtataagtctcctcccatttttctacagaacccaaattgaccccaaatgtttaaagctaaatcttcactgacttgggtctactgacactagaagaaaaatcaacattcaaaacaatttaatattttattccgattatagtaaaataacattatacatgtaatcattaagagattccccaaaccccatcatccaaaaatcaaaactggtattcaggcaagtggttttgacggtggaggaaagtgatgagattacttactgataatatgatgttgggcatatttccatcgcgagcaatgacctgaagcctagagacagcatcttcattgccgacaatgtccacaaccttgttgggtctgtatttctctacccatggaatatcgtagttgctcaatgaagaagacgaagaagaagccattgatgtttcctagatttagggtttcaggtaggtacatcagttggttttgtcgatttttactacatattttttaatcaatgtaaagaacgggtgcaaaagtctaagagcatctcaacctatacaccaaatttggtgtgacacgatcaccaaatttagtgtcaaaaactctttccactccatctacaatactaagagcatctccaaggagttcatcaaatttagtatcacactatcatcaaatttgatgttaaaaactatcttcactctaaccacaacactaaaaattacactaaaaaattattccttattattatattaattttttaataaaataaaaaaaataatattatattaattaactaaaaccaccataaactaaaaatgcacccttctaaataaaaatagtcacacgtgtaacagatagtttgaactttattttcagcttgttaaatttttctaaattttttaaaattt

SEQ ID NO: 18952 - DNA, 4916 bp, Cannabis sativa
atctcaaaatggatttaacaagatgaagcattgatttctcaggttgtggctgcaaaatcagaaactcgttcagttatattgtatataagggacattgagaagctacttgtccaatcacaaaggttcttcaatttgttccagaaaatgttgaagaagctttcgggttcagttttgattctaggttcccgcatgttggaacaagaaattgtttgtggagaaattgatgagcggctttctgttttgtttccatacaacattgacattaaactaccagaagacgatagccaattcggcaactggaaagataaactggaagaggacatgaaggctgttcaaattcaggataacaaaaaccacatagctgaggttcttgcagctaatgatctcgagtgtgacaatctggcttcggtctacaatgctgacacaagggttctcagccacattgaagaaattgttgtaacagcaatttctcatcatttgatgaatactaaagatccagaatatagaaatggaaagcttgtcatctcatcagagaggtaagtgagattattaaaatatgttaatagaaaagtggaagaaaactgtacttgactacaaatatggattttggaacagtctgtgtcatggattgagcatattcaaggatggaataagtggtgagaaagatactttgaagttggagacaaatgcagaatctttaaaggttgtctcatattctttttgaattaagttatggttcaatgaattttcaagttttgacataaattatttttctatttaggatgatgctgttggtgccaagaatgaatcaaaatctgaaaacaaatcagatggagagaaatatgtttcgtcggggaagaaagatagcgagaatgcatcaccagcaaaggtatgtgtcacttaaagttttgaattgcattattctataaacataattgttggtcttattgaagtttttttggtggtgtttctgcaggaagttcttccggacaatgagtttgagaagcgcataaggccagaggttatcccagctagtgaaattggagtgacatttgcagacattggtgccttggatgagactaaagaatcactccaagagttggtaatgcttccccttcggagaccagatcttttcaaaggtggtcttcttaagccatgtagaggtatattgctctttggaccacccggtactgggaaaacaatgctggcaaaggcaattgcaaatgaagccggagcaagtttcatcaatgtatcaatgtccaccattacttcaaaatggtttggggaagacgaaaagaatgttcgagccctgttcactcttgcagcaaaggtctccccaactatcattttcgtggatgaagttgacagcatgcttggacaaagaactagagttggggaacatgaggctatgaggaagattaaaaatgagttcatgactcactgggatggcctattgaccaaacccggggagagaattcttgtacttgctgctaccaacaggccttttgaccttgatgaggccatcattaggcggtttgagcgcaggtacacaattgcatacactctttctattcaataaggcatttcatgcaatttaatagtctgctaaatttgacaatttttacagaatcatggttggtcttccctcagttgagaatagagaaaagattttgaaaactcttcttgcaaaagaaaaagttgagaatcttgattacaaggaacttgctactatgacagaaggatatagtggaagtgatctcaaggtatgtttactaatcaatataaatagtatacaaaatcatcactaactgaatttgaccaactaatgagattaactgctggaaacagaacctgtgcgtgacagcagcatatcggcctgtaagggagctattacaacaggaaagaacaaaggatgtggtacactactcactatcttttcagctcttcctcactcaaaatactcatattgttttaccatgttttcacatttagcttaatgcatgcatgatgttactcacaggaaaaaaagaagaaaagttctgaaggctctagctcagaagatgatgcttcagccaccaaagaagaagataaagaggagaaagtaattacactcaggtctttaaacatggaagatatgagacaggcaaagaatcaggtaacttgatcaaaacaactctctatttatagttccacaaaccagcacacaaaaaatttcaacatgagtagttctaactgtttacacacatcatagtgtattctttccttaatgaatttatcattacaggttgctgcaagtttcgcctcagagggatcgattatgagtgagttgaagcagtggaatgagctgtatggggagggaggttcaaggaagaagcaacaacttacttacttcctctagaataatatcttataagacatccaaaaccactcatcagcaccttcttagtgagaagaatgtcagtctaagaaagcttgaaacttagtcaattctatacacactttttatggcactgcgcagggcgagtttctagcatcaaagactcggcgaatcagctcctaggaatcccattaaagcttgtttgtgcattaatagtaactccaaatgatttatcttggcattcaggcgttaagagagggctatcggcatttgtttagagcatcataaaaagtagaagccaattgccaaatagtcctcattaagattggtcatgtgttctttttcttttttttactttattttatgaatgtatggtttttggaagtgtgtatgataatgataatggtattgtggggaagtaggaaaaaacatttatggacttgtttgatgttaagtttttgtattgtatggtttacgaacatgctctggtagagtatattattctgtaaattggttgtgtaatatttaaatagtatagtattttgcctcataactttgtattataattctattttcctcattgctctgtttggtattttctcattttcattagcaaagttacactaataaaatgctaaaataaaaatcagatgtagaccacagatgttcccaacttccaggatcaagactaggggataaaagtgtgtaatgcttcttaagtaagaaaagatattaatgatactattggacattgtaactttaagaacataagaacaagtgcagagcatagagaaaaagaagcacagatagtttaagcagagcaaggctaaaaaaaagcacttcgctttttaagagacaattttatttatagtactagactgttacaaattgtacaaacgagaagatctaacaacttttaactaattaactaatttattaactaactacaactaattctcatggttaacatcccttctcaaacgaaaaggagtgatagccatttgaagtttggacttgaggtatgagaattttgtactagaaaaagacttagcaagtccattgccacttcatcaagtgcaggaacatattgaacagaaagttgtttctccattatctgatctcgaacaaaatgaaaatgaatttcaatgtgcttggatcaggcatggaatactagatttgctgcaagggttgcagcactttgattgtccattcaaattattagtggctgagaaactggaacttgaagttttgttaggagagaactaatccatttaacctctgctgcagcatttgctaaagccctgaattcactttatgtgctagatcgagccaccacttgttgtttctttgctgaccaagagattaagtttccagtgaggaacactacatagccaccagtacttctccagtcttcaacacaacttgcccaatcaacatctgagtagcattctaaagtgattccaacaacaagtttaagaagcaatccttcataaattgtgcctttcagatacctcagaagcttcttgcaagcttcccaatgcagtgttgttggagctttgacaaattaactaagcttattaacaatgaatgcaacatttagtcttgttagacttagatactgtaaagcaccaaagtgcttctgtacagtgtactgtcttcaaaaggatctccttcagtgaggcttattctgtttaaatactgacgtatctttgtaaattagcaactttaccctttaaaatttgacaactatcaaatcgtactccctcaaaataaagttgagaaatattcaatttttttttttttttgtaaatcttaaaaagttaatttagaaattaaaaaaaaatattttgaataattaaaaaaattaaaattttaaaactaattaagtaatttaaaaaaaattatttatttttttattaaaaaattcatttagataaaaaaaatatattaaaaattcaatttttgtaaaaaactaaattttacgggaacaagtttgagtctattttttttactccgaaaatcttatttataagtaaacataatatttttttagtttaatttttaatttttttcaaaataattttatatttttattgtatttttaattatttttctttattttttaaaatatgagtttataaatataaataagcttgattttctcttcaaaaaatcttagcttgtttaactaatttattagattttcaataattttagtttaattttttaaggtacgtgtttataaataaaataaagttaaaaatatttttttaaaaaataattaaagtttttaagtaaatttaatattttttaattaatttaatatttttattagattttttaatattttttgttaattattttttcaaaattaataaaatattgtaatttatttttttctaataaaaaaggacaaaattttgtaagtaaaagtgctaattttttttttttttgagtgaaatatttaggtgtgccctgttttgggtctgtagcagtttgtgccttttaacagttttttttttaggattttaactacttt

SEQ ID NO: 18953 - DNA, 2508 bp, Cannabis sativa
  modified_base (160)..(160): a, c, t, g, unknown or other
ttttttatatttttacagttttctaaaaaataacacgaaaataatataaaattaataaaaaaattacataaaagtttcatgaaaataacaataaataataacatacaaataaaaaaaaattaacaataaattaacaagattacaacataaaaagaccgtnttttctgtaaataaaatcaaaaatcgtaaaaatatttaaaatttcgtaaaaccgtatttttataattttctttttttatttttatgtttttgtgaaataatctaattgtggaaaacccatgatttcacgtgatgaagctgattctagtgggcccccattaacaaactgggctaaacatacataactcggcccataagcaaaaatataacacgtgtcccaaagtaacagaccggtagtcacagggcaaccgttcttggcttttataagatcgcgacacatcaggaggacccagatgaagaaaagtcaacgtttctggcccccaatgccgtgactcacgagtttgagaagataaggtgctatatgcggtccaaccttaaggaagcgtggtcctgcaggaacggactatcgagtgcaaccaattccttcctctgctcgtaaagacttcatcagccaatcatattcaaccatgtatgattacggagttcaccagttcgcagcccaacaacctcatccaatcagtttcagccacgtagtctttgtggtttgacgttgaatcggtatcccaacccccaccgtttattatagtgggccaccgtattgaatgtttcgtcgctgtcaactaaaagtatccgagttacagcttctattgttaaaatcctcacataagatacagcaaagttatgaacttggaacaataagcttaagctatgttgttttcatacttatatgtgtttcgagatttttgttttgtttctttttccactatggtgacaaaattcagtctgagagaagaaaggttcacaagattttgttttgggacattgatccataatagaagattttgataattgtgtaaattatgttttggctatgttacattatgtaccgtatatttatttgaatagttttaaagtaaaaattgtttattttattttattttgaggaaaaattaatgataacagagtatattatggcactacctaacatgagtaacacatcctacggaaaaaaaaaataaaagactatgaatatcaatcattaagatcttaaaaacagaaattacaaatgaaagaacatttcaaatgagtagaacgtagattaatttgatgggttctagggaagtgtgctcaccaaaagactatggtagttcaggttttcgtgagggaaagaagtggaacattgctatgatgacaaagaatatttaagctatttcaactaaaaaggatagcttagcttgtgggtttggtggattgatgttgtctaaagaagaatgtttatttttggttagtgactcctaatcccgatgctagtaggtatttcaaaaaattaagtaagctcagagattgtattggcaaacaagctatgcttgatgcttgtaagttcgaaagatataaggtgaaatacttttatctctctcttatttgtaaggacaaaattatatatcataagttggtttgatgcagattcatagttttgaaacagaggtttatcttttagcaagcaataaactgtcatcttttaactcgagacttgattgagaaatttatattcattgactccctaatgtgtcatgtttgtgagctggaagaagagtcccattcccatttgttcttcaagtgtatcttcacaaggaaagtgttagctgagatcacttgctggtttggtcttgttgaaggcccctaaaggtgtcgaagagctaaccatgtttattttggctgctgtaatttacatggtgtggtgtaaaaggaattgttgttttttagaggttttgtggctcagttgaaatcattagtcatcaggtgaagatggtagttaagactagagtttattgttttaatttaatcaagttgtcaaaacaagatgtaatgatgttaattaacaatcattaaattgtttgattgctgcttatggtgatttaaattaaaaaatttatatgatcaaaaaaaaaaaaatttctttcgctccaaaatatatatatatttttttcaaacaaaatatatatttaatatatagcttatacagtactaaacttaaccatatcgtttcccaaaaaaaaatgttctcatatgttaaaataaaaataatatttaattatttaataatgatgtatttctatgatattgatattgtagctagattatatagcgattatggtcactacagtatccataacagttgtggaaaatatttaggtatatacttttattagattttttaactgctaactaccaatgccaataagaacagtgaagaagtacaaattattgtccaattgtttcaatatcaacttaagccccattggccattgggcatctccaatcatggctttaaaagcctttttttttttt

SEQ ID NO: 18954 - DNA, 3452 bp, Cannabis sativa
  modified_base (489)..(493): a, c, t, g, unknown or other
tgtaaataaattcaaaaaaatcgtaaaaatatttaaaattccgtaaaaccgtatttttgttgttttttagttgtttttgtgcatttgtgaaattaaccctaacaaataacctcaattagctaccacaggctaataaagttattaactgagctgttttctaaatcatgtcatgtcctttttttcatatttgttttttaaacattgtattttaggaatattatgaagatattaaaaagtaatgttattaaagtttgcccacacatttgctttgctgatatatcccctagttgaaagtttatggctctgagtctctgactctgaaataattgatcgatgcaaaggaagacttctcaagtcaatgtcaatggtactttttaattaatttagatgaaaatttatatatgagcattgctattaggcaccaatagtgcttagtacttttgcgacatattgtgttgcgattggctaacgatactccctaaaagttannnnnttaaattatataggacccgatatttagttgaaccaatagcgatattgacacatgggaaggtgctagacaccactaatgccttttaacatttctctttatatatagtttggtttttgaatggacttattgtatatcctccactcgcataccaatcattacttaatgctcaatatttagtgtactccattatgatatatatatgctatatcaatgttctttagttgactaataatatctataggatttagatattattaaagatttttttaacgagccccattaataatatattttcaattttattgagtttgaatatagctgatgatcgttttttttttttggtctaaggagcatcatagtttctacttgatgtatagtgtatacaagtttatacaagttcagagagaaaattggattgcaggcgttgattcttctgggttctggcacaagttctagaatttggaggtaccactgaaagctctcaatttagtatggcgagctccttcaaattgtttgcccaccttgactcaattaagtagtaagatggtcccagttcaaatcatgtgtccgatttgtcaaaaaagtgaagaaactattttctatgcacttatttcctattcaatcgctgctcaatgttggcagaggcttttggctggggttaggtcaattgttgctgctaaattttacagttggtttgatcaaattttacaaaggtacagtaagggcaagtgtagggaggttgttatgttgtgttgggggttatggaaggctcgaaacaagttggtttggaaccaaaagtatgctacggtggatggtgttcttatctcatctatgagttgtcttgtgcaatggaactcagcccaaaatagaggttcaaaggcttcttttccagtttttaaagctggtgatagagttgaattttgggttaaaccgcaggaaaatacaatcaaagtaactgttgatgctgctatttttcacgatcgagcaacgtttggttatgacatagtcgctctaagactcttaaggggaagaagtgatggctaagtcgagtaattttattggtataggcgctccaaatttagctaaaataattggtataaaggaagcgctaagttggattaaaactcaaccatggcagaaagtagagttggagtcaaattgcttggtagcagtccaagctattcgaaactcattacctatgttttcttcttttgtggttattatagaagattgttgtaaacttcttgcatttttaaacaatatttctttattttttattaaacgatctgctaacatggttgctcatagtcttgctagagcatcttattctttctcaaatcaagtgttcaacaaaggtgatattcttattcgagatacaaacttatcttttgattgatttaacaaattaataaaagttgtataattattttttaaaaaaaataaataaaacgatattgagcattatattatcctttcatttgtattatatattggtagtgataccactcaccaaacaaaaccaatatatattatcctttcatttataacttgatcattttcctatttagatcattaagataaacccatcatggataatagatggagtggagtattaattgatttcacacttagtttgacaaaagtggtgcatgcaaaagaaaactttgattaattatttagttgatgaatgaaggtaaggagaagactgtcttttaactataggacatttcatcttatcatggatggccctttgtttggggcaaagtaattgtcttctctctctcttcacaactctgaattatatatcactttgggatatagaggaaaataatctcattacacaatctaatctaatcttatccattatttgtacataaattggccgtgatatctactccaagtccaactttattattgtagatttaattgggataaatgtaatataaattcgaaaatttgtatggcataaattcttatgtagtgttcattttattgtatttaaattctaaagttggtttattttgttgcatttgtagcaaaaactctatgtggtgttgtatgttttctatgtcaattaatctatgtatatatatcaatatactcaaaaatttagaaataaaaatatagagaccatgtatagttaagttttaaaaaaaaaatgaaaaatgaaaaaaaaaaaaaaaaaaattaaaattgaaaaaaaaaacacttacctctaaatgttgttaatgcatggtgtcgaagccacaaaaagaagatagagaagataatggcgaaatgaaactcatgcctatggcatgttaagaaatagcttttgttaattagtgttaattaactgatcattagtgtggttgtagtgaggttgttagcattgtatctttttgttattgtttggtctcctctacaaaactagggccactcggcacattcctattagtgtttgtattacattttcagagtataaatagaatatgatgtactcagcctccatcaagctgagaaatccattttaccaaaaattgtgcaaatcttaacttagtatcaaagtaagaaaagtctgcccaatgtcgtcccattctcagactcttcaagctaccaccacaattacagcaggtgctgcaagctcaatagtccatgttcttcaactcaaccacactcagccgtttaatacgttgaaccaagcatttcttttaatgctaaatttgttgattatgacaaataggatgagcctcatcttgagatcattaactgagccgagatgacaaagagactttgtcctagagttgggacatatttggctccgttcttttctgacttgttagattaaattgaaattccgtattttaatgttcccagtttaattctttaattaagtgactaattaaatgcggaataaagaaactggtactgaaaatagtttttccgtagttacagaatacaactctgtaactccagagaa

SEQ ID NO: 18955 - DNA, 6460 bp, Cannabis sativa
ttgtgactaatatttttagccacaaaccttgtagtcacaacataggaatcatgatttatataattagtcccaattttttcagttttagtcacaagttttgttgtgactaagattttttgtagtaagcaactatcctacaaccatcatctgattgaaaccttcgtctgatgcaaccaccgcacaaccacacagcaaccaccctgcaactatcgtttgattgtataagtgatagtgtaagtggtattttggtaattaaaatcacataaaaggtataaatattatccttaacttatggaggtatttttgtaaataaagtgtcaatttatattttctatgtaataattccttatacgaaactataactagaataatgagaaactaagttaatgaaataaagaaaaatatgatcaaacatctatagttgtaattttaatttttttgagaaagggtctgttattataaatcaaatagagtcatttacaacattagagaagatggtagaaggaatctcttctaaccatatataattattatccaactgtaatgcttgcttagccaaactatgtgcagcttggttagcatctctttttatatgagataggcaaacattagagaaagaggataaatgaaatgagacttcagaaaccaaatcatggaagcccgaatttggtgatatacgtccattcaatgcattaacaagcattaaacagtcagtttccacataatcaataggaatatccaattgctttgcccacgaaagaccaaaaaaatcgccttagcttccatttcctgagatttaaagtttcctactgctgttttcgacactgcagccaagacttgtccaatagaatttctaattataacaccaatacgaattttgctcctcaaagaatcaatttgctgcatctacgtacatttagtttgatttttctctctggaggggcttgccacttagccacagctgcgtgactggggtgagaaccagttgctggtttcacaacagcgtttatttgatgaaattgttgcaaataagctacagattgtgacaatagttggattggtgacttaacctttttcccatggataatctatagttgtaattaatgcaatgatttggacatccataataatattttaaaatattaatcaaattttgtgactccttttgttttcacattttctagagagcgagcatattttagcactactacaaacatggttttttgtcggttttcgaaatgcttttttcagggaccatcgctaataaatttaaatgattgttttaaactgttaaaaaacattgagtatttccgacagtttagaatactcattatagaaataggcgttagttttatgtaaaattcgcaaaaattttaatacccttatgctcgacagttatataatgataaaactgtattttttttttcttattcctcacaaaagaaataacgttttttttttttgctaatgttacttggtaaaatatgttttttcttagaaaatttttacacagagtgatataaactttttttcttctttgaatgctccaaagttacatcatgattcatgatcctataaacattttaatttctcaactaaataatactacgaaaattctcacttttgattcaaggaaatcaaatcatcatacttatgtcttatatatcatcactagatggttttcgataacaaaatattaattactaaaattacaaaattataatattaatatatatttctagtcatatcttgtgacaatattaccaattaatcacaattaattatacattgggacatttaatctttatgttgcggttaaaaagagaaataattatttaaagtactatttttttttgtaaaatttttaaagaattttttttttatatagttttacgattttctataaaataaaaaataaaaattgcacaaagtacagaaaaataacatccaaacaacatcaaaacaataacaaaaaaataacatatatagataacaaaaaatgagcaacaaaataacaagagtacaacatacgtattttttgtaaataaaatcataaaaatcataaaaatattcaaacttccgtataaccgtatttttgtaatttttttttttttgttgtttgtgtatttgttaaataatcctttaaaaaaaattatcacaaagtgagatttttttttttaaatataatggttaccgataaggaggtgaatgaaagttagaaaaactgaaggggtgtttgcaagttgaggtagaagttgaatttggatgagcaaagcccatattttatgtatcttcttatgttatgtagtttgttgatgatcttagtatacatgatatataaatgccaaattcaggtattcattgttaagtatcccatacgttagttactgtagagatgttttcgaaagataaaggctgatacatgatcttgatatgtgacaagcaaagaagatgttacttttgttctattcaaactatatggttaacccaattaatgattttatcttatattaaagggttagaaagaaaagcaaaggccaaaaaaaaaaatatatataataaaaaaagaagactttgtggtcttgttttttgttatgtatatgtgctgtccaaaataagtatagaagagaacaagagacaataatcaattaatgaataaaaatgactattttggattaaagtttccacttttttctgatgagagaaaataccaatgcataaaacaaaaagactatctatatctctatatataagcatatcaaatatgtgtccccccctactactactactacaacttatcaacctctctaaatatatataagagttagaaaagaaaagaaagaatcacattaagaatcataatgaaatgaattatgagtatgatgacccctaacattttcacaattttggttaatgtagtaggtctcaaagaagtacatacaaatgagtcacactagtgagttattattattgttactactgctatggtcatcagactctgcaaaatgtaatgaacaaaaagaatcttttacttcatcatcatcatcataataatcatgattatggtcatgatcaacttcttcaagcgtgacatgactccctgtgagttccttggctctttgagcttgaatttcccaattggttcgagccaaaacgaccaacatggtgaccacacaggagctctgagcagccaaaagaccaagccataaccctgtaaaatcgaaccccacataaaagcttaaccaaatagcaaccggcattcccacaaggtaaaagcagcccaaattgatattagcaccgagagaaggccttgctgtgcctctcaaaacgccacaaccggttgtttgagggcagtttccaagttcacaaagaccaattatgggcaaaaccattgatgtcaatgcaatgatctcaacatcttgtgtgaacattttggcccaaatatttctcaccattacggcaaacaacaatgccgagagtcccaaaacagagctgtacaaaagcccaactatggctgcaagtttagccctttggggattgtttgcccctagctcattccccacccttgttgaaacaccaaaactcaaagaagatgggaaaatgtacattagagctgtggtttgaatcaaaatccccattgaagcaacggttgcttgaggattaagcaacaacccacataacaaaatcatgaactcataccaccaccattcgagacaaaccgaaatgcagcttggtattgctaaactcaaaagtgacttccaagctctcaaacagtctgaggaaatctcaacccatgttttcttatacacacctgagattacaacgtacacaatcaatgacccaacaaggttgaaatttgtccaaaccccacttaatgcaacccctttaatccccagatttagaacagagacgagaaaatagtttatgggaatgtggagaatgatcgaaagggtggcacagaaggtgagagggagagttatggactgtgttctgagatagactctcaaagggtgtagaatcgattgagcaataagatcagggagagaaaagaatatgtaagattgagcttctgtagctatatcatcttgttgaccacagagtaacaagattctcctcatatttagccataaaatggctattggaagagaagtcaatagaagcaaaatcacagttctctgcaaggtaaggccgagaagtttgaacctttttgctccaaaagcttggccacaaatgggctccatccccatagcgagtcctgagagaacagagtaccctgtaatgttagcaaatcctatagcaagagacccaccagccagagacaactcgccgagtcgacccaggaaaagcatggagatgagtgagcgagaatagagcaaaagccccgttaggaccatcggaagagctatgttggctatgcatttggcttcggaaactgcctcagaaagatgggacctttgggagttttgagtctgggattctaataaatctgtggtctttgaattaatcaaaggggttcgttcattactgtcttggactgtaacagacgaaactttaggctggttcgaatcataatcgcacaagcaagaagaaggagatgaagagtggtggcacatagtttttgtcctgtgttttatcaacggaagaaaaacaaagaatcagagacgatgagactctgaaaaaccaaggacagagagaagagagaggtatagagttgtggagaaaggggtagagaatgaatttaaagacagatttttgtaagtggaaaaaatatacatttatttattatggggacggcttttttaatttgttgccatatatggtgtgaatataaagaattaaacttggaaagaattattataattaataagagaaaaaaaaatgaaaaggatatagtttgacgaattatttggagtcttatttcaactgaaatgaaatacttatttgagaggagaggagagcgtcgtccttttacgaccgacccatattcatatttgtcactattggggcctgcacaaaagtgggtcccaatccccacaagggaagaatgaaagaaagtagaagagtcttttcttttgactctcttgtggtagggtttatgaatctaatttggtataaattatgactaatttttttttataattgttattattattattatttttattatttatgggtttgagaatgggtggtgtagtgtttcttttggggaattttggaccgttttaagccccactttggctaaacagtccttcttcatcagtatccttaattatatatttaattaaggtcaatgagtttaggcgttttctaatttgcaagtaataaataacattttcaatattctttacatttttttttaacaatgtaattttatttctaaagaatatttacacgtattaagaaaacatttattccatatcgtggattagtatttttcctaattataattgatttaaaatatttttttcatctattattttccataaaaataaaatttttaaagatcattagtatcatattaattccttttgtgtactgttcttctcatctgtaattttcaaattccatatataattttctcaaagaagaaagtagccatagccaatgtcatatgtattcttttctcatttattgtgggtttcctctattgtccttatttgctgagtgaaggttgttttttgtaggtacgaatttctaccactgcgcatttagggtttccaggttcaactcacttgtcaaaattaataaaattcttaactttttacttttagtattcaccccatttatttatttgaactaacaacaatataaataaaccaaaaaaaaaaagaacattgcccaattgtaatttaactagcacatttggctcataaaatataaagatgagagttcgaaatagcatgctctcctggtcctaagtattcttctcgctcactgattttcatatatttttttacagtatgtttgttaggaaggaaacataagaggaaggaaaggtataaagggaaagcatgggaaggagtgtagttttcctttgtttgggaggatagaaatgtagaaataataaaggaagaaaatttggaaggattaaaactcttcccgggcctgcatattttgatcaccccttccttttacaaaatttactattagacactatattataaataattacatattattttttttttgtatattttaatattaattacccatattcaaattttgttgccatactgtaatactcaacatttttcaatttaatcacatattatattaaccatctaattaaacatttccttatttatttttttataaagaaaaaagtttctcattttttttattatattttgaaggagaatatgattatagggaaatatgtaaactgtgtttggttgtgtagggtaatatgtaatcatattcctgttaattaaattaagctgtttggttgagtacaggaatc

SEQ ID NO: 18956 - DNA, 4533 bp, Cannabis sativa
  modified_base (3751)..(3762): a, c, t, g, unknown or other
aaattagtgacaacttgtaactatgctatattttagtcatatattttagtcacaaatttatgttgtgactaaaaggttgtcactaaaaataattattttttgtaatgtaaaatcaatgtgattcatactcaatactgccatgaatcgtaaagaagctttattgataatctttgatagaaagatagagattcaagccactaaacaatgtaacaagattatacatcaatctcacatgggggaagctatttcaagaataggggaatctcctttcacatccctccattcactcaaaaatggctcaatcacttctctctgtgtaacaaaacaagtcccatcttcaaatggcaagggatagagtaaaattaatagaggttagttgaggttgttacttaactaacactattagttatatgttcagttggtgatcatgttgtagagtcaatgccctttagtgtcttaattacaataatttctaccttaatgttaagtaagtttaaacaatgtttaaacatctctgaagtaacacattttgtgagcatagatctgttaggttgtggttagtgtttatcttctttacttggactttgttgctggagatgatatctctgatgaagtgcaccttatatctatgtggtttgacctctcatgatgcataggtttcttcttgaaatgaagttcacttcgattgtcacagtatacaactgtgtcttcagagtttagccctagttcagtagtgaaacctttcaaccatatgacttctttaatggcttcaatagcggccatatattttgcttttattgaagacagatcaactaccttttgcagtgttgctttccactaccacagccaccaagtactctgaaaaaaaaaacagtgaatgacctccttgtgtcaagacacccagtagtcagagtctacacaaccagtgactacttcttttgtaaatgactcattctaaactttattctcaagtctagagttccttttatctaccatgagtatccatttgagtgtagaccaatgttgttgtccaggatttgccaagtacctgcttaccatgctcattgcatacccaatattagatcttgagcaaatcatagcatacattaggctccctaccaccttagcatatggtatgctgcaaaataataatttgggttaggttgattatccattgggacatcccttgtatccccatgttgttcttcctgagtattcaggaatccccttggttattttcatgtctccgggtcctggaaccccgaggtcttcctcgcggtctccttacagttggatcaagttggttttgaggaatggtcctctgtgcagccctggctgctacaacttctcactccaactcaacattttgtctgtttgattcagccaagcgtcgtcgaagtttcctattctctaattctaccagtggtacgtatatggtagtgtcataggcatcctcactccttctttctgggatttgatcaccaacaggattgaaattaccatcattccttcctaaacgtggtgtttcagatgtgttggttctctgagacccatggattctttgccaggacaatgggttcttttctctggatgattaccgtcatgtgggttgttatcagccatttaatatgggtttgtatttgttttataaggaaggattttccaagtttttatcaccaagactctcaatgaaagcattaaactattaacgcgaatttttgttaactaaatatatagtcttttatgtaataaatttactacagaatttgataattaggataataaacaccagatattttacgtggttttgtagttaaaatctatatactcaacgagtttgtattattagggatatcttttgaatacagagtataactttcagaataataaatagtagaattttaactttattttttgctgtccctttttctatagattctgtccctatttataggtatataggttgacaattattttcattaggattgatttatttacaactgttgatgaaacgtgaacattccccatgcgtttcatttatttacacatgggataatatctaataactacctaactgctccttgtctttatcctttagacggttatgctgactaagaatgttgcatctcgttgaatatgagttatccttcttatctatcttaataggaaaaaatgctaagtgtaaaagtacttcatctcgctatacccctttatttgtattgatgatcgagatgactactacgttgtgtaaaatgcgaggcgattgaatgttgttattttcacattgctcgtgtaggagagtcaacgattcacgagatcttttgatatctcgtctagctcgtatatttttactactctgtttatcccaaggcggacatatgtcttgtaaataaatttaatagttattattcttatctcgcataagacttaagagtcagcgagtttgaacatttctaccaaatttgtaattaattggaacgagttattttatttgcatttaaagatgtcattattatatccctctagttgattcatattctttctgtaggacaaacttctagtacatagctgaatttcgggtataataattatcctcgtgaattgttattttgatagtgtcacgcgaggtaattacatatcttaaccatagtttatctcgaggctgaacatttatttattcttcgcatttattattcacttcattcttttagacttgtatgataagtgtcatgtccatatttttatgctcgaattatgggcataacatgtacaataggcaacctaataccatatgttagaaaatcaaataactcaagatacaaattggcatataattaatttagaaaagtccacacttatgctttaattagactttacacacaaagatgataagcccattacctattgataactaagaatatggattaatccggtaaagaactatctaatcaacccaaattttattaaaatcaacaaaagttaatgtaagcccaaaaaagtctaacaatagagagttcaagaactatttgaagcacaagcaaaagaaaatgagtgttgaagatctcattctcaaatttcgtgttgaagaggataaccaaggtaatgagaagcaagccttgaatcctaatgctgccaaggctaacttgatggagagcatgataaaagctaaaaggggaagaatcctatattagaatattttctttctatggaataaaattaatgctgcgaaggctaacttgaggtaaataaatattttatattcattgaatttagaaacaattaattggttgttattttatatatcgctagattttaatatttattactcaatttaattttctaaattaattattaaaatattctgacaattaatgtggcacagatactgatggagtatctcacctataaatatagagtcttggtccaagagctcttcacttattttgtgaaaactgcaaaatccatctaaagagagttgagatagtttggaagcccgattttccattctgaagccatcattggaattgaagctcaaagatcaatggctggaagtatttccgtcctttcatcggatatacgattatgatatgtttacaatttatgttgcttttcatatcattcgtatctgcacttgtataaataaccaatcaaatccaatccgcacgattcaatccaatccaatccacaaagtgaggatatctgcacttgtgcggatcagattggattggaaaattcaaaatctgcacttgtnnnnnnnnnnnnttgattgacatgtaaaagtaaccaatccaattcaatccacactacatatttatatattttttaaaaaatatatatacaattaatattttaatataaaaacaatagtaatttaaaaatctaattacaaatatattttaataatagatcaaatatatatatatatatttcattcttatatataagaaaactattacttaaaacaaaattaaatatttctttctatatacatttttttttcttcttttgaattattatttgtaattttatttattttaatatgttgttggagcataaaacaacattaatttgtgttcttttattgttaattatgtaaaaaaaatattttttaataaacattaaataatttaatattaaaaagtaacaaatccaaaataactgatctaatacgtatttttattgattgaattagattggatttgagctatgacgcggattgcattggatctaaaatataaaattcgttattagcgcagatcgaatgcactaaaagcaaaataatgcagattgaatttgacaaacactcctatatgacatggtagaattagttggtctttcaaattaaattatttattatttaatcaaacattcataatataagataatgtaaattttaaatatgacatagtgaaattaaatgtcattttgaatttaattatttactatgctgtaataactaaaatatttggttattattttctatattacattagtcttaatatctcgatgtggaaatagtgatttcataaaata

SEQ ID NO: 18957 - DNA, 7307 bp, Cannabis sativa
tatagtgaggtgcactaattctattaaaaaattacaaaatattaaaatagataactcaattgagaaggaatgtagtgggcccactttgaaaaaatgaccttttgtcactttagtcaactttctatgtatgtggagggtatgagattgtttgttggagggtaaggagtctactatgatgactttgataagaatagagtgcttaaatgcatgtttatggggttgtgtgcaatcatgaatccaattgatgtgttttccttttggtctcttctcttttctcttcttttaaaatgtgctcaagtgtttatctccacttataggacccatttcctcactcccttttctttaagaaaaaaaaaattacttacaattattatagtatggtaaataaggacaatagtgatcatccattttaggaaggaaataaaaaacaatagtaacaattttaccaaaaaattatgataatataagggtacaaatggacaatgttatttatttttaaagagggaagatagggtacaatattgaatacaaaaattatgctaaatttaattattatatttgtatttggtaaaatatttgtaattgtgctcttacctctaatacaatgcaaaattactaaaagtatgaaactataataaatgctcctttgatatttatagaagaaatatatattttaagtaattttttgctttaaaaaaatgctagaattatagtgaaataataaataagatataaaagaaattagtgacaaacatgtaaataaaaaatatatattatttttgttacatttataagtaactagaggaaataaatcatccatgagaacaaaatttaaatataatatattttatgtggacggctaaatataacatcatgaacttgattgctcctctaaataatacaaataaataatttctttctcttatgtccgaagcaaagaattgaataaatatatatatttattccccacaaattaaaaatattaaaaacaaacttttcaaaatatatatatttaatttttattgtaagatggtcattaatggattctttctctcatatattcatttgaattggaaatctaattattttcacactcttatattatgaagaattaatatatagatctaacatatataaaaaggaatatcgaatatatgtacctcttcttgtttttttttttttttgaaaccaaagcagtatatataaatataattagacctcgcagtcattacaaatgatagttctaggtattaaggatagctccacgaatcctgtaatgttctgggtgaaggcccatttagccacattgtgggcagcaaaattacacattctagaaatgaacgaaaaattacaagataaaaaatacataaagagttgattacagacataaacatatgtacctccacgaatatatgtacctctaatcattgagtttaataacctcgattaaaaattttagatctacaaaaataaaagaacgagaattagtatcggtatcaagcttccaaactcttactaattcttttagatgcgacatatatattatatctatatagatgaaattttacataattaatcataagtaacaaattaaatagaaaaatattttatcaattaaattcaataaatatattaataataaattaatttaggggcttttttatttttacactttaaaataattattttttgtatttttatgcaatcaaaattcgtatagcaactcacataaaaactaccgaagaaactaccttagaaacacaaactgtaaattaaaaaaaaaaattaaaaatagtatatgaagtaatttgccattaattttttattaccctacatatattatgacatttattggatttatttatttatttatttttttgacagacatttactggatatttagttaggatacataataagctttgatcattactacgaacaatttgtctattccaaaatttttttttaaaaaaaacaatgatttaaaatgttaagacaaaaagctgtgttatccaattaattaattaatcttagacaaacagtgaacaacgttgctttgactaattatggctaaaaaaaataggctttacaaaaagagagagcacttaagtacgattagattgtcaaatgagaaatgttaaaaaggtactaatcgtgtctaacaccttcttatgtgttaatatcgatattggtccaactaagtatcgggtcctatctaatttaatattatagcttttagggagtattgctagcaaatcgcaacgcgacatattaaaaatatactaggcaccactagtatcttatagcaatgctcttgtcaaattgcaaggcactcattactgattagtcactcttctctctctcagtttgactggtcaaagttacaaactatctttttttacgaagcaaaggtaattatataacaaataacacatacattaacatgttgatgttttgttactccattttggaaaattgtatttttgttctctcttttttcatttgttttttcataaatgatggaatgtttcactttttatgatggaaaattgttttatgtattgttattgggtattaatgatgtctaatactttttagaggtagagctctaaattgattagcgatattccttataatttattatattatattaaatgagatctcatatttaattacattaataataatatggcatttaagagagtgttaggtaccattagtgtcttttagtatttctataaatatgtctataaaatgctaaaatgtattaatgtgtctaacactaccaaagatattaattatatcgttataactagaattaaatatcaagtttcacataatttaactcaataacaattatagaatattgttgtgtatttgtttttgtggctatatcagttgcgggattggtgttggaggcagttcaatagaatcgtgtggggaattcgcaacctaaagttgttggtctcaaagaagttttgagttggattaagcgtcatgcttagtctaagataatcgttgagatggattatcttacacttgttaatgattaattgagttattttaaacatatggtctctccttatggttttatgctttttgattgtaaggctttgtttgatgaacttgagtctgtttctttgtgtcttgttaaacgttcaacaaatcatgtggctctcgcattagcgcgagcttttggtttggaagttgagtatgtattcggttggaattcgcttccttctggtttggcatccatagttttggatgatttgaattaataaattattttattaaaaaaaaaatagaatattgctaaacattcatacaaagtcacctcaaaatggtgttagacactactaaaacttaataacaatacttttttttacataaaaaatatcaaatagtatactcagtgatcaattttcagactatgataagtctgttctaacattatcattctttgtaaacataaattgttattattaatccatgactataatacaataaaaaaaaattacaaaaatacaattgtatgaaattttaaatatttttacagtttttaagattttatttacagaaaatacgacattttgattttttttcatattattttaatgttgtactcttattattttgttgttggtttttattatttgtatactatttttatgttattttcttattactttcatgtagttttcgtgttgaatatatatatttatatatttaaacgtaaaaatataaaaaatttacaaaaaaaaaaaatgtataaatttccgatatagattgggtcagtcttgggttaaaatgggctacgcttatacctagggcccacttagtctgtgggctcaaaaaatcatttttaaaaatacacattttttttattaattatcaaaaatatcatatttattttaaataaataagctcaataacattttttttcctaaggccccacactccttaccaataaaaataattaaaacagaatttttatttaatatatttttaaatgaaaagtctttgaattttcaaagtgtttcgattatccaaaaatattttaacatacaacatctctactttatatggttggatgttgtgctttatcatattactttcaaacacaattatctcaatttttgttgtaattctataacacaatagtggttgagagctttgagtttgaacaagtgttggttcaaaaactctagagtaaaaagagtgtctcatctttagtttttctacttacattgaaggctcatgtgtatagattcagtcactatattcttaagctataacagaattgttgattacagtgggaaattgaagtaggctattaatttctgttgggccaatttaaatttagagtattgctcttggatacaagtggtgcttagaactttttataggtagtgtttcacgattagttatcgatattctcaaagtttgcctcattgtcatgtactgctgaacaatttggaaagcccaaaataaggtagtatggaataacaagcaccccactgtcactaatgttcttgcatctgcccaaacagcttttgatcattggattaaagctcaggataaaacttcattgtcatcgttatgtttgaatagcatcgatgatgactctgagacttgggctaaacttggtgaaaatacaatcaagattaatgtggatgcagcgcttttttatagtgagaacaagtatggctttggtcttgttgcccataatcatattagtaatctaatcgcatcctgcgctggtagttttggtggcctttatgcacctgaagtcattgagataatgggaattaaggaggccatcagctgggtccaggctaataattggcaatttgttgagattgagacagacagccttgtttctgtacaagccattcaaagcactcactccatgagatccacatttggccttcttatcaaggactgtcaaatacttttatttgccctttctaatgtcaagttatcttggataaaacgatcagcaaatcgagtagcacatcatgttgctagacattctcgattttaccctggttgtagcgtttctaagttttccattactgttgaattccaacatcttttgcactcaaaatgctagttttagatatatcatttcaaaaaaaaaaaagttagcgttattctctaaaaattatttttttaaggtatttgaaacttgatgcttaattacactaataataatatgacaccaaaaataatgctaaacactcttttagcaattctcataaatttattatttcttgttgcatctacatttatagtagtcaatattgcattttgttttgatcttgcttatccttaagtttgtgttgtagattcacaacaattttgtatcgatttttcattttttttttctgaattcgtcacattaaaatgtctcaagagttaccattactagaccttttggatccaaatttacaggctatctttccttggaatttagaactaacacaaagtattacaaggagagccatggcatttaagcaacatcacattttgttgttatttattctcagccatgcctactattgaagaaacagaacaccagtagtgtccagcacgccgtaccttttataggtgatgcctcacaattgatttgcgatattttttaaaacttattttcttaagttatatggaatttttaatatttaattacactaatagtggtatgacacggaggagggtgttaggtaccaataatactttttcacaattctcttaaagaattggttaatttctccatcaagtcgattgaagctatacttacaattattttttatttcttacttaaaatagttggtgttttgattgttatataaattgaaattgtttttttataaagatttagaaagtccaagcattcacatacaaagaaaagaataaaaacacatagaatttgaatagaataaaataaaatttgaaatgtattataaaaattgatgaaaaaattattataatcatttttcaacttgtattatagtggaatgatacttccttctcttttaaaattaaatggcattcttttgacaactgaaaaggggatcacatggtgtagattcatttttcataaactttgagaattctcatcctattaaggatgacaccgtcacagcaagctagtctctgaaagagccaaacatggaattcgaatccttaatcacatgtgctgtgtaaaggcatccttatatactacaccgcacaatatatggtatattaaatgacattctaatcccttaaaatacaaccaaataaaaaataaaataaaataaaaattgattcacaattttcattctattctattctaaccaaatacaacctaaaactagtacatttctattacaactaaatgattgagcactcaaaatattaatgtaaatttactagtctagctaacaaaaaacaaagatgtagtatttaaacaaataatgtgattgtgtataatataattaattttttttttttgagagagacacatgccattgctctctattcaaaaattaatgcgatataaatgtgtgtgtaaaatttaatatattaaaaaattaaacaaatactgttcaaattagaaaattatatttttgtgtgaagaaattttgcaaaactatgctgcaaaaataaataaatcaatcattcattaagagatatcaacttgtacatatcttcatcaccttttctctgtataaatacattaataagagaaatacaagaatctaagttgaacttgattattactaaatgcaaatccatcatgaaattaaaaatgacaattgacattgtactagaactctcaaattttgttgtccacatctttggcatgcaatcactaataaatacattaaattttaacttagtggtggccaatatcgccaccgccgccaccaccgaacccaccaccaaatccgccacctccacctccacctgctccaccaccaaatccacttcctcctccaaaaccaccacctttaccgaatccaccaccacctccaaagcctccacctttaccgaatccacctcctcctccaatacccccacctttaccaaatccacctcctcctccaaagccgccacctttaccaaatccgcccccaattccaccaccaccaccttttccaatacctccgccaaaaccgccacctttaccgatcccaccaccaattccaccacctttaccgattccacctccaattccaccgcccccacctttaccaataccacctccaattccgccccctccgccctttccaataccaccaccaaagccaccacctttacca

SEQ ID NO: 18958 - DNA, 2433 bp, Cannabis sativa
tacatcttaataaaaaaaatatattatttttgaatagaaaattatttttaaaaaaagttatccatgaatttctcataaacgcaagaattcagttatataggcacactttatatagaatagatattttttcctaaagaaaaataaaaaaaaaattattgctcgtagatctctcattggtgccccgtgaactagtggtcctcatactccgaaaaagaaatggtggtactagccatcatattcgatactccttctcccgaaatgataataaagatatgctatctatggtatggtagctacgctgttgtcaagtttttttatagaaaattagaaaggctgttgtcaagttggaatctaaatatattgatagtttccatcgtgtcataataatgtgtatcaaatataacatactgcttttgatacaaattaaagtaatagtaaggaaaacgaaataacacattttattgcactcgattattattagtaattcttgcacattgcaactacatctggtgtgaagagaatcaccattcaccaacattacagaatacagattatataggctttttattttttatttgtggcatattatataggattttttgtttaaggtaaatagggaattggtacaagactaagaggaactttcttgtaaacagtgagaccataacattcactcatgtccaggctagaatcatcttcattgggaaacttccaatcaaaccaatgtaaaagatttgcactgagatattcaacagtggaaagcccaaaagccaagccagggcaaccccttctcccaaaaccaaatggaatgaaatgggagtcctgtcctaatttgaaatcaatatactgatcattctcaaacctctcaggtatgaactcctctgacctatcccatgactttgggtccctatgaattgcccatgcattgatgaaaacttgtgttttagctggaatatgataccctccaagctctactttctctgtcgtttctcgagctagtaaaagaggagcaggtggatgtaacctcataacttctttaatcacacatttcaagtaaaccatgttgttaacatcatttgcatcgatcttaggcttatctcccactatttttctcacctcttcttgagctttcttcatcactttcggatgtctcattagttcagtcattaaccactctaatgttgttgatgaagtttctgttccagctaagaacatatcttgtacgattgcttttatgtcgttttgagtgagttcaaactcaagtttatgatctttttgaactctcagaagaatatcaacaaagttatcttttatcacaccaatattatcaccacttctcaagctcatcatggccttgtgttcttcaaccacttgattcgaaaacgtgtcaagagctttcgatgtggatttcaagctagacgtgaaccctctaatggagtctatccatgccaaacatggaaagaaatcaccaaaactgaacgacattaattgaaccaacaaccttctcgataactcgccgaacagattccctttaccaccttcttcaccaccattgctactactaaagctctttccattaacacatctacaaatgatatcagttgaggtttccattagcatttcactcaggtttaaaggaacattagtcttaccacaaatttgccttattctatcgaccattaaggctgttgcttcttcccttacaaacttgaattgttcaactcttttaaggctcaaaagctcaacaacacaaatctttctaacctgacgccaatactcgccatagggagaaaaggccacgtccttgttgtcatagagcaagattttgccagctgtggttataggccggttggagaaaaccacgtcatgtttcttaatgatttctctaacaatttcaccacatgacaccaccagagttggaacttgtcccaagcgtaagagcattaagggaccatacttgttggaaagctctcttagtgacctgtgtgggtgtgtgcctagctgatgaaggtttccaattattggtaacctcggcggtgatggtgggtagctgagcttctcatctgatttttggggcctaatatacagatagataatgaagaagaggaagaaaataaaggtgacgatatgtaaattaggatgtaaatgtagttggtttagaagttgaaacagagtcatttccatcttggtcttggtagctgagaaagatatagaattgattagcatataaatactaatatacattttttgtatcaacttagttatataatataagatgttcatgacaattgacaaagagttaacttgatgaaataaaacaaaaaaattaagcggtgcataataggtcatctttacggtgcataaatcgatccaatccaatgagaagtgaccaatccaattacaatcgatcaccaaatattagatatccaattg

SEQ ID NO: 18959 - DNA, 2093 bp, Cannabis sativa
aaaataataggccatatatctagcaataagcatgccaattaattaggtattttaaagtatttaataccattttaatgtaacgcgttgtaaataattacccatttttttatgttatttatcaaattaaaatatatgagacttgattaatattgaattgcaccaatattggagcacctcttgtagtgcttgacaccttaaggccggtgctcctcatgaagtgctaattataacattctattacaaccttttaattaacctccacacctaaaatcacataccgatatatttttttcaattttttttttatagcggcattcgttatagttacaataatatcattactgtaaatttttaaaaaattccaaatgatttacagtactgaaaacagagttcctagtattttaatttagcaagcgtgttcaaaaaacttcaaacttattttcagcactgtaaattatttaaaaatttgtaaggatgatattgtaattataacgaatactaccataaaaacaaattaaataaaagattgtaataaaaaattaaccgtaacaatcattcctcgaatcatataggttagctattatattaaatattctatttttaaaagtatatattatctggtagttggagagttaggacaatttaaattcacacatgctaaactcatttcctttttaaaataactttgtcgggactcagctacactatgtagtactataatatttaaagacatgaagagtagagaagaaactccataacctaatgagctcttaaactaaaaaaaaaaaaattgaagtatagagagcattatgatgatgaagaagaagaacataggaactagtttgattcttctcttagtgcctttggcattattactagttctttatgtgaacccacctcactattcttcttcttcttcttcgaaaacctctcttcatctctacactattaatcctcatcgaaagctcatttctcatattctcttaacttcgtcttctgaatcttcaagtagttacgcagttatatttgacgcgggtagctctggtagtcgtgtccatgtttaccaatttgactccaatctcgatcttctttctatagaaggcgagttggagatttatgatcatgtaattactatgctgtgtaattaactaaatttcgatattttatacatattatatatgttataatatttttgtgtttttttataggttgaaccgggattgagttcatatgctagtaatgttactgctgcggcggagtctttgattggtctcctccaaatagctgaggatgcagttcctcaggatctgcattcctccacacccgttagggttggggtgagattattttttttcttaatataaataaataaatataatgttattgttatgagcgaacacacttagagaacgatataatctaactctgaattaaaataagacaatgaatgagtattaaaatcaattttttttaacaaatctcatgtaccatgttattttttttaattttttgaaaaaagattatgatataaaaataacaataaaaaaaaaaacaagagcttttgttaatgacaatttttaattagggaaaaaaatgaagtgcaattatttaagacatgtgagatttaataagtgcactactcaaaaggtttcggccactacagatttttataatatgataacattaattatttatgattaaagttaatgtttgtactattttattattatacaaatgtgtttttttaaatgattttttcatacaattatttttttaatttctaaaaaaaatgtgaaaatgcaggctactgctgggttgagatctttatctgggaatacctcagaagaaattttggaagaagtaagtaattattttctgaaacttgtttatatatattatgaatatatgtatttttttttattattattattataaattgaagtgtttgatgaattttttgtgtgttaaaatttaggttaggaaattactgaaagaaaaaagtgacttcaaacttgaatcagatgactcagttgctgttcttgatggaattcaagaaggatcttatttgtgggtatgatataatttataataat

SEQ ID NO: 18960 - DNA, 4500 bp, Cannabis sativa
  modified_base (44)..(47): a, c, t, g, unknown or other
acatggaataaatggtagagaattaagccatatataagaacatnnnntactccactcattgccaattggttttgagatggaacctcatgattctcaacatgacgtattactatttttttagtaaactttgataaaatgatgctttaatggtgcaaaatatgtgaattaggggcataccaaaattataacaaatttagtacaaaaatgaaatattcatatttttagaatgatttaatcacaacacaaaaatatatcttaagctaaagctgttttcactttttatttatttacttctttttcccactaattaatgtacgcatttcatatatttttgtgactctaattaaaaaaaaaaaaatcaaaatatttttgttgactttttgatttattttacactaatatatatatatatatatataatggaccacaattacaaaatttatacaaatatatatatataaatattaatataattgacttattttttgtgttggtcaccatggtactttgtagcactttttttcaacattttaatcaccttaatcacgatatatatctatactaataatatgttgaagtggatgtttatttcatcatataaattatttatttatttatttaaaaagaaattggatagataaaagactagacttcacagtcataacaaatagatttacatagataaaaaaaaaatctgtaaacaaccatactgttggtgggtaaatgcccactttgcctcattataaattacaaaattacaagatttactaatactagaaaaaatataacatacaaaaaaaggagagacgttagttttcaaacacccaataagattccttctcattaaacgcattgataactaccttaaaattgctttccataataataaacttgcaactcttgcccttggctacatctaaagcgaagcagcaggcaatcgtttccccacacaaagcaccataaaactccaactgtgccatttgaatctaaatcactatgccaagatagtttctcgctaccactaaagtactacaagatgacgtgtataattagttagcagttctctataatctttattaaattaaaataagtgaaatttaatattaaattataccaataataatattaccgagaacactttttaatatttatcttaaataaatgcttgtatgaggttcaaacgtgtgttcacaaagatttatctattcatgaattattccttcaattgaggaataatcaagttgggccaaatataatttaacaattgacaacgttaataatgctagacctaactaactactcttactctatatatagtctataatatataacattaattaataaagattaaattaaaactctcttcttcccaaaaaagaaaagagattaaattaaaacttattccgtaattggctccttcactttggttcaacttgtttgcccatttatacataccttattattactatataaatatatataaaagttaaaaacaaacgtaaatctaagatttatgttttcaattttttcctacatcacttattaattatttagctttgttatatatttagggaaaattttataattaactcttttaaaagaatttttttggaaagaattttttaatctaatttttcttattgttatgtacgttgtagttatttaagttatcttacaaaattttaaaaaattcaaaaatagagtttaaacattctgttgaacatgtgactcttttatttaatacgcgagtgaaataaatagtttgaacactattttttatatggtaagttattctaaattttacaaaatgttttaaaataaaaaaagtagactaatattttttttttcttaatactaaaataaataaaaaatagatcgatataactatttttatagtacattaaagattcgccctaaatatcaattatatatttagttttttattttcgaatgtaatatctcaacataagttataacatgtaataaataagtggactataacttatattattgatttgatgatcatgaacaccagcagtagttaatcaataattcaagctgtgtatatatagatttaaaattttaaatagagatattattaattatatatgcctatatatactactattagtagtattatatgtattttttattttttttttcaattttgataactaagacacacgaattgttatgttaggtcaatatttgtataatactcatatagtcatatgtatatagtatgttcaatcaattaaaatatatatttttgaataatactcatataatatgctcaatcaattaaaaaaaaaagttatcaggtcaactaacacaaatcaataacacgttggtggatgtatactcaaacattgtaaatggtaaagatcacatgattaattatttttagtttttttaattattattattttttttaaaaaaaaaaaatcacatgtagtgatctaactaactgttatgaccgagtgtgggtgtagctggttaggatactttgcataaggtccttaatttggttaccttttcgagttcgagtcattatgataacacaatccagagccttaaaagtggcgctccttgggagtaaatgagtgtttgtgtgcctttaggtaagtcatagtatctctgtgtgggagagcctcaactgacaaccatctcaagaattgtgtataaactcccgcctcaatatttactcttcagtggtctccgaaatcgctataaaattgaaagagttgagaatagaatgtgcatcacttgatctcttttttcacaataaaaaaattacttggaattgctcaattgatttttttttttaatgtttattaaaatttacatacgttgatcaaatctaattcatgataaagaaatgatgtagataccattatactaaaacatattacaaattaacctaatttagaatgagttgattgacaaagttagtatgtatttaggaaaaagttagagaggatagcatagtcaaattagatgacactttgagttactataaaatattgagaatcacattatatattattttttaatttttatttttatttttacggtgtagattattctggtaattgatatgtagatttagattgcgatttaaattattccattagttgctatgtgggttgctatataaatttccgtaaaaatgaaaaaaaaaaatctactttaaaatataaaaataataataaaaaaaaaacccttaaaatattttgttgttatataacatctcaattttcttttaatattgagaataaaaatggggtactttttatatatatatatataaaaaaaatgagttgatgcattcacttgtatgtgtacaaataattgattttttgtaaacctatttgtaaattattcactattataattttttttaaaaccatcatataaaaaaatgagattataatttgtgaaaatgtaaaaaacacactactattagttgagacaaaagtaacacccgtatagtaatccattacataacacacgtttgcttagagaaaacatgaactaaatatatgagaatgcacgagactaattacttcatttgttcttcttgtagcccattggtttgagtttggaaataccttaaaccatcataagcattagaaagatataataataaatttaggtttaggccgaccaaatcacaaagatgttatttatttagaattaaagttagagaaagagagagagagaatttaatgggtgaggagttgtgcttaacatttaatcaaacgagtagcttagaatatataatccaaaactaaaagggtctctctctctctctcacatatacacatatttattagttattattaatatataaagactaattaataattaataagcatttttgaattaagtaaacatttaaaatgaccgaccacgtggaatgcgcaaacagccgcatcacacgccggggagcggcgcctaccccttttgccactgtcccatccacactcccccaattcattttaatgtcttttactcactcaacccaactcattatatataaattataaacatagagaaatgctaaagtgcactagtagtacctacaccctcttatgtgtcagtatcgctattggtcaaactaagtatcgagtcccacatagtttaatataataacttttaagaagtatcgttaaccaattgcaacgtgacatgtcgagaaggtgctaggcaccactagtgcctaatagcaatgctcataaatatatcctacggattattttgtttatagtgtatccgatcagcactaagtgtagattttatattttagatccaattcaatccgcacaatagttcaaatccaattcaatttataaaaattcatactatttcatgaatacccttagttaataccatttgaaaccttactgttggataaattcccatactattgtcccataaataaagttacaaggaaaataaattagacctctttataaagcctcaacagaccattataac

SEQ ID NO: 18961 - DNA, 8174 bp, Cannabis sativa
ctctgtacttattttcactcaaaatctcaaaacagattaagcacggcctcaaaagaaaaatataacagtaaaagggcaaaagattagcataaattaacttgtggtgtaaatttctcatattcttgtgttctttattgagcttacctttcgcacttctagtggcttttccaatgttccaacttgaatttcttccacatcatcatcattctcattctcaccatcactggagctggagctggtttttggtactcctttccccttccctcttcctgcaatcctacctcttcctcttcctcttcctctgcaacttccactcacacgtgatttcttactaatttctcctctgtcatctggtagtgacggtgattcggacacaagcccatccttgggcatcttttgtttctttgattgcttgggagttgatttcttcctatacttgctctggtttctggcaacactttgctctgtttcctgtggaagtttctctgattggtcatccccagatccatcaggtctttctcttttctttttagatccagaaacttcttctacaacgtcatccattaactccaaggatggttttccagcaattcctttaacagccttcttaattctcttgcttcgaattttagcaaatctttcattgaatgtgtaaaatgcttccaaacgtagttgagtcttcacaagaaaatgaacaatacatatcagcatagagagagtgagaaaatgagatcataagccgatgaaagatagatgatatgctctaatgcaatggttaagatggttgtttagaatgctagtatttttgtgtttaagagagaagcagattcagcttcaccaactgcattttcacaattttttgtattctgtcaatcctatgttcctaaccattcttagcaataagtttttagggacagagaaatggcaagttcacgacctcatgtttattgtactccttcagaacaggtagtaataaatcatctgccttctggctaccccagcaaaatttgtcccaacacaatctgcattccacagaaccgatcaggaaataagtagcttatagttaccaaaacaaaactcaagctacttggagtaaaatgtaagaattacagtggatttgttcatttactccaatgtctctaaattataaacaaggtcagatcgaaaataatgccgaaaaagtgatgaattctgtctctagaaaatgaagacatgcttgtaactctctgtttttcaaagacatgactcaatttccataaaataagaggattaactgtctgtgacactagaaagaaactgtggatggaaagactgccatcctaaacgccaaactttatgaaacttaaaggagaattaacttacttgcgaagaacaaaatgatcaggctttccccatgtgaaaggctcggttgacttatctacttgaggacaaatgtaagcagaaataacagcttcactaggaaatatcggaggtatatgccagtttttgctcacttttctctacacaataaattgttaaagtatcggtaagaaaaagacatgagtttgtaaacaaaaaaaaaatacaaagaaagaaaataccctaaggaatcatttcgtacatgcttatccataaatattttctttatgtcctgagtatgatcggcagactgctgttcttgatcctcagaaatgttttcatgagatgcagatgcttcttccattttgttttttgagtttttcactttattgccaatttttaacccttttttccttgcaattgaatctgtttcgttatcaaacttccccaatatagtaggatccggtgattcaatccagtcccggaatttttggaggccatcttcctcaggaaacgcatttacaacctcaatagcattaacaatgcctataccactataacagaaagaagactaatagattcaaaatcaattactttaatcaagtaactgtatgaaagcagatgataggaataccaaacctgccggattttttaaatatatgtgatagtgattcctagataagtaggactgcagtataagatacccatgcgtatagaaaatgcataacaacgtggcatgatctcatgagaaattaaatgcagctggcaattacctgacaccttcagtataatcactaccaagaagaagtgccatgcgaatcaactgctctcttgttagaccaagctccttctcaatgtcctgttggaaatgtaccattagaagaatcgaattttttaaaaaaatagttactacaatcaattcttttgagaaaagatatatagaaatcaaaagaataattataagcacatccagaaacagaatattatctatttggacatataaaaaatcacgctaagcataaactcttcatcccttataccttcatgaagtatgtctcaacatattttctatcatcaaatatattcttgtaaacacttcgtgctccaaacaagaaaacatctgagtcatcagtcacaacaccatcaacaaggtttgctagctccatataagcacactgtgcttcggcctccattggtgcaatgatatatggtaatccaaacatttgcagtagctcctacaaaagagtcgcatgggtcaaaaagtttagcaactcatgctaacataaatataacttgatggaagaggattcatagatagtataacagacctataaaaatgatcagaacaagacacaaaaaactagtagtaaaaaacaccaagtgtttccaatccaccaagaggagatgggatgtcataacttggcatagtatttaggtggaatgttctttaagtatcaacatatatgtaagaactgatgtgctaatagaaaaaattaaagttccaaacttgaacactttgttattgttttaaggaattgttcctcttgaaatgaaaacaacaaagtacagcagaattgaactaatgaatctgtaagctatgtccatgccttacgatcacaacattataaccaaaaatcaacaatttatgacccacctgacattctgtgaacatctcactactaacagattctgcattacgttccagcctaccctgctcatctccaagatccatacgttcttgggctaaaacttgaatttcttcctctagactagcctctgtaacttcaacccgtaaaccatcattgttcttaaatgaagaattctccaagctatgctcaatttcttggggaattttttcctgacctatctttgaagctaaattatcttcattctcaacatcacgtattaaatcatttgtcactgctttcgatgaacagacagctttgccggttgcctcaaccaaattggatgatgttttagcttcagtagcaattttctgatcttcaaccacatcatcgggaccgtcatcacacaaaacagatgagtgagaaccacctttagcgaacttatcaaaagaggtagagaacccgtcaaccttattagaagtacagagaagaccttccccagccacattgacttcttttacttttacaggagcaacatattctgcatgtggtgcttgtgcttcgttggacaaattagcacttttatttgcatcttgcatgggttgttccatagaactgatgcgaacttcacatggtgacccaatcattatcctcgaattatcaggattaccagaagaatcagaggtttttgagatacttacaagatccacatcattcagagtttcaacgttacccaaaattttacaagttaatctgttttgttttgtacaatcattccctggagaaactggcccttctaccctgtcttctgagtcagtaatcccattaccttcactagaatatccattggcaatttccagtttgtcatcttcaggcattgcaaaattagatttctgagcatctaaatcctccagacttctccttattgcctcctgcaattcagcattttcttctaaattacctttggaagttgccttttttgaatcagaggaagcatgttcagtaaattcacacactccttcctcccattccacttcactatcatcaatgctattgcctttacaagggagttcagttctgaggttaacatcatctgagaaacttttatctttcgcctcagtagtaccttcctcccaggaacagtctgaatcagaactacaagacatgttccttgatgacatgatattatcagacgatagtttaagaggattttcttctactaaacgagcaaatatctcatcatcaccttcaaaacacttgatgtcaccatcatcttcaaaagaaatctccacagatgcaccattattaaccacagaatcttcatttgtacaatccaatgtaacagaatcagcaccaccacaagaagtttctaaaaattctttaccagatgaagtttccggaactgcatgattactttcatttatcaaacactcaacattcgtcctctcattttcaatctctttcatcaagtccaaattcctttgtaaatcacgggtcatgcgaatacccatagctctcactctacttacacgaattcgccctctctcatcatgatatgtctcaatattgtcatcaaaagcccttctcgggttgttgggttttgatccattcacattgttagacttaatggtagacgcaggagcatgcatgacacttgaaggatcttcttcctgttgcttatctccatatttctcagttctcgcagacagtgccctgagattataatcatgctatatatcacaaagtcatacaagatgagaacatataagtaagagggatataatgactcactgtttatcaccggtgaaagatgatgagaagataaattctctgttagattcagatgctattcgggaagtctgtacaccatctactcctcttccagaagcaaccttttgcacttgatctatctcccggcggaaagcaacagtcttaagatatgcttctatctgtaactcagaaaactttgcagggtcctaaatgtagataaaaatgaccatatattagatgatccaaaacgtgtatgggcaagtaccaaccagagtatcatattatcaatatttattttagaacaaagcaacactagttgcattgatataattgcctttaaggacctaccttcttgaccttttgatacttctgcctgttttcagccatcagtctttctctaatctacaaagacagacataatgtcagtgttacagacctcactggaaataaatacacacaattacataaaaatgtagcttacttgaacaagaaggtcaagttgcattgatggaggcaaagcagctagtatggaaggatcaacttcaccatccattgctggctgcaaaataataaaacaaccatgtgaaaagaaattaaaacaactcatcacaattacacccaggatggaactaccgtttctaaaaacaatttcacctcataacttaaaaaccaacaagaaaattgctaaatgtttttaggtattaacttcaactaaaccttgcaggtgtagagacaatgaaaagcttcagttagcagatggtgcgcaatttgcttacttcaagtacaacattgtttccagatttccaatcagaaaatcatcaagtcttaaggtattcatgcaacataaacaattaaatataacagaggcattgactttaatgacaatggattatatacacttgggtattatggggatactaattaccagtatcatctcttcatcaccattctcatcttcatccatatcaccatcctcctcaacgggataaggagtagtagatgttgatgctttgttataaaaactccaactttcttcttccatgagagatgctgccaacctaaatcactcaaagagcaatcatcaatgcccatcacttgcttagttgaaagtctggtacaagtatgtatgcagcttacatttcatctaacttctcctggttgagactgcttgacaccacattgtccctccctacattgatccctgcttcatctagcatgatcttcttacccttatcaacattatcctgcttctgtttctagtttcaaaaatcgttcacagttactaagctgtcactttcctagttacaaagaagaattgcatggaagcaaacctgcttcagatcaagttgcagagacggtgttaaagcatctaatacagctggatcaactccaccatgcatatctggctggtcagaaatagtgaaatttgcatcataaaccaattataacaaagaaaataagcacctacgcaaacaagagtgtttttctttcttttttttgctggccgagcagataggatgctttttccttttgctggctgagcagatagaacccttgaaaaaggactttacccaattaactttatatttactcatgctaccactgaaccctattatattttgaaggtgatagtaggtaggtccccagaactaaaatctcatgtacccaatccatgggttggaccactagacctccaactcaaaatgtagtttctcaattcttactaaatggactatggaaacacgtaataattaactggaaattcaacaaaaaatttaggttaacaaacatgataacaaaaacttaagtaacagaccaaatggtttacaaaaaatggaatacatactagtatcatttcctcatcatcccaaccatcttcctcaaaaggaatagaagtagactttgttgagttgttagctaaatcgtcttccataatagatgcagccagcctattaatcatcaaaataattataagaccagaccacgtacaaaaatacaaaagttacaaatataattttgtattaggctcacatttcatccagcttttcctgattgcaattaatggagctcacatcctctttcccaaaatcattgcctaccaagttgtcctgatcactcaaaaccttcttacccttggcatcattcttttgcctctgattcttaatgccctctgctatctctttcagcttcatcgccttaagctattaagacaaatcaaagaataataaaaagttaataataaggcattaaatcagaggctcttttaaatagtttaccttaacaatatctaccaataataacaaagtacaaaatccacttccaagtttacacattgcttattcatttggaccaaaaagcaaaacgaaattcttggtaaaatccattaaacaaatgcgtaggttgataatagacgtgttcttcaatgtcccgtagctggaaatgaaccgaccgacatgccatgtttaaatggacagggacacgtgtccgcattctcaatcaatctcttacacatgaaaagaatgagtgatgcactcacacgcagaaaattacaatcatgaaaggaaaaaatgatcccaatgccaactctagattcacaaaaagggtctttgagaaccaaattgctgttgaaactaaacgtcaaattcccaacttaataatttatatttgaactccaaatcactcttctactaataacaatcatattagcacagaaagttggaaatgaattgaggggaaactcacatggttaagcaacaatttctcggcagtttttcggagtttagcctgagcattctcacgcattcttcgtctcgcaatgacggttcggcgcttgagtgccggagttccaccatcgaagacaaagacaggcttggtccgtaggtacaaaagcttgcaaatcctgcgaaagaatccaagcaaatgagcgttccttatcatctctcccttttcgtccctcatcgccttcatgaactgcaccatccatatactggcatctgtcaacaaaatcaaattgaaacacgtttcgttcagtaatcgagcaacgatgcagttagggttagggttaggagatgataggctttatttaccgatggcaagcttctttccggctagggtttcgacggagacgcggcgaccgacgggggccagtaattcccaaagaccgtgaactcccatttcgctcggctgacgatgacgacgactctcctcaactttcagtttatttattgccgccaattaatttttataccaccaaaaagtcgtttggaagttggaacttaaactacactacgacgtcgtattactcgtggtcttcaattacaatttatattatcgatttttttttagagtgaaaaaaaaagacacaaatattttagaaaattttatttgcaccctattataaaaaaaaaaaaaaataataataacttaattttatttttaaaa

SEQ ID NO: 18962 - DNA, 3406 bp, Cannabis sativa
cacaaacaccaaaaacatctcttatatataaatacattacacaagcaaaaaacatttgtgtctctctcatgttgatatatatttttttttcttataggttggagtgattcctgaccatcctctgccatcattatttccgaacgatgaagatggattttgtggctgccttcaggactctgcatcagcttgctatttgaaccaagttcagttattttcccgatgacgacgtcttacgttgattcgaagaaatactaatctttttttttgctgtgttactgtattcttttgagggttcgttgtatcagttaagctggacagaacccagaactggagattgctgaattactaaaaatatcattttggactggatggaaatggaatggagctattagttgttcaaagttctactagcttgatattttccattgttcaaactaatccaacttggtcagatactaaactaatttaactgtactctcatgttaattttatgtctaacctaattaaaacattaatttttctggacaaaacaccacttccaaatttaaattttactctccttaagataaaactctattgagcttaattaaaacaaaaatatcacttaggccaagtctaatttaccaaaaatatctcttaggcccagccttaatcctttgagtaattttttttagaggaaacagaaatatcaaaattgaagagaatcaaaaagccaatgtagtggatgtataatggaaaatatatgcggtaaaatatataggaaaaggggactataagatttagcattagcaataggaagatgtatcctttataaactttcattagttacataagcttattattctaactaaatatattgttattagataatagataatataatacaattacaatgttcatttaaataattttgtataataaccccatcatccaaattggataatgggaagaagaatgtatgtagctaaagcatgctccaaccaaaaacaaataaatcatcagtaagaacatactttatcaaaacatcttagtccaagatcccagaaatgggaagaaagcaatcaacaacctcaacaacaatggggtgtcacttttcctttctcttcgacccaacttacccttatcacccgatgttcttcttgatccacctctcattcttgatgacctacccgaagatttagctctttcgagatcatcccatccaccaaaactggttccactttggccacccttttcaacaggctcttcatctccaactacccatgattggtacccggttttttgtctaccaggttcctggcggtcttcatcgtactcttcttcagtttcggtatcagttacagtgctgctggcagctcttctctttctcattcttgtcctcctgcgtttcggtttactctgagactttccccaaagtttgtcaaatgcaaaagccaatgctgactgaccgagcgggagtgctaatgccatgagaaaggcttttggaccagtagctagtaaccaagatgcaaatataactggaagcatccaaccataggacttgaacacctgcaatgacccaaaaaacaacacaacattgtaaatccaactaaagaatttaggaaatcaaaatctaaaaaataagaaacttctaatccttaaagtaagttaaaaggaagtatgcaattgactagaaaccaattacaaactatgggagcccttaggcccctttgatgcaaagagttttactcaatacattccataccctctctatttccttactcacctatatatagtaatttctcactcaaaactaccctcccaaaaaaaactcatttaccctttttattctagtacaccatattattcctagggcctaacagtaatgtaattcatactaaagactttctcatagtaacagagcattaaaaccattaggtgatactcatcaaatctaaatgttcatattcccaaaccacacaataagacaaaactagagtcaaagttcctcagttagactctgattggatttggaccaaataattacacttagccaaattagccaaagttggtgttgagaaataatccctgcaaaacacaaccaagcaaaggcaaagaaaaacaaaaaaagaacttgacagaaaacaatagatcaaatcaaacacaatgaaaacagaaataaatcaatgatagaaatgagcaagatttacttggttctgacacaatcaacctattgttcttaatgttacaccaatagactgatccctcctaaagatataaaaaggtgtaagacaaggctgtaacttaacaaagactcttaaagaacagtctttgttcagttaagttagttataattggtatttaactaactgatgaatcaccaaaccaagtagaccaatctgatccgtttgagttgatgaaatcactagtcttcgcagttggatattacataagacatgtcaaagaagaaagaaagtgtaaccaacagaagatcacactatattgatcaaagtaaggttactagagctctcaccaaacaaaccacaatgaaaataaaagacacaaaattttcttcatcaaagattacaaaagacccatctttcaattcaagaaaaatcaacataattcagctcaaaacccaaaaatacaacatacccaactcaaaataaggtattaaaaatctaaaaacccatagaaaaagcataaatttcaaacctttagaatccatagagcatcaatggcttcctccaaaattccaggaccttcctccctctccggcgactcataatcagaccaccaccgcctcttgcttccattgtagaatccttcctcgtaatcttcttcttcttcatcttcgtcttcgtcttcatattcatctcttttgcctctgaaatcaaaaccgaatctttgagagcgtctggtctcggcattggaatcccatcggcggtagtgggtccggcatgaaaaacgatagtggtagtaagaagagggtgaaagtagagaaagtgggggaagagggttaatgggtggccaaggaggaggttgtgtgaggagtatgacgaggccactcgccataggagctgagtctgagtctgagtctgaggctcttctgagcttccattttccttattgctgttatctctttacctattaataacaatttctttcgtttatttattattattattattattattattattttaattagtatttttatcttttgaaatttgacatgttttaaattatatttttaaggtcattcaaaattttcttaaactattaatattattaaatttaataatttttttttaattttagttaaaaaaaaaaactaatatagataaaaatttaaaagacataatttagtacattttaaagtttgaagacatcatttaatagctaataaagtttgagaacatgattc

SEQ ID NO: 18963 - DNA, 3499 bp, Cannabis sativa
agtgtagagaatgtgattctttcagacacattcaagcagagtgtgcaacactcttaagaaaaagaaagccctagtggctacctgaagttatagtgataaagagaaagactccacaactagtgatagttttgatgaagataaacaggttgtagatttcatggctcaaagtcaccaggttagtggatctaaagatgatggtaactccacttcctttgaggctgatagtgaaggaaggcaacatgcctatgaggagatgtttgctcaattggaatacatgactaaatggattagagggctaaataatgttaaggagcaactagaatttgaaaaaatcaaattggaaaatacagtcaagtctctcaacagacaacttggcaaaacaaatagtgaaatctataaactcacaactgatcttgtgagagctaaaaggcactcgagtttattcctctgggaatttctgccaacaattatactttacagctccaaaaatcctatggagataggacatccattggatataaaatgtcatacaagaaatgggctaataggaaattgatgatccttcctcatccaagggcaatgaagataagactgctataaactcggtgcaaaatacgtgcactactagatcctcagattcctctatatagggtagtgtctcatctagatctactaacttgaagtttaaaggaagcaagactttcctagatggacatgttcaaaaggagaggcttgttcccatctatcccttctgtaacataggacgacacattagagctaaatgttacaagttctagacatatttgaaagttatgattgatcttcctaatagcttttgacaaccaaataaatttagagggaagtcgtcacaagttgggtggaaacctagagcaaaatctagtgacactgtgggattggttgctcacacctctctttcacctttcgaataggaccaatggtagtttaacaatggtttctctcatcatatatatgattggaaatagataattgttggtgaactataaagaaattaaggagagactggtcacttttggtgatggaaacaagggtcaaattattgggaaaggaggcttggtgttgaacagagatgcacctcttactagagtattgtatgtgaaagggcccaaggaaaacttgataagcatcaaccaattttgtgatgcaaattacactgtaagtttttctaaaactcactatttagtttcatctactgggtgctcggtcttaacagggaagagatccggtgatggtagttatatgttggacaatactgtcctatgtaatagtgcatcattgtataaatctgatattgggggttctaatattattccaaaagttttaaccaaaagaaataatagttttagatcataaccttttctttgaagagcttattcaatattattagtgctatggtagagtcttctaaatgttttattgttgaatcttgggtgtaaacaaaaaaaggatgatattttttcctagtgtttgctgattttgatgatgttgtacatcgtactctctttttccaaaagaaatttgacatacaaatgctatgttggctagtgttcctcattgcttatctatgtgtcattatgtgtgataatgaaagtgccatataaacattcttcaaaattcattttgattcaaaatacatagacaattaatatcactttttaagaattggttgagtaaaaatacattagataatcacatgttattcttgatgcactcttagatttttgtttactaatgtcttgaattctcatattaatgtgtgcaactagggaatttttttgaagtgtattctatctgattaattcgttgtggtatatgatcattattattctcagcttcttcagctaagccttgattgctatcattttttatgaggcacttcatgtcccatccacaacttctctagttctgtcaaggaagctctaactaggtgaattttttaggatcttttgaacctatatttttcccaaaaagactacctcttttaaatgaaatgggaagaactctcttttgtccatttactaataagtagtatgctccttctatattagtatttctgattaaaagatgacgattacatctctaagggagagtgaaagtcatagttggtcgcaaaagaaagagccggagtgactaaagatagaaaaggcagaaaaaaacacacaaaaaaatagaaaaataataaaaatggacagcttaataaaaaaaatataaatgagctaatgttctctcatgaagtcaatagcgcactcacataagaaaaatcttcgttcaaaatcctattgaaaattccacgtttattgtctttctcaaagtgtttttgaatatgttgattgcatgaagttatctcatctttttattaagtatgacctgctgtgaagctaaatgtggaattggttctttgctcaaatgatcattcctcacttgttaattgcttaggtcacacatttttttcatcgttacaaattgaacatgttaagtcctgagatatatcatttggcgtattttttgttgatataaaaataaatctcattttaagcattaattgtaatatcgtggtgaattgatatatagttttgcttggtcattctccactactacaaaaataatttttctcgatgtttttaaacagtcatttaaagcacatgttttatgctgatgtggaaataatagttgttcataccgtgtcccttgatcgtggataattgatgtgatattaattacctggtcttgcaatttatacagtttctttttttaggaaaataatattttcttccgagatcttagggaagcatcccttattctgtgcaaagtaataaatcgaaaactttgaatgtttatgtgtaattctaaccacgtattaaatgtttatattttaaagctcggctattatttcattttttaagagtcactaattttaataaacttgttttccagaaccgaacttggacctggatccaaaccaagatccagaccggaacccagaccaggaccaggacctggacccagacctaaccccaggccccgagcccgggccttcaacccagacactgaccgagaccgagacatatggacccagcaggatacgggacccgaattcgtccctggccccagcctcaaacccgggtttaagagccgaacccaaacccagacccagacccagaccctaactcagacctggctccggccccggtcccgagccccggactaggatcgggaccttgacccagacccggactcagatccaaaaccgaaccttgaccagaacctaggaccaagaccaagacccgaactggaattcggactcagacccagactagagacccgagactcgtgaccctgacctaggaccgggactagaacccgagacccaaatctagacccagacccagactcgacctgtagttggtgttcgagtcgagtgtattgaaaatatattttaactttacacaatctattaata

SEQ ID NO: 18964 - DNA, 7826 bp, Cannabis sativa
ggtagtatatgaatcacataacatcatgcatacaatacacatacacatatacatatatatgttctatgctagtcttaccttgtttttaaataagtgtgtcaatcgaaatagaaaatcacgcgctgaatggaggccctatatcacaatcacataaatgggtaaacaacttgctgaaaccttctcggggacctaaactcaatactagaagtttttctatcgataaatagtatgacaatactctaaatgtcgagaaaacacaaaaatcaaggctctagaaactgccaaaattggtaagccaaattttgaaatcaataaaccagtttctagggtcctgcctggagaaacggttaactagttatctgcagaaaattctaaaacctcgaatctcactcaattttttttttcaaactcagccaaactttccaaaatacttgaaatatcatccaagaataattttcaagcaaaaacagtcgcaaaaatacacaaaaacgaaaaaaaaaaaatgtcattgttgagctaagtttgagttcaaaaactcaaactttcttaaccactcaataacccaccaaacacccctcaaactagctctaactaacttagaattaacccagaaaactaaaacaacacccaatgaactcagacagaaactaatttccattttgcatgcttaaacctagcaaaacctcaagaattcaaaggataaaggttttcaagggtttaactttgcttgaaccatttcaattccttgctgaaatctctgaaaattgatgaggtggactggttttcctctagttcttgtgagccgaaagggagagagagaaggcaagaattgatttttgttgtcaacttaagttttttgattaatagcttagtctagataagtaaaagataaacttaatctatttattaaatattgaccagttgccacttagtggaataatccacctatcctcaaaataaaaaaaaaaaatactaaatttgcctttgctttaatgcttaactaataaaatggcttataagtaaaatagtccaacactataatctagcataatctcgatattccaaaatcaaacatatgattgtctctcttagataaagggttttaagttaccacatatgactctaatggtcatctatcacattttttattgtcaccaaggtaaaattataaaaattgtaaatttctcatttaacataaataacacacttagagtttaataaaaatctctaaaattaaaagattataaatctcatgcctattttttaaaaataagacccacatcatgaatattaatatataatcatcaaataataataattaatactaattatcctactaatctatatcttaatccattacaaaaaaattaataatgaaagctagaaaaattaaacacaaacaagtagtttgaaaccaattcaactcgtgcaggctcactttctttgacttctagtatgagtgtggtaagacattatttcaagtagcaaggaaagaaacttactattcttgcgttcaaaattgggaaatttccctgcataagagcttttctttactatatatgtatcaaatctatcaacttagatcgaataaagacagtgacttacacaacaaaactagacttgcttgctcttattcctgaagcttgagagacctttcctcgttagcttagcctaccaaatacttttcaagaaaaacagaaaaaaaaaaatcttctggatatcaacattatatagtatatataaattataacacaatgtagcattttttccccatatatgaccaaagagttccacatttccatctaaaacaccacacactttttctctaattcattattattattattataattatcatctgtaaaaactactttttcaatgaactataaacattatcaatatgataatgagccatataagccaaattagtatactcaatttaaagggttggtgtaacctaaccaaagttagagttagaccttaagaacccactacaaaacaaacaaatatatacataaataacaaagaaaaatatgcaacaataaatatgtagaagaagttacttctactactttgcatatggtcaaaaataaaataagtcaagcaatcaaatatcaaaggaagaagggaccaatgctaattgctactccaatgttttaataataaaaacattttattttgtgtcacatagaaagaaagaggagattcccctcaaagtctcgttatctaccagaactcacaagtttgaagctacaccacattttcttttcagagctttatccctttcggctcaaatatatatgggcaaaattaccaataatccatttactataattcagtggctctggtgctgccaatgcattcatgtacgccacattttaatgtgacaacacttgcatacttatatttatgcgcggtcagactcagactcagactataaactcttaactattccccaaatctgcctacggtaggagcaagcaagcaccacccctagtcttgtgaacccatattcataatcaggttcaaaggtatctgctttaaattttagattgatttctgttgtttgtggttgtggactggcagttgggtatgagttatttttcccttttattgtttgttttggcttttaagcttaaatgggtttttgtcagattgagttaattcttgttatcgtttctcgattactcatatggggtgttttcgagcatttgggttgtcttatttttgttttatataacgaaaaagcatttctttttggaacttttctgggctttgtgtgctcttagataaaattgcatgtttctctgattatatggggtttgtaattctgttaatactgggtggtgatggttattttgtgtttgactgatctatgggaaaaggaattagaagtactgaataaaatttaggagtaaaattaaacggaattagacaaaagttcttgaatccaacaattatggtagttttcaggaaatttttaactgctgaaaagtttgggaacgtacatgtcaaaaatttaaagaaaaagaaaatcataattagcataaaatttgtagctcttaattgaatctccttttgattggttcaaatcataggctttggagtagattaccccataacctgcttttatttgcttaatatcctctgtcatcttcacctaatcggtgatcaaatcctttgtgaaatttgtcataataatcgtgagtatttgaaacatcgataatgacgatttgttttatttatttggtatatttaaatatgtgactgtaacactgttggtgggggacctgtcttgtttgttactgtaattactttcagcattgtttcagctaaggaacttgtagttttgctactttagttcctcgtttgtattgaggtgaacactttaagaatttaaactatcatcaccatgccgctcaaggcgttagactatgaatcactgaatgaaaacgtgaagaaggttcagtatgctgttagaggtgagctgtatcttcgagcatctgagctccagaaggaaggaaagaaggtatggtttcggtcccttgcttggattttcgctcttgatataaaaattggaatggattgcttttcaataaagcattatctttgtattttagtgttcaaaatgaaattgatcaattttaactgtttacatttcacataatgtagattatcttcaccaatgttgggaatcctcacgctctaggacagaagccactgacattccctcgccaggttcgtcaatatttcttctttaatcattatctttttgttttgtttattctcaaattgactaaataatggttgttgtaggtggttgcattatgccaagctccatttctgttggatgatcctaatgtggggctcctctttcctgctgatgcaattgcaagagctaagcattatctttcattgacttccggtggtctaggtacttttatttctctatgttcctagtaactttaggattcactctcagtatttccgacatatttatctcctagttatttacctcagtgtaaacctttgattgtaactggcttttcatagatttggagtttgtattcagttgtcacttgttaaaagtgaagagctccatttcataaactgatagtataaaaaattgttgttctttacttttctaggtgcctacagtgattcccgaggtcttcctgggatcaggaaggaagttgcagagttcattggaaggcgtgatgggtttccaaggtcataatctcatcttctattattttccatttctgaataaaacttattgaacttttagttgggctctctagttataaactaactagtttttgttgtttgttctgtataacagtgatcctgaactcatatttctcaccgatggtgccagcaaaggtgtgatgcagatattaaatactatcatacgtggtgacggggatggggtaattcatctttgtagaagaaaaaataaatcatgcacatgatataattctccttttctttgttcgttggcttaacttttcttttacatgatcactgtttgtattttctaccagattttggttccagtcccgcaatacccactctactcagcagcaatctctctattcggtggttctcttgttccatattatctagaggagagtgcaaattggggtctcgatgttaacaaccttcgtgagtcagttgctgcggctcgctccaaaggaataactgtgagtatgcttttcctctttataatgaatttaaggaagctcttttaaaatatgaagcatgggctcaaactctggattggcatttggcaaagtctaattcaatctgaataggctattaagtttctaatttccttcaaaattcactgatccctttaacccctcatcgtttatcttcaatatgtgctaaaactactgtgatatatgagcaggtaagagcaatggtgattattaaccccgggaatcctactggtcaatgtcttagtgaagctaatttgaaagaaatcttaagcttctgtttccaagaaagtctggtgctgcttggagatgaggtttatcagcaaaacatataccaggatgcgcgccctttcatcagtgcaagaaaggtatctataactttaagttctatcatctaattgtaagagtaattgcttgactaccagcttaaattgtttttgttttctacttttcgtccaactttgataacaatgaaaggttttgtcgaatatgggagcaccaataagcaaggaagtccagcttgtttctttccacactgtatccaaaggatattggggtgaatgcggtcagcggggtggatattttgagatgaccaacatccctccaaaggttagaaatatcacaattatattgagataataaccaaatagaaacaagactttaccaacagtttacggattataatacaaattttattgtcggattaatttaaatcctccatttttctaattataattcatggtttatgttcttaaatcctttaattgacttgtagagaatgaaattcagcatggctaggatcatttgttgttttcatctattagacttccaaactcgattatcattaatcattgtagttcatgtctttctatgcagacagtagaggagatctacaaagttgcctcggtatctttgagtcccaatgttcctgcacagatatttgtgagtgatatttaagaaattcttctttttgttatttagtctgaattatgtcagtgggaaatttacccttgttttgtctgatcacagatggggttgatggtcaatcctctcaaacctggagatatttcatacgaccaattcgttagagaaaggtaatcttagctgaaattctatttcatctaattaaatgtcttggcactgtgtgaaccattgtgcattttgaaaaggtttgatcatatatgcaagatctgatattagttaccactcttctagctttaacatgctattgccataatcctgcgcagctctgcacatacgaaaacttaaacgccaatttaatgtttgtggttctttgttattttaaggacatgaagaaatattacattagatgttatgaagtgtctcacatttctagagatatttattgtgagttgcaagtacttatgattataacatgtaaaaacatgcagcaaagggatccttgaatcactaaggagaagagcaaagttaatgactgatggatttaacagctgcagaaatgtggtttgtaatttcactgaaggtaaaagttgtaacaaagaaaagaatatctttcactttgttaataaggactttttcaatatcgtcggtggccatgaaaaataattgagataaactttgtttcaggtgcaatgtattctttcccacaaattcgattaccaccaaaagccatagaggctgctcaatcagctggaaaagttccagatgtcttctactgtctcaagcttttggaagccaccgggatctcaactgtccccggttcaggatttggacagaaagaagggtaataatttcatcatttcaacatatcagacattttcgctttgaaactttggtcactttctagagaagaactttgttaccatttacttagcatttgacatgtctatgcagcatgttccatttgaggacaaccatcttgcccgccgaggaagacatgccagagatcatgtcgagtttcaagaagttcaacgacgagttcatggagcagtatgaagaccatagaggttattcaaggatgtgaaaaatcctttatccttccaaaaccaatttgtattataatatcactcagcaattggtagctctttaattttattatattatatatcatctctatacttgtgaaaatacttctttatctgtctctattttcttcctatcacaaagggtatgaacctcattctgttgaaacatatatacactacattattactagtttctattatctgaattctaactttaatgatttgtggcttagatttagatcatgcttgaccaaaactaaaagtctataacttgatcgtttttattattttgttgaagttacacattgagaatttaatattcaggtgaaaagtagatatttttagaccaagttttattaatagtcacacccttcgtttaaaactgaaatttctgaagttaccattttgacttcctaatggcagatttttttttttttttggttgaaaaaaacataagcaattacttgttatgtaaatgtgtattgagttagtgtgatttgtgtgtgcttatatcattactctatgaaatatacacaaaaatgaaacttttgacatgttttcgttaacattttttattggaaaagtgaattgaaaaaaattcttgaagagaccaataaccattcttaaaatgaattaatatttgttttctaaaaggttagaggacattattttttaaaaaatatttgtagaaatgagaacaaaaaataatttttaaataaatcgcaatataaaaaatactttattttattttaatttatctattttttaacaaatactttaatattttgagatcctgatatgaaaaagacacagacttggacctcggacatatacctgccccagacccgaccctgatctagccctggactcggccctgaacctcggttcggaccctgaacctagaccctggacccgaactgcgacccgaacctggaccaagaacccagcccggacctgaactcggactcggaccctggacccgaaaccagactcgggacccagacccgtacccgtacccggactcagacccggacccggacccaaacctctactcgaaccccgacctcgacccggacgccaaaaaataattatacaacaaaat

SEQ ID NO: 18965 - DNA, 3147 bp, Cannabis sativa
aagttaccaagaaaacaagtatttaatttttttctattattatttttaaaaagaaacatgtatattaccgtggtacgtgaatgaaagaggcacgtgattgctgagaaatttcttcttcacaaccttatttcacgtgcaaacatgcttcctttattttgtttgtatttgaacattttatatgttattattttatttaatttattcttagatacataataagaacattttttgtctgaatataataagaacatttaacaataataatgcatgagaattttttgttctacttgacgttcaagactattacaaaagttggaaaaccacttctattagatttaatattaaccctttttaaaaaaaattaatatttaacgaaataatgtctacagatttgtaaattaccactttgaagctgcttttcatatttaccctatttgcacggtaatattttctataatacccagcaaccacgtattattttaatttattataccatttatttggctaataatctagatgggtaagatgaataatttactataattgcatgtacttttattattttataaattggactgacgtatatatattacagtcaaataaaaattcatttataagtagttgtttgatttaattcttctctttaaaaccctatcagtagccagaccattcatcgcagaattaaatgctaagaatcgaccatgatagatccaatacgatcccagaatcagaatttgataataaaaactctatcactcactatttcacaagtaggtttttttttttcagagatatatgccataaatagtgagttcattaacgaaaatagtcgacattttttttagtagtcgtcaccatgattaatctaaactctaaagataaaatgaagcacaaagtattaataatattaaaatttatcttataataatggactttataatcagtaaatttattaattcaaaataaataataaataaaaataatcagtaaatttacaatattaaccttaaaaataaaagtgcataaaaacatgcctatatacttatatatatatttttgaaagcaataacatatatcatttatgtccacatgctatttattgtaaattatttaggctataaaaaataaataaaaaagtatataaatgtgggtcactttcgctgaaaaagagttctatttataaaaaccggtactgatggaatagagggagacaaagacagcaacaatgggcccaaacctaaaggctaaagctttggggagtcgtgttttcatgaaggccctagaattagaaatggtacttgtaaatcttcgtcgacgtgtgtggttagcgaattttttaaacgttagcagtaaatgagaatttttcatttaattttaaaatccaactcaattatctctttgcacaaatttgtagttcaagtatatacacctactttattatccttttttttaatattagcagttgaggttcaaaattggaacctgttttccaaagagaataatattactatacttacgacaataaagaattttattttagttggatttaaatgaaaacatagaatctgtcaataattcatataaagcatcagcgatactatcagcggattcacataaaggcgagcaaggatatttgtctaaattacaaaaaaaaatatgtatacatttataataaaaagttaatatttataaaaatagtgttaatttttatgtaataattaagcgataccctcatgatttacaacccaaagccaatacaaaaaagaaattctttaagaaaaattattaaaaaaggaaagaaagaaagattagattttttttcctttcctaaaaaaaaaaaaatagaaagaaagaaagaaagaaatgccagcaaaagaaaaaagccccttggccaaaattcttttcctctttaaaatatcagatgacactctttctttagaaaatagaaagtactctgattaaaattaaagaaaaataaataaataaataagcaatgacattgttagtgttactgccaaacacacaaaatgttgaacaaggaatttatttttatttttttataaaaaaaaaaacatttttgatttggtaagtttaaaactttttttatgtgtaaaactgcagaatgtcatctctgtctgtgtgacttttgtcttttctattaatgacaagtaaataacacgagagttcatgaccaaacaaaatcaccaatttagtatagaatataattaatttattagttaaacagtaaataaaaaaagaaaagaagaaggatatattagttagaaatcataccaggaaataaggaagagttatgagttgcgtaatgacaagccactgaagcccatacccaatgaaacccataaaagcagagataaagagaacaacagacaaggggagatacatcaaggccaacccagacgaccacccaaataccttccccatatccgaagcaacagccagataattcagctgcacctgagaaatccccagaaccgatttcaacaccgaagagtaagccgagaaatcgaagttcgttcctgtgaacgcctgaatccatattgtcgccactagaatcatccattttcgagactgaccagccataataataatggttataattaattatatgccttttgatagaaatgcccaccacccactccggccgtacgagaaaagttgaagattacgctggtttcttgatttttattttttatttttttggcagtgtttcttgattttgcgtatttcgacggagtctctcttcggagcttcctttataagacgttcaagtgagtcgtgatagggtcccatgctcctctcaataatgacaactgacattaacatttacttggcatttagcctccctttctatgggtttttctttttctttttttggtccactaatattttttattttattttaattggaatattattttatttgccacattgaatttgttgttgaaatcccatcaatgaaagaggatgtatgaaggttcacgtggcggcatgtggtaggaagaagatccatatgacaggtggcagtggcaggcaatgaaaatttaaaagcattaccaatggttaatgatattttataatggaaatttcactatttgaccctaataaaataccccatatcaaaattta

SEQ ID NO: 18966 - DNA, 5473 bp, Cannabis sativa
ttgtctactcatcacctattacccacgcacataaacacatatacaaatataaatatatattcaattatatatacatacaattctacaattaaaacaaaaaaattcttaaaaaataatagtgatgtttagtactattctatgtcatactgttattaatgtgttatcaagtatcacgtcttatataatttaattaaaaaaatattttttaaataatatcgttattcaattatagaacgttacttatagaaaatgttaccggtacccggtgtctgataataatgctcttaaactaaaggctaattaagatttttactccctgaattttgacatgtactaaatcagccccatgaacttttaaggtcgttaaaaataccccatgaactattgagattgttgaatttaaggatttttttctaattttagtaaaaaagtctaacagaatgaaagaccaggagccatgatttagtacatgtcaaaattcaaggtgtatgattttgtagatttcaaagtcttaagagcatggtttagtgtataacaaatactgaaattaaaaaattgaatgaaattagacaaaaacgcttaaatctaacaatttcaatagttcaagaggcatttttaacgaccttaaaagttcagagtgtataatttggtacataccaaaattgaaagaggaaaattctaattaacctaaactaaataatgattaagtgagagtgactaccttgcataagcttaattaattaattaacaactgttttcttagtaattgtatcaaaacaccgaatagaacaagtcagctttgttttctacgtcgccacatgtcactctctcaatcaaagccggcttcaaattcttctttatataaattactctcatcacccaaatcttcaaccctttcattattatttcaatccaaaacccaacaaagaaaatcacaatgaataggttgataagcttagaaccctcaaatctagtaaccataagagtagagcatggccaaaaatgtcatggaaaaatcaccttaaacaatgttatgtacactatgcctgtggccttcagattccaaccactcatcaaaacccgttactctatcaaaccccaatcagggattattccacctctcgagaaattaacggtcgagatcgtttatcatctcaatccgggatccgacgttccagatttgtttccttattccaatgattcttttctgttacacagcgttgtggtcccgggtgcaaccgctaaagactactcaaactcatacgacgccgttccgaacgattggtttacagctaagaaaaaacaagtgtttactgatagtggtattaagattatgtttgttggctcggctgttctggctcggctcgtggctcacggctccatggatgagattcgtgatgttttggaaaagagtgattcttcttggagagccgctgattctgttgacaatgaggggaatagcttacttcacttggctatatcgcaaagccgagctgatcttgttcagctcattcttgagtttgatcccgatgttgaggctccgagccagctcgggtatagcccgatcgaggctgccgtggagtccggggaagcgttgattgttgagcttttgttggctaggaaagcgagcacgaataggtcggcgaattcgactgcgggtcctatccatttggccgctagaggcggccatatggatgttttaagacttttgattttgaaaggagctgatgttgacgccctgactaaggacggcaacacagctttacatctcgctgttgctgagcagcggcgagattgtgtgagacttttgcttgcaaatggggctaacccgaatgttcgcgatacttttgatggggatgcgccgttgcatgttgcagcggcgcttggtgatgagtatttagtaaagcttttgcttcaaaaaggcgcgaataaggatgttagaaaccgcgttggccgtacggcctacgatatggcggcagagaacggccacgctaagctttttgatgctcttaagctcggagatagccttagtcttgcgtcaagaaaaggggaagtaaggactatgttgagacttatagagcatggcgcggccatcaacggccgcgaccagcatggttggacggctctccaccgagcctgtttcaagggtcgggtggaggccgttcgagctctgctcgaaaaaggagttgatgtggatgctaaggatgaagacgggtacaccgcgctacactgcgcggtggagtctggccacgcagacgtgatagagttggtggtaaagaaaggcgaagcggatgtggaagctcggacgaataagggcgttactccgctacaaatcgcggagtcgttcggttatagcgggatcactagggtgctaattcaaggtggtgctataagagattataaaagtaataacaataataagaataataataatgatagtgatatttcaaaaaagatgatgattgtttcaatggaagaagatcaagggttgaagaagaagaagaaaagcaggattattagaggaagagcagctcgtggaagctttgataggtcaacagcttcggtcatggtttaatggtgtgtgggttgtggtgtttgaacagaaatgtataatcattcggtttcttttttttttggttatgatattcttgagagtctcttgttaatttgaacctcatatggacattttgtttatggtacttttcaaattttgtagagaattttttcttttttctttttaatgctagtgaacaataatgtattattaattactttttttttttgctttggtcaatgttaattacaaatatatagtttagcgaatgatcactctcaaaatactgtttttataatagtagtaatttttaagaatacacaaatacactagaatttatatgaaattaaataaaaataaatttagctcgagagtgaatcaaccatgaatctttattgattgaatagttaatagtatacaatgagatatgtctaaaaatataactcaaaacaataaataattacgaaaaaaaaatatctcactgtaaggaaaatcaatttaaaagtaatactttcattacatccctccacacacacacatctaatatttgactctctctttaaatttgactgtgaaatttaaattatgagcattagagattacttgagtgagtaaaggcactactatttatagttgttggtgggactctttttaattagtaggtgtcaaagccaattgttctttgaatatgactagtgataagatagaactactaactttgatagattaagtgaggttaatctcaatatatagtgagatattaaatgtaaagaatttgagaataagtagccaataccatatatatacaactatccgtacgtgttaacaaagaaaaaatgttatcttaatgcactaaaatgaaatatctcaagtatctaatcttacatggtggtgcgttgtgagttgagttggttggttagtgtggtgttatatggcctgtttgactgaactgttttattttagagaacaacagagctcataattaatttgtataattctaatagcagtgtcacgaacgtcttaaaaaaagcgatttagtctgcgatctaacctaattttcatttgataattttgtttcttttttatttttttgcagcaactattctaatataagtggtgctttgtgagtagttaacgattttttatattattaccgatattagattgcattaataacaatgtgatatggtatctcttgtattgcttaatatttgaacctttctcactgatctatatattatatatgtaagatatagtgttataaggcatcatgagtttatgattcaatataaagggttggtattcaccattataatcccctacttcagtgttattcaactcattctctttctattttactaatgtttctcggtgggcctgaactaaacaggctaatggggctagggcccaacttgcctaggaatccaaatatattctttctttaataatttttaaaaatactatttatattttttaataaaggtctgataacttttttttttctcttaaggccaaccaaatctcaagatcaacataacaatagttcaattttctacattgatcttaacttgtttcacaattgtatctttagctctagagcattgatcccaatagatatcatttctattttgccaaatttaacacacaatagcagccgtagctgccacgaaaacctgcttcttgaaccgctgccttgggatccaccttagcagctggttcaaggtctttgccaaactccgccaaagtttgatctgcttgaaattcaacttaatcaaataacctctattcaccaaatgaaggtctaataaatcaagtatccatgaaattatagttgataagtgacaaataaaaaatatgtaaatttggtgatattttggatgttacaaacctgtaaccagatttgtacaatccaaaaatattatttaccaaccccaatttgtcacatttttcatttaatctaaagattatattttatataaattaatacaacattgggcacatgctttattttttttagttttgtcattattgttaactgcaaactttttcatggcttttgatcttcaaacgaatcaataaagatgctgccaaataaaattatttttatgtttagaattttgtgcattttttgttttttatttttttaaaaagaaggattttgtacttgaaatattttaaaaataccatttttctaggttcaatactataaaataaataaaattatattatgttcagaatttcgtgcatttgtattttttgtacccttttttctgaaaaggaggattttgtactttgaaatcttttaaaaataccacttctgtatatttaccatattatgaataaattaaggggcccttctacaataaatatcaaattatttgctatttttgcaaattacaagagacaatttcttgtacaatatttcagcgaaacaaataattggtagaaatagtctaacacatattatatatttttctatttattgtacaattatttttcgataattaatcttcaaggatttgatttgagttgtgtgaagaagatttgtgagtagcaaaatgtaacaatcaaaggttggcaagaacagatatgaaagtcaccttatgtcaatatccatatatactaccaataccaaccattatatataaataaataaaaaaaaaaaaaaaagtccacacctactcacaagtcttttacttacaaacccaaaattctatgtttgaatattatttatttttggtgtaatgttaattggagcctataaaatatttttcaacgtaatgccgtgacagctctctctaaactcatcatatcatattatatataaaatacattttattatgtataacttgttccatatctgaatcaaaattatcatgcaagttacaattaatctttattttaaaataataataataa

SEQ ID NO: 18967 - DNA, 2487 bp, Cannabis sativa
aaaaaaaattgtcaaaattgaattcaaggttttatttatactattttaaaaaatacagggtgtactttgttatttaataaaatacaatatctaatctacatattctacaaaacacatgtccaaaatagtatttacacttttatttaataaattttaattaaatttgtcttgtgatttctactaataattatgaggtttactaataaattcaaagtaaatatttatacaaatgaaaaaagaaataaaaaattgttgtgtaatgattttttaaatcaatattttatagtttttggggttaagtaaatcttattagtcctttcctgtgatcaattgctgaatgaaatttattaaaatcatacatcattcttgttgagttgctaattcaacacaattaatgatgagctcttgatataggaacttcttatatcatcaatacaataataattatatataaaaaaacaaaataaacatattaattcatttttataaatattatgttattgttttgtctcgttgtaataaaggttaatactatattttctaaaatttattgattggataatctcttttgtaaaataataaattagatcttgtattttttaaaatagtacaaaatagtattttgagtttaatttttgatgattttctttctaatataacaaacttaaagacaatttctaacacgaacagatatataaaatgtactcaattttgtcataacaattctagattgagttattattaatttttattttgacaaaaaaattagtttatggtactattttgtatgtttaatttgtcatttaataaaatagatgatccaattaataacttttacaaaacacaagattcaaaatgtatttacccttgtaataatagaacatacaatgccacaacttatcaataatatttttgattatcgacctctttgagtgtatggtggtggtggtgttttctgaagctattttaatttcataatttttattcaagaaagatataataatactttagccaaaattgtctcttgaatcttacattgagcaggaacactaaaattagtctttgctattgattcatcatcacgggtgggagtttaatcagccattaagcagagagaataccactggtgtatacggtagctctgatactaagtttgaaaagaagaaaactgagaaaataataataaaaaagagtaaaactacaaagaataaaatgctaactttgtatttatagagtgtgaaatacaaaaagaatattctagatgtgtacaacacatacaaaatcgtttacaatagataatatcaagtatattcgaacgatacaaaaagaatttgttatgatttagggaccataaaatcacacaacaatcatttgctaacatggcacttaaacttttggaggagataaggattggtgactcaattttcgttttctaacacatccccctaaacctatctccaattgacatgaatgtccttaaagcagaacgacgacatttgcaggagaagaacaatccatgaaagaggagaaagtagatccaaagatccatttccattgtcccacaccaaatctcaccgaagctcgaccaacttgcaccactagagaaacacaatatgtccattgtccccacacgaagactcactgaagtatgacaacccactccaccaacacacctaagaacacaactctctaggccaagaaatggttggcgacgcctagagaaagagaagaaaccctaatgagaattgagagaattcaattagggtaaattgtctatatctttctttgtaatcaaccggttgtataggacatcataagtctaaaatgctacttttgaagacccatgataatgagaaatcaaaatttctagattaatatttttttaatattattttattttattcttaaaaattatgtactttttgatgattgtgaatatattttttgtaagtaagattcataagatattcttgtaattatgttgtattttaagtacgatgagtgctaattataatgaggaaattacattatatatctattttacttcatttattttaatttttacctttgtttctagattatttaagatatacccactttatagatggtgcccctattatattccttaggctaatgtaaattatgtattagacttaagtagaagatgagagtatataggggaactcactcacaaaagtgagtacattttaatgaaatataacacgagagtatttttattaaaggatacaaaaaagaggtattcctcaacttatcccaattataatctcacattacaattttttctttcaacctctagtaggtccgaaaatatattttggaatattatttttcaaagttctttaatagatgtgttcattatggttaaaagggaattttgtttgggaaatttacgaagatactgtaattttggttaacttttataaaaatactgtcacatggaaatcttttcaaaaatactgtgttttt

SEQ ID NO: 18968 - DNA, 2397 bp, Cannabis sativa
tgtgttcttgctgcattgatggtgatagtggactctacgttgtacacaatagagagagttgggattggaaatagtatgttaatgatcttgacgcagagctgggggtaaaaataaaattaaagaatacattgtactctgaaaaaacaattatataggttatggtaatttagaacgtaataacacaaggcattcgttactctttttgtttatatgttcattgaaaaatctattgaatttttgtttatatgttcattgaaaaatctattgaataagttgatcgattagattctttgagtatgatgacaccagcaatctctcaagaagggacttttgccattgataattttttgttttttgtagccacatagtgttttttgttaatatttacatatcaccaattaagttcattttcctattcagcattcttcaggaatgtggatagcatctagcatttggtgatgtttcctaagaatcattttgtcctgtcatgttcttgtctttgactcatgtttttctctaaagattttttctgtattgggtgaaataaactttctagtttataggagggagcctctttttgaaaattccaatttagaggattttgttagaaccatcaaattgtcttgaaaggactttgttaacatttccttgtatttctgttcatttacttgcagtaaggtctaatctattatcatttgtcatcttgactaagaatatcactgattgcactatattttgttcagtatgctcataggaagtgtgttcagcactggtgcaatgagaaaggagatacaatttgtgagatctgccatcaggtatattccatgttctttctctacacctcgtatcaatcgttttccaaaattttgaatgttttataatgggtttcttcaatcattgatgcagccataccaacctggttacactgctcctcctccacctcctaaccctgatgaaactgccattgacatagggtatgaaattttcttgttttgatgtttgaaatatgagaaaggatgatgtttttgactcgtgcatatttcttgcagtggaggctggaccatatctggtactcctttggaattggatcctcgcctattggcaattgcagaagcagagcgtcactttctggaagccgagtatgatgattatgctgcttctagtgccagtggagctgcttactgccgctcagttgccttaattgtaagcctttcttaatttttcttttaaaacatttagtgattcactaaatgtttaaagttattattcctttcatatcagtttccttaaacagatctagctggagtttaatgttatctttttggcagttaatggcccttcttctcttgcgacatgcattgggcattacagatcctgatgcagatgatgaaacttctgcttttttctctgtaagtgggattgcatttgactttctccttacttagtaggcattctaaagcattgtaagatcaaatcaatttaagttcacatttactcataaatttgattatttgcagcttttcttgctccgggctgctggctttcttctaccctgctatatcatggcttgggccatcagtatgttacagcgccgaaggcaaagacaggtgagattttctgtcacttagcatgttcagattgatgttcattcatatgtaaattttatttgaactctgagttgtcttaatatatttatacaatttgtctaaacaggaagctgcagcattggcagcaacacaagttgcatttgttttgcaatctggacaacgtaggggtttgcaatttgcaatagcgtcaggacgaccagcagcagcttcgccaccagcaccagcaacagcaccagcaacaggtcctgcattgagttcagctgaagaagctgtttaaggttgtaataggcagcaagaaattcttgggagttgtatgtgttattattgcatggagagggagagtgattcagcggaatgtgattaaaaaaaaaattaataagtggaaaacctttcctctgtttaaatgtatgaaaaagattattaaagaagagaaattggtgcgtgtggacgtccaattcatttcatcattaaaatatggtggctaccatcaccctcttcttattggttgctcttcttattggtttggtggtgcccatattggtttctatctttctttttctctatctcatccttttctttgtaaatatcgatttcaaaggataaagtagataatctcatggttggaatgtctcatcgtgttcagcaatgacatctgtctctagctgtatcttttgtttcaatcttagttcttcctttttattataattaataaactaatgtttatggctctattagctttatttgctcgggtgttcataaaaatattcattctaatataatttagagatag

SEQ ID NO: 18969 - DNA, 3338 bp, Cannabis sativa
aaaagtaattacaccaagacttgaacactttttactagaccacaatacaccaaacacttacactcttattttaatactagacacctttacaacactcttctatatttactcaaaaaaaaaaaaaaaacactcttgtataactcacacttttgagacactctttggaatacttttacttgtgcactagagttatcactaactcactacacaccatcaaaggacctactcccctatttatagtactcaagggtggtggatcaatgtgctagaatgttctaataaattgtcaaacctaaatttttcttaaattttttttgtgaatattaattctatataattttagataattttataattttactagaataatagaaaattttagatatttgtaaagcaggcgttcttcttttaatatattatagataaaattatgacttcattaatatagtttttgcactaataagaatcattttatatcacattgtattgaacaataaaaaattaaaagaaattatattatacatacaataaaatttatttatttgttagataaatataatagtgataattataaatttttaattttattttttaccataattcaaatagttgaataagttttttttttttttaaaaaaaaaattaaatataatctaatgaatttattaataacatatataataaaaaaatattgtaaaatacattcgtctatatatttttatattcagattaaagttcacatcttattatacttattgttcaatttacaatcaaatagaatagtaatgaaataaataaaaatagaaaaaaaaattatttcatttctttatttgattgcattttaaaacattaaaaaatcataaaatagaaagaaaaattaatattttttttatatattttaaattttattccattttatttctattttgatctatttattttcgttgtttttaaataaaaaataaaaataaaaataaaaatgatgtatttacaacaaccataatacagctaattaaaatagagacattttactgatccacatatttgggactttttttcttccaaactctttggtatttgttattcatcctcgttatgttagagttggaccataaatatcttatatttacattttagcccctaataacaatgctctcatctcatactttgtcaaaataactatattaaaaaaaaaaaatgctctcatggtacgcggttgtggtggtggtgatctggtggacacacaaccaaaacaaataactaaaccaaaaatatccaatatatatagctctgtggtagagacagccattagttgttttgttttgtgccccaaccaaaactaaatatcagaaacttcccccacatcaatacgtgggccctaaagcccaaattccccttcttactgggcccacttcggttttacaccttttaattccgaaattttttttattcttattcttattgttattattttatatgtaacacaaattataaattcatttttatttggaaattaacatttaattcgtttcgttacattactcacagcaacaattacagctaaattgcaacttcttcttcttcttccttttacaaagccaaaacaagatactttcccggaaaatatgtaaacgacgacgacgacgaacaacaacccgaagtcggaaaatttgtactagagatatatattctcataaaccaaacgaaaagaaacaacacttcgaaacccgtttattatttttcggaacttttcttaatttgtttctgttgggaatttccattgatgctggttcgtatgctttgagttgagtagaatttggaaggagaagaattttgaaacttttattgttgagactgggttgggttgggttgggttgggttgtgagaaattaaagaagatgggggcgtcgctctcgggcatgagtgaaggctcgaacggttctactctgggtccaggcctaggggacataccggagagctgcgtggcttgcgtatttctttatctgactccgccggagatttgcaatttggcgcgtctcaaccgggcctttcgcggtgcggcttcatctgacttagtttggcaaaaaaagttgcccccaaattatcaagatctactcagtttgttacccgctgaaaggtggcaaaacttgtcgaagaagggcattttcgctctgctttctcgtccggttccctttgacgacggcaataaggtgggtatatctgttttctcataaatataatgaattttctttggtgggtttgtgttttccgtcttgaaattttatttcctttattgggtttaataagtaaaactttagggaattagggtttttgtgtgggcaagaatgttatggttttcttgaataattttttttggtaggaaatatggctcgacaaagtctcgggaagggtttgtatgtcaatatcagcaagagcgatggcgataactggtattgaagatcgaagatactggaattgggttcccacagaagagtcaaggttagtattaataccatagcataaccttattatagtgtgactcaggcagtagtttgaaggttcttaagctactaatttttatggaatgagtccattttgggaatctttgtgctttcttttagtttaaatgctaatcttgtatggtattctcttatatctttgcttacttattagcttgcgcgtgtggaggtaaccaagttttgatccgttacatttcttctatggttggaggagggttctaattgattcctttttccctctcttttttcttggtgtgattactatcttgtgatagttaacgtttgtgggattgctttacttgtacaatttgtcatgaaatttctcatttacatgggaagtatagcagtaatcttgaaatccggaaaggctttttaaattcaggaaattgagaagttatagtgtctcactctctttagatttcacttacttttttatcttgttaaatcctttacaatttaaaagtgggacactagatggtgttttgtgtagtctcgatgcttaaaaaatatgattgaattggtcaacaagagcagatgtttataattgcttaaaagatatgattgaattggtcaacaagatcagatgtttataattgacagctacttcactgaacaattaggacagtaggtgttctgctaagcttctcttgggtgttataaatatgcttataattgcttttctatgatgccatttttttataactcattgattaacaagatcaggcagcagaagttttgtatttcatttgtgatggtttgccccttttaatttttcttttcttgggggcttgcatattgtagtaattttctgcttttatg

SEQ ID NO: 18970 - DNA, 4119 bp, Cannabis sativa
caaaccacatggctgttcaagctacaccacgtctaggattcaactaacttccatatgaattagctggacaaaaatatgtcagcatcaactaatattaaacatctagtcttaatacgttaaccccaccccgtataagattaagaaccaaggagaaaacctaaagatttgaatccaattaactataatataaacgtctagaaaggtacgaaggttctaacttatgacttttccagacattcagagtatcccaattactaccacagatgccaactaggtttcatatgagaatcctaagaaactatcctgagatatggaaaaatgttcttaaatttataaaacctataaacatattataaatccccaacatatgaccagattaaaatattaatactaataagcagttgctgcaaaataaatctttactcttatcttaacacaaaccttaccaagttacaaaagatgatgaagtaaacctttcccctgaactttcagcctctatgttgtctgcttctccgaaaaaagacaggtcggatttgaaaagatctattgtaagagaaaatttcaccagaaataaaagtcactattaataagcacagacgggaaaagcttgaatatacatggcgatagatgcattagacctcaaggcaagggcgaaaaattaataatagatacacattctactttgaaactactcagaaatgagccttttactcaagagcatcaaaaaaccataatttccacaggttatgacatagaggaatacttaacagcttttccttgtttggtatttaagttggaagccattacacaaaaggttatgataggtgggctcttgcagtatagatataaaatgttttgtgtgtgtgaaactaggacccctgcctaaccaactctacaatatttggggataaggagactagcaatttctatgttaggtacctaggagtgactcgaatctcaggccttgtgggagaaaactacatgtctaaccatttgagttagacaagagggtatattaataagcaaccataagcttttgatgaatgttaagtataaagttcaaaagcaccatcacgaacttcatcatatgccatacaacttttaatgtatatacaactccaaaagaaacaaaacaaacaggagcaaagcagttttctactttacatctcttaaatttctttcttggtattgatgttatcatgtgttgttatctgagaacagtgcaaactttaaaagtaaactacattatcaaaaacttaatctaaactactattgatagttttagtatgcaaatattgagctttgaagtgtatgaaaatgataaaatgtttaaataaacaaagctcctagtcctatattatatcaacatcccaataaatccacatcaatttctccatattgtcaagtaaatgctcatattaagagacgtctgcaaaaccttaacctaactaagaaaatttttaagttaatagtctttcttatcacgctccagaagtttgatctatgatatataagtacaaacctaaacatagatagactaattatacatcacatatgcaatagcaaattctgttttgcacaagagatatagcatatgccagaagaagtatctaacaataaatatgagtaaaatatattttaaaaaaattgatacggcatgctaagcaccagcataaaaaaaacaaaaaaataaaaaagagaaaaaagaaaaggacaagaaggaaaaaaaaaaggagatatcagggctgctgctcacacatcatcagcaacaatttgtatatttttcatttttggtaattaatactaagtcaagtcattgtagttcttataatgttatgctctaatgacataattataccttccagttttgcagtgcacgacatccctttctctcctttctaatgtgcattgattaatatacattttcatctatttggcactacaaccatatatatcatattgttgtttggaatctttggataagtaaatatattgttgaaagatttatcaaatatatatatatacacaatgttcaaagaggaccaaaatataccccctcctaaacaatccaaacttggaaagttgtttatgatatagaaaagtcacatcctcacatatataatcaaccggttttcttaaatacgtaaaaggtttgctatgtcagtacaacgagtagttgcaccttcaacaacttcataaatggcacaggatgcagcaaaaaaaaggctagggaaagagtagaaattgcattgcaatacaaaaccatgggacatgagaaatctattggaccacaggatagcctgcagagaagtttgaaaagcaagggtggttacacaaaaagtggcacaattacaagaagcaccaaatgagaggagtgaggaaggaaaggataggactacatgttgggtaacataaattctgttatatcatatattgtatgtgagcaaaatgctaaaaaactaattgaaaagtaaaaaaaataccagcaaaattctattggtgaccagcaacaaatgaagtgatatcattatactacattcatcatgataatgctactgtcacaaactatagatcgggaaaaaaacctataatatctaggggctagtatatattaaaaaaaatgtaaacttaactgccattgaacttctgttccaaaaaccatctcgattaatatggcagcaacctgaaatgacaactaccataaaccacccacaggaagagacgagtgagtaaatccaattgaagagccatcataaagtagctttttcctccacggcctcagatttagtatcctttgacttgcttgcatctccaagtgaggactgatcaacagaagtgctgacaacaatggacgggggaaagtataataagttctctaaaccatataatataaagggtaaaagataagcatgcaaacatcaaaaaatacaggatacctacattttttgctttttagcattctgcttgatagttaataccatgtccatagccattttctgatgctctcttgtttgtgaatgcaaatccaaaccttcaactgtttcacagtcaactttacatatccgacaccatcccatgcttggtggttttctctttcttgatttgtcaatcgctaggtctccctgtcacaaactcattatttaagtatataaatgtgtttgtgtgtgtgcatgtgtattgacaagcaatttgtaaaaatagatactagatagcaatttatgcacaaaaagagaactaacactatactgggaactttaagttaaaataaaataacattatcctaaagaggctaagctaaatgagaaaatttataagacaaatggttgcaggagaaaaacactcaactgtataaatgtcaccgtcgtttggaaacccatgaaatgcaaagctgctcctgaatccaggctcaccaaagtgtggatgatttgacctatcatcaccaccaaatgagtcaaaactcccaggtcccatttcccttatccttgcatgacgtggatgggttccaataccatctggctctccaaaatatgaagcaccatgaaacttatccataggttcctccctgtgaagaggatttggaaaaccaccttgcccaatcaaaccatgccttaagcgattgcccattccaatgttacccagaccctcaaactcactcctgcgcaaatggctaggcaacatcgacaacctactatcacgaaatgaatttctaaatggttcaccaaatcgatgtacttccctgccacgaatgtcatcagaacctgtgcctctaaatccatgcacagagacaccaggttgttctctacccggacttcgcatagccaaactgtccatatgccaaccatgtacaggacctggcccataaaaatcaagatgaccacgagtgggctctcttcttccaaaaacatcttcatgatggccacctggtctctctcctacatcattggaaccaccatcattgtaggaagaaataaatcttgaaggaacagggcccaccgcaggatccacatttaatccattatcaaaattcagatcatggactgtcctattaaagggcctagaagatagactcccaaactttggcatagtttcagcatccagagaaggcctagggaagtgctt

SEQ ID NO: 18971 - DNA, 5219 bp, Cannabis sativa
ctatataagttatgaaaatagcttctagataatatcgctaaccaattgtaaggggccacttataaaaaatggtgaagacaatactcctaaaaataatagaagtttacccttttgatctctatagttttttttttaacatacgcacaaatgatttttggttattctaaaaataaatattatttaaaggttacttttatattgtcacaacatgttatatcatattttgacaacgtgaaaacaacatattatttattaaaaattaaaaatatataaaatttttaaatacttatataaatttctcatatttgtatataaggaacgattatatagcttctttaattaaatctaagacggatttgtcacttgattttgtctataatattttcataatagtatgcaagttgtagatatttagagcatttggaaataatatttttaatattctaaatcattttgttccttaaaaacaagaacgtgttaatgtgtttgaagtacattggatatttttttcaaaaaaaaaaaaatttgtacctaatttgtaactatttataatatattatcatataaattaaattataactattcacgccaatattactttttagagggtgtattactctagtcattcggttatatacagatatattatatttttttttaagttaattagtacgtacataaaaatttcaaacgtggaagactaatttataaagtgataattttgtgtaaaattaaggtacaaagatgatgtttatgatcgtatatggcagccgttcaattttccagaacgcaaagtgttgagtacaccattgagagttgattcgagttctaacatttaccaacctccatctagtgttatgagcactgctatgtccccagcaaaggtgagtaatcctatgtttgccttccacatgaagccagatgaccctacagctgaatactatgtatacatgcactttgctgagttggaaaagctcaaagcaaatgagtcaagagaattcttcatctatgaaaatctagagttatggaatgttgataatcaaccttttagtcctcagtacttgagtactaccactttattcaatgttgcacttgcacctataagtggcgatcaaattgactacaccctctttaaaaccactgcgtctacacaccaacccactctcaatgcttttgaggtttatattgttcagaatttctcacaaccacaaacccacgaacaagatggtacgtatatatagatatgtgcatgcaactgcaaaacttttatttatagtaaaaaaatattatatctatggcaagaatatattaggttttcaaataattttttgttgttatatattctcatgcaaattttactattaaatattacaaataataacttttgtgcaatattaatatacaagttataaccaaatacatgacttttatatatgattacaaataatttgttgtcgttaataatattaaaattggaattggataaatggactagaagtgcttaatgagaatggggagacagagagtttgaaatgtttgaatagtacctagttgctataatatatatataaaaaaaattgttccattagaccatctatgcacagattggttggatatttagactttcttcaggttaatataaattgtcctcttcaaagattaatttattttatgttagtcgtgttctctgtctaaaatgtaataatattaatgtgacaattgtcaataaactatattaatgtaataaattttggagatgtattatttgtgcaaaatgtagttaatacaaggttaattaattaagattttcgctctctgaactttaacatatataataaattaattttttagtcgttaaaaattttcctgaattattgaattgttgaatttaaggatatttgtctagtttcattcaattttactaactctgttattgtctatatactaaatcatgctccttaaactttgatatctactaaatcatgatcttcaaactttgacatgtttcaaatcaaactctttaactttcatccatgttagacaatttccttaattataaaaaaatattcttaagtccaacaattttaatagttcaagatggatttttaatggccttaaaaattcagaaaacataatttgatacatatttaaatttaggaagtaaaagttctaattagccttaatatataatattgatctttgcttaaaatatttataataaattaataacataagtatttgaaaaattaaaaaatatatatatatgatttaattgagattattaatcattaattaattgatcatgaggcttttattattattcacactataattttataccaatttttccaaaaataactaattaattaaagagaatgtcttatccattatgtagtacatatatttgtatttaaatgaatagtaaactaacttaattaaacctttataatgtgtattgatagttggtgctatgcttaatatcaagtctatgtatggagtacaaaaaaattggcaaggggatccatgctctccaaaatcatacacctgggaaggtcttaattgcagctttaatggtcaagatcctgttagaatcatatccttgtaagtataacattttaactattagaaaaaaactacatttactctttccttggaccatgaattttagtttagtaggaaaaaaattattgagaaaattataagaaaagttagaagaaaatattttatacatatttgataagtgactttttttactatatatttatggttctaaatttaataaaagtatactacacttaaatttaattttttcctaaaaaaaacaactaatatttattgatttggattttgttttttttttcaaattaaaattcaatattaaaagcttaatttgattagattttatgccgaaatcactttggttgtcaatttgtggctgcaactccaagcaaagtaataaaaagttaataggaacccaagtaagatggtttataaaaaccttaattccacgggagcaaataatcacattacttcttgattctcctatttttttaattaattacttgtatatattatgtatgtttttaatctcaaattaactctagtactcgtttgcaacttacataaactatggttccacttccatgcatatgcatgtgaattattagagacttatcctcaagtggattggagggagaaatagcttcttatatatcaaatctgaccatgatacaatctatgtaagtccctatatatatatatatattataaaatggaccactaatgattcatattgataactatcattagtgacatttataattgtcactaattaaaatatattattattgtgacatttgtaatttatttattttaaaaattaatttgattatcggtgtaatattatttcagagatttatcaaataacagtttaagtgggtctgtgcctgaattcctttctagactacactttttaaaagttttgtaagtttttcttccagtattattacttaaatttgtttattatatatatgcaaagaatcatattttttccatgcatggtttcagagacatgaggggaaacaacctcacaggttcagttccaagtgagctcattgaaaaatctaaaagtggctcattgctactgaggtatttttctttcctttgtcctttttatttttttttattaattttataacatgtgtgtgttattttattttagtgtttcagataatccagatctttgttcctcactttcatgccgaaagaagaacaaaaaatatatagttcctatcatagcatcagttgccactctatttgtcctcttacttgctttctttatcatatggaaagttatcaaaggaagaaaaagaggtatataaaaactactatatatatttattaaatataaaaatttacaaattatcatcactatattaattacttatattaataaagctcaattattatgataacaggaacatagtataggggatcaagcaagacacacaatattgttcccaagtcatgggacaattctaaattggcgacctttttcgaagacaactatttggttttataatgtataatattcttctttctatttcatagatggcttgcttcaacaaccacaaaactcacaattttaattatgttcttaccatttgtgtgattatgtttttgtgttatttaattaaacttggatttcaactttacaaatatttttaaaaatttatatacatttaattttattttattttttttgataagtaaagactttattgaaaaaacggaaaactagtaactacagaaggaggccacttcccttaacaaacaagagttcatagtcttagtaactctagccaacgagctagagagtccgcaatgacatttttagtcctaggaataaacacaacctagacatccgagaaggacttacaaagagttaaacagaacgaaaaaaagagggtacgtatgcccgctgaaggggaattcgtgggactcaaaagctattgcagttgacttcgaatccatctcaatacgcacctttgtgatcctctttgacaaggctaggtgcagagcacaggctattccgcatagttccccttcaaggatatccttaacatgagaaaacccaattgagatccatgaatcggggatgagctactgttgatggattgcagcaaatcccacttcaatgtccaccaccgaggcatcaactttgacacaccagtaatcatcactctccacatgcagcagaggacaagcagtagggggctcctccagatcaaatcaggccttgttctttgagaattcatccattctgcgaagacaatcgaagaacactccatccacagagcattgtttatccgtaaaaagagcagtattgcgccatttccaaatcatttcacagatgcacccaatgaacaattgaatctcagggtcctgtatgtactccaccacaaaccaaaatccagaaggttattccaatggaagctgtctaaacgaatcccttttttgaaccataatcctctagtgaaagagcattgacagaacagatggaaagaggactctacttccatattgtagaagccacaagtgcgaataacaccctggagaaatccagttctggaactagaggggagaatatcagagaacaatttctagatgaacaattttagtctggggtggagttcaatcttgcacagtttttcccaaat

SEQ ID NO: 18972 - DNA, 10788 bp, Cannabis sativa
atctttggggaccaaaattgttcttcaaatagttgaccaatgataacatatcttatttgcacatatacaacgcttaatgtaccttttcattagtaaatcaaaactaagtagacatgttaagaagaagagaaataaaccagttcttgtgtgcatttatatatatatacaatgctgagagtacttaacgatcaacaatttaagaatagccacagagaaagaaagaaatcataattatcattaatatctaatttacaaatatacaagacaaatattaactacatgtacatgttgaacatataatttttcctacaaggaattcttggagaggccttccaatacttgcacccctgacagaaatttccttggcttcaaacagccttcttctgcatcttcaaacaaataatcacgaattttccttttcatctgacaaaattacatatgaaactgctatataaaaaagaattggtatacgaaaataggaagaaaaaaaaaatggtggaaaaaaccatgtaaagatggatctaatcctggaacaaattattgaatgtacatagtgaatgactcattgcatcatatcattcaactcatatcccaccttgtgagttctcctcacacaagtcagactgagactgactctgaacgatagatgcattaaaccattgatctgggaccataagaaaataggctgtcatggcttttctgaacctcttcttgtattgttttggtgaaataactgttggagaagcattcttcggtcctccaagaatgcccgtcgtcttcacccatgtttcaaggtgcttatcccaggtatattgcctcataaagtcaatgatcccaagaactaactcatgcttgtcttcatccagaccaacaagtagtgagtaatccattacatcaacagactgcaacagcacagagaagtaatgcagtaaatatgggttaaaagaatgcagattgcatattctacattgaagttcattatgtacacagaaatgggaaaaacttactgcaagaaaagcagtgtcgttccagactgctctctctagcaaacgtttagccttggttcctacaaatatgggggaggttggcattgcttcaatcaagttttgatccagcagaactttgtttctcccactagaatcagcattgtatctcgaccgagcagatccttttagatcataaagccgtgtcacattccttctaaacaaaagattctccataacaagaacatccatctttgtatctttccctcctttgacatgctttgaagtaacctgtcaatataaatcaatcagcatgaagactagtatattacaatggagaaatcattatcactattatattaaatttacctgatatatccccacaatcttagccaggcatgttggacttcttgacttaattgcatcagataggtacttgaaataatcaggagcaaactttatgaaggattcaagttctgtctttgtgacttgtttaatgataaatctgtcatccaaggtttttgcaaagaagacgttgcttttaccaccttgggctccccacttcttacaacgactaagagaccttatataatcaagctcagatgggcaacaaatcctccttaaggcttcaaaacgctttgcatagtaacaagtcacagaatatttgacattaccaagagggccatcttctccaaaagaaattctagcatgcaaagcctttgtatatgagagtggatccaaaccacgagaaccagacatggacaacatgctctcctcaccagatccaaagcttctaaaagattcagacaggaaatcatcagaagaatagaatgactgaaaatttgatgtgtcagagcatgatgaagacaaaaggtccccagcttccttcggtctttctccatcatcactcacttggtaatgatattgccgtgatgctaatgcatgagctataatactagagggctcatcatcatatactggaatgataacttcattaacaccaacagggagaagcagcctggcccctccttgaagttctgagtctcgaaaggaggaaatatacactgggttatatccaaacattgtgttcagtttttgagcacttgcaaagaagttcttgttcaatgaacggtagaagtttaagaacggcattcctaaccagccacctgagtcttccatgctctcacatcccatcatagatgaaactggtgaaaaggagtgagcaaacttgggctgatccaaatcctccacatggtctaagttcgctcgttctgaaaacacagaggcgaaggcgagtgaagtatctgcggctaaatcagatagtgcagggagattatcctttgggatttcacctcctgtgttagtttcacctatccatgcagcatcaagggtatcagacaaatttgtattgatagaaaattctccttctgaaagagtcctacgagcattggatttgtcttctctttcattacttggttcttgattaaggaggtttgtggaaggagaaacattggaattctcttctttttcgttacttggttcttcatgaacaaagttgggttgatcagcattgctactaaatactacaggataatttacggtcttgccaatttttccttcaaccagaaaggaatcacagctattatagcctttccctggcataacggccacattcatgtcagatatattttcaccattagcaacaattttcccctcatgctcagaaactgaacgactcagaccatctttgagaccgttaccatccgatttctctgcctgaaccaggcggtggtcccacacaaaagactgaaaaagcaactgccttcgcagccgattgatctcaaggatgtcagtagcaggatggccctttctcccatccttgtttacagtttttaggagaagttcctgaaaaaacatccatggaaaagaaacgaggtaaaatatctgagatcaaattctgaatccttgtgttcatgtaggaggaaacattaatctcaaatattcaagcaaagtcaacattcatatatattttttgttgttgaacaaaatcaacattcatatattgaattccttaagtttgtcatgattttaaatgttcggcacatttaagtgttttgaattctcaccatcacagcaaccacattcatcttacacagtaaaaaactataggaagtgaaaaattctaaatcaaagacatctactattcttgggttattgctaattcaacattcaacaagtcatcaaaacaaatatgaaacaatggtagttaggctatttagtatttcatacttaatagaatgcttgtcatagtgcccatgacatgaaatttctggaactaaagcttcaaaataacataaattaaagccaacctcaaattcttctttttccttctgtaggattccttccatttctatagtttgacgtcttgattcagccatttttatgccactgccatgcattcctggaccagatcttttctcttctatttgacttagagcatttagaacttcagaaaagagaagctcagctcgatcaacagcctattaacaaggtaatttgagtcacaattagtcatactaatttagttttcaatctagaataagtaaaagtttgatcattttaccttatcagtttctttctgaatccactcctgattctcattgctaaaatccaatttttggggtggaagaaagacagagaggacattgattgctgcatagcggaagcaagcaaccatttttccaaaactgcattggtatacatagaggagtctatgaatcaaatggtacaaataaacctctatgctaataatattactagaaatgacatcaggaagagcctggttttagagacagcatattatgaaaagtgaagagtattacccatagaaccggagacaatctctatgtaaagaatggccacagcttgccaccctgcttgcagctgcatgatttgaaaaactcagctccaaaaacttcccaaatgataaaccccaggcagcatctgacattattattctcctagttgctggaggaaagccattgatccttggacaacgtaagcatctatgccacatccagatcttgccttccttttcaccaggcaataacatttctggtagcttcttgaccgatatggttagggtgccctgtcgatgagtataacattgaacatgtgcttctgatggcatctcacaagactggcactggtaactctgggaaaaatgatgtttctcagtgtcaaaacttacagctgaagggtcaatacaaagagagaaggcatagaaagaaaaaggaactcacctgatcaaataaatggtcacggagaaaccttcccagaggcttatcagaacttccatagtattttattcgaaatagatgggacctctcacagacagttcccttccagatgcaccgggatgataaagacaccaaaatgctctgatgctcagaaggtgatggagcgtactcatcctttattgtatcaaaatcatcttctatatagtttcttccatcttgttccaatggtatctccacactccctgtcacattgtcagttatcacagtggaattgttacacatcaaagagatgctattgttgactgttgaaggttccaaaacctgcggcggttccataaaatacgttttgtttttctctccaaacgtatcaagaggagaaagattcctgggattccaatctgaaactgctgtcccagttagagcagatgaggatgaagatacagtattggtcaaacttgtgtaattagtgggtatggaactacgaaaactgtcaaaagattgtgtagtgcttatatatgaggatatatcagatgcaggcacactgttggatctattatgtgccacagaatttgcaccaacactgacattggaataaggtacagttgagatggacctctccatgattgttgctttatctgctggaagtgtcacagtaattggagagttcaatgagaattcaggcagggttgctccttcatcagcaagaaaagatgtctccaaagccaagtgatacgctgcaaatattccatactggatgacatgcttgatttttttcaactcatcaccattagcacctcttagtagaatctgaaatggagacaagaaagaacatgaatacagtatgaatgaaagtactgcttcgggaagcctgtttagttcaataatccatcctaaaataagcacatccaaatatttggttaattcaaagacataccgtacaacccaaaggcttcgggcagccttcaaaaaacatcagcgtcttaaccaattttttcccaccctgcccagcagtgcctaagtcttcaagaaacctctcaacatggaatgcttcacaggagcccaatttctgtgatgagagatgatcaatagaagaaactatctgagcaccagtgcaacgagctatgcgctctaaaagtggcttttttatattaagaacaagtgatatgtcctttgcaagaagatactcctgagcaaatctagaaactgatttctccactagaagaacatcaggctgatgagcatctatctttgccactgccatctttaagtggtccatttcctagataataagccaaaaacatatactatattaatatggagccaccagaaaaatctgtttttttaaaaaaaaaactatcaaccagcaagtgacaaactacagaagttaaaaaaggccacacaatcctaacctgctgtaagagagtgtcaaaacttgacaggtggttagaaacccgctggtactcaagagcccctccaaggatcaaaatacgagccttcttaacttttgttgtcattcgccggtgagccacatttttcttacaaacaactcctttgatcaccatactagaaaaacaacattactgtcagaatcagaataaaaaataaaacaaataaataaatggaatacaaataatatatgaagtggacgaaagttccctagtgatggtcctcgcgtatgacaagttatgatatttcatcaaaaaccttggctggcattctatgagcactcatagtatttattcaatgaaagagcgaattgcagcaatcatgagaaaccagatgatgtatggcaaaatcacagaatcagaatgtacgtaacacattgaattacctctcacaacgatgtccagaagctatacattttactttgacatatcctcccgggtccatccccccacctttactcatatctggctttaatagtgtagcagcctcccaagatagagatgtaatgatctccaaccaactctgtatgtcatcttcttcacccacaggaaggttctctacctgcaatagttgagctaccaaggccctgaaatgcccatcaaccacattcttcatggccttcttatgctcttcatttgagcgatccctattgcgagactccccacttccaaaactatttgagcgcaaatatccccactctcctgtagcattgacatcatcaccgtcatcgtcatcatcgtcatcaaacagaccagtttccttttcatcttcatcatcttcttcatcttctggtgcagggggaagccagaggagtccattgttctcaaaatctacaggttcagcatcaacatcaccaccagcaacatacagggaggaagacgcttcgccttcatcgcccatatcatgttcatcctctttattcctcagctttaaaatattttccaggccatgtgattcaaaattttggttttctaatggggagcagctcaaactcgttgaatcaatgttctcgctatcaggatgcactctatgcattccatcatcattgttcatggcttcatactcaacttgattgtagtagtcactgactgaaggataatgcatagattcagaatccatccgatacatgtcgtactcataatcctcatcctcactcctaatgcaacagataaagaaagcgatataaaaattaaggtcgaaaaatgacaatataagaagcaagatataaatatatagtactgcaacacctatctttcactgtattattaatcttctacaacatccatcagacagtaataagtacttactgcaagatgattaggtttaagagatgtcacttctacatgactaaaaatgattacaagctatgttttatgtaacacaaacgtatatcagtagagttggagctcctctggcacaatttgttaaaaaccattaccatctcagcctcaagcatgcagttggtaaaaacagttttcatatgagacattacaaacaaccaacctgtagggaaggcctataacaagaactccaaaatatgcacagaaaataaataaccaacctgttcattgaaattctctgttgatctgaaggtagatcccctgtatcgttgcaaagttcactactccttccttgttctcctttgcttttctcctctgtgtttgtttccaaaaaagatgttggtggagaactgagaccagaacaatgttgagcttgctgataagatccaaatgagaatggcatggagctaggagtattgatactactattaccggtttcacttgatctagtgctgcctagacttaatcctgattgtgatgtactaagtccgtgattgggtctctggatcccattatcaagagtaacaataccctgctcccattgcttgtaacaataattacacactcggattctatcctgctcttccagggatgtagttggataatcagatgggacaggaatcgagttttctgtacacttgccacagaaaacccgaccacaaagtcgacaatggtgtcttcgattgaacaatgtaaattgtgtatcacactcgtagcatactctacagctttcatcaggcatccaaaagtcccttgacacattagtcggctcagatcgtccagagatccatgacttcaccatgccaaccagctgacacaatgacttgtgagcaatttccatgtaaaaacaacctcacagctccgggcattatgataggctcataaacaattcctagcaagccatatctttgcaccaaaacccaaaaaacaaataatcccaaccacaccaaaaacttcaaaaggcctaagcattttttttttttttcaataattgacacccatcagaacccaacttctgaaaacaacaagggagctcatattgctcctaaatttcaaccccaaaaccaactccttctcatcatttagaacaaaattaataaaaacattccgtacctcgagagctgatgttgaatctcagtccatatgccaaaaatccccttacgctggatcaaacaaaaagaagaaaatcagcttaaaactgcagaaccaatcctaaagtttcttcctaataaattcttgaatgttcagaagactagaactcacgaccactcaaaaaacacataactgagactacaaggcgtttaatttttcctacgacccaacttcaaagaatctatctttaatcactccaacgcgtcagaccctttaaattctcgatgccaaacattcaaaagcaataataaatacaataaaaataaaacccaactgcagagatttaattggcctaaaaacccaatttattttacgaacaccaaaacaatagaagaatccaaatagaaaacaatttttgcttattcaataatccaatcgaaattaccatatggtacgagtcaaaccacaccggcgaatcagatcgagtgaaggacaaaaagggtcactgtatattaccgccacgtgcccactatcgaaaccgtgattcatacaccgaaagaaagaagtagttgaaacaaaattgtaaaataaacccaacccagaaagcgattctttaatgattcgataccaatacacctcgactctcaatcatcgtcatcgtcaaattcccgtatttgaatatgcttcgccattattattatgcacagagaaacaaaataagcaattaaactaatacaaatatatctgttattctctgtactgttcttgtttgtgtgaggattgggattggaaaaggctgacatccattatcataatgattgatctatatattcattattaaaacaaaaattggcagaaattttattatttaattaatttccactttccttgatttattggagaccttccgattctacgtggctgcatgatttatctgcattaaaacgacgtcgtttgcatgctcgtaagggagaagatgatccacacggtattgaaagctagactcatcaacgatattcccaaaatgccctcgtcgagtcagcattagttgaattttattttaatcagcaaaattaaaaatcccttaaaaatattgatttattattttttttcctttgaaggaaattattgattttttatttatggtatcggaaattggggaaggacagagatttcatgcgtatgagaaggatttgacttttgactatttgacaactgttaactgcgtgtctagtttggtaaatctcacaagtcatcctccaaacaattaatactttgctggactgtcttggtaaaatatatctatatatatatttatttatatatattgctaaaaaccgcgttgactttagtataaagcttagggagcaattcatacattaaacatatctttttcttcctcacttttttaaaattatccaaagcttaagttccatatatatttttttttgaaagaaaagtgcttatcatttggaacaataaaattgtaactggaaaacatttcgtaacttttttttaaaaaaatcttatttgtcaatttaaggctctaactttgaagattgataaaggtagggacggcaggcccaaatgacagtcattattttattttatttttcttttaaatgtacgtagggtcttcttatatatagaatatgattgattttttgtatactttgtaattaaataaactttattacatggtagagcctttgatcaaaagagataatttcattctttaaagaaaactattattatatttaacgttacttgtaaatgagcgagagaattcataaagaagctttgaataaaaagattataaatgtttgtggtacaaaattataaactttaattagctctttatttatattttcgaagaaggtgaatatggctttatggttggtgtttgaaacatatatctttgataaaatacattgataagcttgttcacccgttgtgtttcaaactcctgcaatactatcagagcccactaatcacttacctacatagttcaaaaataatttattttaggcaaagtgtaaaactaaaattaaaaagaaagaagaatataatctgggtgaaatttgaacttttgacttcaattatatatataatttaatttaattattacaaaattatattatatatataaatattatattttattatatttaagggcacatgttcctttacttctatgtgaattcaccccgatatatttatgtataatattaaatacacacagatacaatatatattctaaaagagaattgctaaaaagcacaactgttgtctaatactttcggtgtcatactgttagtagtgtaagtattaggtcccatataaaaaatattgttgctacccaatcagagcatctccaatgaagtgtcattgctatattttagcacacttaaaaaaaaaaaagtatgctaaatttggcacatgctaaaagttttgctaaatttggcacaagatatatcattgtgtcaaatttagcctgcaataaatactgtttttttatttactaatatcactaattattgtgattcaatgacttttattaaacttagattactttatttataatattaccattatttaaataataaaagaataaaaaataataaattt

SEQ ID NO: 18973 - DNA, 4386 bp, Cannabis sativa
  modified_base (1396)..(1400): a, c, t, g, unknown or other
aaaaaaaaaaaaaaataattaaaagccgattttaatctggatattacattattactgttaaaaattaaactaaaatatttatgttgcaaattactctcattctaaatgttgtgttgttttgaacacaaatagcaatacttaatgaattgcatcatataagatacaatattgatatataggtcatatttaaattgtatatatacttaataaaaaaaaataaaaaaaacctacttttatatagtcctctaacttcattagtcataacttataacttatgatactaatattatttagagaattgtatgaatatactatattggtgtatagcacctttttcagtgatatattgttattaattagtataattaagtattgagtctcatataacttaaaaaataatttttagacaatattactaaccaattacgagacaccatctgtaaaaagtgctagacataaaataattatgagcatcgctattaggcaccagtggtgcctagcaccttcttgacatgtcgcgttgcgattggctagcgatacttcctaaaagctattatattaaattatgtgggacctaatacttagttaaaccaatagcgatattaacacataagagggtgctagggaccagtgatgccctttagcatttctcaataattatataggatgtactctcacttagtataaaataattaattaggccgacattactttgttattactaattattaattactcttctttatatgcctccttccttctctatatgtcactatcttagtacacattattcaatgcttagagagatattaatagttaattaattaattgatttaatgaaatgtttcttcatcatgtgcttccctctctccttccttctatagtcaattaaaatgatatgttaaaaaaaaggcaaaaaatttactatctatatcatccttccaaatgtcatctcttttaataataacttagtttgctttcaaaaattaaaaaataaaataaaataataataacttagtttacttaagactacgcacaaatacaaaaataaatactttaaagaataatatcaaatttgcaactttaaatagccagttgaagtaataattagaatattgcactaatgttcaagtacttttcttcacaaaatttatttatgtataaatatctttttcgtctttaattaagtattataagtctatcattgctgcatcaataaatttttcatattaatttagttctttttttttaagtagacacactattacttaggtggcatttagtatttagaaacacttttatttttaaaatttttaattttaaaaatacaagtaaaattttatttttgaaaaacaaaaatatattttataattatttttatttttcaattttaaannnnnaaaataaaagtgtgttttataaattttacttatttgttttatttaagtcgggatcggggtccgagtctgggaccgaaacctagacttgttgggatttatgctcttaaagcaattaatagataatatgttacagaatatatgatacaattataagataataaatgaatacattaattacagaagtataattaataaatatccaaaaattcttattcatatggagaagtataatctcgtaaggatgtacaagagaattaaaattatacgatatgaataaaactagtcggtagtgtattaaagttttagaatctttaatatagaactgctaagtacgatttactctacactatactctagtgtttgtgattttgattcgaaataaatatgtaaagagacatgtggtaaaagtgatgtgtataatttgattatatggaccgatatgtaataacatcttttattaacatgttgtttactataaaagagttattcatatcacaacgatgatcattagtagatcagtctaaacattgagaatacatgaactcttatttgtgtttattgagttctttgattctctcgttaaagtttctcaaagaagataattcttacaacttctgttttttgagcttaataacatgagtggttgggaacatgttatacaataatagaatcaaagctttctaaacggatcaaatattaattatcttatagttttaattctcgagtgctaacagttagatcgaaatttataataatttatacattaactgttcacattgaattaatggtacataaggagtcataaaataattagatgggtaaaacaataatttgaccaactctaattatgaactaataattggagggcgaactacttatattaattatatcaatactagtaagaattttataaatataattctatattgtcaaagagtgtaattccatatttatagttgattaataatgaaattaataaattggattattctattgatgagatcgataataatcaagtattcattggagttttgaaatgtaggtctcatctatacaacattgtacaagggaaggttttatttgatgagtaaatttgagtgagaattaatttctatgagaaataattcttaagggcaaaataataatttataaaaattattataattttaacaattatgaattgtgtaattaaatagtatttaactatttagttgtatttgataaaactatattaactaattaaatataatattattcttaaataatattaaagagagaaatatattttttgtgatttaaaataatatttattttaatccttgtgaaataagagattaatgagaattaattaattattatttattggcaaaataaataataaattttatttgtagtaaattgaaaaattaatttttgtaccttaaaatatggcccacaagtgtcggcctagcccacacgtgtagagtgatatataaaggccagtgataattttgtttgattgttttactattaaaataaatataataaaattattaattatcttttaattattaaattaaatacattattggataatgttgatcaaaattttcgacaactattaattaaagttgcgagaagtgattaataaatgttagaagagataaattttttttttttgtgtgtgtgtggttggggcattaatgaactttagtccacaagtcatgatattaataaaagtgtttattatagagaatttttcgatccctcattttctatatgtcattggggtatatattacaattagtgaaaatatgtaattttaaattatcataaataagcttttaaaatttaaaaaagatattaatcaaacaataattacttattaaattgatttaagagaaaaaaatatgatactaaaattacatattccctttaaattactagagaatttataccaagattttacaaaactaatatttgtattataagttttttttttttttttttaagaaattttcaatattattataaatcaacagtcctataagtttgagattagtttaaattatcatttagcaaaaataatttttattattaaagtatttttattttattattttaattatttattaaataaaaatatgaaatcatgtcaaaaaaaatatgaaattagttataactatcatatatttatataattatatgtgatatattacttataaaaatatatttttttataaaaatttattattttatttacaatataatttttatttatttatttatttattatatatatttttattttagcctattctaaaacagaatataagattatttttagcataatctaatctaatctcgaatttcagtcaaatctaatctcgaatttcaaatggaccctaaaggaataaaataattttttttttttcagttccatttcaagccaattaatatatatggtaactcattttcaacgatatgacacattaaaaacaccaacaaaaaaaaaaaaacaatacaaaatcctacatcttttcgtacgcaatcagctccccatctcatattttctatttttacctttttctttttatcttggtacagcgctagaggagaccaaccagggcctttctcatgtcgtcggcgaacaatgtagaggagaccaactctctctctctctctctctctcgacttctttctttctttattaatttattaattttggcactagattgtccttagcttctgaaaccgccaagggcttgctgttaagaaaccaccgtgaacgaggattctcgagttagatccaagagcctccgaatctcattgaagaggaagattcgacgatagtggtggtgctcaagtgaggacttcggcaagctagaattttttggtctttttattacattcttgaacttaatatgttatattgttcagttttgtgtataactttgaattgtaatgtgttctataattttgtatgagttttgtgttaattaatttt

SEQ ID NO: 18974 - DNA, 8585 bp, Cannabis sativa
cgtgcttcccccttaattaatttccattaagggatcagctgtgaaagctaataatatctagctattaataataagctagctcttattatctgttaataatatgtgtgtgaaaattatcctaattttaaatattatatttaacaaattatgaagttatatatgaaaattagaacgaaaattattccttacaataagaatagttattggggtaatagaaagtacaacagtatgcatgacctgggaattaataatttctaaatcatcttataatgttagccatattttaaaggaacataagtttgtatgttgagaataattataaattaaaccactaataattagaataacaaattatataataaaatcatagacaagtgcatgttgcatacaacgaggacaaaacgtacgaaaaaaaaggccaattaatatatatatatacacacaaacataaatatataagaacactctcccattcttcaaaaccaatgatttaataagaatttaggctagttttatgtttgcctgtggtatccatttatagttcctttacaaaagaaatttataataagagagtaatgacaaagccttttgttttttttttaaaaaaaaaaatagagttttctaatattaataatgtatggtttttactgtattttaaattaaattattattccaataatagattctgtcatcgttgtttgtactttgtatatgatttttaggaattagaaagtcttgattcaaatggaaaaaaattataaatttagtactgaagttaggacgtacttactaaaatttcaatcttgtaaataaaagataacataatttttattactttttacgatcaagaataaaaatgtaacaaacaaattaagaaaataaaggtcgtgctgcatgtcattttttcttttttaatcattgcaactagtattattatatggggataaaaatcagctctgataattctttgtttgtaagctatatttcattattatttgtagtgtaaggtctttacctctaaaaggaagtggctccaaaagtttgttacctcattattaattggcatgtttctcaaaagggaacccataaatttcaactttattgattgaacttaactcaacctgcaaatcacttattgtacataaatataatttaccgtaccatatatttaagcatatttacccctagctagctagctagctatatacttaatcaccaataggtagtacaaatatatacatatacaccatatatgcatgtcaattatgaacttgtatacatgacacatataattataaacattgtaaaacctaacttaaatattaatctcaatatgtataatataccaaacattttgacagaaaaaaagtggggtattagtattagctactatatatatacatatatatgaatatgttgaagaaattattattaagagaggaagataagatgaatgaagggcacatggaaaaagctaataaagcgtcacatgagagatgctttagcttcattatgtggggagagagccccatttaggccaactatctctatcattcctaaactaagttccaagatgcattattccatatcacttggccatcgttggcagtggcacatgacattctccctcacaatgcaccatgtgagtttgcaccccatttaatttaatttctctatacttgtagaaatatattaaaaaaaaaatatcatataatggggtcctaattaagtcaagagaagggccttttttaaaatttgtatatgggaaactgtatatacggtcatatagaggaaaagagattcaaaagcaagctataaagttaggttccttgttcacattctaaggaattccataaaggaggttccaagatcgtgtgttaaaggcatatttatatatacatatacacatatggctcattcaatgtgggctaagtcaagattccctcttatccatccccttattatttcatatgagaaattaagaggtaatagccttgtgatctcttagatctaatgatgatgatgatcaccttgaggggtaaggaaagtaatggaattgaatatgaaaaatagctctaatatttttcccaataaattaagtgagaaagaacaagtgcacatttatgtctagcttaaggaagaagatagtgtgattgggtgtggaaattaataaacaattaccaaatataactcagcatgcttagatgatggtactgcaaagtcattaattaacccataaaaagcctatcaaagtcacgtgtactaagaatttctctaataaataatttaattatatagctattataataacatgattaataatatttaaagatagtattcctaaaactaaattaaaaataaagaatattgagagtagtcaatctatacaaattatgcaattgacaggtaattgggatccaaaaagtcatctatacatcacatgcccaagtcaagtttgatccaataatacatacattatatacatatagctttgtatatactttgtacttaccgtataataataataataatgataataatttgaatatcttgggcatgaaacatttacaaagaaatctcatccctgagagtgtggatcctaaagaggatgattatttaaaaccaagttaggttttcatgggtccctctaatcaatccaactccttcattatatcattctagtgggaccttcaatgttttgttatgtgtctttgtagcactagtggtagtagtactatttatttatcacgagtgatatctctgaaagggtcatattgattttcaacatccaactagtgtgtgcataaatatgactcttttaaaattggtctgcgttacattattacggagaatatataaggtactactatactgctaagaaggagtagtaccctgcaacagtaatcagtagaaaagaaagaatatatattattggatttgtaatattattagagaaatgttgaatagagtagtaggagtaggaatattacgggcattgggccttagttgtggatgaagagtcaacaccaaatctcttttgcagggagaaaaaatgatgagaggagtaaggggagaggagagtattgtataatgatgatagtggtggtggtgacaaagtcagtggttgttggtacaagatgtggttatgtggctttgtcagattcttgttgtgtggaccgcatgagaatacatgcattgtcccaattcatcatttatgagatgaagaaaatctatgtatatatttgtgcaagccttgatcatcaccacaattcacattcacatggaaatcctaccttatttattgattgtaatagatttcttgagataacatatctaaacatggatgctattacagcccttgataactcaataagtgtacaattgggctttatatcattggatgctataaggggatgtgggaagatatctagatatgtaaagcccaactaatgtcttggtcttgaacttgatgaagaaatggccttcttcatggcccaattaggggattagaaaattggatatattccttgtttcaatattatatagcaaaataataaaatttattttgcattattactcaaagaaccaaaaaaaaaaatgtaaaattaaaaataccactaaaatgataatgaaagggtgatagagggaaccatatgaaacctaacttggttattttgaatcatcatgtatatgtataggctactaaaataatgaaagatgggcatactttaaacctggtgtaagaaagtgagaaagaaagaaaaaaatacaaatattagggtttttttacatacatttggaatctcttaattaataaaatacggagaatgagagagatattttaaactaaaaacttaaaaaatggaatatacctataaaaagggtttttttatatatttaaatttcattcactaaatagtgtactattactagatacattaggagtgtatacaatgaccagatctattaggagtgtgtactacgaccaaatgtattaggagtatgtactaagtccatatgcatgacagagtgtgtactacgactagatacaaggtccttatattatgaccagctacaaggtctttgcatcaagaccagctacaagattcttgttacgaccaactacaaggtccttgtattacgactagctacaagatctttgtattatgatcagctacaagatcctcgtattatgacaagcaacaaggtctttgtattacgactaactataagattcttgatattttcttataccaaagcaatagatcgtgcaataagtcaagttaaaaatcatggccgtctactcatttttcaaatgaatatatttttctttgaacaacttgaaaatccttaatttatttttatttatctttcatgaataagtgattaattttattatcttgacttagtatatggataaacaaacaaaatatcatatttttgagctgtcctgattaatcacttaaaccccataggggtgcatgtacaagaaagagagaaaaaattagaaaattagggattgaaaatatgtgataggtaattgggcaaagaaaaacatatttttgaaatagtaaaaaaattgatgaatttttattttttgaattatgaagtctattaagcatagaaactcaaattttctatgatgtgttattgtgaagttaatcacagtcaatgagatttttgtgcttgttattttgttctttgcttcttccaaataaaataaatatatttagaaatcagttgtttccaagcagacatctgtgaaatatgaaagtattagcctatagctaactgatcttaaaataatgactatagtgagatattggccaattttgtgactggaaaacccagaaaggtcaacatccaaaaaatgtaacacttgcagtattatatactgttgtttctccaaaaggtatatctgaaacaaaatgggattatcttcttcttttgctgtgtattaatggcagcttgctcctctgtaaccgctactaagccccaacctcaatcaaaaaacataaatacttaaaatattctgaagtgcactatattgatcttggcaaggaatacattgcactcatgactttgaagtagaaaccccaagactcattactttcactaataggcatttgaccaaatgggttttgctccacaaatttctgaacatcttcagctgcagacaatttttccagatagaccctaatatcacctccagcacctgcgatgtcacatttttcaaaagtcatatattatttatctcccactcattaatcagctgttcgtttagtagacctatctaaacatatagttgtagattttgcctctaccaagaaggtcccgctgtcaccgaaaaaatgattataagggacataggcttgacattgaaattcaactagtcactcaaacatgatacatactggtacaacattgaaaaatgatttaaagttgtagggtacttcaaaattttcataaattttacactggcagataacgagttacctaatgaattgtcgctccaattctgaaaattgtatgaatgagggaagactgcagtgtatgcctatcacagtggcagatattataaaattacaagtacaaattaggaagaacaaaaacaaagatgtcagcaagaatttgttacaaaatgtgacaatgaaaggttagctattagtgaaaaggacttacaggattaagcaatgctttgtaaggtgaatcatccaacaacaatgtattagtttcattatattcccccttctcccatggaagatcagggtcatgtttttcccaaattctcctcagttccttaaaaaccaaggtcttgtgtctgttttcaagagttctgaactcagttgcagtgcaacgagatagatcctgaaacagagcagcatgtattgtaacatgcaagagataagcagataattataacatatgtgaaacaaaaggcattgtagaaaaagcatatgcaggcagaaatctagggaaaaattgaagttacttacccaacaaaacagcaacttgtgtttcatatctcccattagataatcgatcacctttgaagcgattttgcttcagcaagttagtaagaaattgaagtcagtaattgtagccaaacgtattttttaacaatcaatgcatgctaatataccaaactaaaataggacatagaataaaggttgaagagtactcagatcttgaggaccaaacaccgacttcaaatcgctcaaaacagaaatttaggaaatcacggcaagatggcctactgaaaactgaaattaaggaataatggcacaattaaaagtaagattataatcaataaaatacagaaaaaaaaaggacaggaataaatcagtttcctcacttgcccgtcttttaatgtttgtgtctgctttgtactccttcggaggaggagtaactatatcagccagcaatccatttatatctagaactagaagcttcttttttgaacgtgtaaaaggcattctcggaaatgaagtatgaaaaaaccctgcggtggcattttctccatttatagtattaacaatgcctgaagtattaactgcagccttggtgtttatctcacgaaacagacttaacgtcgtaagtatagtactcaaatggtcatccctgctcgggcaatctacctcggacagctcttgaactaaagtagtgttttgaaccacactacttggctttgtctttctacgtctccgccttcttttctttctctttactaaagtcaattgttcaggattcttagttttgtcaatatccatctcaaaggacctaacgacagaaggctgcagcgttcggttggcctcaatcattacttttacttcaccattggacattggcaaagaagttgtggtcttaaaagacctcatattctccgttgacttttctatggaatccaccataactggattgatatgcataaatgttgacgcacccttgatcatattctcctgcctgttaaggccctgcaattgtggaaaacaaatactataactatgccactagagatatctattatggttaatagtcagtaatgaccataaacaaaatgagaaaaactccattcatatgtttacatttaggagacaaatttcggtgaacctcccacaaaattaataatcaaagtgagtcactaaattttgttccactgtaaatattatgattatgaattagtaaacatattcatgtcctgtacctatatagctctcttttagagaaccaaaaaaaaaaaccgtagattttaatgaaaaaagttaatgaatacaatacaatacaagcagaaaaaacattagacaaaaggattaagattcaagtttcaacaagtactttgcatgtttttcattccagtaatctaatagcgaatggtacattggacaatgataataaaaactgtcataatcctgttcaagaatcaagcaatgaaacccagaaacacaaaacacaaatgttccaaacattggactaagctaattgagctaccaacgttatcggttcctatcttaactaaagcacaccattaatatccaaaactcaaatctgcattacttttctcccaagaaaatttagcgaacccgaaatatgaggaaagattggaagaccagaatagaatctcataaaagacaaaatagatgaaataaagagatgcaagaaaacatatacacatacatatattgtcaacgtgaattgagatggaatcgaagaagacaatgcagaaagatagttattgaaagagggaaaaatagagatttgaaaaggcttgacctttgagattgggttgtcttgtcgaaacgatggttgggcttctggaagatgatgagagagcgtacgattgaggtcctttatcggaagctcaggcgtcaggctcaggattctcaaacaccagacccttttttggaggctccaaagatttttctcacctgtttggaagtaccttcatttttggactaaacggtgccgtttcggtgattggacattacaatttacaaaacgcttttgtgcccacagcccactgggctagttgatacctataagtaactattatatctggcaaaaattatagggaaatttagatagtatacaaacttttgctttttttttacaaaaatactgtcagacggtattttttatttttttactgtatttttttactgtgttaagttttcactggtgttttactagtgttctactgttgttttgagttgttctgctttgtattttactggtgttttataaaagcacagtattttttaaaaaaattccgtgtgacagtgtttttgtaaaagttaatctaaattccattatttttgtaaatttcctaaaattataaccaaacacttatttcgaagagacatggttttctatttttcttttttcgaaatggaagtccttcattcaccaacaacaatattacataggattaggcaaaacgttaggattaggcagctttaatgacaaggctttactagcacaaggaaaattaaccccaatctgtataactaactttattcaacaaaacttgattagttaatactgtacatgaattacttaatgtgttctttttataaaaaaaaaaaaaa

SEQ ID NO: 18975 - DNA, 7359 bp, Cannabis sativa
  modified_base (2020)..(2021): a, c, t, g, unknown or other
  modified_base (5289)..(5289): a, c, t, g, unknown or other
caagtcaatacaaataaagtggagtaggctattaccatcatcaaggggccgatctctataattctggtattttctttactttacattattcatattttttatttcaattattgtgaaatcgctttaatttgactcaatattattggctaaaaacgagatcaatattttggtgctttcattgagagcaaagaaacacgagtctttattttatgtcttttcaggacacaagattggtgtaacaacgcggaggggaaattatactgacactacaaatccaatggccacaaatccaaacatgcagacacctgcaaacccgaaaatccagttaggacggatcccgatctaactaatcctcagccaccaacaagcccacaaataatagggcaatgagtgactacccttcttgttgaattcgcttcgggcgtgcaagaaatttgaacaactagtacttagaccgagcaaacagcccttggtactagaatcccttctgctacaaattctcaaagaccaatgggtgatgacaccgaactacagaacttgcaagctacactagggaaaatacaaagccacagtaacactcttcattacgatgagtaagatactagagcagctataagcttttgcagaacaaagatgctagttcaaagagtggaaggatcaagagatggaaatcatgaaagcccaacaagaagtaattatgttctaggcaggctgccgtactgatcaggagagcctatcaagtcactagccaacagccggcgatcgatacctacatttttattgggccacagcatgggccagaagagggtccacctaaacacacttagcaaacccaagttaatggtcgttcaatccagggccacagagtcaaactgtgagccacacagtagaggagcaagttttgctaactcgttacttgggagggagtgaccagcataatgtttgtccccagacggaaatacccagtcgacccttttctcacaatagccaggcacgaaggcctccaggagaataagtctttgaccgattaggcaccttgcacattttctagaatgatctaacgggtaggacatccctcctaccattcagccaaataatacaaattactatgtgccctgccctgttctaagagatcctcatatgacacaagttagtcaataggcaggttaagttgatccattggtgcaagcccatatagatcaacttaagagcctcgttcaaggcctaacctacccaaaactcatagatctacaacttgactacaccagaggatcaccattctcaccaaaaatcaattctctcgatctactgcccaagtttaaaatgtcaacatggaaaatgtacatgggcaaagaagatcctttgtctcacatttagtactttaaaatacagatggacttacaagtggtgagagatgatgtacggtgcagaattttcccagctacattggtgaaagccgcccaacaatggtttttcaagtttgctccagggaagtttagtccatggaactccttcatgtcaacgtttcatgcacaattttcctcttctcagcaactcccatctcacttagccaaagtgaaacaaataccaaggaaacccttaaggaaccgtttggtatgcaagtttcatttcatgggaataggtttagcattgcttggagagtaatgaaggaaatcataaacttaggaaagcaacattattgtgtttggtggtgtgcaataatattatgatgtgcttgggaatataaagattactttgtttggttgacataggaatggaatgtgacaattttttttacaataatgattatttttttttacattaatgattattttttttttgtaaaataccaataatttaatacttttttttctttctaagtgttcaaaataatttttatttattatttttcatataattttataaaaaaattaacaataataaataattataaaaaataaaatatacatatatacatatatatatatatataagaatgttaatatatatatatatatanngagagagagagagagagcgagataccttgtgttagcaaaggaatgaagagatactttcacacaaaatgagagtttttttagagtgagctttccttggcaaataaaactcaactattttggagaggtggatattagctctgtgtaaagtcaacttgaccccatagtaaaatgaacacctcagctaaaaaatttaaaaagcaataccaaacattggtttgacttcatattctcattcctaagtaaggaaaattgcataccaaacagcccctgagagtttatatcaacaaattcattattgcagctacaaaagtgaaagggttaaccaaggaagggaggctagctgcaatcctaagatgtattgagcctttagaagaattgtaaaaagacataaaagactaactatagggtcaatggtagaattcttggaccaaacagatggatttacaaagctcgaagaagcagttcagcatgtggacagagttgggtagaaaaagaaccaacaacataccattgctacaaatacatccgttcagtaagaccagaattcacagaatcacaaaagctctatccaaggtggtaaaaggtaaaatgatggcaaccaagtcccctacatcagaccatagtattgcgtgtatgtgcctctaaaaccccctttttgtccaacaaattatctaggcaacatattttcaaggtgaaacttttgggtgatgtgtgtccttgttcacgtggagtcctttattgcagctgtatagcacacgatgaggagcttcttaccaaccaacgatcagatcgtcatgttgtaaggcctgcccttgcagcatgtttagtacgaaaccctaggtaggtaaaggaaatgcctttacccacatgtaagcctataaatacctttattttttatgtacaaaagggtgaacaattatatactagccaaacctctgtaaaaattcctataagctttcttcttcattaagagaaattaaaggactgtagagctagggtttttactgtaaacatttgtattattcaactacttgcccaaagagccaatacaactaactcgtggactagggattattaactcctgaaccatgtaaaaatcatttgtctattatttgctattttatttatttcttaagcattgatttattagtttctaaaaatctcagtaaatagccacactacttatcgatagcaaaacttctagttttgagtttagatccccaaaaaaggttttagcaagttctttacccgtttatgtggttgtaacatagggcctccattcaatgcgtgattttcgattcaggtcgaccgacacacttgagtttgaaaatgagttaagactagcatagaatatatatatatatatgtatgaatatgtgtatgtatattatatgcatgttggtaatgtgattcatatattgccaacactagtacggtagttgtactgagtgcattggtacagtatatgatgttcaaagggtatgatccgatattactaacactagtacggttaagtacgtagtgcatgtggtacaacactcagtagtactcggggtacggttcagccctaccaacactagcatagtagcggtacttagtgcatgtggtacataggtcgtacttctgttaagaacgtgcttgattatctgtatagccttatagataagtgtgtgggtgcctaaatacaagtcggtaataaattatatgttatatgcttttccttacagagtctgatgactcttagatattatttttatgtgtaggtaaaggaaaggctaaggttgaactgcaattccaaagctcaggaatgattgtacatctcaagatggtgcaacatggagagttctgtctcataacaacttggatttcattttgtactggttgtgtgacatgtttgtaaagtttcttttggaaatgaatataagtttttaaagtaggatcctgaccttttttgaatggatatatgtaaatatatttataaaattttaaatttgtcacgatttttgagaaaaccttttgtttagtaaaggtgtgcactgtaattaaaaagacattgtagcatgcataatcattagggcgttacaagtatgctgccactcatgacaaattggcctatgtgagaaatgtcatcctaacaggatggacatcgcagagttacgaagctggataggaaggtaaatatgatttacttttttttcttgattataaataatagtagattgaattgttcttaattactaacattgtttttctcttgcatgtagattcgtgaatagacggcgaagatgatatgaggaagtgagacttctacaaagtttgagatggataaggattttagaagagcaacgaagaagtcaattttttagtttaaatttcaaagacaatttccttacttttattgttttaaatctagttgcacatgtaaagtttgttttatttaaataattttattttgaccatcttattttttatcaataatgttcatttaatttcaaatttatgtgtgtaaagttaactaaataagacttcaatgctcatagtataaatctaaaatcaagtttaaatgtcttaattattattttgactacataatacataagtaactgtttgaaatagtaatttatgaatatttcaacaataaagtttaaaataaattaaaatgtgattttaattctatattattaaacttagacattaaatgagatttaattaaaagtttgaatgactattcaaacttatacatggatattaaattccattccaatcttgtacgttaatgattcattaaggaatcattactagaaacataaatatttaattagaattatctaattgaattaattcacattaaaatattcttttagttgaatttatttattgaaatatattataactaatacatttaaattaatatgagatatgatttaagtaaattaaaagtattttaaatggtgtgtttggaatacatcaagattgagaataaatgatagaaggtgtttaaacaattaaatctcaataaagatgacaattaaaaaaacagaataattttaaagagtcaaaattaaattttaatagttataaccatcaagtatattcaaaggtaaaaaagtatcttagtgggagtatactactcattaaattagatgattttaagaaaactagattattcttaattacaacaattagtgtttttaaatcaaatcatggtttccatggaactatacgaattttaataaatgagatttattaaaataaaatatatatatanatatatatatatatataccaaaaaaatgtttgaatgtctagctaattaaaattagtgattgttttggcatatggaacatcaaatcttatgagaaaaaaattaatgggatagttaatactttccaatttcgaactttggagtcgaaatataattattcaataatcatacattaatagtctcattaattatttaatacattaagatgatattgaatatagaatttttaataagtgataaaccttgacctaattaaaattgatattaattacagtaattaatagatgtatatgggttagttcaaaaaatatccactaagagaagaatgacttggtcattaacttcagaagataaacatttgagttattatgtttagatttaaattttgatgtgattaaattcaaataatataatacagtagtaattttatatatcaaatattattagaagaataaaatattaattgatatctatgaagtataattactaataaatagtattactaaatgtggatttaatagtacaatataaaaataagaatattaaagtattaaataaataattcaaagaatattcaatgtatgagatacaagttttgaatattataattgtttaactattgaaatttaaggatacttatatgatgagattacacaagtaataaatttcaaactataaattaagaagagccttaattaaatgatcaaagaaaatagatagataaggaactgtttaattgagtgagactattaagtatgttgaaagtatatttaaaagacgattcaagaggtgaatccatttgtaacgacttaatagaatttaagattaataaaataattaatttaagaatatatattattgtattatttgagaaacgagaaataactactcttattaattatgtaatattaaataatataatcacttaattgtgtcagtttcttaaaacaagaaaggatgtgaaataaaatgattcattccaaatatgtggcttgattaattatgggatctattaagttcattagttatcataattaaaaaattaattaaatatgactaatagagagttttagattaatcaattttaaaataaagttttgaacaaatatatatttaatatattaaatgattgatcacacaagcatgaaccgaaggaaataaaagaatgaataaactaaatatactgagatcaaaattctgtatattttttcaatgatgatgtggtggtctcacagatctggaactacattatgtggagagtctcgttcatatgacttaaccgaaatagtcaaatgagatacaacatctataagagttatagaatatgttgcacttacttttggtgtaagtgggagattattgagacttattccctaaaagaaagtaattaatggatatatattagagaatatgtgacatgaaattataaataaatgatacattaattataataatataattattaaatatctaaaaattctttgttcaattggagaaggtataatcttgtatggacgtacaagataattaagattatacgatatgaataaaataagtcaatattatattacaatatttgaaatctttaatatgaaactgctaagtacgatttactatacaatatacttctagtatgtgtgattttggttcggatcacatatgtggatagatatgtagcaaaggtgttgtgtacaatttgattatgcatgactagtcattaatatctttcattaacgtaccatttaccatgaaagagttattcatatctcaacgattatcattagcagatcagcctgaatcctaagtatatatgaagtcttatttgtattcattgagttctttgattcactcgttaaagtttctcaaagaagatgattcttaaaatttttgttttgagagcttaataacatgagtggctgggaacatgttatacaatagtggaatccaagctttcctaatggattgaatgttagttctcttatagtgttaattctgggagtgctaacagttggatccaaatctataataagttatagattaactgttcatattgaattaatggtacataagaaa

SEQ ID NO: 18976 - DNA, 3125 bp, Cannabis sativa
agggtatatataatacaaagtgaatacctagtaatactagagtaaatgaaaaatacattaaatgtaatacagctagcttgatttcctacaggtttttttgataatgatatgagttcatcttgatggagtttgaccatctgtcattaagtgggtagaaaatgcaggctgtttaggcattggtagactggccccttcattgctcaacattgaaataacatctgatatgcttggtctatcttcagctaattcttggacacatagtagacccacttgaatgtaaatcataagatcagtcagtggacaggtaccagccatttttagatccattaactctatgcacctcccagcattccacagattccacgccttgaaaaatataattgacaatgatagcaatggaatcagtcattgatttgagaatatgtgatagatgtatctgtccttaacagctttattaattataatttttatgtactaaagctcaagatcaagaaatattaagaattctaaggtgtggtttggatacttacatgtcctagtaagttggagcaatctgactcagtaaaggtggagttcttccttccactaatgatttcaaacaagatgactccaaagctgaacacatctgattttgttgagaaaagtccatgcaatgcatactcaggtgacaaatagccactgttttcagtgccaagagaaacagaaaagttagcttagttgtttgaacaatatggcttggaaataaagacaaaaattcataaggtacttactatgttccagcaatcttctttgttttatctatatgatcattctcaaaaattgctcttgctagaccaaaatcagatatcttggggttcatatagttgtccaataaaatgttgctagttttgaggtctctatgaatgattcttagtcttgagtacttgtgaaggtagagaagcccctgagctatcccttcaatgatgttcttgcgtgttcgccaatcaagaagtagtcttttagttcgatctgattcaactccaatgtttgagtgcttgaaagtgatgttaaatgaacatgaagatgatgatagaaaataagagatttgacagaagaatttggttaccgaaaatgatggaatccaagcttttgttaggcatgtactcgtagattaagatcctttcatctcgatggatgcaaaatcccaaaagcttaacaagattcctatgttggaggctagaaattaacatcacctcattcctgaactccattagtccttgtccagaattcttcgaaagcctttttactgctatgtcttgcccaaataacttgccctgcaattgacatcacctctgttaattatattatcccttttctattttcagttatgctatagtatgaaaagggttaccttatgaactggtccaaaaccaccttctccgagtttatttgcagcagagaaattgtcagtagcagccactacataagaaaatctaagcgggagcatgccttgattctttctcttattgaatccaataccatttgattttatatcgttttcattagtaaactgtgacagtaacaatctcatattgcctttcatgccttccttctgccaatcaaatcctgcaaaaatacaaaatgagttcaatttgaaattttatggtaactttaaatgtgttttgaacatagttaaatttgaataagttacctatgaatctgtactttcttataaaataagtaaccaataagatcataataaccaatattacagacatcactgtggctgtgacaagaatcaaccggttcttcttcctattttgttctgaggaaaaggaaaataagagccatcagactcaacacacttgagtaaaagaaaggaatagttcacaaaccattatttataagaaaaatgaaactaaagatcattacagttaaccacatgaaacaatatggttataagttcaaatcttctgatttcatagtagaagtgaaaaagcttactagattttcgatgtccacgcaaaagaatagctcggtttcccttccctgtcattttcagaagatccaacttacttccataatatagttcacatccatatctatcactacttgagtaagcatatgcaacacatgaacaattgctcctgcacagcaactcacagccatttataccaatagcagtagcccttcgagtgattattgaagtcggcattagtcctgttatttcagagaaatcatcaccattttcacaaactaatggaatgatcaaacaaccactagaattcttcactgccgtgccatcacaaagcgaataattgaccattgaaattcgctgatcttccattttgtactcattgataaccccatgatatgccatcacaaaccatgagaacacaatgctttctttgttactaaaagtaacataagtctccttctcttctgatacataactaaagttatgattatttgatgagctttcgaagaataatctgaagtttttcccatcccaaaagccaatctcttgataaacactttcaccccaccagatgttgaactgagtcttgttttctctgtcaaagcctaaagagaatgagccttttcctggatcaccaggattaagccatgacaaaagaaactggaccctcggctgactcgctccaatgttaaacaatcccaacttcattccaggtagaaatgtatctgttggatgttcaaaactctgccatatcatcttttcgccttggatcaagacaaaatttcccgagtcaagaagtttagcaattgtattattagtagttgcaggtgcatcactgttgagaatggtcttatctgatgttctgttgttatatataaccaagtttccattagtaatgctaagagatcctgaggaagctgggagaggatcttctctgttcgcaacccaaactgccttcttgtccttgtcatttatgaaccaaattcctacatactcattgcctgaatcaccagaactgaagaatcccaactcaaacaccccattagaagaaaccaaggtttcataattatacaaagtttcacctgttctaagggtatttgatgcatttgataaacaagaaaggggagaaaatatgaggagaaaagaaaaggctttggagttgaaagct

SEQ ID NO: 18977 - DNA, 2212 bp, Cannabis sativa
tgggttgagaacgaagcaagctggtagaggatcgtgccggggaagttagttgctgagatacactgtttcggagaaatgtacggtctccggtagtgagctattacttgctttagtttttgattcatttcgcctttcttctgtctctccttttttcgtgtgtgagtttcgtcgttttagttacactcgatagccagtatttaagctccgaaatctccgtcagccatggggtatctgctgaaagagatgctcaagactctttgcggttcgaatcagtggtcttatgctgtgttctggaagatcggttgccaaaaccctaagtaagttgtagtatgagaaataatttagtatgctactgtaactgtttattcgcttaagttcttcttgagtaaaaggaatgagaagaagtggctcaacaagtgagttagattcaattgagtcatttctcaactgcaaaatatgaacgtttttagaaaattttccttttttattcactttttccctatgtttcctcataaaccaaacaaagtagatctgttgggtcatgatacctttttcattttctttaaagggtttttagggactagggtttgtgaatctttctggttataagatatgattcacatgtgaaaagtcttcaactattatcgttttctaaaattttatatcgtaatctgatttttgttgtttcctatttttggaatgttctgtcttgctttgttctgttttgccttgtagattcccagtcaaaaaagcatgttcgtataataggttcacaaaccactctgtgcctggctcactaaatttctctaaatctattggttcaggatttggccttccgtggttgattctattcagttttactttgttcttctttcaagtgggagaaaattttaatattttccactactggttaatttgatgaaaaaatcagttccttttgtctttgtctgtttggcttctaagaaatgcaattttaacaattttttatgctcgaattacttggaagaccaagaccacgtaggtacttcggaataatatataatattatttcactctacttggcactgcaatatttctaaacttttaatgtgtcctaaggttgaagaattttacttgttgacaggctactaatttgggaagaatatcactatgaatcctcaaattcttctctacctgcaagcatttgtggagctgggagtactgagctaccttttggagagtgggaaagactattgatgtcatctgaaacttgcccagctccgcttggaagtcaagcgggagatcaagtcttagcacttattaacaaaatgatgattagtaatcaggtcaatatagtgggtgaagggtatgcattttcattccatcttccattaccttgtaatttgcaaagaagtgtatgccttctggtatttatttaattattactttttgagatttcagaatagttgggcgagctgcatttactggaaaccatcaatggattctttctaatggttatgataaatatgtccatcctccggaggtattatcatcaatttttgacacttaaaaattctttcacactgtatcgttcattttgcagagcctagagagatgttctatatgtaataacaatataactcatgtttactgtaaatggttgcaaagaaaaagttacaattgtctgaattttattttctagcagtgtatttatgcaattctacaagttcatgataggaattggatttgacacggttttttattttcctggcttctttcattcaggtcctaaatgagatgtgccaccaattttcagctggcatccaggtttgttgtctttataggccatctgctattttcgtttaatctttgtctttcttgtttagttacattactttgttttggtatgcagacagttgcagttattcctgtccttcctcacggcgttgttcaatttggttcattgctggctgtaagtaatgctttttcctctcaatccttggtatcattacaaaatggtaacactatcaatttcatatgtattttactaaaataaacacaagaatttactcgagcaatgtagaaatatgttctttgaaattgtggtgattatgctccttcatcttttctctaaataaatatggatgagattgacagattccatggaattgttttcggttgcaatcactctcagattaatttcaggatgtgaacttctatcgaactatgtatt

SEQ ID NO: 18978 - DNA, 9941 bp, Cannabis sativa
  modified_base (168)..(172): a, c, t, g, unknown or other
  modified_base (2348)..(2350): a, c, t, g, unknown or other
ggaataacattccaagactaaaccctcaaaacaaacaaggtaatatttcacattaccattcccttactagaattaacctattccaaacagccccaatatagtgtaattaatgggacactcaaattatttgtggtttttttatctttacactttaaaacagtttttttnnnnntttttttttttacattttcacgaaattctacgtaaaaacccttattgtaactaatactgcaacctaaattgcaacaaaaaaatcgtatagaaactcctattgcaactagcgttgctaccacttagaaacctaaatcgtaaaaattaaaaaaatagtatatagggtaattctccaaactatttttataaataagtttgtctacaatgtcccaccaaatttagtggggtactgtaaatcacactatttttgctttttaagtttttaataattaaataatattttttaagaaaaaactaaacaattatatatatttagtattaaaatattctaattatattaataaaataataaaataataaataatataaaatttggtgtaatttttaatgttgtgattggaattgaaaaaaaaattagtgttaaaatagtagtttttttgtgttgatttaacaccaaatttaaattttaccattagtgcaactccaatggagaaatctaaatttagtgttaaataaacactaaaagatttcaacactaaatttttttccaattccaaccacaatactaaaaattacactaaaacatatattctttattattatattattttcttaaattatctcacattatataaatataaaaatttaatcataaacatatattttaatgttaaaaaaaaaattagtgtagtctatagttttagtgggacattatagactcccacacatataggataacattttattttgtgtacaaactccaagattttagtattccattggagaagcccttatacttatacttgtattatatagatttgcgctcaaacaaaaaatttgtttacacattagtaccaagttgttcaatttaatatctaattttacatattttaataactattaaaaatcgcaaccactcataaagtgccaaagtgccacttatgagaacatgacaatgctattttagttatacgtttgattatttcattttcctaatgcaaaaacaaaaaattatcagaataggaactgttgttaaaaaataaaaaaataaaaactaacagtgtttagcatcatttcaaaacaacattcccaagcctcgtaagatttctttttcgtaatacaaccaatcaaacaattccaataatactttatagtgtcacatacaaaatcagcaactcaaccaaacatacataaacaataacaaaggcaaacaaaaaaaatgccttcatgttgaaaaaggacatacaattaagtaagaaaattaaattgtaagaggccttatcacaattacacaacgccacatactctactattacaaacttatataatacatggtaaaaactctggctaattacattagtgatgctaagatccacggagctctattgggtccccaatggcgctctatcatctggcccggctaacatgatctgccatgtaataaactcgttctgttaagaattttcgtgcaacaacaatggggagaacattgaaccagagtagtaatttataacatagtttgaaaatgcacttacattgcaatcaaaagcgaaccgcctggcaagcatgatcgcagcatttcgctctctttctgattcaaatgctaaaacgaaagaaacccctttctttgcttgccaaaacaatgcctgagctgcagcattcccacctcctctaactccacacagctaaagcataaacaaaacaggagccacttaattgaccaagaaaacgaggttatataaaaaagggaatatcaagtcttttatgaagaaatccaagctccatgaaaagatatggtaaatattcaatttaaaaggacaaactgaagatttattttcaaagaagttgtggttagatatatgtgcctcgctttggatatgatgctttattttagcaggccattattgggataaaaaaagggcaagaaacacagtagtataatatacctgcattgaactggaatagtactctttagctatcgttgtctttgctttgcacagttttatcctcatcttcccaatgtgaaatgcatggatagattccgattgatgattaactccgttcatctgagtaattaccacctgcaaaagcaagaaatcttttaaatactgcagttttatggctacatcataattctacatcattaaaaaaaagatagatagatatatatatatatnnntatatatagagagagagagagataacaattccagacattttttgcttatatgaaagaagaagcagttttaacgttattaagataaatgttttcttatcattcatccaaacttgagctaaactgggccaatcaaaatttatcgaggaatattgtgaaaacttaatagtctttaaaaattagaaaattgaatcattttctgtaccactatgatcaccacaattgcatgtgcaaatggaaaagaaaatgtacagggtaaatcttgagctttttaagacaggcagtaaaatattgatactgacaccaaaattcagaaagattgataacatacattaaactcaacgtcatgtttccgaacaagtgcctccacatagctacccaaaccagcagctgcacaagtttccacacattacataactagtttgatatgatcaataaaaaaattatataaatgaaataaaatggaaaatatctgaaatctaagctaaataatcagagaatgaagatgaatgtcagaccaggatcaactggaccggtggttgtcagtgttattgtctggccttctgcaacaatatcaacttgcaagactcgtccaacatcaaagggctcaggggcatagattgatttggttgctcctgaaatagaaaagaaaaatgattaaaagaagaatagcagctaaactattgcgaacttgatatcacaggaacatatattggtaaccagtttgatatctcaagaaaagatatataactacacacgtgggccctgacaaaaaaaaaactacatacgttggtggtcagatctaatcatacactctagttctctaaagaccaacaatcaagtataccattagcagaaaacattgtggctgacaatctctagcacataaaaattaaaaacccaaatgttggaatattgttggaggtgatcagtcagaaagtgacacacttgagtgaatcttctttcgtgtttggttaattaattgcttttgagactagtgaacattgcaccaatcttgctttctttcccatttttaagaatcatattgaaccccaacttcagcaacatattcatttttccttctcaattaacaacccaacacacaaacgggagtgttaggagattacataagctttatgctgggcctgttaataagcgctaaatatagttcttctggaacgtgaagcaacacaaagttgccaaaacaaactacttatttttcccctatacaagtctagagaagtttttataagaaatagttcgaataatacggtgttcatttaaatcagtttaccgccatacctgatataagctcctttttgcagccttcagatgatatacggtaccattgaattgaacatctagatagatctggagcattatcagagcagggttgaatttgcaaataagaacctaaagcttcagtaccatctatttcatacaactgattattgttctccatgcctctcttgctcattgccagctgaaagaattgttcagatagagaaggcaatgcaattaattaatgcactagcaacattaatacacaaaatagtacactcttaagagtagtctgagtgaagacatcatgttattctcaagaaaaaaaatccagttatatcctttgtcatgccaaaccacagtgtgttacacattataagcagtctcatcgacgtaaatatttttttaaaattttatttcttcaactagtcccattaccttttttacttgccaatcacaacacctgagtttttctatttatactcatcactcaggtaactttcaagaatagaaaaaataagtacatttggaccacaaactttaattaagcctatttaaggagctactaagaggaatggtaacaaaattttagacaaataaattatggacactccatatattacccatacttcacattgttaaaatttcaatgttttcctaacaggagctgcagaaaagggtttgtggataaatattaacattttatttaaggaagaattagcacactgaccccacttgttatcactacctctaccactaatattattgcctatggtactcttacagaaaattaacttcccgaaaagcttatcataggttctttctctccattggaacaatagggccgttatgctcattactaagcttgttgaatagatgaaatataaccaatgttatccttgcgagacatacctctttctgaagccgaagataatgcttagacttctctgtgagctgtttcctcaaagcttgaagttcatgttccatgtccataacctacaaattgatgattaattcataagtaccaacaaaactctgtttataaaaggacaaattagttactaccctgaaatttttgcacagagtaggatattattaaaaaattgtttcaccacactgccttgttgaagtcatatgccgaaattgttttcatttttttcccctaaaacacaaccatgccttgaatctaacgcaaacaggaaaaataagtttgtagtcctcatagatgaccaaacaccttaactaaattttctcttttaagctctgtttggaaaaacataatatcacagttgtttgggtgggaaacaaaaacctagtttagccaaattacagtccccaataaatcgctaaaaaatcttatagtttatgctatttattattgggatggtcacaagttgaagttggtaagaacttgagtgtgaggctaaccttcagctgtaaataaattagcatacttcaattgatataagcaaaataccattgaacacaattgcaatcaatcaatcaaatgtccaagaaaagttcagaaaaatacaaaaaacaaaatcaagaccacaatcaatcgaacacacaccttgcttggttgatgcagcatttttattcgtctagcctcttgaacctccttcatcaactcctccaagtcctaacagtcctcatacaaatgtactttgtcagaaaacatttaaatactctgataaaaaaagagcatgttcatcaagaaataaaaaaagtaatcagaatgcttgactgcaaatttctccaaaactgaagactaccaacctagattccaagataacataaactgtaagataataccaactgttgtagtatcatataaaattgtatgaaatatcaatacatgagcataagaatatcaaaataattcattgatcatattttacaaaaaatcctacggaaattaagaaactgcgataagaaaacagaaaactaaaatgaacacaagatgtaaacctgcttccctgatgcccgagacattcgctcttggtcttgaagagcctcttctactctttgtactgctgctctggcagcttcaatttcagcacgagcaaatgctcgttcctcatcaacaagtcttctagcatcttctgaagcctacaaaatgataatacatattcaatttcagataatataaccaatgactaaagaggagtttgtagaccagtgtaccatgaagaattgtttgctggaagcgatcatcaaattaaggttataactaatactttaagtcagctacatgaagcctctttttctaatggtatggagaaacataaggttacttcttgcaaatatttgtttttagagcttcatgtgaatttatcttttcttacctttgaaccttttaaatttttggaacttgcaaggcttgtgttcccactaaaattctagttatcactagtacataatttgctgatatttctgatgtggttgcaacaagtttggtaattactgaatggtataaaataaaaacctagttcccaacgggcaaagatgaatttgatgactgaaaagtaagaaatgctatcaagtaatacttccatgtctcaattcacttaatacacgacgcaaccacaaacgtttaatcacaaaaccactaatctctcatcaggtgagacactgacactgaattcattcatccatgacaccagaaactcttgttaccccagtttagcagtcaagaaatcataattacctgtttaagaaaatttgctagcttcttcacctctgtcttttcttgcattaactctccttctctttgagtcaactgaactgctaaggcctccacctggagatgacagatgatattccattttatttaaagatgggacgatagcaaatgacataacgaaaatgttcaaacaaacagtattaactcaatcacaccggaggtgagaagatacatataatttatagccgataaactgaagaagtatgtatcaaatatgaaaatgaaaacgtattacaaacataggaaagtgaaatacatacaaagataactccaaaagctatccataaaattaattacttaattgaaacttcaagaggtaattagttgactcccagactgagcacaagatactgataaagtgacgttattatgagttaacaggtgctgtgagatgagaagactggtacatgtgctctacgattaatacaagttgaggttttgcttcaaaaaaaaaaagtaacaaatttcttggatcttatatgttttctttttctatttcaaaattcattagctcctatgttgtactatcaatctttcaagttgatactcctttaggttataccattttgtttgcaaatttatttcagcatttcaatatcacgcaaaataaataacccttctaacccacttaaaaagtgagaaatgtaataagcttgcttaatagaaaaattccagaatatacagactaaccatcgatattgcttcttctacatcatccttgtttctaccagccacgcgtccttttaaggattccagtgcatccctaagctttttcaaaaggacatgcttttccaaggaagctgcctctctaagtcttgcctgcatcatttcacccaaaaaaataaaattttaaatttgcgtccaacatactaaagttgtgaagtctctcatgatattaactttcacaacctcaaaaggacaaaaaacaactaaggaaagaagaaaaagttagtataaagttaaaaatctttcaatgcattcacatttttgaaaatacacattgcttcataacaaaaaagtctttcaacatattcacacaacgaaaaaacggagtatgaaataaaaagacattaactttttacgtgtttgagaataataacaaaaacaatcttatattcatagtgaaaaaagtctttatcttacttcataacaaaacaatctttcaacagagcaaatcacttatcatctagtggtaaggaaaaactcccttttaaattttactttcagattattataataacaaacaccatatgaacattaatcctcaattcttttataccaagttaccaacaaaacaaaacaaaacactggtgtgtaaaattttgaatcgcagtttataaaatttataaacttaggaaaattgtataaaagattggtaaagcaatttaacctcttcagacaatttagcagcagcagccaaacccttctcaaatttactggcgaggtcacgaactgaaaggcgcttctgctgctccaacagctgcgcagtctcacgtgcaaccacctctttcattgataatactttgggatcatccttcaactcaacaatctgattgttcgatccaatcttataattaggaaaacgactcgaagcaaatatcacatcggctgaaactgctggaacagcctctttttgcatcgtatcaccaaaatctctgcttactctcgtcatttttttttttgtttgaaccagttactctgtcaggcaccgcaaactaaaacccattcaaaataaataaattagacaaatattttgaaaaaaaaaggaaagaaaatcatcatgttgatttcaataactactaaatttgagctttaacaacccatactgaagattgttaaaccgaaaaaaaaaaataatgatgataacaaaaactgaaatcaactaactaaaaagatgaagcataccataaaacacaatgagaagctaaaaccctagctcaaaactatgatgtagaacaaagagaaaaatgaggacaaaaaaggaaacttggaacttacagatcatggaaaaatggataaagtaataataataattaactcaaaatggacaatggagattctgtgatcagattcaactcaaccactccttacaaataaaattgtgtcttcgtttctctcttatcctaaaattgatcgaacttgtttttaaatttgagagagagagaagtttgctgagacaaaagatgggttttgagtttgctttttgaaaagtagatagagaagaatgaaaaaggaaagaaagccgctcactgttgttacctgtgactatttttccttttaataataataattaataaaaaaaaaaggcaaagaaatcgtttaccgaatatggaatgaacgaacggttaggattaaatgttaagggcatgggatgtcatgcttatgctttaaacttcaaactctcttggcgggtcccacttcggcccccgccttttttattttattgttttataaatataaataaagactccaaagaaaaatattaaatattatatttagattgaattagtgtgatatagaattaggccgaccaaaatatgtgtaacataaaattgaaaagaataataaattataataaataaatgaatgtgtggtgtcatgtaataagtgttgtttagttgttactcttattttaatgtttttttgaatgaatgtgatagactgttaaggaggcataaatataatcgacccaccgtttaccgaattgataaggacagggtctaatgacgaaattaccctcgtagtagttagttgactttggacaatagagttgttatgaagaatgatcgaattggaaattaaatatcacactatcccaaatccaaactagtgcaatccaattaattgcgaaatcatagattaatgctcaatctaattcaatttcccgctctcacaggtcaaatttctatatttatttattttaggaaccaaatatcatgcgtgattattaagcagaataaatataatgtttgtgtgtctattttattttcggtaattctagcatccactatataaaaacaaagaaatcttttctaacgttttttttttaagaaatagtcgagcttggaaatgttcagcaacattaaggagccaataatatatggaaattgatcaatacctggaaagaaaaattattctcaattggaggtaaagaagtgtttttgaaagcagttgtttagtaaataccaatatatgcgatgagttgttttaaacttccgaaaacgttttgtaactaacttgagtctatgatggctaacttttggtggggttcaaataaaaatggcaacaagattcattggaagaattagaatctcctttgcaagtcaaaatttgaaggaagtatggggtttagatcatttattcacttcaaccaagctctcttggctaagcaagcttggcgaattttcgaaatgccaaattctttactaagccgattactccagcacaaatacttttctcaatccacttttttggatgttaatcttggtcattcaccttctctaacttggcaaggaatttgttggggacgggagttactcatcaaaggacttcgatataaaattggga

SEQ ID NO: 18979 - DNA, 2635 bp, Cannabis sativa
aatattatttgtatatatagttttctaaatttttttataaatatgtgtgaattggattgaatcggttacttttacatgtcaatcaacatctaatctgcacaagtgcggattttaaattttccaatccacccgcaccagtgtagatatctgcactttgcggattggattggattggattagatcgtgcggattggattggatcggctattttacgaacacctctctacgctgcaataaaatttctaagagtaaacttagtccactttagtctaagcccgaccctgatgcgagtagtttttgagttggattgcttactaagttatactaactaaccagtccaaccctctctatataaacacccaaatgtgaaaggggcgtacgttgtagactaaatcaattacatctattactaaacgtctttaatgttacttaacattatacactgacaatgattttgtttgtttacaatactttcacctaaagagtatattgccttagaatatgtaattgttcagattaatttctactccattaaatactctcttctctttttgtatgtgtttaatttgtgtatatattatgtgtaggaaacttattctatcttataaatgaaagggacaatattcctaatttatcatccttattgaacaagtcttttgaagaagaatcattcctcaaatttgtttgacaaaaagacagacaggtccctctagattaaattcctttcacgtgggaacagaattaaaaagagaaaacaaatacaagtacacccttttcttaaaaacaaataacaaaatattaatatagaaagaaaacccatgtacaatgcttaaattttaatatgatcggttggtaacaaaagtttctttgttgattatttctcttagcatttgagcggcagaatagttaaaacatagagtaaatactattttaaattctgtattttgtaaaatttataaattaaactattcatttgttaaatgacaaaaataaacttcatttttttaaaatagtacaaatagtattttaaactgattttttatcaaaataaaatttaataataatccgacctaaagtggtacgacaaacctagttaatttcttttgtatatgttcgtgttaggaattgtctttaagttggttatattaaaaaaaaattgtcgaaaattgagatcatggtcctatttgtaccattttagaaaatacagagtctattttatcatttaacaaaatagagaatccaatctataatttttacaaaatataaaatttaaaatagtatttatactaaaacatataatctataatctatagtatatgttagctttattaatcaaatattttaattttattgccaatattaggggaagaagagaaaatacataatttgtttcaccgattaatgtgatttaacaacattgtattgtactagtattagtatatattttaggtagtagtctcagagacagtggtactagaaggagtctcttctgcttgatcagattcttccacattgctggctgataccactgttgttgcttctagttttgtcacacgaaatatggccaggttggtatctcctgtaaattaaaatatgcattactccttttaattttaatgcacatatatacaacttcaaatgattataaatatataagtttaattagtagaattaattaaattatatattataggctacatgcagtccacccactaaaacaaagagctttaactatggattataaatatatgaatcacatacaatacaaacaaacaattatgccattaatcaagtcaactgtcaacaactgcaacatctagaaactgatttcaaccactcaaaattaataaataaaactttgttatggtttaagtcattggcatttatggattatagataattgtaaaatggggatcgataaggagacattagaatgattcaaagttatattctaattaatatatataatatatatggtgatgaaattattaggacacaaactcgttccaaattattacaattcaggatcatgaaaaataataacaaaaaaaaaatgctggttaaaattagttcgaatccgaaaaacaaaaaaattatttggattgggttaggatcaagggtcaatccttgtaacacgatatgtatttgattaattattttatttatttaaaactatatattttcatttaatgtaattatttaaatgcaagaaacaaattaattagaactaaatatatatgcaaattaaaatgtgatgatcgacatatagtgtaagataaatatagttgagacataaataaaatatatctacccgcaaataaaataaaagaataattatataagacatcattttttgtaaaaaaaaattacatttttatatttacaattttttttttatatttttacggttttttataaaaacaatacgaaaacaataaaaaaattacataaaagtaatgtaaaaataacatttaaataacataaaaaaaatcaacaacaaattaacaagagtaaacataaaaagactgtatgttttgtaaataaaataaaaaaattgtgaaaatatttaaaatccaataaaactgtacttttgtaatttttttgttgtttttatgtatttgtgaaataatctttt

SEQ ID NO: 18980 - DNA, 1407 bp, Cannabis sativa
ttttcttattgggcccattacggtccataattcagaatgggctttttttgtaatcaaaactaaagagtggcctcataattaacccatgtatgcatgcacttgcactcacgtacacgttagacaacttttgttaatttccactactaaggctttctcttattgggcccatcacggtccaaaacacaaatgggctttttcttctataatcaaagcccattatttatttttaaaaaagccttataattaagttaaccccatgcatgcatgcatgcataaatctacgtacgtaaaaatactaacatactctttaaattgaatgtaatttttgttttatgttcttatacagaatacgcttatacattacgagtagacgaaaagagtgacgtgtacagtttcggggttgtgttactggaactggtgacgggacgacgtccagtaggagatttcggagaaggagtggacatagttcaatggtcaaaaaaagccacaagttgtaaaaaagaagatgttgttcaaatcgttgaccgaaggttgaccgccgtccccgaagacgaagtgactcacttgttcttcattgctactctttgtatacaagagaatagtgtccaacgtccaacaatgagggaagttgttcaaatgttgtctgagttcacagatcgccatagtactactcctcatcatcaccaatcatcatcttcttctaagatcaaatgtgaaaatgacacaaaaattacttgccctaagtttagacaagatcttttggtttaatatgatataattaattctatatataagaagaaaaaaaagaacgtataattaattaaaaatagcatttttttttaccttaattttaatgattttctagagttgagttaaatgggtgtaatattgttatatagtggcttgtcttttttttttttggttgtacaagaatttgaggggatttattttggtttagatataggaagaaggaagagaagagagacaattgtggtcaattattatattagagttagatattattaattagaattaaaataatgaaatatatatagttttgcacttgttttcaaaacggtgcgttttatatataagtgggaaaaaagaagagcatgaaagctttaatttgggcaagcatggatgcccttttttgtattatatatctttatttaaaaaaagtagttatttaacactaattgttattttaacaatgtttaaattttttaattttaatatttaaaataagaaattatattgctagaaattaaaagtttagggattaatttgttagaaaataaaatttaatgacctatactttctaaaacatatttatttggggattaatttgtcaaaatttaagaattaacttatcaaaaactatataattcaagcacttaattacggctt

SEQ ID NO: 18981 - DNA, 4003 bp, Cannabis sativa
ggtggtgggttcggtgggttcttcgttcgagtggggattcgtgggtggtgcgatttcaaacgctagagagaaaagggaggaagagagagagtcagtttgaaaatgaagggggtaaaattgggtttaagtacttatattattatagccttttaaattcatttttatatatccatattaagattgttaatatttctacgcatagctgcaagaacattagatgtaacaatggaggaaaagaaagagaaaaaagagaaaagaaagaccaaaaagaaattaattgtattattatactagttacaatgttagagtacaagaaatggtctatttgtatctgctcaaaatagagagaaagaattaacagttagaaagtcacacactaactaacttacaacaaccttctaaccactttaactaattctaaacaaggagaccctaatacctccccaaaaactcataattggaaggacttgcaattgtgagtttggatcaaaaaatacaaaagctatggcctgagatagatttggtgagaccatctgctagctgatccgtggtaggaacatgcttgacttgaacttgttggcaaagtttcacgaacaaaataaaagtcaagttcaatatgttttattcgagcatgtaagacatgattggcagtgagaagcacaatgctaaggttgtcacaccagacaactggaggcttagactgaggaatttgaagtacaataaataaggagtgaagccaggtgagttcagataccacattagctaatggtttgttgctttttacaacactaagtattaagtttccacctaagaagatagcaaagcctaaggtggagcgcctgccatcgggatctgaagcccaatcagcatcacaaaaagcaacaagatcatttgaattgtgaatgtgtaagccatagtctattgtgccaccgaggtatcgaagaattcttttaacagcttgccagtgtggttgtaaaggggttttcttgaactgacaaaccttgttaacactgaaaagcatgctcaggtcgagtgattaattaatatcgcaaggctcccacaatcgacatgtaaagttaaggattgtcaaacggttcatggccatgggcagacagctttaaaccattcaccatgggagttggaagaggtttagcatcctccatttgagctttgatgaggagatctctgatgtactttgactgagatagatgaagcctttgtggagtagactgaacttcaatgccaagaaagtatcttaaatttccaagatccttgagataaaattgagaattcagtgtgttgacattgttggcattgaacttagtcacttcccgtgatgactatatcatctacatagactaagacaagtgtagtagatgaagatgtgtgtagaataaacagagatctatcagatttagatgaagagaatccaagtataattgtaacgcccgtaattgaaaacttggtaaaccgaaatcaatcttattatattatatttatatagtttataggtcgtgatcccgaacgtaaaacacagttgaaaatacatttactaatataaagaatcgtaataataatttatttttttacaaaatacaaggcagctcaaaatgctataagaccgaaaccctccaagttgcactgccgcgatatgtacaatccttgccaagctctaactcaccactcctctagcttagctttttccttacctacacaaggtagcaaactgatgagtcgacagactcagtaagatatgcataacatatatataagcaatgctatactgtctttatgcttaagccgtcctgagcccaacaactgagctcaccaaatggttaagaacgttctcaacggaagtacgaccacagtaccatatgcacaaagtaccaactctgtacttgtgttggtagggcccttattgtactcccagaagttactaagtgttgtaccacatgcacgacgtacaccctgatactcatgctggtaacactgtaactatcctaaaaccctacactgtactaacacccttaaaactataaatttagcagtgtgacagataataatatgcattcattcacaatatatgctttatgctatcttacctcattccagattcaagcgtgtcggtcgacttgaatggaaaatcttcgagctgaacggaggtccgaagtcacattacacaattgggtaaataactcaattaaactgttctgaaactctagctcataactaagggtaatcttaatgacacattcaatatacagctagcccaaataccaaggaaaaccaaactaagctcggaaaaatcacacgaatttggaaaagttacaattttaggggttctgcttttaactggttaaccagttttacaaaccttgtaaaaccagtcgactggtttgcactttcaaacctgcacaactcggccaaatctttcccaaacacaaccaaactctcaagagcacctgtacacatattctagaacaattcccacacaaagataactagaaaacacacaataaaattcaacatgccattgttgagtcaagtttgattttgctcaacctcaaactagacaattacaacaacacaaacagtcctatatcatcaagtaaaacctattaaaactactcttaattaaaactcaaacaaacagaaccaaaactcccaaaattcaagacttaaccaaccaaaaccttaagaatatctagagtagggtttagagggtcataccttcaatcaaaggcttcaaacctaaaccgaatcttcaagataaacaacgcaatttagagtttcacctctggttcagaaaatggaagaagaagaataggcaatctaggtttttttctccatttcactaatttcttattttctttcttttcttcatgaattattgaataaaagggttaattaaataaccttacttaattaaatgcagttgtaaaccaaaggtggggacaactaaaaggctctatatttacccatgtgactaaaatatcctccgtcgcattttccatcgcaaccgagctaaaattacaagaacaagatattttacagaaattataaatgttcagatttatccctcaatagtagtataaataataataaaattagtatttataatctcactaatctatacctaaatcatgtagttattacaacaatgaggtttgtgtgcaacttatcgaactaggcccgaggggcctgattgaggccatataaggccttgtgtaatttgcacactagatgaggggctgagggaagaacaaacctagacggttgttgcatatacacttcctcttgcaaatcaccattaagaaatgcattgttaacatctaattgctttatgtcccaaccctttaatatttctaaagaaagaacaactctaatggtaaccggtttgaccactggactaaaagtttcattgaagtctgttgatgaaatctttttacaacaaggcgagctttaaactttgacatacttccatcagggtcctctttctttttataaagccacttacaaccaatagcttctcttccttctggtaagaaaacatatgtccatgttttatttttaaggcaaccatttcattagacatggcacaattacaataagcactttgtaaggcttgtttcacaattaagaaaaactaaagaagtataaggttcaaaatagatttaaacttatgaccactaaaataaaaagatgttgctaaatcattattccacttaaatttagcttgtaaattattattttgaattatattaaatgtttaactaagcacaccttaaaattaaattctggattcgccactgtagatcgtttaataaaatgtaaactaacaccatcgaaactaaaataaagtctcatgtactccataatgccaaacagatcagagtacataaccaccgaggtacgaataacttgaatagtgatgagtaggggtgtacaaaaattttcgtaaaccgctcaacccgaataacccgcccaaaccaaaccgataaaa

SEQ ID NO: 18982 - DNA, 5613 bp, Cannabis sativa
ttttagaaagaaagaaaaaaaatgttgacacaaccacatatacatctcaagatttttttccgggtgtgtggtccatggttttgtttaacaattaacatacccttaggatacacagtacactttttcagatggaagaaacctttccacttttaccttaaaaatgccgtacaaaacaaactaacatttttcttgtactgcactaaaagaaaagttggctcattgtattgaagcatatattacatcgaaaaacgacattccatatccctaaacgacatttcatatccccgctctgaaacactacaaacatagcatcactctttaaagccagatgcttctcctcgaaatacattatgggacaacaaatcatcaaaatatatatagtaaaaaaagaataccattaaaataattaattaaagaacaagtaaaactactactactacaaaaattcagagcctgttttgatttcagggctcttaaggtggctaagccatcatggctttaatggcttttagaattcaaaccaaacaaatccttgaacgcttgctgagcatcaggaggaatattcatgggcaaaggagccatgaaattcacaagcttttcttgaacatcatatctggcaaaagaagttacaagttagtaagcaggtgaattgtgataaattcttctattctaatttccagtaaatgcactaagattcctagctaatcatatagctgcttcaagtgatgaaacaaacaaagtattattaattaccttatcttgcgtccctttgaagcacgtctatcaacaattttccttttcttggtttgcaaccttttcagagcataaaaggccgtctctgtggacagttataatgtgacaaatttaacctcatgaaatatttagtatcttaattctacacagtgaaataatatggcaatgcttccttctcagagtcagaggaccaattatgaaacaagaaatgtttgttttagtggaaggatttttttttttcaagaagcttagcctaccaaacaagggagaagattttgaccctctctcccacctcgctccctcgattaatcatcattgcatttatctaacccaacaatcattggaaagcaaggattctagtaaatgataggtagatctccataaagaacaaatcttaaacctcggtaaaacatgagcctaatcactgtacctaaccctcatgactatcttctctaccaatgaaacaaacaaattagaattatgaaagaaaagaaaaatattatacactctatttaccctcccttttttggtttttccttccccgggcattatacgttccattcctatcttctcccactcctaccaaacatatagcataaaagccagcctcacttttttttctgaaaaaaagactaacacgtgaaatgaaactataatcgctcaattaatcaaattcagccaaagaaaaggccaaaggctcgacaaccaagcatttccacccttcgtatacaaagcaggcagcatattaacaaggatcaacaagcatcactcatatgtcatgtaaagacaacagaatttgcacaatttaataataccaaacatattgatatttaagaggtcacagatctacgaaaaataatgatttaagcttattaaaaggtacaagatgcataagactttaccattagatgttgggtcaatcgtttcaaaaaactccttcagtaaatgctggtaaaactcagaatcatctaatagttctggatcaccgtcagcctgtgcttcctaccagagtacaagccatacttaattacagatcaaagttattaatgatataattaattttgtggccatttagaaataggatattgaaatacaagtgtaaattatactaatgtttctttagcctgtattctacataaaatttcactttcacaaataactttacacttattatagcaaaatgaactcaggtatgcaccataagaaagttacctctccctttagattagcttccactccaggaacctgctgttcaaatgacatgcacaagcaaagagataaattaagaaaattataaattacaatagagtccaggacttaacaggcataattggcggaaactaaatagcaatccccttattctaaattaaagtaaaaaaaagacctataacttactgtcccaaatacggcaacagttgcttttctttgctgcatctgcttgatcatcctacttggatctctcatataagcagcaacttgttcactaatattctgcaagtaggaaataaaaaagtgaatcttgttgcaactctggcagggtagcctgactataaccaaaatcacacagctattacttgattaaatgcttgtagtttgcctttaatagcggcagcaccggttgtcacttgagtcttcctttgccacttgtctactgacttgtctctgaaagcagctattctacaaagtacgaatatgaaagttgtcatgtcagactaggcacgatttataattttaaaatgcagcatatatgactgctaacaccaccaacgataaaacattaagcaggtacatcaaagtgcaagcatgtgactgaagttgtccgagcattgaacaaaagagttgtaatcgttaagcataaatactatttccattctgaatcttctgccttatgaatttacagagttgcattttattatgtattcaatatcttgtatgtgataatgtgcatgagtaggaaggttaatggatttaccagatatattattttcattctgttggcttctgcatttaacatgatcttacaaaatttcatttatgtattatctatcccttctagtgaaaaaagaaaacagtgatcaaacctaaataccatcacagtttttacgtaagactaggtcatcaatatgaaattctgtataaatctattactaattactaatattaataccaaaagaattaaattatcaattaataaaagtttccaaagaatagttaagttagcttgacaggatattcatgataaaaatgctattatcagttataacaaggcttaaatataatacaaaattgatgtcatccacagagaacatggaaaaaccaaaagacattataaacacctcataaatgaataaattttaagtatcaattacttttaactttttttttataatttatgtattggcaaaagaaaaaaagaaagtgttggggagggggagaaagaataacaagtatctgaaaagccatataaaactgaccatctttaagtccacatagcctgatagtatatattagttgaacatagcaaaataatatccaatatatgattcaataccttgcatgcaattgagataatcgagcccaatcttcatcatcactcacagtagagctcttcaaagattgcaaattcttagacacttgtccaggtttaccttaagaaataggaagatatgtaaacatccacctcatttttgtagggaaactctgacatgcagagtgaaagttatatgagcagtaacataatccatcatagtgttggtaacagtgaatgtattaaagaacaaataatgaccacaaatatcaaatcatcagattttgtgcacatgtaatttattcttctggtctataattgtgtatttgaaagtttgtaattctctgacagtccaaaacattacattcgaatacaggacatagagtagcaagtatgataagagtcttcatatacaaagcctattctactaatctgtgtgatgtttaatcagcacaaaaacaaccaaaaaaatccaaaagcagatcatacataccatccgtggcttgaataatagatggatttttttcaagtaaaacctgaaataacaaaggaacatgatgtcattgtcagaaaacatgtgacaatattaacaaaaccaaatatgtgcatgtccattgttcacattaattaaagcataacaaaaaggaaacacaaaaggatttagtacctcttgtagttccatcatagaatccaaagttttctttgaagatgtaattaggtcagaatacgctgcattgacactctcctctgtatcacagaatgaagacctaagtggatcctgcaagcgaaaccatatgactgaccacctgaatatgtttaagcaatttgaatccaaattaatgagtttcaaccattacaacatacctgtggtaatctatttgaacttgtgaatgctttctgaagcaaaaatctaagctcaagagttttatcccaaagagcctttcaaaaacaaaaaagaaaagaaagaaaagagtaataagtttattaatatgcaaacgaatataaaaaaaataattaaacaaaatgttaaacacccagtgagtgttaaaaccctgtcaacattttctctgaacgaaacttctgaaaatactagcaacaaaaataatctgtaagattttacaaaccagatcctatatatacagtatatgtgtgtgtaatgaatggaatgtaattgttattattatgatagataaatagtatgtcggataaaatgaaactagggcatcagtgtaaatttgcagagtacaagagcacaccttttgattcttcactgcttgtcctttaagaatatcttcatccttatgacgtttcaaattctgaaagatatttctaatgtgaaaaagaaaaaaaaaataaaaaacaactgagtcaccgagtacaactgtttatatgaacagacaaaaagaaagaacaaatgagtttatgtttcttgcaactgagcatgccatgattcatgcaaatgggcatgaagatataagtcttactgctcctggtcgcgaagattcatatattctttctcaagctcttccatctcagcatcggtattttgcttattactattttgattttcttctccctcttcctcttcgtcctcttcatcatcgtcgtcagcactgtcatcctcatcctcgaattcatcatcatcttctatttcattctcttccacctacaattattattacttatatttttctatatacagattaaagaacagccaaataaaaagttacaaagccaaaattagacttacacttagttcatcactgtccatatcaacatcattatcgaattcatcatcactgtcctgagacttttttgaacgtttacaaggtaacaccattttgaactcctagaattcaatacaataaaaatccttttaagacacaatttaagcatttttatcttttgatgcatacatacaatcctctctgctcagtacctgtcggaaacggccacggtatttcttcggtgggcgggagaaccggaaacgggcgccagaggaaaagagctgctctgctgtcagtggcgtcgaagagggagagagccgagggggtcggggcgtgggattgaggacgagagaggtgaggtcgggaggtggccgtcaccgtcgggaagaaatctttgcagttgcagagggagagacagagtgacggagaggaacgggactataactactagggtttttgttttcgggagtatattattttcaaattataaattaagtatattttaatttttttttgaaagaaaagtatattttaattagaagggttaagtactagaaatttttacaccaaaaatacaaattacacactttattacatataaaccta

SEQ ID NO: 18983 - DNA, 6910 bp, Cannabis sativa
  modified_base (3061)..(3063): a, c, t, g, unknown or other
  modified_base (6208)..(6210): a, c, t, g, unknown or other
taaattgtaacagaaaattgtacagaaacccctattgcaactagcgctgcaacctaaattgcaacagaaaatcgtacagaaattcctattgtaactggtgctgcaactactttagaaacccaaaccgtaaatttaaaaaaaaaagttaaaaaaataatatatagagtaattcccctttaattattatagtcgtcaaaaaataaaatatttatctataatcagaagttaaattaaaatatttattgcacaaattgctttattaaatattcttatctttatttattaattaattaattattttttttataaaaaaaacatattatataaaggtcaaacagacattttcttttctttatcttttatctcactttctctctactttactttctttctctactttctctctctctctctactctgcattttcttgcttcttcttcttcttttgagtgaaactcaagcaccatttcactatcatcatcataatcaatcgtcattagtactatctcctttcactacactcaaaaaaaaccagtctttttcttttttcaattttcccgagaaaattttctgggtctctcaattttttcatttccctcgaattagttcatttgagtgtgtttttctcatttgggttccttttaatttcgatgatatagagaaatttataatttttttcaagctatggaatcattcaagtactgtatggaaattcaatcgaacaacaacaacaacaacaacaacgagctgaattcatcatcatcagagcagatttcggtttctgattgtcttttcaaaccaaattgggagcaacaatcattggatcagaacgacccatttgaatcagctttaagttcaattgtttcttcacctgttgctccttcaaaccctaaccttaatggaggtggtgatggaattatgatcagagaattgatcggtagattgggtaatatctgtaactctggtgagatttctcctcaatcttatatgtgtagtaataacaacagtaggaacaattcatgttatgctactccattgaattcaccaccaaagctcaatttatcatcatcagtagatcccaatccaatcagacctaatttccatatccctaatccaccaagtttagctcccttttctggtgaccctggttttgcagctagagctgctaaattctcttgctttggaaataatagtaataattttggtgaattgccttttagatcagtccctagaattgatcccattaaaccaccttcaaaggcttcacctttaaccaatcaacctcatcaaggatcttcaaggtcttcaacccctgaaaatggcgattcaagggaaggatcttctgtttctgatcagatcccaactgggaaagctactgagattattgagcccaataataataatggtaataagaaaaggaaagccatttcaagaggaaaatccaaagaaatccaagttaaagattctaaggtaaattttggtttatttgtaattgttactcttttcccattttgtgaattttgttatattgacaatttgatttgattttatatttataggttgttgaagcaattgagaatgatgaacaacataatgtgaaaagaagtaaaaaagataataataatgataatgaaggagttgttaaagggtcaaaagatttgaatcagaaacaaacaaaagataataataataattcaaaaccaccagagccaccaaaggattatatccatgttagagcaagaagaggacaagctactgatagccatagtcttgctgaaagagtaagatttccttgttaattaattattattaactcatttttatacaagattaatcaagctcaatttccattgacatgtctttggttttgattattacaggttagacgagagaaaatcagtgaaaggatgaagtttcttcaggatctggttcctggttgcaacaaggtacttaaaaagattgcattttttttcagagatttaaatgattgaattattaatttactatattaagaaaatggtttctgaatttgcaggtaactggtaaagcagttatgctagatgagattataaattatgttcaatcattacaacgacaagttgaggtaattaatatatattaagcttctaaaaagttgaatttgattagtattttctttactaaatttgtgttttggtttggtttcagtttctttcaatgaaattagcaactgttaatccaaggatggatttcaacatggaagctcttctatcaaaagaggtaattaaactttataaacactcctttttcaacccattgggatttttgacctgtaataaacttgtttatatatatatatatgatgatttcagatttttcagtctcgtgggtcattgccacatggcctttatccattagattcatcaacaacagcattcccatttggatataatcaccaacaaataatgccaccacaatcttcttctttagaggctcaattctcaataaaccctttaaatggttcaattcatagagcttcaacaaacatgcaaataccttctggatttgctgaacatgcccaacaacaacaaccacaggtgagtgttttttttttaagggtcattcattaaatgagttctcctttacataataatcttaaaaattgaattttttttttttccttgttaattctgcagacttctactttttttgaggatgatcttcaaagtgtggttcaaatgggttttggtcagattgaacagcacagtcttcaaggtataaaaataaaatacatatacacccaagaaataaaaaactcaactttattaattttcttcaaatttgtctaatctttacatttttgtttttgcaggctcattgactcaagctcaaatgaaaattgagctatagtaatataaaaaaaaaaaatgattaagattattttggattaactttctctctctctctcttggattttctcatttgaggcctcccaaagccaaagccacaggagagaaaggccctctctgtgtatataacagagctaagtccccagtttgagtgagaagaagaagaagaagannnagaagaagaagaagaagaaagaatcacttgagctaggttccatccattattggtttttattattattattattctcaattctttggtggattcttttcaagaaaatcctcattaaaaaaaaaccttagagaatttactaatttgcttcaacaacaacaacaacaacaaaaaggggtccagcaaaaatgtccaatttctgtaaagactcaaacaaagaaaagaactttaccaatgtaaacttttcttttttgtgtatgaacttactatttttaatactatgatcatgatcaactgattcattgagagatttcattaattattgtgtttgttcttatagttcatagtgttcatctttagacctttttcataagaaagatttgatctttgataataaaggtagaaactttaagttgggaaatctatttatttattttttttgtttttggggaaaatagtattagtgaaaatgacaccattttaagttgctatcaaagtttagctggaaaaataataaaaaattaatttttttttttaatttttgataaaaaaaataaaaataataataaaggtcccgcaatcaaagtgatattatcttaggttaaatggagtaagttgtggtttttaatagatatgtactggaaaccagctgttgagtggggacaattggtctctttagtctatttttatgattaagaatcattcataataataataataataataatataaagagatttcattatcattttgatgattattatttattaaaatgtagtatttgagctggaatccaaagccactttattgttggagaaaatcacttactaaataatttgtgtttttcttgggttgtggtttaagtattataagtaaatataaaatgcaaattcgacttatttattagttatgttaaaaatagtatatttataaacggatttgatataatctaactcgatttattttacttgtttatataaaaaatcgtgtttaattttagctaatttaatttaattttaacatatttataattacaatcgtgtgtgtctaacgaaaatgtctttggatcaacacaaaaagacttttttttctttttcaaactttattttttctttttaggttggaaaattgaaaattttgaagagagattgaaaagaaaagagcatataatgtagaagtgaagttgtgacttggctgaggaatcaaatgaaactatttgcactatgtttgccatgaatgaaggaatgaagaaaaatactttggttagtctacaagaatcaaagtaatggaattattcttatcttttttatatataattttagtaaattgtatatgcaaactttattaattaacaagaatctgaatacaatatagcatgtaataaattaaaaaaatatatatatatttttaattatacctcttatattttcatatagttttccacattaattttttttatcctaaacatcattatgtaccatttaattagtataatttaatatcaattttttaaatttttttttattctattcattttacatgaatgtttggaccataaataatgtgtaacatcaatcactcgatgcgaaatacaataatttgtacaatttaatttttcgatttattttcacatcgagttaaacatagttatttcaattttctcttattttcccattttaaattttcaaatatctcttacttttatattctaccaaacaaagagttaattaaaatgccaaattgagaatattttttatttttttaaaaattagcaataaaatgtaaattggataagtgggagaataaagttgtggaagagttgagatatggagaagattgatagatacctcattaaagtgagaatgaaagtttccatcaaagagtgtcaccactcataaaataaataaataattaaataaataaatactcacaattctttctttttctttttggtcactgaatcttttccattaatattattataccttatacttataaataaataaataaatatgtatctatacataagtataattgactaaaaagcattaatattctctcattctttttttttgggcttttttttttagtatattattaataataatacattatttaatataagactttaatgaactacttcccaagctggcttaatcaatgttatgggagactactatttattattatatttgtggcaaatttattttaatatttataattattacatatataattttaataaaaaaaaagtagcaacaaaaatattttattttatgattttattacagtcgtatttttttagccattaagtatcaactcaaaaatacgtgagaacttattattagactgtgtattaaataagctaaagaaacatgtcactatgtgtttttgagctggcacttaacaggtttaattaatatttaacaactaaaaaatggtgcgattgcaacaaaatcatgacataaagtacttttgccacgatttattttattaaaattatgtatgtaataattataaatatttaaaaaatttcgctgcaaatatctcataattaacaaaaattattacatgataactaactaccatattttttttttatttttttaaagagtattaataatatttaacactttcatgacatatcataccgttaatagtatgaacaaaattatttaaaaccaaatttataaataaaaaaaaagacactagtaatattgaattttttaaaataataatagataaaaataaataaatttaaaactaatagtgatcaaaatatgttaaaatttaagtcaatttcacttgccatttgccatgtgccctaacttcatatatatcattatctaataataacatatttttacaatttgagttgtcaattacaaatataattctccaaattggtttctattttttttttctctttaaatgaatgagaaagacttttacaaaattagatattttttataatgtatttcattttcttttatttaaaatattaaaatattgtacaaaagataacaagtacacataacaatattgtttgatcattaaaaatggtcggttactaaataaaaatttgaatttaattaaattattatatttatacacattcaacagctataaaaatatatatatatatatnnntatatatataaaaatatacataatcttaatatcttatatatgcatggcatgtgaattaggctacctaacaagataatgtcttttcttctttctttcttaatttatttatatgttttttaattaattaattaatattggtcaaatgcaaagattttgagtagtttatgtaatgtaatccaaaaaaatataattcaaaattaactaatgaattaattaataggttttgtggcaaattgttgttaggtacttggctggatcttgagtatcatgttgaaaatgacatcaaagcaaataattcaattaaccaatctcatcactttaatttaatcatcattcttctacacatacatatatacttataatcaaaatatttagaattcatctgaatttgggaactactttttggtttttaacatgcaatttctagcctaacattacttgttttttactatgcttactttaaacactattcatttaaattatagctagtaatttgcggtataaatatacttaagtttaactcttggtcaattgtaaataaatatctaaatttaatttttaacggtaataatacctaagttatatttctagaacttctgtatgtacatgatcgttaagtgtcaagtcaatagctacatgacagtccctgattgatctatgtcattaaattttatttttatttaaaattaatataaatata

SEQ ID NO: 18984 - DNA, 6382 bp, Cannabis sativa
aataaatttttaatatatataaatctaaaaatgaaattttaagatgacatttaataataaattcaatctaattataatttaacttttagcatccaattcaatgaaattgtaattaattatctaagggctcgttgttgtattgtattaatattatttaatacaatacagtgtttgatattgacttatattaactgattgtgtaaagttataatatatttttaatacactcgatcctaataccaactatgggtccgggtccaggtcagggttcggagtccgggtctgggtccgggatccggggtctgagtccgtgtccgggttcgggtcctggtcccggtctgggtccgggttccgggtctaggtccgggtttgggtttcggtctgagtctgggttcgggtctcggtccgaggttcggattcgggtcccagtctgggtccagatctgggatggattggtaaattctttaaaaatattataatacaagttaatacggaacataaatattaaaatatatattatattaaaatatttggtcgtaataattaatacaatacattattttattcaaatataataattaaatcaaattgaatgtgtagcaaagcaagtaactagagccgagccgagttggcttgagttgagacacagtcaaagttttcagacatttccaagtcaaaatcgtcgagtttgactgggcatcctaagctcaagtgcagtttttagtaaattcgattctttatgttacatatatttaccaaactaccctcatcattctatccaaaattccaaaaacttcccatgtagtgtctctaacgacgatagtgtacattattttctgacgtatttgccccttaagggtaaaatcgtcatcataacagaagattattttgtttttaattattttggtaccattataaatatgaaagtcctgtaacgtaggttgggatacgacgaacttaactataataaattttattttttattataaaaagatcaacggctggcgatcaaagaaggagaattgtttttaatgaaatgacgaaactaccctttgacaatgaatggattgattcattccattgaggttattttcgggaataaaagatctcctgcgtttagctgtactcgaacttcaactagtttcggttgtcttattgtcaaaataaaattaaaaaaaaaaacaacaataaaaaagaatttgtttttagttggcttctagaaggctagtgtggcaacatacatccaataaaaaagtgccacgtgtttagtggttgtagcaacgagcaggtcacttttgccacctgattaatacgacgtgtcggcgattatttctaaccctgaaagataggtcgttgcaattaccatattacccttatttatcttagtatttacaccctaacagtttttattgtgtaagagtgtaaatcggttagtttgatcgggttaccataaatcttagccaatccaatattaatatgggattacaaatatttaattataatctgcttgattagaaattaaaaaagttttaatccacttaataattttgtagtttagttagattaacccattcaaactaatctttacattttttttataattattattgtaattttttgaacttaaataattaaatttaaaaaaataaaaatatattatttatattttaacttaagaagatattataattttaataattaattgtaaaaactttaatataaaataaatataattgagtaaacataaaatatttaaataaatattaatcaaaagataataaaataataataataataatatgatttagatttatattttaattttaatatccaaatataataaaaattattaactataaagttaaatactgtaaagaccaaactttaaatacaaaataatttaactaataaatatagtttatataatatattatatacactttcattaaaaaaaaatgtataaatcaatttaattaaatttactcgggttaattgagtagtttagaataatttataagccgcttaatatatttatttagtagtttaaatttttattgtattaatttaaattgtattttttttattgatttattcagtttaatttaaatgatttgttcgagttacactgtttgtgaatatttttgaagacctctaatatttctataatttattttttctattttaagtcaagatgacataatcattcagtattatacttacaattattatccacaataataaatgtttggcaacaaatatctagtttaagtaaaaaaaaaaatattattatgaaatttatctatatgtgtgtgatacgtaatgattgtgataatgattgtgatgttacatttttaaatgactgaaataatatggtcacataagataagtatagaatgttattttaatgtttttgattttattttaaacaaaaaaacagtttgtgatttttttttttctttgtaataaatgattttgtattgaataagagtatactttacttgtaattgaaactaaatcatctagataaaaagaaatacaataaatgaaaaattaaagagataatgaaagggtattttcgtaataacaaaaacatctgaaatttgttttggacattttgggaataaaaaaaaaaatcaaaactttctctgtacatctctaaaaaaaatattagtttggagggaagtctctgcgaaacaaggttggacctctctctctttctcttttctttcaatccaaaaagcaattcacacgcttaaattaattaaattgaaaaaagaaaaaaaaataccccattttcatcgtcttcttccttgaaaaagctctttcttttcaatccaatttaaataacttcttctcttccatttcatccccaacatcatctttcttctccacccatctctctgtcttgggctctacgcttctcaaggtgtgtcctttctgggaaattccaattgggttttcttttaattgttttgtagtgaattgggatcgaaaaagtttggattttgattgattttgtttaagaacgatttatgggtaattgttgcgtaaccccagctggagtttcatctccagataggaaaaaaggaaagaagaagaagcaaaacccatttgctttagattatggggctaatcaccatgttagtagcgggaacaagctctgtgttttggcagaaccaactggacgtgaaatcgagcttagttatgaactgggtcgggagcttggaaggggtgaatttggaattacgtatctttgtacggacaggtctacaggtaatacttttgcttgtaagtctatatctaagaagaagcttagaacatcggttgatattgaagatgtgaggagagaggttgagatcatgaaacatatgcctaaacatccaaatatagtaaccttgaaagacacttatgaagatgataatgctgttcatctggttatggagctttgtgaaggtggtgaattgtttgatcggattgtggcaaggggtcattatactgagcgtgctgctgcagctgttaccaaaactattgtagaagttgttcaggtaagaattttttgttttcttatttataattttgatgttgttaatcagatctgttctttgaatttttgacttttttgttgctatttgatcttatgtttgaagtagtagttttgttatatttcatctgaagcttggtaaaaaaagatagtatttttttttttactgaattagttttcctgacaattgatattgagaagatgcctttttgcaagtacagaagtatttaatgaaagttcaatgaatcgatacttgtacctttgttcaccaatatggattcccaattcacgagattctttgcaaccaaatgcttttattcttcacctgcttttgtagtctgtaaaaatttaatattgattgaaactggtcacgttttctatgcatttggttgctttatcttttcttccagttgtgtagtggtagtgactcattaatcttttggtttttgcaggtttgccacaagcatggtgtgatgcatcgtgatctaaaacccgaaaactttctatttggtaacaagaaggaaaccgcgcctttgaaggcaattgatttcgggttgtctgtcttttttaagcctggtaatgtgtttgtcaaagctaaatttgattgcattattgcagtatagtatattttatcaaaagttgcttcctttggaatacttttagctgatttttttggaatttatgcaggtgaaagattcactgagattgttggaagtccatactacatggctcccgaggtgctaaagcggaattatggaccagaggttgatgtttggagtgctggagtaattctgtacatcttgctttgtggtgttccacctttttgggcaggttggtttcttgtctcattttctttccattgtaggaactcggagaaacatgtttaagaattgcatcgtacggtctccctatgcatgaaaattatgtgcatggcatgattgcatcaacaaaagctatcgtatatttataccattagactcgtgtttgtttccatttggtgaagttttcttcaaggaacattgtaattttggtgggattgtaaatgaaaacgtttatttggaagttgatatttagcaagtttggaaagaattattaactttctactttggaaacttgtgtgtaacgtttaattctaaatctgattacttggtgtgcagaaactgaacaaggagtagcacaagcaattatacgatcggttttggattttaaaagagacccttggcctaaagtttccgacaatgcaaaagaccttgttaagaagatgctcgaccctgatccaaaacggaggcttacagctcaggaagtactaggtaatgttatacttaacatttaagtaactaacatttacagagctaaaaattagagtaactaacaataagatcctatctactaaactaaatgcagatcatccttggttgcaaaatgcaaagaaagctccaaatgtgtctttgggtgaaactgtgagggcaaggctcaagcaattctctgtaatgaacaagctcaagaaaagagctctgagggtaacttttcgacatatttatttatagttcaatttattatttttggtgggatattttcagatctcttgttcttcttagcatgtccttttaaattttaacaattcactcggtgatgatatttatttattttgaatttacaggtaattgctgagcatttgtcagtagaagaagttgctggtataaaagaaggatttaatcttatggatactagcagcagaggaaggattaacacggatgaactaagagccggattgcataagcttggtcatcaaattccagatgcagatgttcatattctaatggaagctgtaagtataccactcttttcgaaccattcactttttcttcgttaattctggtacaactacaatatgactcttaatggcactgattcaagcaaaatgtgggatgtattactgtattactagttcactatacatgaatctaactagaattgaatttacagggtgatgtagataaggatggatatctggactatggagaatttgttgccatatctgttcacctaagaaagatgggaagtgatgatgagcaccttcacaaagcctttgaattctttgacaaaaaccaaactggatttatagaaattgacgagctgcgacattgcttggctgatgatgttgaagaaaacaatgaagaagtcgttgaagccattatgcaagacgtggacaccgataaggtatgataacataacaccaccgcccttgtttttgttcaacatcgatcgattatgttcttaagctttattgtagtatttactcaatttcctttcgtgaacttgtaggatggaaaaataagttacgaagagtttgctgcgatgatgaagtcgggtacagattggagaaaagcgtcgagacagtactcacgagagcggttcaacaatctcagtttgaaactgatgaaagatggttccttgcagttagacaataacgagagtagatagaattggaagaaccaaagagcaattattattattattttttggaggagaaaaaaatcattgatttttttaaaaaaaagaattattattttggtaattattctggttgattttctaatttgagacatcattctcctttttggttttgaaaagggttggaaagagtgttgtttttcatttgagggttggatgtgttttcatttgtttgtttgtaacttgtaagggagtacttggggtaaagaagttgtttccacaaaccaaaatagtgaaattgtgattgtaaatattatatattttaaaaattggaattatttttattagaatcattcccattattctttcttctcttttggtttttct

SEQ ID NO: 18985 - DNA, 3479 bp, Cannabis sativa
ttccggtgttattaattgcatttattattgtaattttggtttaaatctcatttattacgactccgcgtcggttggctaaaaatccagtcaacagtgacatattaaatatttatgaaactgtattttttttttaattttatctatacatactcgattattaaaataaataaagttcaaattttaaattattgagcctaaactaaaatatgtagtattaagagaatggttgtgcacatccaaagtgaatagtgagctagtttggatggataatttctatcttttctttcctatatacttaattctcatgtttatcaatgaaatattaattatttaaaaaaaaaaaaaaaaaaaagtccaccggagaggagaggcagagtgtcgacggagctcgcttcttctctcttaaataaatttcgatataatctgattggataatttaaatttaacataatatctaattaatggtaaatagttgcgaaaacgcaccgttttgataataaacacagcagagcagagcatgtcgcgccttatccaaaatcttatcaatggtttcttaaaaaaatccaatataataatttcaagtattcttacattgaaatttcaaaacatatatatatatatatataatcaatatcaccaatcattagtcaatagtcattattacctctctgctcataaatcaatcaatggagaaagtttcagagaaggagctcaacactatgagaaggagaatggcttctgtagccaaccatctcgtctcgggtcattcggatcatccgaacccgaactctatcgggttatccactacatccatgaacgaccgttatcataagatacacggtgaagtttcgactcaccctgtcgtttggaaaaccgcttctgatgattccggtaaggactttgttgacattatctacgagaaagccgttgacgaaggaatcgcaaaggttacaacattgactttaacattaatgtttcattatcttatttttagttgagtttgatgataattttttttgtttgcttagattacgattaatcggccggagaaaaggaacgcgttccggccattgacagtaaaagagctcattcgtgcttttgatgatgcaagggacgatagttccattggagttataattctcactggaaaggtctactttttcttctaccatttttgtaattttaccaaaaaaagatagtcatctttcaaaatagaaaaattggttatttctggttaatttagcaaatttgagaatagagtaactagaacctcttagttaacttttgcgccaaaaatttttaaatagtttacaaagccaaaaatatatttgaagttttttgaacgtgcacttggtaactggaatatcaaaaattctgttttcgacacggtaaactattcgaaatttttcaaaaatttataaagataacactgcaagtgatttcaggtgtagaggttgattaagaggttctaattagcactcctctttgaatgtaatgcatctgtgttgatttgaattagggaaatgaggctttctgtagtggaggtgatcaagctttgagaaaggctgatggttacaaagattttgacaattttggtcgtcttaatgtattagatcttcaggtacattttctttttcaaaacattcatttgggttattaagaaggtttgttcatttttctttatgtcattattatttcagatacagattcgtcgtcttccaaaaccagtgatagcaatggtatatactaaccctgatcctaatcttactctgttcattcaatcctctcaataaaacttacttaacatgatatactcactaggttgctggctatgctgttggaggaggccatgtattacacatggtatgtgatcttaccattgctgcagataatgctgtttttggtcaaacaggtcctaaggtagtacttggttttgaatcaaaattatagtccagctttaaaaggggtttttacttgtattgtattaatcaaacttgaccaaactataaaattttattgcaggttggtagctttgatgctggctatggaagctccattatgtcccgcttggtaagcttttgaactgagatttattaagaatagaataaatgtgatttgtctccagaattattaagatacttgttgagttttgaactataaaaatcatcagtttaagagtatagaccaaaaaatatatgtataatatgttacattcttagagttgatatttgtatgtttaataccaatttcaaataatttaaaattgttaaagagattttctactgcaatcatacctccaaccctttgtcacgtaggcaatttgtttaaaaatgagttagatgtaattgaaagggaatatttaagattttttataatttgaatggattttttgccaaaaaaaaaaaaaaaaccaagggacaaactttacaaagatcataattgagataaaaaacaatcttacttaatcttaagaatataacccaattaatgtgtgtgatccattatgtatgggaactactaaacaggttggtcccaaaaaagcacgagaaatgtggttcatggcaaggttttacacagcttctgaagcagataaaatgggacttgtcaatactgttgtgccagtaagttattttgctttattgaaataaaacttatttgaatttggttaaattaaatgattctgttgatttgtccagctagagaatttggaggaagaaacaattaaatggtgtagagaaatactaagaaacagcccaactgctgttcgggtcctgaaatcggctcttaatgctgttgatgatggtcatgctggccttcaagtaagtactaatataagaaaacagagtttagagaaaccaagagaataatttaccttacataaaaaccccttttatgaatcataatagtagtctccattgattgaatgtactgagttgaatcattcaatgtacatgtaaatgatgatcatatttgattagttgttttgtgggatggatgtaggggcttgcaggagatgccacacttatattttatggcactgaagaaggtaatgaagggaagacggcttatatggaacgtagacgccctgatttttctaaatttcctcgacgaccttagttgcattgtgttagtgttaccattatttattaatgtaaaaatatcagtctctttttgaaattccaagtggtatttcactattttgtgctaactagctattaagattgaacattatcacttatcatagcattttataattgattagtgatgtttttatattatttattaaattaaaatataaaaaaaaaaatgtcttacttaccataaagattatgttagaatctgtagcttctaaattctaactccaaaacacaagaataatacataaaaatggttttgtggtattttttaatttagttatgcttccacgactaaaataataaaattcaacctcatggcctattaaccaagaatctgttagt

SEQ ID NO: 18986 - DNA, 6593 bp, Cannabis sativa
aatctttgagaaaaaaaaaattagtcattgcaacattgatatgtcatttgaatatgattatatatacgtaatttttaaaatttttaaattttcttaattaggtaacgtatctgataatgcatattatattatattcttaaccgaaactcacataatcaaatttgaatgtgtctatatgtaagttggattcgtaaatttgatataaagatttttttgttcccaaactttatgaaaaatatagtgtaaatcggtttaccataactaaaagagaaaacaatcaaatttcttattacaaccatttcaatttaaaatataattaaaataaataataataaagttacagatatgattaaaaatatttataaaattttaaatttaattttttttatataaaatatttacataattttttttttattttaattcaaagttaaaccaataaatttaaaaatatgattaaagatatttataatattttaagtattttaaatttaaatttctttatataaaatgtctacataatttttatttttaaataaatataataatataataaaattaataaaaaatattctgttaattaataagatattctgttaaagttagttaaacctaaaaaaatatagttaaactaaaaattctgttatatagtcacacatatatatctaagtgttagtgtggtgtgtgtggggagaacaaaattgaagccatgagtttcggccattaataatattgcctttattttaaaattataataattataattagttggtggtgtggggacttaatttttttttctttgagtgtggggacttaatttgtctctacatatgatatatatgtacaaactgattagccatttcctcttcacctcctaattaaaaacattaatcatgtattaattatcatatatgcataaccatcttccatgaatagttaattattaattaacattatatgtatttgtgtaaaacaaaagataattaacttgattgatttctatgctatcattctctatattcttgatgtacacgagatctccactttccattcatattacttattatatatatataaaaacaataattaatgcatatattcacctttattgtcaaataattaactctatatataaatgagaattgcacttaaatttgacaaggttggacccttttagtatggtaataacctacttctcttagattgtattaatttgagaaaagaacacagtgttttctctcttaaagttcttacaataaaatctttgagtaattcccttagatctctctctaaaagcaattcttttaatcttttttccggtgaagataggtcactatttataggactttaatgcatgagagatgatttttcttttgcttacaatgtctatagataataggaaggaatattcattacataaatagaatacatgaaataggagattgagacagcatgtcgtatccctttagctcaatcccatgattgtagggattgtcttcgtgcttggactccacgatattatcatgaagtagtcaagtcctggtaagtagttcggaaagccaaacttgcccctgttcggatagtctgccctttttaccctgctcgggcaagtaggttgaaagtgcagatgtgctacttgaagtctgcttgatctccgcccatgtgcaggaatgttggacacgtgtcactcgtatgtgttgccacatcaaaaaatgggataacattattaatatttatctatattttttatgtatatatttaaattaatctaaaattggtataagtttaattaacctaaaataaataacattaatatttatatatatttaaattaatttaaaataaatactattattatttatataaatttttaatactaaccttactaacatggttaaatttaactaaatattcttatatttttaaaatattctgttgaacaaataaaaatagtcatatcttatatataaagatattattaaaaaaaaaattagcaaaaatataaaaaaactcactatatattctctattataataagtcattttttatatggttagactttatttttttaaaaatttactctctatttaagttaaaaattgtatttagaaaaagtataattagagatgctattaagcatatgtttcagtttttgtattttgtcctttattggaattacttatgagttgtgtacggccgtgtggttataattgtaataagcgtgtaaaatgtttctttaatcaatgcatgaactagtagaattaattatgcgacgtgtctaatcagtcttaatattcataattagtccaaaaaaaatattttttttatctaatttacttatatattaaaaacatgttatatttcacataaaaattaatttagtgatatatgtttatattaattttagcattgccattcaatgtatgattacaaaacttaatgcaaaatttataataattaaaatttttataaaaaataatataactaacaataattttatcattaattatttttattatgtaaaataataaaaaatatgtataaataattcataatttaatattatatattatacactacaacaaattttatttttaggtttagtcataacaaattgtgactaaaaatgaaaaaattgtgactcattatataaatctatgttttgataaaaagtttgtagttaaaggtattaattacaaaaattacaatttattgtgactaaatatttttttagttccttcaaaaaaaaaaaaaattagtgaaaatatttgttatgattaaaattaaattagtgacaatttgtatcggaatactatgttttaatcacaaataactttttattttgactaaaaaattattactaaaggtaagtttttttaaatagtgataattaaatgtattaataaaataataaaactagtatggaagtaaataaaaaaaataatgcatttaccgtgatttaaattttgtatcataaaattttctctttctaaatttgcaccagtacttgtatcaaaaaaaaaaaaaaaaattgcaccacatttggcacactattaataatgaagcatattttttgcaaagtaaattatattttagattatacattataattatttgcatttttattggagatatttttatatagtgatatatgaaaaaatccaattggtgaacaacaaagggcaaaaaaaaggttcttaatcatatatttagtttggtaactgtttttgtgaagataaattagtactactattattggaattattagtgtaattatgagagtactttagtggtttcacttcacataatacatatatagagaagagaataagtttattaaatgatatgatgagctagtagctaacaacactagtcaggtgattggacacatacatatagagatttttaacctatctatatattggtggtataaattataataatgtccacattggatataccaatatatatatataaatatataggtcccccatagtagtatagtcacaatccttggcctcttcatataatcttttatatccacaaattaaagatcattttagctaataagaaaaagagcttcatataacagctctctcaaagacaagtatatgtaaaaatatattcccatctcaaatctctttctctctctcacacacaataaatagacaacaaaacctactttcttttgcttttctcacattcccactaactaaaaaaagacaccactcactcactctctcctttctctgcttttttcatctttcttttctcctttctttttttttttggattgttgtagatctagattaaaggatatatcaaagagtccccaaaagatgatccaagaattgttaggaggaggaggaggaggaggaggttctggtcatcataatcttcatcatcatcatcaacataatcatcatcatcatctgttaggtactccaactcatgctgataatcaaaataggaaaatatcttccattattaatggaggaggacttttagaagctactactactactaccactactttacttcataataattcttcaacagtaccaataacaactcctactactactactactcctcccactactaccaccagctccggggcggcggctactgctacaccggagagtctgaggtgtccgcggtgcgattcggccaacacaaagttctgttactacaacaactacaatctcactcagcctcgccacttctgcaagacatgccgccgttactggacaaaaggtggagccctaaggaacgttccgataggcggcggttgccggaaaaacaagactactattgtgtcttcctcagttgtctccgggaagagtgcagctgcaggcggcggaggagtcgctaatagtactggaaagatgaagatggtgatgagtagttcggagattaataatattggacggtcaggattcggcggcggcggattattcgatcttcatgatcatcatcaactctcctctaacagcccaatactttggggttctcctcagaattctcatctcttggccttacttaggtcaactactactcctcctcaaaaccctaaccctaaccctagctctccacaataataataatattaataatagtagtagtgagtcagtagtagtgaagcagcaggggggtttggatccagtgtctcaggctccatcgcttggtctgtgcagctctttttggaggaacaatcaagtcaataataatcaaagtcaaaatccacattatcaacaaatcaacggtttgataagctcagctagtcttcctcatcataataataatgataataataataatggaattcaagagatgtatcagaggttaagatcgtcatcttcaacaacaacatcatcatcaccagctaataataataataattactataacgatcatcactcatcaggtatactataacatatatatataaatgtatagattatttacttgttataataatatctcttctttttcattaattaatgtcatcatcatcatcatcattatttcagttggaggaccaggtgatcatcaaatgggtttctggaatattaatcctccgccattttcatggcctgatctttccactactactaatggtgcatacccttaaaaaccctttcatatatataaatttctttcttttttttttgggatggggaactactacattttcatcaagatatatgttagaaaaattaggttaattggggttgtgtaaggctttattattaattacaatttctgtttttcttttctcttttcaccacgggttgtattaatatcacggggacacttttttcttcttcttcttcttcttcttcttccttaatatcatgtagttgtgtgttttgaggtgtgtttaattcattaggttaattaattatggtggtgtgttcagagactaatatatgataattaaattaagcaatatatatgtgttgagacgtttctgacttatatttttttctgagtaatgattctttatgtttcatatatcaaatatatatattactaacttaaaaagcttaacatatacagcgcatagtggcatatatatggctactttttgagagtgttcagtctttttattaatctatatctaaggttcaaaaagaataattaatatataatatatccttttctttgttaaaatttaccagagaaccgtgaaaccaaatcaagtaaaaaagtatttataatgaatgtgaattagttaattaattaataatgttggctctaaagctttcggtctctttttacttgaatcacattaatattatatagtttaagagattatataaagattcgatggggggtggtttgctggtatatatatggttgatgtgttttattacgagaaagtaactatagtactgagagaggtggagaatgaagtgtaaaaaagcagagaaataataaagagagctttggtttttgggaaagagtagtttccttaaacagcattttgattctctctctctctctcacacacacactcacacatatattatatatacacatgtacagagtttttggtcagagaggattcccttcctctactctatccaccagcttttgtaaactttatatatacatacggcttctttattaccatcttctttctatgtgtaataaattaatacttaaataagactatgcatctttatcactatgtaattatcatgaaaagaggataaaattaactattatgggatagctagaggaatgtattgaaactagttgaaactgtttttttttttcccgcacaagaaaaaaggaaggaataataagctaatatatatggtaagaatgtttataatagtgtctcttgtattaaagtatacaaatcttggttatataaataagtctttgattatcactccatacgtcactacaaaaaactgctacttttagtgaaaactatttttagtcacaacataatattacttgtgactaaaatatagtatttagttacaagttgttattaattttgttttaatcacaataagtattgtgactaaaaaatacatttggtcataacaaaatgtaatttttgtaactaatacttt

SEQ ID NO: 18987 - DNA, 7625 bp, Cannabis sativa
tttctttgtgttttctctcttacttttctagttttttatcagttttgatttctggtttgatggctaatatgtttgctgcttgtttgatcattattcttgtttgaatttgtgttatttaatcacaatagtggtatcagagctcaggaagaattccaaggtttcaagaactcaaactctgtgatcaaaggccaagaaagctactacaatggcatcatcttctaccaagttcaatttggaaaggtttgatggtactcgagacttcagtctatggaaggagaagatgttagccatactaatctatcagaaattggattcaaaactagaggagcccttcgagaagacagagcatgcttctgatgaaatcaagaagaaggagattgatgaatcaaagaagaacgattctaaaactgtcatgaagcaagcaagatcagccgttgtcatgaatattgtagacaatgtattgagacaggttattggggagaagacagctcttagaatttggagcaaacccaaccaattgtacatggctcgatctactgcaactaagatcttcttgaaaaggaagtactatgggtttaaaatgaatgctactaatactttagatcaaaatcttgatgagcttaataaaattgtgttggctcttactaatacgggtgaaaccataaaagaaaaggatcaagctattatattacttaatgctttgcctgaccagtttaaagatataaggactgtgtttatgtatgacagggacaccttgactttggaggatgttatgagtacactcagattaagagatgctaagttaaattgccaaaaagctgcaagacaagaatcaaagacagatgaagctttgatggctcaaggaagattaccaagaagaggaaattttaagtttagagggaactcaagatcaaattcaagacccaaagaaactaggaagtttcatcactgtggcaaagtttgacacttgatcagaaactgttgggatttaagagataaaagaaagaagaaaaggacaaagaggaagatgacagcaacaattattcaaatgcagtgattgatgattctaatagagatgtgtctgtagtcattaacaatgaaattaaggatgaagtcaagactgatggtgatgcttgtaccagttcttgtctgaaagatcaagatgattggatcttggatagtgggtgcacctatcatatgagtcccaacagggactggtttatggattatttagaaataaattgtggtagtgttgtaatgggaaatgatcacaagtgcagtgttattggcattggttcaattgtcatcaaaagttttgacaaaactttcaaaactctacacaaggttagacacattccatatttgaaaagaaagttaatttctttgggaacattagatgatgaaggatatgattacaagacaagcaaaagggtaatcaagatcacaaatggtttattgctaatgctaaaaggaaccaagagacatggcttgtattatcttgatagaaaaaccatgacacctgcacaagctgttactgttgacaaatgcaatgcagaatcaaaattatggcatgctagattaggtcacattggtgaacaaggcttaattgagctatctaaacaaggtttgctacatgattacaatcatgctaacttaccattttgtgagatgtgtatagggaaaacagcatagaatcaaattctcaaatagcaattacagagccaaagttgtcttggaatacattcatgcagatttatggggagctagtagggtaaaaatacagggaggtaaataatatttcttgtccattgtagatgatattagtaaaaaagtttgggtgttttagttaagacataaaaatgattgtctagaggagtttaagaattagaaacttcttgttgaaaaccaacctaattctaaatgaaagtattaagaactgataatggattagaatttgtaaatgatgaattcactgatttgtgtttaaagtttggaacacaaagacataaaattgtgataaagactccacaaaaaaatggtgttgctgaacaaataaataaaactttacttaacaaagttagatgcttattattagaatcgggtttaaagaaacacttctgtggagaagcactacatactgcctgttacttgattaataggagccccaacagaaaaattgagttgaaaacacctgaagaactgtggacaggtaagcctccatctctgtctcatttgagaatatttggttgtgctgcttatgcacacaatgtagaagacaaacttaagaaaagatcaataaaatacatatttttgggttatcctactagtgtaaaaggttatagacttctctctgttgaaaccaataaaattgtaactactagagatgttacttttaatgaaagtgatttcctatttaaaagaaataagaaaggtgtgatttttgacatttcaggtaaacaagatgatgttgccatctgaaattgaatatacctcatcgacataattttttttactattagagtcattacgacggttcttgtccttccgagaactagatttcttgagtctgatattagtcttatctttttgtacatctctgcctctagaattagtttagttaccatgccctgaagcatggtttcctctcttttttcctatggacattgactgacagttttagatttcttttgttgtttagtcaaaggagtattcttcaaagtttcgcctattatccatttccctttatccttgtgagggttagaagttctaggatctttaggatcaactctcttgggagcatttgttgttggagttatttgcacttaaggatccctttggttagggttgtcatcacgacttccatcctcgtcattttccccggcaatatgtcattgaattgatcctgtcaagatgatgttctttcagttaattggagttttctggccataatgaccatgggatttgactcatcgggattatcctttcctccaacaccatcattaacaatcttgccttaatgaaaattttttggtgtgtcttgaggattatcttttgaggtttcttgaggatcatcttcaacatcatcagaactattctcttttgaatcatcatcttcgaatacaggagcatctagatttgtgtctttgccaagttgatccttgtgatagctggttgcttcattctgatcttctgtattcctgccttggcattaggatcagtgaagtgaaaactagacttatttcgggtgagtaccatgattaaagcgtaatcttcagatggtatcactgcttccttcaactgttaatgaaagcaccaacatttttatcgagactttcgaaaaaccaattataataaataaaagctgaataaataaataattcaaaaaaaaaaagaataagaacaacacacataaattttacatggtttgggcgttaacaagccttagtccacgagtcgatattattatgtatcatttgttgaaaaagcctttaggaatacaatgagcataagttctctagtttgcatgagcaaatattataagagagaccaacccttaatctgaataattcgttaggtatttatagtattaagagaattatacttagtttccctttatccctctaatggagagtttacatgaaaatacataatttgggttgttctcgtaaggtccagcccatgaaggagttaatctgttgactaggcatataggatactattaagctatcaatactgtgtcctttaattgtgaattaattatttgatctttattttgggtagttttccctttcagcttgatacgatcttttggccgagattcgtggatggtagcttccttattctgtgcaatttggtaaaaggggaaactatgctaggcttctaggaacatgctggttagcctttcgggaacacggtactgagcctacttccaaatatgtactgtccttggaagaagctcgtttgagcgaggaacacaaataccttcctgaaaggtcttgttggacttgggcttggcccaagttatctttttcgggcctactggtgggctttggatgctaacctagaatccacgtggcccttgccggaaacgcggataacaataaactttgtaacaatatttatttatttgttataattattattttttattttttcttactaatgtattttttgttatttgcatttaaaacattttctctctttaagggagtcaatcctcattgttatacccgatttttgagaaattaaaaaatttaactttgtgactttaaccaagacttacaaatgccaaataagttaagacatcctacttggggggccccatggcacctctacgagactcgaaaacattgaccaaccatttggtgatgagactcatacacctaagtgtgcccaaaatagggtttatgggctcgcacaagtattttcaccctagagacctcaatccgacaagaaaaccaacaaggacttgacttatttaggcataaaagtcttgaacttgaaaataaagtcaaagttgcataagtatgccactctacaaggcataggcaaccactgccacatgaagatggcagtgctctctctctctttttggggagcactgccacaagagagtggtagttctctctactctcaaaataccaaaggatacttgtcaaaatgtgttccctcaatacccagaaggccaccaattggtgtagaaaccacttggtcgaccattgccatctttgtggcccaaagagtggcagtggtcggctacaccaaatgggaaggaatttctttggccaaagtgtatttccaatatcaagtatcaaacacaagtgagaaaattcacccaagggtgtataacccccataggcgaccgctgccatctttttggcccaaaagatggtagtgccctcttctaccaattagtcaagaaccaatgtggccaaagtgtttttatagcatccatatgactaaaataagcaagaaacaccattcaaggcttcccataagccttgggcgaccactaccatcttttggtactgactggtagcagtggtctcctattagggttttagacgtcaaaatgaggttttggggtcttaagagccccaaaatatgatttgccatcaaaaaataagtcaaaacacacccccgagtggttcgagaacatgcacagcagagaatcgccacttggacgtggcaatggtcggatttgaagtaaaaaagtacatattgcccttcagtaaaccaatcatcactctctcaaatttttatccaaataaattggttcaacttgcattgaaaagatattttcaagacaatctaagtgtgtctcatagttatagctcaattctaaagttattgggctcaaaattggctcacaagacaggttgacacactttactcgggaattgattagtgttatcaagtatgaactatgatgggatgttggagagctatgccacagcccatgtgtcatcatatgcgagaagtgccatccctaaacacctcactccaacactactctataattttatgaattttaagccgaaaggtgacatctcttgtcactcctatctaatttagtatatttctagcgaagaggtgacatcctttgtcactcttctccaatgctggcatttccaaggcgcaacaacacacaagaaaatttaagacaaggagaaataaccaacttcaacaacaatcctaatatttatgggatatttgcctaggaataagggatatttttatagatatttatttattcctactttttcattcattattcaaaaatagctacgagatttgaaagtgagacaccccgacattgggaggattactaacaaaccttaagcttatataaagatagtgataggctacctatagggctttgcctacttccctgcaaagagcacttcatcccttgagatttcattcttttaactttttcctaagttcttcatactggtacaacaccaagcctctattactcaaacactaaggggtaccattctcttttcttgctctcattgatgtattattcccaagaatattatcaccattattattatcagacttatggtattaggtctcccatgagccttttacccataagcttcgatgttgatttgcctagaaatccctttttgcattattatccacacattcttgagaacattattttggtgtgtcggatccaattaataaaagtaagtagatatagtctcattaccatcacgacatgggggtgaactactataaatccttggtgtccttttaatttatcgcaattttatttagctaaattaatttattgcagccctcttatttttacaatcttcttagaccaattaatgaaaaattgcgtcaactctcacaagtacaagattctcatatttatgctactaagattctcacatttctcctgtcgagagtttttcactgctggatttttcgtttcttttatagagagtaatactgaagttgtcaattctgtttattttttctggcggtatctttatttggagttattttcttagatctattaggtcattgttatctatttttctaagtgtatgtcttctacatgtaatgtaaaatgataaaacagcaacacatatgtgaataagatatgtatgcactaaagatgaaaaacgagatttcttaattaaaagaaatttctcattgtttaataaccaatgaccctaaacaataaattaattttcttcaaaaaaaaaaacaataaattaattattatattgaaaaaatagaaaaaaagttcttttgtcctttgtaaaatgtttaacaagaggtttaaaacttgggtgtatatctaatcgtttgctctcatctcagacactccaaaaaccgagctctcaatcccaacaacaatggctacttcttcagacctcaaacaaactctaggcgaccttaacagagactcctttgtgccactcctttccaagctcattggggaatcaaagtacgttcaaaacaacccaccacaactcatcccacaggaggatcgtgtagtcaagcatgtactcgattctctcctcccttacagcaccaccaccggcggcggacctcttatcatcaaccacgtcacttactttcccggcagaggaaacgtcatcattgagtaccctggaacccaacctggaaagattctctcctttgttggatgtcacatggacgtcgtcactgccgatcccaacgactgggttcgtttccttcatttcaatacttttttcgtttcactgttttttttttttttaatttattctttctgggtttggcttcgaattaactttggacattcataatttttgaattttctgtgtgtgaattgatgaaaaaattgtatgattatatgatttcatttcagctgttgataaattttctctgaattatatgattctcagtttttcctaattgtggggaatactttttctcatcatgattttaaggctcagatcagaactagtttaagaacaaatcattctttatgtatttttagcaatttattatcaaatattttcatgttattctgtttcttgttttgaggatatttaacgcataagtaccaaatttgagtttgtttgaggcatagtagacacccaatgtgattttataag

SEQ ID NO: 18988 - DNA, 10818 bp, Cannabis sativa
  modified_base (1393)..(1396): a, c, t, g, unknown or other
cctcttttcactaattcatccctaatttttcatttgctactacatttgaaggtagcttgattctaaagttttttttttttttaatttaagcgtttatatattacaaccatgttttaccggggactcgaacccaggatctctccaacacacacacccatctgtgaccacttgagctagcctcaagtcacatgcttggttcttagtttcgctttagtaaggagacatcctattgaagcacgccacaatagattattgactttaggggagactttaaaattccaaagcttcctctaaaaacccaaattatcattggtatgcttaccttccttttcgttttgcagtaaacaatacacactcttcactgaatattaacctgttttttcttattttcattaccaagaatcaggagaatcctccactaggggaatactaatgattaggttcacatctctttcaataaaaatatcactaatcagcttaacatcccattgataatgccctagaatcattaaacttgacaccattattcccattaaagaatcactcatagtataaacaaaggagtcatcacaattaggaaaccacattgacaaagtcaaccttaccaacctgaacagtaacaccttttttgactaacccttgaacctccaagatgcttctccatataaaacttgggctacctccttcatctgtaagaaatgagccattggaaaaatataccttgctttgtaaattctacttactaaagaactaggttgtgttaaaaggtgccatcttgtttgcctaagccacattaaaatcatgcatatgacgaaaacctataccacttttcgatttgggcttacacaccctttccgaactcatccaatgaatacttttttccttctttgaagaagattttcaccaaaatttacacatcattatttttgtatctttgcaaatgtcaagagtcaatagaaacactcattgtttggaagagcttgtgctacaatctttaataacatctctgccttcgataagagttttctatccaaactttgaacacactgtctcactttatctttaagatagcctaaaatttctgatttcttacacccaatagtattaggcaatcccaaataggtgttattatcatcaacttcatgtatctctactaataataaatgtatgtttattgtttaatttaatgctttaaataaagtgtggtcttgaaaatttatgagcattgtgttgattattgttattaatagcattctcattgtgtaatttttaaaaagctaaggcaaaattattaatgcagaattattaatgatagtaaattttttttagctgatttaaatggtagataaattttgagaaacttacaaaaatactgaaatttgggttaattttnnnnaaaatactgtcacacgaaaatcttttcaaaaatattgtgtttttataaaataccagtaaaacacaaagcagaacaactcaaaataacagtagaacaccagtaaaacaccagtgaaaacttaacacagtatattgcagtatgaaacttataaaaaaacacagtaaaaaagtaaaaaatatcgtctggcagtatttttgtaaaaaaatatcaaaagttagtataacatgtaaatttctctaaatttttataaaatttattaaacgatttgtaaacaatgtagttcacttcccattgagatctacttattttatttctataataatgaatgatttaattatttaatgaatcttttttttttcaaaataaataaataaaatttacatcatgaacgacaataatacataaactacacaaggaataagcaaaacgactacaacgccgccgtgcccgccatttaccgccaaaacctgaaatttgaatagagaagagaacgcagagacgaagacgcacgaaggttcaaccttcactatggacgacgaagacgaaattctctctgattctgaatcttcctattccgattctggcgaggacttctctgctggcaccgacgaagaagatgaagaaaacgtcgatgatgtttctgagaataatcagccaccaaccaaggctcaacaaccaccgtccgatgaagataggaaatcgaagaacgtcgatgctcttctcaggttggtttaacttttctgtgtctgcgaatctgcttccagaaatggagcatttgctatcctcttgattttatatttagggtttcgattcttcattaaccgtgattgtttttaatctgtgagcttatttaattttttggaatttgagctcccgtttggttgctgagaaaattgagaaattaaaaggaaaatgaagccaacgattacacgctcgcactttaatttattattattattttcagtaatcagagtctgcgaatgcatatatgcaattagaaatctggcattgtgcaattgttcttgtattccgctttttagattcagctaatttggaattatttctgatttcaaaattccagaggtaatcttatcgtgaccagacaatcactgcttccacgagttctatcggtgactgaaggatcagcagtttgcaggaagccttttaagccaccatgctctaatggctactctggtcaaaatgatcagctatcccggcgtctctgcgctcgcaaacgatttgttccctggggatcttcaactccagtattagtgccaattaccaatcttctaaatacacctgaaactgttttgaaacatgaagtggaggaggagattgtaactctgcccccagagattgatcctctggtcttgtggcagtctgatgaattagctactgacatgaagcaaatagtagtggatccattgcttgttcgtttcctacgaccgcatcaaaggtactttaggaatatgcaatttagatatttttaaagtgttggaccgtgtgatttggaaagagcatattaacttctaattcgtatgcaccttactacaagtttcatgtatgtatcattagaacatttgccaaacttatgtgccataactttgagatcttgttgttaagcttcattcaatggtaaaagcacaagatttaccaaacatggactcttgaattgataagatgtaattataatgcagagagggcgttcagtttatgtttgaatgtgtctcagggctatgtagctcttcaaacatatttggatgcattctggcagatgatatggggtgagtctttatctttctattattttttccttttatggttatgctattactcttaattggatatattattgattttaatttgttggcagtttgggaaagacattgcagtcaatcacattactttatactcttctttatcaagggtttggtgagaaaccaatggttaaaaaagcaattatagtcactccaactagtcttgtaagcaattgggaagctgagatcaagaagtgggttggagaaagggttcatctcattgctctatgtgaaagtaccagagatgatgtcatttctggtattgataggttcacaagtcctcgcagctctctacaggcaagtctctgcaactaatcttgtgtattttcctatgaaagatacacttacattcatgcttttccaggtccttattgtttcgtacgagacatttcggatgcattcatcaaaatttagccacagtgaatcttgtgaccttttgatttgtgatgaggctcacaggttaaagaatgatcaaaccataacgaatcgggtattatgttcaggcattgacctatttaacgatattttgttcttgagatatggtttgttattgttctgatattatttataaacttttcttttcttttcttaggcattggctggtctttcatgcaaacgtcgtattttgctgtctggaactccaatgcaggtgaaaagacagacacctgcctggtgcctatgaagtcttgtgattccaacatcttcagtttttgctaacgtctctcttttaccctgcagaatgacctggaagagttctatgcaatggttaattttactaatccgggaattttgggtgatgctactcatttccgccgatactatgaggtaatttagttaccttttttttagttttcttttcttttctgaaaaaacgtaaaaatataaagctgcacataagctcattagttcctttttctttccagttcgtcttttctcttcctctttgattggtttgttaagatcagatagatcccaatggttcctttcctacaactctttttggttcatttttatctttcaatgtaatcgtgatgctaacaaaccgagtttgctgctaattattatgcatacattctagtttattaattgtatcattatgtcatatttatatcaagactcaagttgctgcggagataaaataagagcctcgttttaatgatatttgtcttatgcctgatttcagcttgtaaagtaacacaatttattaaagctttttgcctaatgacaatgccagataaacgttagttggactacgtattttggttgcattgacatttagatgatagagtacagattactgacatatggggcaataatctctggactgtttgcatgaaggaacatcaatatctttctcctgaacttgagctaattttatattgtacttttgctcaaagtgatttatcttccttttcttactgttctgtgagtgcatgttcatcaaatgttgacacacatgttttatttaggctcccattatatgtggacgagaacctaatgctactgaagaggaaaggaagttgagtggtgagcgctctggagaattaagtgcaaaagttaatcaggtcaggttacaacttacagttgtagctgtaaattcccattgttttatcttccagagaacagatttcttggctgtagaatcaaatagttcttgctatgttaaaaatatgtatatggaaaactgtagcttgaattgactaataaagctgcaactatatttttaatcaggaataatgtaaataataaacgaaactacgcaaccagaagttttactcatacatatatttttctgcttaatatcctgacaattaatatttcaatgtactttttcagtttatattacgaaggacaaatgcactattatcaaaccatctgccaccaaaggtataaaacatatcttgctctgcatgtctgtcactgacaaggttatccagataccagatttatgtagaaaaggggaattgtggagtttaaattctattttgaagttgtaatatgcaaatatttattttcaagcaactttatagctgaaattaaatcttgttctgattgcatactagtttttgttctttaaagaaattaaatctataaatttattttactttggaaattttctcctgcacagattatcgaagttgtttgttgcaagttgactcctctccagtcagatttgtataaccattttatacattccaaaaatgtatgttctctcttacctattaagttactcgatacagttgcggtatttgctactttataataacattgtctgacaagttgaggttgctttttaattgtcctcattaacaggttaaacgggcaatttccgaagatgtaaagcaagcaaagattttagcctacataactgcactcaagaagctttgcaatcaccctaaggtgagatgccgcttttatcccagtcatatccaaatccattgtggaatttcagatcacctagctatgaactaattctagtctatttcttcttctttaactttttctcatttggtattctagttcaacactttcaggttgaaactaatgttcaagttgcatgttattttctagattcatctcacatatgatataacatattgtagctcatctatgatactgttaaaagtgggggttcaggaacttcaggttttgaggactgtatgcgttttttccctcctgagatgttttctggaaggttagtcttcattttctttttgtcagaagcattcatttctttttaaatacatagttagctatatattatcttcaatagtcttacttttataaatatttgtcccacattcaatagatctgggtcatggactggtggggatggggcttgggtcgaactgtctggaaaaatgcatgtcttagcaaggttactgggtcacttgcgtcaaaaaacagatgatcggattgtccttgtttcaaactatactcaggtaatttgtgcatagttcttgtcgtttgtaagattcacaataatttacagttttacagatttatcttattcaggttttgcaatttctgttttatttttttcaccattctattattaatagcattacaagaatcccatcctttcccccaacaatgtaaactagtcgtgttatatttatatgttctccactcaataattgttatctagttagggctaaatgtatggattcttactagttattcaactagttaggatcatgtgatatcatggctgttatgcattcatgtaagaacaaagatgaaaatgtgttgatttggcatgccaaactttgccatttgcattgaccaccagtgtgtgttgtattaataacaaataacaaataaagaaaaaggctctgtaacacgggctctttgagtattacattctcatatgtcaactattcttatttcattatgcattcttaaaaaagtcctactgcagatgttacgatttgtttaactttacataattgtgatctatcagacactagacctttttgctcaattgtgtcgcgaaagaagatatccatatttgagacttgatggaaccacatccatcagcaaaagacaaaagctagtaaatcattttaatgacccatcaaaggtgtgtcactttttaatttcaaagccttaagagggtaccctcttgtttggggtctcgtctatttctctggtcttgtctgtgtactaaccatgcttactccacatgcaggatgaatttgtgtttctcttaagcagtaaagctggtggttgtggtctcaatttgatcggtggaaatcgacttgttttgtttgatcctgattggaatcctgccaatgacaaacaagtaattgtcttgttattttatgtagaagctgcaagcggtcatctgatttataaaaaacatgcattgctccataaagtaaatgcttattcactatcctttttatttctgtaatcagctaacatttcttttttcaatttatttataggctgctgctagagtctggagagatggacaaaagaagagagtgtatatttacagatttttgaccacaggcacaattgaagaaaaggtttaatgtggcagtgattcagtaatcaatagtttttgtttctccataaattatggaatagtatgtcacccacttctacttaagctttattaatcctccataggtatatcagcgtcagatgtcaaaagaagggctccaaaaagttatccaaaaggagcaaactgatagccttacaacacaggtttgaatcgtgtttctttcatgatttataatgcaagtttttcattgtatgtgagcaatatccaatttcaggggaattcgctttccatagaagatctccgtgatctgttcagcttccatgaaaatgtgaggtaagggtttccttttcccttccctaccctccttaacagatgttaaatgctgtcctggaatatgattgccattttttctgcttcattgttaatcatttgctaaatgaacaaatagcaaatttcttgtttttgtgcatctatagtatttagctttcttgttgtacagaacaagaggctattgtttttatgtttctggattctttgtcaaagtatatggctctttccttcatcttcagtagattaaacttttggactttatgcctttatggttctgtcaatttgctggcacataaaccggtagaaggaataagaaaggaacagatctatcacaatgtaaaaaacaaaatacgattcatattaacgtgataagcttaacatatagtgaacctgtagaaaaaaacaattaaacaataaattaactgctaatgataaatctaagttattttgaaaggagcaaggaccttggttacaatgattaatatttcaatagtcttacagcatggaaattttcttccaccccattttaatgtcttcattcctgtatatccataggtctgaaattcatgaaaaaatgaactgcatccgttgccaaagtgaagataatatgcccgaaaccgagaacaaatcaatgaacaaaagccgtgagtctgatcaagacacctctgatattggaggatttgcagaaattgctggatgcttagacaagttaaagagctcagagaaacaggtgggtggcgtttggttgattaagatttgatagtttctaattaccatgtaatgtcaaagtagattattattattattttgagtaacctttttcaggtagggacacctctggaggaagacttgggtagttgggggcatcatttttacccaacaacagtacccgatgctattttccaagcttcagctggcgatgaggttgaacaaactttattttatttcatcctttgtgtttgtcattagttccaacttttgttctgttaccaagatctacgcttttcccaaatatttattcttctaaccaaaaagaaacaatacatacatacatacaggtgtcatttgtttttacgaaccaaattgatggcaaacttgtacctattgagtcaatggtacgtccaaatatgcaaagagctgaaggaaatgagaattgtcccaacaaattaaatcgaaatctgaacaagaaaactatggtgttgcctcaacgtaggaaactcgcggaatctgtcgtttccaatcaaaattttaaaagaagcaccttatcttccttctacaggcctatgtcaaaggtaactgtggaatgtgtaacacgtactttaagtcctatagaacacccagtagtaaggcctcatgaaacattgtctcctcatactttgcaacatgacgacgacttcgcctaaattttccagttgctcttctagttttgttattttttttgctttattactttgatttgctttgcctgtattctgatatctatgagagaaagaatagtatagcagtttacatacgcacaacacaatgtatacgtaacatataaaataaatatacataaaaggtattattgaataatgaatatatgctagggtcgtttacttgtttccataaattactgtttatatgatgttttttttttctccctgttcgattgtattggcatggttgtaatttgcatgctatatttacataaacagcaaaaaaaaaaaaaaaataaaataataataataattaattaggatttttgccaatcatgcctcttgtatttttaaagcctttaaaattctgttaagaactatcaagattattagatttaaaaaattttattcaattttagtaaaaaaaaaatctaatatggatgaaaatttagagacttgatgtattacatgttaaagtttgagtgatatgatttgatagacattaaagtttagaaaatatgatttattatgtggataattacagaattaatgaagttcaagggggtttttaatagctaaaaaagtttaagggtatgatttagtacatatttcaagaggcaaaaattctaattagtcaaattaagaataatagtttaaagaattgctaaaagcactactggtgcttaataacatttttggtatcatactgctattagtataattaaatattgtgtctcatgtaacttaaaaaagtaacttttaaaaaatattgttaaccaattatgaatcaccacctataaaaatattagtcaacactgatatacattagcaatagtcttatataaagtttaggactattattgtgcacattctcctagtatttgaatttggatgtacataaaggttgcatttattagagagtagagactagagagacttgagaggatggcaattcacaagaatgattctatttttatttggtggtcttattttattcttttattaacatttcacgggtgattactgaggctgcattcattgtctccacttctatatgatcagtagatctatttatgaacttattctgattttaattttaatactatatactcagtactataaattttgaggacgtttttgtttactgtagaattacagacagatatattctcattttattttatttaacactgagagtagtaacaaagcaatacgatgaatttagccttgaaaattggagctaacatatttaatgatttcaaagagtatgtttctgtacgaataaccaatgactctttttctgtctttttctttgttgttattttgattctgtaacaaatactaccagttaataatggtactcattgttgtcaatattggactctagtgacacctcaatggtctctagtcctctcttttgaccaccctactctaggatcaagaaaccaataatactatttccatatttgttaagatcatacttttaactattttaatccaatgttcaaatgagaccaatactgacagataatatgagaaaactactttgtttgtattcaattatgtgtcccaaataaacaagatttttaacccatcaaacttgctaaataactggccaagtagtaattaatcttagaaagaaataaaaaagattaacaaaaagacttttggggcaacattcaaagtacccacttaagactaaatgacagtttcttgatctgacatagtgaaatgagccttggaaagcaaaaaatgtttaggataaaatgaagataatattatatttaaaagagtaaataattaaagtcttcattttgagcacaaaacgacaaaactttgctagct

SEQ ID NO: 18989 - DNA, 2140 bp, Cannabis sativa
  modified_base (1376)..(1382): a, c, t, g, unknown or other
aagtgacatttcttgtagtggcaagactaaactctacaaaaaaaaattatagtttagaggacaaaaattttatttattcatatttttattcatttatagaatcggacttattgaattttattcaattagtaaccaaacatatgacctcaaattttttttttttggtttttgtaagggaacatatgacctcaattaattcctaaaacaagtgcaacattatatgcttcaacttataaatgcggtatatcagatgcaatttgcaatacatgtatatggaaagcgtgtgatggggtagttaggaaaaaccaagaaaattgaatagaaaatataaagaaagtacatggatggttgtgtcaaactcttctacgcccaacacgcgtaatttgctcttcatttctattttccctcttatatatatgtatataagacacaaaggcttctcatcaaaatcaactaaaaagaagtaagttttctatcattaaattaatttctattttctatacaaaaagaaatatacacatgagctaggctcttttattaagtttgacgttgtttttttcttcttcactatatatagtcatatacatagttcaatcattcagatatgttattacatgattcaaaggaggatgaagatttagacattgagtctctacaaacaagaagtggttgtagaactgggttgctcgtcccaacagtgaagaaggttgcgtggtggcgcgtgctttacgcgatcgttcgtgtgaaaaaaatgtttgtgttactaaagcgaaacaaagctgagcatgatcaaagtcaaagttacggaaaccgacagccacttctcactcatcatcatcccctagctcttcctaattacgtctctctcccctgcattaatactcatcatgatgatgatgatgttataattcaagtatgtactttcttctctatttaattaattactactattgcatgcatgttcctctcattacttgatatctactgttaatatatatatataaataattaattaagtaaaaacgaatacatgccgtaccttatagtcaatttatatataacgatcaattgatcgaggtatatgggggtcagggatcctggctaaccttcaaattttttgatatatacattctcttacattgaatttatttatatataattatcttcaaaactactgtttttataaccagtgtactccagtttttcatcttcttcttcattttggccactccagtcctgatccgtttcgttcctgataatgttctaccctgcatatatatgcttgtaagtcacgtggcaatttacttaacaattaataatcaggtacctacaaaaatttcagaattataacttaagtattattatcgccaaaaatnnnnnnnagatatttatttacaactaggagttaaacttacgtatttatgccacaaattactctaatattaaacggtcatgtacataccgagttctaaaaatataacttaagtattattattgccaaaaattaaatttaaatatttatttacagataaaagttaaatttaagtatttatgctgtaaattatttttttatttatttaagttttatacatgacaattaaagatataactaaaataaaataataatatttacaaataaaattaaacaaacatgtctatatttaatatatttcatattttttaggctaatataaacaaatacaaatatttacattttgtggaatagagtatatatcgggaaatttttgaaaatctttttgttttttttttcttgttttgtttgtttgttttttctctttttatgaaaggagaaaaattcccattaaagccagcaagccaaattacaaacagagctcgtcaacaaggagctcaatcattttacaaactattcataactgtcaatatgccattatataataatctctagagattaactttctcttaaaactcccaaattattaattgtacatatatttttttttattgtaataagaaatatttgtatatataatatatattatatattttttcaaaatgtgtgtacgggtataaactaaaaggtaaataaaagcatgagcttcacaccaagtaaggcaagatattgttatttgtgaggtatatatattatatattttaattt

SEQ ID NO: 18990 - DNA, 6567 bp, Cannabis sativa
aaaataaataataataaaaaaaccacttgtgcaacagacttttttgactttgtttttggcggttaaattattctgaatttctaaaaaatttacagaatgccttaaataattatgatgtagactatcatatgaaaaaatataaatgtcaaaaatacgaaagagattcattagtacaccaatttttaaaagatgcaccataaaatttccctaaacatgaaaacttatgttactaattgaaaatttaaattttagtttcatgtgtttcttaattcaaaatccatgttcaagaatttatatgtgctattattattatatatatttttatcattaagattttctaaacaatggtgtcactataagacaataattaacactaatcacactatttcatttgcacaaatcagttcctaatcatgtttcaacatctatcaatttcaatttcaacttcaaattaccagcttgaactaaaagctcttccttaaaagaatccacttttagaactgtccctttctttctcaaggaaaggatatgtaccatgtcaccaaccttaggaggcttagattttcctgaaaggtgaaacaagttatgaagattatgacattgcaactatacgattcgacaccgaaatagccattaaaattcttctatcaaacaatttttgttaatcttaagttgacaatgacagatgatacctattggtggtgattgcttgacatctacagcagcagaagacgatttcatattcgctgcagaagaagtgtttcccgagttaatagccttcttatggttgctttctttatctgttgtatttttctgtatgtttaagggggctcgagttgcagatgcacgctgctggcgaacattcttgtgaatgatagagcgtgccttggaggcagcctcggatattacacgcatttttctgaacctttgctctgcgctgtgtttcatgatcttccttctcgctactaaaagcttttcgtaaagatcccgtgagagcctattgttacaacaataactcaacatgagaaatttaagctttaaccaatgtgattcgtcatatcatttcaaggatttgtcggttgaattattttctttcgtaatttttataagaattcagaaaggaaaagagcattcttacatcagatgatgctgtgtttcatctaaaagctcttgatattcttgctttaacttttccatatcgagtataatctgcattacgaaatataaccttagagactaaattagctctcatcaaagaatcgaaagattcttctcaaaagcttcatcctatagaactataagttgtgtgatacctcatcaatctctgcactcgcggcaccatacagttcacgggccttttctactacaatacttgatagtcctaacctttcggctatattgattgcatttgaacgccctacaagataaaaattcggtttctaagatgtcattgtaagtgctgagatcactgtaattttagaacaaattacatagcttcgagtaagaacctggtactccccaaagaatcttgtaagttggcttaaggttcacttcatcaaactccatacatgcgttttcaaaggcatcattactgtacaacaaaaatctcaaaagggtgaaacgactgaaaccaaatgtgacattataatcgcaaacatttcatcttttgacttggcaacctgtatttcaaggttttaagttccccgtgatgagtcgtagctatagttaacagaacaccggtttcagcaaaagattctagcagtgacattcctaaagctgctccttctaggggatttgttccagcaccaacctaacacatatacaagattacatggtatgcaatgatatcggtacattcccatttggacataggactatgtttctcgtgttcgtgattgaaatggtttagatttaagcatacctcatctaatagcactaatgaatgactagtagcctgtgattgaatctcctgtaagatgttaacatggaaagtattcatcaggaaagaaacacagtacaattctggaagaaaaattagctttgactcgggtagtgtgagaggaattaagatgtgtcttacacttatttgtttcaaatggcctgagaaggtggataatgattgagtcaaggactgttcgtcaccaatgtcagcaaaaacagaatcgaaccaagggattcgtacagattcagaagataaaacatgaagtcctgcaaagtttagcaaattatcagtggttttctagatgtctagataccaaatccatgtttgattaaaatcagtaattccaacgagaaccgttgtacagaaaggaaatgtaagaacctgattttgccatcagaacagccaatccaattgtctttaagcaaatagttttacccccagtattaggaccagttataaccaaaactcgagttttctgtgctataaaaaaatcgactggaactggccgagcttgctcaagtgcagcaatctttccttacaacaaaaaacggaacattcatcacgcataataaaaaatggagtgaattgtattgttttctcctctcgttgcactattatcttcgggtttgagaagagaatattcactgctgatgatcctaaatgaatttcttttcgcatgcttaagaggctaaaaactaactcatgacatagagcaagcgatttaggaatgaaacaaagtaaaagtagattctattttttattatcatacctcagaagctttcttggactctctcctcgccttccttagattttgcttgtgtttatggagtagtaatggatggtaagctttcggcatatacaagatccagtccctcttataagtcgataaattgtttgactctttgctttctgaaccaccatctcttggtggagacagatcggggcatgaaccaccatatgacataccataggttgcccgagcattgacctaaagcacagcattagcatatcacaacacttgcttgctgagctaggctaaaatttctttgtcgtcctcatttcgacaagacaagttttgaagagtgtctcttttaacaatgacagaaagaaactaaaagaataagcgagggtagagcagggatcgtcacctaccacatctagtttaatgatgctattcaagagcaactcgatatcatctagatcgttttgcatctgataccgaagcaataaaacaaaaacttataagtgaaaggattctaagcacaggcaaaaatgaaagtgtaagttaggctgcaagtgacctttgttgcgagcattgaaagtgcatctgcctcggcttttgccactgacgccctcgcttgttgcaactcatcatttaaagacacagcagggagtggctctacaatacttccaacgcctgaattactataacaatatattaactctcaggacaaaaatattgaagaactgagctcctaacaaatgaagaaatcttagaacaaaagtagttgttgaaacttgaaagtgagaaagcaaattttacagacctcgtcaacaatagacccttgaaacttgtcatacggtcagagcttgattttatgcaccaccttccttcaatgttacacacttcctgaaaaaataacggttaagcgtgttgggttggggaaatgatcttgaaggtgccaagtgaaaggtatctgacttaggtttcttaccattaaagacgaatcattcctttcatttctgattaggctgtccactaactgatatacctgaatacagattaagtgagcgagatgagccaagttttccaaattgagaagttaaactggcaagcaaactataagcatgtaaatgtttaaaaactaaaaaatatgaaattgaatgaatagctattacccttctttctagtgtccgaacttgatctcgtgatcgctttaggttggggctctgaatataggaggaaaaccgaacattaaaagaatagaccaaatgggaaaaacatttgaacaatcaatcaagacaatgacttggttgtagcagcggaaaataatgtcaaacatagcgaattgtattacacttgaaaaaggcagtcagtaacaaaccgcagagtctttcacagagccatcttcatctataatttgctgtatcaacttaactaatgaccgatttatgacaaattccattatctgcacacatttaagttaagaaaaaataaggcgttggaaactttgaatcatatggtgctcagctaaaatctaaagagtctatggatatggtagtaatactcactacttctgtcaaaggcatgaaacgcctataccaatctgcatcttccttcagagctagtttcaagttatgttgtagagcatcggcatattgtaagagagagacgacagccattgcttcattgccttccactagtgagctccttcgagcacgttggatagcagattgaaccttcacatacaaaacttataacacttagaagaagctaatccatttacgaaatagaaggggaaaacattttagttattaattaactctgttctacgattattttcaagactgcagcttggtggctttagctacattcagattcagttataggtttctcttgtatttgttcagcttcaatgaatagccttaggtatgatcaccctaaggtgtgagaacgcttgctaattgtacaagtgtgtggaaactagaaagagctttacaaaatcagtattttggtgcgcatagcttaagtgttcttttaatacttgagtgttattcgagagggtgtaagtattcatccggttctatagtggatttcattaaggccattgctgccttaccttggatgtaggatcaatcacattgattgaatccaaaccaagtaacttggtgtttttaatgagaacctcaaaggtcgggtgtgaaacttaggaagccaaaaggtaatctagaataattaatcttttaacaccctggtagcaccaagacattgaaggcatacccctcatccttcagtaactaactttagaattatgacaaagaaaatcaatacaagcattgtagcaaaatcaatttttccaatcgaaaggatggatggctgctttttaaattcaccatttgaatcaaaatttgcttggggctctaaagacacgcaacaagatgatttatgcgcagcttgcccagaaccccctgcctggtccagttggttaattttgattgtctgcggctcaactctcgagagtcgagactaagatctcttacaatggcagagagtaaaagccctccatgatgcatagaatagactaaattcctgcataccccactaaccccttactcaccatactaatcctcgggcctaacattctgttttctcatactggatttactagtactgcttgttgttttgtctcagccatttctcttggtatgctttgtttgtcatttgtgtgttttgtaggtataaactctcaacattttccttatgtaaggttacttctatttctgacattatttcaatacgaaactatttttaatacacaacaaaattcacagttaaatatgtgtacttacaaagctcgattatgtccacaaaatccaacactacacatgagtacaaacttgcctaaaggtctcaaacaaagataaaaagtgaagaaatgcctaagcttaacttggttgaaatttagcaaatgattagaattacatattaaaacgaatcatattctttcccatacaaaattcttgtgtttccattcttgtttcaacttaattctttatactatatctaaatgacccactagagttttagtaaccaaaaccatgaatttcccaccaaaccaataaaacacatcaaaaatcaaaatgggttttgaaaaaaactaaccagaagaacatcaacgccggtgaaatccaaagaacaaccaccatgcttaagcatttcaacggctgcatttgtttcatccaaaagcctcaaactttcatggtaattttgattcaaagaccaaagctttgccttggtggcttcacgacccaaggaagtacgagcaaaagaggcaacacaatcgcaaagcttgtcccattccaaaactctgagactatcatagtaaaccccagaattgttttcttcttgggtaagaacagattggtttgtggatgaagataaggagtgagtgagttgtaaagcttcgtgctttaatcttactccaattgttacagggttaggaattgtgggagcaaaggatatggatatggatatggagataggatgggcaaatggggctgaagagagcatttcttcttcttctccttctactctatcatttcccaatgattaaacttggccaatgagaaaaacccagcaagaaatgaaaggtgtggagagttgttttgagtaagcaaaatggattatgaaggccaatgagtgagtggcataggactataggagtggtttgtttgtgcaattggctctcatattattttatacacatatttaatctaaatatatattatgttatagtgtaattaagggtaaatacaattttggaccctctgttttacaaaagttatcaattggaccctgtgttttgttaaatgacaaaatggatcctgtattttctaaaatagta

SEQ ID NO: 18991 - DNA, 3348 bp, Cannabis sativa
aatatgatgattattaataaaacaagtggagaataaaataaaattaatataaataagaaaactgttaataataagaatttaaaattaacttttttgaaaaataaaattaataattttgtcaaaaaagtataatttatttttgtctaaggcattgttcaagcttcgcctacggccttgtacaaacttgagacgaccccgaattatacaccaaacataatttttatccaattgtgaaaatcttatcaatgaattaattaaatcttaaaagaaactaatacaaaatcatatatgaatttgggtaaatagcggcataactcaaaatttaaagtttgtaagtgatataaactcaatatttatttttagcggcataactaatgtttgtaaaactgtaatttttttttttaatttcgtcagcatagactgttattatcttaaatagatatcttattatttattactaaataaatctgaattatatataaaacacacaatattgtatgaaagagagtggtgtgggatgtatgtatgcaaagcctaatttataagttgggaattatgtgtatcacgtttctactatatctacaatatgtaattttcactactcagattggaataaaacttttcagtacttttccactgaaaaaacactcataaattaaaattaaagaataattaaaattacagcttaagccccagaaaattccttagccaattgcttaaactagctggtctttctttatcgaaagcaaactaataatagtgaaacaaatcatataaaagtactgattccttacttccctacatcattttttatgtatatattgtccctatatagccaataacaatatatatttatatatataaacactatatctgcccttttgttaatgatctaatatataaatatatatgtaagaacccttttgtcttaaaaaataatcaaattgctccaatatggatcatgccctaattttcaacccttgtcaaaattcgcattttcatatcaaacccttgactcgtttcaattctaatactcaaaatacaaaactgtccaattcaaaaccacatgatcaattgttgtttttgagaccaaaacacaaaaccctagctcatgatcatcaacttctcaacaccactacaactactactcatcaagctcgtcatcatgggagattttctctatccgcattaccatcatcatcagatcatgatgatcacgatgatgatgatgaaggtaataataatggcgaaaaaatagccaaaagtaataacttgagaggtagtggagttggtgcaaccttggctttaagttatgttcttgggatcttgtgttgtggatccatgattgttgtgatgagacctcaaaatgcctttgcttctttttataaccgttttctatctagatcatcgtcgacgtcgtcatctagggatcaggtagcaccacggatgatggatgaaggtataatcactccgataagtggtaagaatactttgacaacattcttgcaagaggttcttttcttgacctctaaccctaaggcccttgtcatgccttataacattcatgcaattgggtccaatgaagaagttgtagctcttaaggtaaaattattaatatattaattccttattataacgttttttttctttagaaaatcataagatatgtatttatttaattatttccttttacaaattattttaatattttcgcaaatatgatattttattttattttatagtcactttgcatagtacttttatttattttggaaacataggacaatgcaccgtacgtatatataattggtatatatactaactaagttatgtgatttaatctaccattattttgtatatactaaggacttaaattatgatatattcaaaatttaaagtgaaaggagcattattatttttttttttttgtaagtgaggggggcaaaaatactttttgtggaattttaatcttgatctgtattatatgaaatctagcttaattattatattaaaattaatattatatctatgaatattatttttttactacatatgtcctaattaactaaaatacagttttaatatcaactatatttatatttatacaatacatatataatataatatttaataattacaatgtaatatttcagaaaaaagcaattgagctaattaaagttggaaaaagagaagaagccttgaatttactgagcaagaaacgtgaagatattataagagacaaactatcacaagaaaaatactttatcgaaatggcaataatagaagttcttattattctggtaacatctctccctctatatataactaaaattattggttttaatttccataattaatgaactaaaattaattcaaaattttattagaaaaagtgtatattttaattgtatatttactaacaaattataattaaaactttataaaatatatattacatattagttattacgtacaataaatatttaattatcttttgcttagaatattgtctttttaattatttattttcttactcaatataataattattacttttgtattttaatgattttattttattattataagaacattaggaatttattatctatccctccatgtatatatatctttaattaatttatgtctcttaagttatattttaatttagaataataattgtaacacatttaattaaattatatatatatatatacataaaatctgatttttaattgtgtaataaattatatatatatatacatttatatatatatatttatttatttatagggggaatatgagaaagctttgcaattgaggtatttagatgatggcgataacatcgaatcagatagagttcaacgtgatttttacaaggtaattatttcattgatcatttctcactttcatgaaaaactatatatcttaatacttaattaaaaatcaattaaatcaaatctatatatatataccaagaaaataattaaataaataatataaaacaataaatgaatcgtgaacgaatactttttaaaacaaacaaaaaaaatatagattctagctagatcatctcaataatgagttaacttaaactttttaattaaatataaattcatagcatatatgtggtggtacactaaaattctaaaatatattaaaaaaaaatatgagtgttataggatttgaattgatgacttgaataatatatcatcaacctcaactaactaaactataaatatttatggtttacaatacacttaaattttatttaaataaaatgatttatttcacaaaaacataaaaataacaaaaaaattacaaaaatacgatttaaggaattttaaa

SEQ ID NO: 18992 - DNA, 5307 bp, Cannabis sativa
aaaggaaagttgaaatacatactttgagttcttcaagcgctccataagcaatggaaaatggatttttctataggcttggagttctcttctttctctctctccaccgccaaagtcacagaaggagtaggcgaccatgtcaacttcaaatcttaaatgcaaggcaagatatttagaatggccacttactgtactattatcttctcttattttggtattgccaaatggtaggaagtttccaagcaattgtttgtccaacaaacttcttgcagcatcatattttcgaattcttctaactaatagtgagcctactttttgtatcttcggtgaaaacttcaaagcgtgaaaattacacttgcatctcagtttctgcgagtagtccaaatacattgtttaaatcataaatgttagtcatgtttgatccatagtatcattataaattgaaacactacttaataacttcggtggttaagacaaaagatcgagtgagaaatataagaatcaaaaggagtataaagttaagctattgaacacaccatggcaaaaatgaggttccgtatatgttataagaacaactttaaacgtaggtaattaatttcacagtagtcgcatggttacatagtaggtttgttctgtgagattttttctacattataatgacgacattgcttatggtttttagctttagaagagtaaatgtagagagaaaattaatgaattaaacttcatcattcatgaacagaagttatagttggaacgtatagagctgacacaactacaaaataatattttagcatcgttcaacgttgaaaactgatgcaaaaaaccacaacaaaattatttgtcagtttagaactaataacattttctgtctgtttaaaatgatatattcaatatttttgtcggtttataacagacgccacctagcgtcagttagaaaccgactcataaataagagaaaaaaatgtagatttcaatcaaggccatattcacacataaaaaccctatattttaactaatactataaacctaaacctaaaacacaattagccacttgcagcccatttcacactctctctctctcttgataatcaacaaccccaaccgtgcactgcctcctccgatcgtcctagtcgtatgcaacctccttcgatcatccaatcgtgcaccccttcttctgtctatatcctatcttgacaccacctctgcaacccactcgtcgacaagccaactggccatgaatggcttctccctaactccctcttctggacaccgtgttagcaccaccatagtaaattttctctttctctgctctccatttctttctctctcgtgaatgaaatattccttttgtacagttggggacattgatgaagatgacaaccaccgtccattttttgggtttcgacctcacggcggtgactgttgtattttatatttggatttattttatattttctttgtacgtttatttgtgaagatctaaatatttatatatttgtgctttagatctgtaaaattaaaatgaacattaaaattggtatttgttttagatttgggtgtgacctcagtatgaataactgaattcgttttttaatggttgtgtcggtacaaaactgacaagaatgctataaaattttacttttacactattagcatctgctttcaacactagctaatttttcgtaccgactattgaaaattgacgcaaaacaatataatttgcatctacgatatatacgtcaattttaacaactgacgttaaaagaatttatgtcagttgcaaacccaccaaaaaatcatatttgtagtagtgtcaatggatcttatatacaattcagtaacgagtaacaaacttttacaagtttttaataatcgaaataacaaactctcacacacttgcaatctcactaactaactaactaacactctcactacgaaagttaatactccccctcaagatggagtgtagatgttcatcaaacccatattgtcctttagatattggaattgagtaggaaacaatgccttgtaaaaatgtttgcaatttattctttagttgatatgtgtgatgtcttgatttgtccctgtttaatcttttcacgaacaagatggaaatcaatttcgatatgctttgttctttcttgaaaaatagggttagatgttatgtgctggctgtccgattatcacaatgaagtattacaggttccttgtgataaatctaaaattctttgagaatggaaagaagccaaacgatttccgaagttgtgttagccattactctatattcagcttctgctgatgatcttgaaacaatatgctcttttttgcgtttccatgaaattaatgatttttcaaggaacacacaaaaaccagttgttgatctccttatatttagacaagcagcccagtcagactcagtgtaagcttcttgcttgatctttgtctttgcagagaacaacaatccttgtccggatgttcttttcacatattgtaaaaccctttgtacaacaaccatatgagtcatccgtggtgtccccaaaaaatgacttaatttgtttactgcaatgcataaatctggtctagtaatggggatatattgtaacttcccaattatttttgtgtacaaggttgtatcagctagagcatcatttttaatatcttgacttagttccaagtaagcttccataggtgtgggtacaggtttgcaatctaagtatcctagatcttcaaggacttgaagagcataaggtctttggcacgaaaatcacttgatgatcttgctacttctagacgaagaaaatattttaatttttctaaatcttttagcttaaatctactattcaaccttacatttaatgtctctagctcactcaagttgttgctaacaagaatcacatcatcagcatacaccaacaatactatgaaataatccttaaagcgtttgatgaagaaggaaagatttgttgcagaatggttggaaccttcttcttcaagagcactagaaagtttctcaaactatttttttgaaggttacttccatccatatatagatttgtgtagcttgcaaatcagattgcatggtaactcccccttagtactatacccttgaggtatagtcatataaacatcttcatccaaatccctatggaggaaagtattataaatattaagctgatgtaaatatcattcatgaactacaacaagagcaatagcaagattaacagtcaccagtttagtaactagtgaaaaagtgtcattataatctatgctttcttgttgattataatacttggctaccaatctagtttaaatctttcaacataactgtttacattgaatttaatttgataaacccattttcatccaataaaatgttgatggggaggcaaactcactatgatccaagtatgattatcttccaaggctgtgatttcagtggacataacattgtcccactcaatgatatacatgttgcctggctatatggagcaggttcataatgactgaaatggaccaaatgagagctcgataagtggaaaaaagtcttgagtaatcaagaacatgagaatgacaatatggagtagaagaagatgacatatgtagatgaatgcagtaaaaaacaatgataatcttggagataagatggcttttaagcatgtctaactagtctggaagaatttgattcatctgtggttaaagcagatgaaacaggggttttacctaaataggtagtgtagtgtgatcgtgtataccactatctgaaaaaaaaaaaattatgatattaagggagcaaaagtttaggagtaagaaaaggaaaaatatactcttaaaattgaacatctctagaacaaaaaattctattaattttaaggtctaacagtttgtaagttttcatcccaattggataaccaagaaatatgcaagagattgttcttggagaaaacttagacctaatttggtttaaagtgaaagcataggctaaggactgaaaagatctcaagtgatcataagcaggtggtttggaattgaggatttcaaaaagagacttgtttcttagatttggtgttggtattctatttacgagaaatgtggttgtactgacacattcccccaataaactaatggtatgtgtgactaaaaaaggagagctctagagacatttagcaaatgttgatgttccttctcaactacaatattcttttggggtctttgaacatgagaatggtaatggagactcccatgtgagctgaataactcaggaaacgacatctctttggtattgtcagattgaaagcctttgatatgagcattatactgtgtttggaccgatttgatacaattgtgaataacaatttttgtttcagacttaagtttaattatttgaatccatgcgtacaacaatcatctactatggtgatgaaatacttaaaaacctcatgtgtcatggtgtggtaagctctccaaatgtcaatatgaatcaattcaaaacaagttgcaacaatgtgatgatagggaataaaaggaaatttcttttgcttagcataatgacaagtagaacaatgaaaacccagacaattattatctttcaaatgtaactttttattcaaagggaaattttcgatacaagaaggagaacccaattgaaaatgtcacagggtatccacatttatttttgaatctgaaattaaaaatacagtaggactattagacacttttagaaaatatagattcccaaatctttcacacgttccaatctacttggtcgcattagtatcttgaatagcacaagaattagttaagaatctaaagtcacaatctgtagacattgttagaacactaaatgaaagaaaattatatttgaagttgagaacatgaagaacattggatggcatgatttaaggtgaaatgtaaatgtcaccaatgcaagaaatattttgattggtgtcatctggtaatatgaaaagttgtgtctagtattatggaaaagagcaagattaggatagatgatgtgttgtcccggtatcaataatccaatgagatttgagaatatgttttgtcttaccagagaattatgacaaaagtggttgatctgtggtgatagaagggatttcatctttgagtttctaagctatcatacccataattctttggaattgagttgtagaaaaaccaattgtaggatcttgattgctacccgaactttcttcacttttgtcatcatgatttcttaaaaaatttacagccgactgattattttgagagtttgcaaaatttttgtcttggggagatataacatttctttagaaa

SEQ ID NO: 18993 - DNA, 3532 bp, Cannabis sativa
  modified_base (3328)..(3330): a, c, t, g, unknown or other
ggatgaacagccctaagcttcagcaaagcataatcaaaaccagtaatttttcttcaaaagacgctagttgatgtgtttactataccactttttcctactcaatttaatattctcaaagacaagatgagactaattagcattaacactccatcttgaggggtgtattaagagtagtgagctagagttgttagtgattagctagttggttagttatgtgaaccgtcaatactcttatttttctgattttctattattgctcctctcttcattgtattgattagaagcttgagctatataaggctcactcctcttgtactcatatattgttttgaacacaatcatcttcttgctctgttttttacttttcttctctgttctagttttgtaatattcttgaaaaccgagagcaaacttagtgagaaaatgtgaagaggagcaaaaacctagtagtggaaaaatcaaaagaaaaaaagtactccttattaataaggggattcggtccgattcattgaccgactactagtcgtttgccaaacccaaaagttatggcagtaatcatagccgtgttaagcactctcagtacttggaaaggtcgtctcccactaaaaaagaccttggtgatttggaaaatggcaaccaatggtttgtagttcttgattttagaggactttttttgactcttcgtaaaagtaaaggagttcggtattggccgattcaagtacgaaaaacttagaagagtttggtcataaaatgaagacaggacgaagccactgatacaacatacgacaatcttaactgaaatttccaataaaataaaaaatggaaagacatagtatttaattaaaatgaatattcaaatcaaatctataataaggaatacagaaaccggtattgtttattgatctaaactcatgaaactaagataaatatgatagaataaacctcccacctctgccaaatgaatactccgagctccaaaagcgaaaagctttggaaagaaagatagattaaaggtacaaggaaacaactctctaaggactgtcaaaaggttatgtcaatcacaaaacacctatttcttgggtccattggtgagttcagcagcagtgcttccagcaaccgggttcagctcatcccaagcctcaatccaagtgaccatggcatccgaaagcttgatgaagtactcatccaccttaccaagcttggccttgacttgcttggacagctcaatgtagcacttttggacggtggtacattccttcggaagggtgacagcttggaagaaggggatcaactcttcttgccagtagattcccttgtactccttcttaaggttcacaaatgggttgcttgccttgctgtgccaaatgtagggcaaacctgtcttcactccccatcccaagtggtcacagataacctacataaagaagaaatcagtaagcaaccaaacaaaatagaacaaaagatattttcatgtaagataactacatacgaaagatcgtataatggaaaatcggagataccttgatacaccaaccagcccacatatcatcgtaacgtccgattggctggccatcacccataagtccaaagtacattgcagggccgatcaattcacggttgaatgcaagattcataccacacatggggaagagagttcccttagggatagtcaagactgcatccacgtacctaacaaataacacgcgcagataagatcagaaaattctaattccatataggcaacaagtaattttacaatgtaggaagcagcaaatgtacctgctgtttctctcaagaggcttaacaagttgggtgggagcatcgtagtctgggatgttgagccagagaccatgagaaacagcagttgggacaccttcccgaagactgaatggataaccacggacaaaatctgcaccctcacggtatggatcgtagagggtgttaaagaaaaatggtgttgaaggactcagaacgttcttaatgtgctgctcaagagcattgatttctttgccggaaggatcttttgcgacctgaaattaaaaaatgaaattgtaagaatcccaaaagcaaagccagtttcacaagcacgacttacaagattaatagatctatctcataaggtacaaagctcacacaaaatctcactctcaacgctataaactggagacaaaaaaatcaaccttctaacctcaacatatatttagccttacgacttctaaagcccatgaaatgtcaagtagatatggctagacagcaaaacaatcaagatctatatcaatccaattcaagacaaaccaacttgggtgatgattaaaatgtcaagtgaactgaaaaattgtatcaactacgactacaaaaagatctgatgagtaaggcggcatagacataataaacttttttaaccaaccaaaaagtgtagaaaagtaataatactcaaaattcaaaccaaaaaagcagatcagagaaaactacaaaaaaatagtaccgttttaatcgacaaaaaacaataacgagcaagaactagatacagatccaacgaaacaaatcaaatctagcctttaagaaaaggccagatcaagtgaaaactaaacctcgacacaaatcatacccgaaaaacgaaagaggttcataaatctaatttcaaaattcaaaaccaaaaggcatcgggatccaaaaatccaatcgatccaatactcaaaacgcacatcagaagcagacccgtttgaacaaaagaaaaggcaaaagaagaggaaaacaaaactcacaaagcagtcatcgtcaatggtgtagatgtacttcttcttggagaccatgtagccgaagcaacgacaagcagagtccttgaacgaaatgcaggaagccttaggacccagaattcgattgatgtcgtttctgttgtagagctcgtaatcgaagccctctgggaccttgatagtcttggaggggtcaccatcttggacgatgatcaaatggtatggctggaagaagggcctccacatctccaagaaatcgaggttccggattgtgggtatcacaatatcgagttcatctttcagtaatggagtcggagagaccttgctatcagccatggctgcaagggaaaaataagatagaaagagaaattggggatttgagttgctttgttttgagagaaatgagaactgagatgggactgtatttgtaggattttgaaaacagacatgaaccccgagactttgtgagtgtccacacaatgcactgccacgtggcaatataagggtattttgggtaaactaattaaatgtactttttctaggaaacagctagggattttttttttttttttttnnnaacagctagggatttttacaatgctaaatttagtatttttttacatttttatttatatttaattttttaaaacttttttataaaatttattttttaagaaatttaattacaaaaatactttaattgtttatgttgtcttttctcttatttttttaggtctcttttacatattaactccctctctttctcttttttttttttt

SEQ ID NO: 18994 - DNA, 4563 bp, Cannabis sativa
tcgaacctctctgagtctttctaattttcctgcaatattattttgtgaaactattgggatttacaggctgagagaacacaaaaacaaggagggatggtaatgtgtgcttcggttctcgtcatcatgtgtttcgtcatgttggcccttttaataatcaaggaaataatcttgtgatcggtcttgagagctctttccagcatttggataccaactaattcttgtaacccctcctccccagcaggcccagatgagagatttatacacatacgaaattggttttgttgttcccggcagagaatgaagtttcgagtttcgagagaattattagccaagaaaccaattgttgattttgtttctgccaggattttggtaatttggtttcttagcaaacacatcatgtggtgtgatatgatacttttgttggtttcatagtttgtaatctctattgactttattgtacaaaaaaagaaacagtggctcttttattcaatcaaatttaaaaacataaaatgtcccaacaacgttttagtggctcttttattattattattatcatttttttttgggtgtgattggggactttagtggcttaatatataattagagtactcaacaacttgtataaaatagaaaaagtttaaaagatttaaaaaatggtatttttttttaatggaaattcatcttttattagataaccatatcagtcaccaaaaccgttggaatagaatccaaactgaaattaatttacaatcaggaaacgatacaaaggctcgagcgaactcatgagctaccgtatttactgatcgacgaataaaataaatagaaacattttttagttcaataagtaaagccttacaatcatttaccacttgaccaaaagtagaaatcataacaattgaacttcttaaggcttgaacaacagacaaacagtccgtttcaatcactacttgctgcaatctgctggtttttatccagctcagaacctcccgaattcctacagcttcagccaattctggtgttgcttggacattgaataatcttgtatggccactgataagaactcccctagtgtccctggcagcccacccaactccaaactgcctggatgtttcaaaaatcgctgcatcaacgtttacctttatagaattctccgttggaggctcccaatgctcggccccgtccccattgattaaaccagaggacagcatctctaaaccagatgaatgagcatttttccattgagaaaggtaaccttttgctgacgaaacaatagcatccacagtcttggatttgttttgccacacccgatcgtttcttgcattccagattgcccaagaaattgccacaaacagttcccgattctccctatctaacaactggaagttgctgatgcaccagtcgagaaagctgtggtgttgctgcaagaccgaaaggaaaccggctctgtcccagcagtcttgagcaattcgacaggtcactaaggcgtgggagatcgattcttcttcaacagaacaaacagggcaaagagaatgagggactgcacgtttaattcgcagttgcaccatcgtggggagacagtttgtgcatgccctccacactagatttttcattttaggaggcatttttaggttccagaatattttccagaaactattaatctgagattcttcaaaatttgccatacctttcagctcttggagacgtttatatccacttttaacagtgtatagacccgaaatttcaccaaaccagattaaatggtctgtaccggttgtaagattgattggaatttgagtgatcaaagctctatcccgaggttcaaataagtcattcagtatctcattatcccagccaagaccatccatagtcaataaattggcgactttaacattctgcagacccggatgagaagaaataacataagcatttgctttgtctggcagccacggatcactaagaacatcaatgctttttccatctccaacctcccatcgaacactaccagcaatcaagtgttgagcgtctagaatactcctccacacaaaactaggattagaaccaatttcagctgtaaggaatgaaccattcgagtaataccgagctttaaaaatacgagccaccaaggaatttggattggttagtaagcgccagccttgcttccccaacatggcaagattaaaatctctcaggttacggaaccccattcctcctttggttttgtgttgacaaagtctttcccaggacatccaatgaataccggagttactactagctgaagtcctccaccagtactttgacataagactttccatatctctaactacttccataggtaataggaatacgttcatggcgtagctaggaagagattgggcaacagacttaatcaaaatctcctttcccgctttagaaataaactttgcaccccaaccttgcaatcttttcctcaccttttctttcaaataactcaaagccgatactttgtttcgacccatagaacttggtagtcccagatacatactaccttccagagcaggcgccatccccaactcgccacagagatggtttctcaaagtttcctgagtattagcactaaagaaaattgacgactttgagaaattaaccttttgacccgatgccaattcaaacttgtgcaacgcttccttgatccgaaaagcttcagcttcagtggccttacagtacaaatagctatcatctgcgaaaagcatgtgagagatccttggcgctccattagctactttacacccgtgcaaccatcccctttgttcatagcgtctaagcaaagctgaaagaccctccgcacaaaggatgaaaagataaggggagagtgggtccccttgccgaattccccgtgaagggatgataggtccgacttcatggttcccatgcacaatcgtatatcgagctgaagatacacaattcaaaatcagccgaacccaaagctctgcaaaacccattctcctaagaattgcttcaagaaaagaccactcgattctgtcgtatgccttactcatgtcaatcttgagagccatatacccttcctttccttttctctttcttttgaggtagtgcaacacctcgaaagagaccaacacattatccgaaattagtcgtccggggatgaaagcgctttgattttcagagacaatggaatcaatgaacggcttcatcctattaaccatcactttagtaataatcttatacatgacattacacaaagcgataggccggagatcagtcatagcttccggattcctcttctttgggattagcacaacattagcttcaccaaaaccatcctcaaacaccccattagtaaagaaagaccgaaccgcattcaccacatcgtgtctcacaatagcccagcaacgctgataaaaagccggggtcattccatctggaccaggacttttgtctgggtgcatctggaaaagagccttctttacttcctcttcttggatgggctgacataactcgttattcatcatggccgaaacacaagtaggaacacaatccaccacttctctacaatccgtattagaagaagtaaataatccttggaaataatctttcataatctctcctagattcgaatcccaggtggcccagtttccttgagcatcttttagttgctcaatttggttgttcttctttcgactactagccgctttgtgaaaataactactattttggtcaccgtcacgtaaccaaaattgtttggccctctgcttccaataactctccctttgatcaagagctttaaaaagcttttttttcacttcagtataagcttgcaacgaactggcatccctctttccttggagcagtttcatctgttttttgtagtccttaattcggtgattaagagaacccgtaacctccttgccccactccttaagtttctctgcacaaaggtttagtttacctcccaaactataatcatgaccactttcccaacaatcttttacaatttcagcacataacggctctttcagccaagtgttttcgaatcgaaaacgatgatgaggcgcaaagacagtaggaaggaccggttcaagataaatagccgcatgatcggagctagagtaatctaaattagaaagagtagcacttggaaatacctgaaaccaagtcgaatttgcaaccgctctgtccagacggatctcaatccagttagtagagcctctactcttttcccaagtgaatgggtgaccttgaagttcaatatcagccaagttacattgttgcaaagccgaattgaaacccgagattagtctttcgggataaggccgacccccccttttctcctcttgccgaactatattgttcatgtccccaataagacaccatgggagtgccgaacgactagccagagtccgaatcaagttccatgtatcctctcgcctacttcgaattggttcgccatataatccagtgagcctccaattgccatactgagtgctgtgaacaataaggtcaatatggtttttagaatagcccattagactaccatcatcattatttttccacaacagagcaagc

SEQ ID NO: 18995 - DNA, 5628 bp, Cannabis sativa
tacttgttgtgctcataattcatacatcgtcacaagcactatttctagtcttttttccccgctaattgtgcattcgttttgttttcttaaactataactatgataattcttaattgtctctgagacaaattgtatttattttcgcctttgcagctctgcttcctccgacaatttaagagttccatacagaaatcagattacatggcacttcgtttgggtttcattacagtgcgtatctattttgttttcatgttctgctattatccattttagcttaaatatgaatatgaacaggacagtgtcataataacatattttttacaattttacttaagtttgtcataagggagcaatcaagcctaggtaattaggcaaaaagctgttttcataggctactatgcttaaaacttatcaagttgtttctcgggttttctctatgttaggccatggtttatcttttagtttgtcctaaatcttgaaaggtatgtcttaggacttaggagtacattctattatattttcagttactttctttactagccccacataggcttcagccatattatttccatatgctagatgaagctgcatgtttccttggaatagtttaatgctgcaagttatcatttgtacatttctatcttcaaaaatatattgttttactttgtttcatgatatgcagaagcacaagttgccacaaacatacgattttcacaaatacatggtccgaagtatggaggatgaattcaatggaattcttggaattaggtgtgcacttctcttaccataatactgaattactgataggaatttcctatcaacttagtataacagtagcaattataggaaaatagtgagatgtatattgatatagaagaagagaataacaggttgctgggtattcgagagacccagctctctcccaagagctaaaagctcatttaactaaaatcattcacaccccaaaacccttctattactctcctatttataccatctcaatactcccattacaattacccatatacccttattatataataccctaaggcctaacaaatacttccttaagaaagtaatacatgtactcatcttgattttgttttatttttgctcatattagcttttggttattttctgcatacttctattgtactcattcatggtaacacaatggtaacacaattatatcccttgaagatttctaccagctgttaaaagcactataacattgtctattcatgtgatgcttagtacttcaaatatagtttcattaatcatattatggcagactgattcaatatacatttcgattttaatcttgtagctggccactatggggttacgccataatatgcatctttgtaaacatccacggtaagctacttaatgtaatcacaatataaaaaggcagaacaatctgtcttaaaagatctatttcatgaaatgtcatacctttttttgttgttgcaggtctcaatatttacttctggctttctttcatcccagccattgtaagcagacgacgtactttctttcgtgtctattcaatcaaaataaagtgttcttcttaaagatgacataaaatttgtattgttcaatgtgtttcaaatgccaaagcttgtcatggtagttggaacaaagcttcgacatgttgtctcttgtttagcgcttggagttgttgagcagacaggaccatctatagcagcgaatcagataaagcctcgggatgatctgttttggtttggaaagcctgtgatattactaaggttaatacaatttatcatatttcaggtatctaggcctcttcactcatgtcacactcacattcaacattttttctcaagagttttagtgcttagtatctgttattttttttttcttatgcagaatgcctttgagatggccacatttatctggtccttggtaagcttaaaatggctctctttaatgagtttttacatttttgttttaagcattttctcctatgatcaatatcatcacattagaataaacattacataattgtttttaagccagttcatggctcaatctcattgttaatgaaaatcatgctaatgtttgatacttcaatgcaattaaagctttttgaagagaagaaagattggaactaaataaaaaatgcaaagtcttaccttttatattcattaatcaaaaatactctcaaattatatttcattaaaatatacccacttttatgagtgggttgctcaatacaccttcactctctacttaagtcttaacacacaatttgcattaatctaagggtataatggggacatcatctataaaagtgagtaaattttaaaaaaaatatagaaatgagggtaaaaattaaaacttgtaaagtaaagtgggtatacaatgtaatttccttaaatttttttaagttttagataagcttgtttccagctattaataatgaacagaaaacactagtacatattgtttatttattcactttttgaagggtagaaattcaagatgagaaaaagtgaattctaaacaagaaaagtaacatatcattagaaattgcattaaattttggtgaaaggaaatgtggaatggtttttaagactaaggggttcttacagagatgcttgtaaacattaaacaatacacagactaatttcattccatactattcgaagacaagttcttcatttttttttgtactgttttcatgattacaataactgtattgatgtatctaattatctcttatgtttagtggggacttgagaggagatcttgtttcatggaaaacaatttaatgataatcactcggttggcatctgggtatgtatctgtattttcttaagtataaatacctcttacattaagtatagtcatgccataaaaaaggagctctgagtttcttgttgcataatacagctgttgtaatttaataattcaatacctgttatagttggtatagttgttgggagttgggagttgttatgtagctcaggtctttggaatggaacaatcattctagtacagtggccattccagtgtttggtttgtaaattttaaaatggaatgacaattccaatggaaattatatttccattattcaatagaaacaagtttccactcttatatcattggaaaccacattccatatgagatataaaatacaatctttattccattctatttctatcatccctattactatttttattttattccaatatactattactattactattcccattatcattctaatttcattccaattaagtggggacatttttttggttgttttggaaggagagaacctctcgtatcactgtattcattcatggattagctccaaaagaaagatgtttttttattcaatttttcagtgtattttcttggttaggattccccatatgaaaatactgtcaatgagctgctttttgagtatttactgaattcatttataaaaataatatggtttttaacagtattttaatccacattttgcagtgttattgttcagttttggtgtagttacagcacagtacctctgaacataattgttacccaggtttgtttcatgctcaatcaactctttactagttaacatagttcaagacattttacaatgttatgaattgcagaatttagtaagaaggaatgaatgaatgaagtaacttgaccattctttttcttctatgccgagttcagatgggatcccggttcaagaaagctctcgttgctgagagtgtaagagagtcgctccatagctggtgcaagagggtgaaagagaaatctaaacgcgaatccttgcactcacacaccacaagatcggtgtgttcattagaatcaaccatctatgagggggacgaaataactattgcatcagggactctgtcccggagcacttcattagagtctcaaaatcagttaactgtgacatcaaatccacagcctgaggctgaggctaaggctgaggcagtacttgagattcccaacattccctatcaggaatactcattcaggcttgaagagtacttatctgaatcagtaaacattagctcatcacaaacacaaacccccactaatggtgaagaagccagtttaagccatggagatgaagaccaagttatgactctctttgagctgtttaagaacacataaacttgtattgaccgactctctttataaccacaggtcatcaagtctgtcatagtttctcattgtaattgtattaccacatcaaattaagtcctttagaagaaagattgcacattcactattttcattttcttagtagtatataatatatatatatatatatatttatatatgtctaaccaccaatgaactaaatcaaagatagagaaagaacaaaatgctacaaatggtagttttaagaacatgtaataactcattcatgggataagggaaaacccttatcctctaaaaaaatcaaaaggccaagccagcccaaccaaccaactaaaagcattgacagttagcaaattataattgtaattaccaacgtaaagaaaaaagggatcattcattatcaagctaaaatatcagttatttcattactacaaatggcagtttttttgtccaaaaaaacatgtaataactcattcaatagataagggaaaaccttatcctatgaaaaaaaaaagccaagagagccagtccaaccaaccaaagcattgaaacttcatttttttttccttttcttcacaaaaaacatatataaaatgatgatgaacaagattaataaaaattaaaacatgataataattgtttttttagttacttaattaagcaagttcctcctccttgtgagtctcaatgacaacatcagactgagggtaagcaacacatgtgagaacccaaccttcaccaatctgatcatcatcgaggaagctgttgtcagactggtctacatctccactcacaacttttcccacgcaggacgagcaagaccctgctcggcacgagtaaggcaagtccaggcccatttcctcggcttggtcgagcacgtacacgtcgtcagggcactcgaactcagtctccccctcgggtgtgattagcttcaccttgtaggctgccatggcagtcacacgccctcctcggcttcctgtgctggccttgagcccgaaaagtgcctgaccaacgttgggaagtgccctcaatgaggtcgtggtgggttgtctcctcacaaacgaggtgctcaccatggcactagacagagctgcggatgtagctgccattgttttaagtgtttttttttagtgaactgaactgaataacaagcaatgtttgatattgggatgaagatggatcgtatatggtatggcttgtggaaatagtgtggcatggaatcctatctgccacgtggcagcatgttgtggctacttgctttatcttttgttatcaccacacaaggccaaactcttttgcatctccacccatttctttgtgttttattaaaatatttattttgtaatatgcttatattttgaaagggaaatttgaatttccataactgcataactttataatttttttttcttaaatgcatacttattaaaatttgtaatgtatgaccattttaccaattttccaaaactacccctcccattt

SEQ ID NO: 18996 - DNA, 3960 bp, Cannabis sativa
gttggtttggctgctgcagcaacaaaggccaaattgtttgctgatcatgaagaacgagaaatccagagactctctgccaatattataaatcatcaggtattacaatctgtaaatagaagtttattttttccttcccttattcactcccttgttcacttcctagttttttttttccttctctaaataattaatattctaataaatgtattaaccatgtacatgtacacgtatgaaatttatttttaaccatattttatctcgtaattcatttatttcctctacatttcatgtattaatttccctatgttgttttcctttctctaaatgaagatggtaataagatatgtgcacacacagaaatgtgcaggtggtaaatttgttctttcctcatttcatttaataattgcttattttgtttcctttctcttaatgaagacattggcaattgatatgcatgcatgaagtataaaatactgcttgtgcctgtcgatgtttgatgtgttgccattttagatcaataagtgtggtccaattatttgattttcactgggaatcgaaacacggtagatgtcaatgctcccatcaggactgttttctcttttgtggttgttttatacctgctgtagtttcttctcagcaacggtcttactagttttgcatcttaattatcatcatgatacctcacatgtcactgctgattgggttatatctttatgatgcaccaatcttttaaagggaattaaaactttgtaccatctctttgctgtgaaacctattattacagctgaagcgattagagctgaagttaaagcaatttgctgaagtggaaacattcctaatgaaagaatgtgaacaagtggagaggacaagacagagacttttggctgagcgatctcgttttatggcagcacaaatgggagctagcgggatcacttctatgactctaccaggagcacctggtccttccatggttaacaactcaggtaacaatagacaacaacttatgtcagccgcaccttcacaaccgagcatatcaggatacaacaacaatcaccaaccacaacaggttcatccccacatgccattcaggcctcggcagcaaatgtttgctatggggccaaggatgccgcttggtgccatacagtcaccatcatctgctccaaatgtcatgtacaatgcctcagggaatccccaacctagtatgaatcatccgatgttaaggccagtacctggtactagctctggtttggggtgaaaggaaattccatgtaaatttgattagcatttctagttattccttttttggctgcttgcattctgcgacgaaaccaaaaggattatggactgttcgttcatgattcatctgcctctcatcgatctaaacttaaggggcagcagtttgtagggtttttttttattcggcttacaattagctagaatttagcttagggtccgttcaaagatgaacactgttgtaaaaataaagtctgatattgagtccatctctatctctttcccctttttatcatatttttgctttgtttagtgttctgttcccttcatttatatgagtattgattctagaactgctttttagagtgatctttcaaaaattcatgtaatttgtatgttgaatttgttatcatgtattagtatgcagtaatgtttaaaattgatatggactatgaaaaattaacatttgttttaataaattatctaatgtaattatcatttgattagatgttaaaagcaaaatgctccagttttgtgtaacactacgtgaacaggaacttctagcaatgtcatttgttgtcgtaataggaatgtcgtcactgtctatggcgataatatatcgttgtacaatggactttgtaaggatgatttgtagttacaaaccttgtaatttatgttttattaagggtgtctagtaaataattcaatctgaacaaccgaattcaattcaatctgcaaagcgctaatatttgcactagtgtgtttattgcgaattggatgcgttttttcccctccaacataaaaaatcttttgcgctttctttgatgacgatacaggtgcaaaagtactcttctcactcggatactcttcttgaaaaaattctttttttctttgatatccttggtgtaacttaattcatatcgaaaaggctgcaattctgtaacttcctaaatttatataaatatgtatatatatttattcaactaacccaacaaaaatttgggtgagttcttatttttctccagttggtatactatagttgtctcttattcttaaagtaataatgttcaaggaacaaccaaacagaaagaaacaataacttggtcagacccattccattccctttaattaactttcattgaagtgatcttatcgttccatatatgtatatgaactatacacagatgtaagttttagtttaatttataatcatattgcacgaaatatcgaaatatatgttatggatatatacatgtcttcgcttacccttaattatcactcaccctctattgcaaaatgcgaatagggacaaaacatagtattaggagcgacgaatattattcttaaaaacttttatattagtccctaaagtatattaggagcgactacatgttgcctctaatacttggattaggcgtcactggttggctgactgaaattgttataggctcgaaattacctctattgtttaggatgaaattgtctaagtcgattggttggttattttgtggtgggataaaatttctgtctcaattctccctcctccaatttaaatcatttcaaaggtcattttcgagcttgggtcccattctttagaagattgaatctgcttgggtcttctatctagattttcgccggttgacatttctgaccttggaggattttcgtcattgtgtacattattctagttatcattgctattgttgggcgaattgtcttggcgattacctcgctttcgctaactatttccatcacgggccaactctcgacctcgtcatcagtcctattagaatacgtttgcccactttcttccttttgggatcatgttcggccttgatgggttgttggtcattatgcctattttgctcgtacacttggactctttcatcaagatggtattggataacatgcccgtgagatcctcctgcttgcctagtaggtgtatcttccctccttccttccagcttgggtcaaaaattgtcctagttgtctctttcgatgtagtgaccaggtaatacttgttcgccaatgagatggtcaagattctactccatgagaattgagctggtggatccgtccctcctgggtagttgcaagttattggttagatgctcctctggtctatgcacgtgccctgtttgggatttacaacccttttcctctgttcttattctgcctgggtgattgaatctcaatcctctgcccccaatctgttgggcgaactgttgggtcaaatcaacgacttctttttcccaacggttgatttttttttttttgctaggctcgcatctcccgggtgttgcaatccatccattcttgaaactcttgtcgcttctggtcgaatgcttagttcaccatcgcacgggtctcctcccggttgtggtcgagggtgttagtgtgattctaaacctaccctagaacttttctaaggttctccaactcagagttgtctcctaggtccacgcgaggttctccttcaaatggttggcatgtcccagctctagtttcttcagtgtatagttgcatggtggtccttgactcctagacgccaaaggtgaaccttgccaattcggtggtaatccagtggtagtgcttatcgtgctcttaacacttgtagaaattagggctgaacatcgggtgggtttaccgggtttcgggttggcgggtttcgggttcacgggtttcgggttcaaaaaaatgaacccaaacccggacccgaatagggca

SEQ ID NO: 18997 - DNA, 8441 bp, Cannabis sativa
  modified_base (2419)..(2420): a, c, t, g, unknown or other
atgaatgttgattacaattaatggtaataaataaaagatttggacatccacataattaataatatttataacaatatataatatatatcatctcctattttatttttttggggtggggccggggaattaacacctgctaattctaaaataataaatctaccatatataggtagatatataaagcaatgatagctctaaagattcatcattaatctaacttttctccaaaattcaattcagttgcaaaggtgaaatgagcttctgaaataacaacacctctgaattaaatatatatatatatatatatatatatatgagtttttttggagttgaatcctaccaatcatgtttcaattgcattcactaccaattcctatattagtaggatattgtccatttttagtctaaacctttgtagttttatttttggcaccttcccaaaaagcatcacacttatgttcaagacaacacatgcctattctttcaattgtgggacttgggttaataccctaataaaagtgtcattcggctaattgtctctaccacataaattgttaatgtgtatactctaatacacgtagcacgtttatattggtacacttaatatttttattttaaaattaaataaaactataaaaataataaataaaaaaatattaaaattttgaaatattaaaaaaaatattaagtacaaataaaataatagttgagatgatttagtcgaaaaaaactaaatatatataaataataaatagaagaatggtataactcaatcctgttacataagaagaataccaactaagaagagttaacaaactctgcctcaccactcagttgtttactaactaactaaccgtcgtgtaacgcttcactaacactctctcccgtcaagctatatttagaatgttctaagtgtagcttagacaaagaaattgaaatcgcggggaagacaaggatttactaaattgtctgatcagttgtagttgtaggaatgtaataaacttcaagtttgttagcaaaaatttgatctcgaatgtagtgaatatcaagctcaatgtgcttggttcgtgagtggaaaattaggttctaagcaagagcttgagcactctgattatcacaccacaacgcaggtgaatgtttgtgtaatgatatgccaatttctccaagtaaagagctgatccaaactacctctgtagcaactaaggcaagagctcgatactcggactctgtacttgatcgagccataactctctgcttgcgagaactccaatttactaagttaccacccaaaagcatacagaagccactggtggattttctgtcattagaagtccagtctgtatcaaagtatgtttcaagatcaagaactattcttggtttgaagtgaagtccaagatgtggagtgcctttaatgtatcttagaacacgtttccaggcattccagtaattgatagtgggagcttttaagaactgactcaatttatttactcagtatgcaagatcaagtcttataaaagtcaaatattgaagtgtccctatggtgctacgatacaactctagttggttaaaaggagtattgtcatctaaggcaaatttatttgccaaaatcattggtgtatcacaaggtttagcatcttcaaatcaaaactagttttggcaagaagatcatatgcatgtttgggttaagtaagatataaaccagaggcattgagatatgcttcaaatccaagaaaataactgacaaatccaaaaaacttaaagggaaaattatgtatgcaaattctttataagattatggatatcatctaaatttttccctgtaatcaacaagtcaatctacataaatcgaaactagaagaactaccatgcttttgagtgtaaacaaggatgtatctgaacagatggtttgaatccccaacttatgagagtaagtttgagctgtcatactatgctcgaagtgcttgccttaatccatataacgatttgtgaagtttgcatacataatgagaattagtttcatatacatagccagcatcatgtacttgcaagtctccattagttccatatacatagctagataattgcatcatatacacattatttattattcaatatactaattattatacaaaaatataacttaaaaaattataaaaacgacacgaatatactaaaaaaaaatataaacacgtatataaaatataaaatatcaataaaaagataattaataacttaaatggattcccgtcagggtgggagtgtcatctccgttcccgtcttgtaaaatattcgagaacaaaaaataatctctgtccccgtcccatgcgaatccctatagggccatctccataagaaaaatgataaatactattttggatcttgtgttttataaagattattaattggaccctctgttttnntaaatgacaaaatggaccatgtatattctaaaataataaaaataggaccctgagtctaatttttgataatttttttttaatataaccaacttgaagataattcctaacacaaatagattcaaaaaatgtaaacagttttgtcataacacttttagatcaaattattattaaattttattttgacaaaaaatcaatttaaggtcatatttgtactattttaaaaattacaggatttattttgtcatttaacaaaacaaattgtccaattaataatttttacataacacaaaatacaaaatggtatttattcttaaaaaaaaaaatgcatccctaacccccaacacaaatatcttctaattatttgtatattatatttctaaaattgaataaaaataaaactaccatttgcaatacacttgtctcttactagtctttaccaaagaaaataaaaaaaccaatctttctatccaaaattccatctttgaatcaacaccaccaataatctttatctcattctcaataaaaattcaatctttcttccacagctcactcttcccataaccagagcttcaaacactctcatcaatggagggttccatcttcccctcaaggccagtatatcccaccccatcaaataaaccaacccaaccaaacttcccgccatggaagctcaacccaacaacagcccaaccaccacacactcctccaaccccttctccttcttcattccccattgactctctcctccaacaccttctacacctttcttcatctccaaacacaactcacactgttaaaccagtaaagccacatcatttcagccatgcccatttgcgttctcttaaacagcttgaaaatggcggtaaggaaaaacccacttcggttttagtcttagatgaagaagaagaaagtggtttggaaactgggttccttgagtttctcacaacaaagggtaaaatgctttttaattcgattgtggagttttctttggatgatttgaatggttattttgattctgttaaggttgagttagttgaggttgatttgattagtcttttgaaagctttggatctttctgggaattgggaaagatcagttcttttgtttgaatgggttttatctaatttatggcctgaaagagtgaaactcaatagtcaagttattgaattaatggttaggattcttggtagagaatcacaacatacaattgcatctaaactgtttgatgaaatttctctagaggaattctcacttgatattagagcttacactactattattcatgcttattctcgtactggtaaataccaaagagcaattacaatgtttgagaaaatgaaggaaactggactctcaccaactttggttacttacaatgttatgcttgatgtttatggaaagatgggaaggtcttggaacaaaattttagatcttttggatgagattaaaagtgaagggcttcagtttgatgatttcacttgtagtactgtgatatctgcttgtggtagagagggtttgtttaaggaggcaaaggagttttttgctgagataaagttgcaggggtttgttcctggaactgttacttataattctttgatacaagtttttgggaaagctgggattttttcagaggctttgagtattttgaaagaaatggaggatagtaattgtccacctgactcggttacttacaacgaacttgttgcagcgtatgtgagagcggggttttacgatgatggtgctgctgtaattgagacaatggcgaagaagggtgttatgcctaatgctgttacttatactactgtgataaatgcttatggcaaagctggaaaagaggatgaagctttgaagttgtttaataagatgaaggagtcgggttgtgttcctaatgtatgtacttacaatgctgtgctcgggatgttgggaaagaagtcgcggtctgaggagatgattcaagtactcagtgatatgaaattgagtggttgtggccctaatcgtgttacttggaatattatgcttgctatgtgtggtgataagggtaagcacatgtttgtgaatcgtgtgtttcgggaaatgaagaactgcggttttgatcctgatagagacacattcaatactttgatcagtgcttatggaaggtgtggtgcagaaattgatgccacactaatgtatgatcagatgatcaatgcagggttcagtccgtgtattacaacttacaacgcgcttcttaatgctctggctcgacgaggagactggaaagctgctgaagctgtttttctagacatgaaaaacaaagggtttaagcctaatgaaacatcttactcattgatgctccaatgccatggaaaggcagggaatttaaaagggatacaaaggatcgaaagggaaatatacgacggtcaaattttcccgagctgggttctattgagaacacttattcttgtgaacttcaagtgtaaatcccttaagggaatggaaaaggcctttcagcaactgcataagaacggttttaaacccgatttggtgttgtttaactctatgctttcaatatatgctcgaaacaacatgcaagataaagctcacgagatgctgcaatcaattcgcgaagctggtcttgagcctgatcttgttacctacaatggcttgatggacatgtacgctagacgaggagaatgttggagagcagaggaaatcctcaagagactacacgagacgggcgggaaacctgatctcgtttcctataacattgttgtcaaaggattttgcagacgggggctaatgcaggaggccgtaaggattctttccgagatgacagctagagggattaagccatgtatcttcacatacaacacatttgtgacagggtatgcagcaaaggcaatgttttcggaggcaaatgaagtgattagctatatgattcagaacaattgtagacccaatgagctaacatacaagattgtggtagatggttattgtagaggaaaaaggcatgaagaagccatggaatttgtgtcaaatattacaaagatagacagttgctttgatgatcaatctgtacagagacttgcttctcggataaggcaaaattttgagttctgaatttgttttgttttgtttctttgttttaggcaatgtgtgtatatggtggcaaggcaaggcaagccagtcagtgatagtttgtattgttttttaactttctttggcaaatgactgtcacaaaccagattttactcacttgaaatagaagtataaggatatgtataaatatttatttatttatttacatatatttgtatttttaatggatataattagaaaaaaaaaattaagtttctatttttaattttgttatctaattaaaaagagaaatttacggtaaaagtcttctaaaagttcactatgatgcagattaatccctaatttttaaaaataacgacaatagtctctaagttcatttttcttgtaagtctgtttgttcttattttaactagtctgttaacttatttaaaattatcacgagctgaagcgttatataaaattattttttattcttattttcaaaagagaaatgctgaagggtactattggtgcttagtatttttctacgtgtcaatattgctattggtccaagtaataagtatcgaatttcatatagtttgatgtaaaaaattctaaaaaatatcgctagccaattacaagacgatacatccataaagtgttaagcactacttataaatataattttaaaaattgacaacaatataaaagatgcatctgctacccaatcattagaaggcaattatcacttgttaaatcatagcaaagctttcaatatagtttcatggctttgaaatctatctaatatatatttatatagttatctaacaagacatacaactacctttcaaaaagaaaaaaaaaacatatacaacttatttttacttataggtacctatcttattatttcaaaaatatatttcattcaataactgatcagaataaggtataaaaacaatcaaactaaaattccttaaaaaaaacagtatttttctttgactttttctttttcattattttgtggttgagccagccgggaggtccctaaaaaacaattaattaatattttaatttaaaatatttgcaacagcataagtatttaaaattttaaagaggcttaaattcaataattttttttgggaattacttcatattttattttttaactttttttaaaaattttatagtttagattgttccggtgatttctatgtgggttgctatacggattttagttacaatttaagttgttctgttagttactataagtgattctgtgtgaaatttcataaaaatgtataaaaaaaaaccctaaattttttaagagtaaaaatatctaatatttataaaattaaaattttccttaaattctattagtatcttaaatttgtaactaaatttattttttaaaatttattgaaagcaactttgaaagtaatcaatactacacacacctgcatagatccaataatttaaaatttaagtcttatatgtgtcttattttttctaacgtatcctcctgtttaagatactaacagaaattgtaatgttccagtcatttaagcccttaaatttgtaggagtttttacaccatatactaaaatttcaattttttttttctttttcactgtgggatgaattttttttcaaaaatactgtgtaagtttcatattgtgtactatgttaagtttttactattattttatggttgttttttagctgttcaacagttattcttaattgtcatgttttgttgttttacggttgttttaatttgttttataaaaagacattattttttttttgtaaaaaaatttcgtgtggcggtaaaattgtaaactttgatccaaaatccaatatttttgtaaaaatctcaaattttaaacattatgatgtgtggaaaggttagattagaattttgttagtgaattttaataggcatcttaaatttgttaatactatctttgtttggtaagttttgacaccaaaattttagactggatggatactttatttttagaaaaagacttataatttggaaaatttgtacaatacacctaaaaataattttttttacatttttacgaattttttttatttacatttttacagaatttttttaattagttgttcacttgtttttttcaagaaaaatattactttcactttgtttttctatagcagtaacgtcaaaacaatattgttttgaaataatagaaaaataatactctatattgttgtaaaataaatcatgttactatctcgtaacagcatagtcaaaataatatttttttcgaaattaataatctgtattttgtgtatataaaaagaatctataaaaataaaaaaaattgttatttttatatatttgtaaaataatccctctcaattttgcgcaaattaagttaccaagtggcttgatcgacacatatcctactaattacaacatttgaagtatttttttgttttgcaacctaattatttattagttaaacattttttttgacaaaattagttaaacaaatttaattaattaattatttaatcatattataagaaactattctaatatatttacagactaaatcaatatacaaatattcaacaagacataattaaaaccttcttcaacttatagaaaaatagccaagcacatgcacaccaaacattgaaaaacttataaaaacaaaagccaaaacattaccattacaaaattttaaagctctcaaaaaactaaaatcattatatgcttcaaaacacttaattcacacacaacatgttaataatcatatgtcatataacaacctctcaaattctttcatgtgttcatgttggagaccgattgcgaccgacaaactcccatcatcatcattcggattattcataatgtaaaccaaaccatcaaaaagaatcgcagcgggacccacaaaaatcggtctaccccatccaaaatcagcatcataa

SEQ ID NO: 18998 - DNA, 4044 bp, Cannabis sativa
gcctataccaaaaccatactttaagttcaaaactacaaaactttatatactgttttcttttaaaaaatacacaaaaatgtttggtaatttttaaaaataccaaaaacaaaaagcccaataagaaagatgagaaatgtgaccgatttagggattgggcgtggttgggagagagaagtagagttggatcgtgctgatgggcgaggctgatcatcatcatcatcatcatctgaagatgaatcattttgaatggtcactgttgatggaccacttcttgctgctgcccttagataagttctgaatggtggtgtaccacttccagccattgatctagctgacctgtaaagtaatatatactttttcatttttatttctttatttctaatttatattaattaattaacacataattaattaattaattacatacgtatagtagaactccttgcgactagtactagtggctttgggtgtagccctgggaattgtaatccctgcttctccattttcatttcctctcatcccattattcattaatggtcttttttggtcttcttcgttctgaaacatcacatatattaattaattaatggtacttaatttgtagtacataaattaaggtaaattaatagatgtacctcttggaaattggtagttttaatctgcttacatttccaccatctatggatgtagtcataatacacactttgaagtactagcactatagtacttattgtgtaaagctgcatatttcaaaaaagttggatcagttgagttgagcccattataagaattttcctaaaatttatataaaacatacaaatttcccatatatagaaatgtacttttatttatcgaaatcatcaaaaagtagcagaaattccgaatccaaaggaattatatttaatgaaattagccgagtaaacagttctatattttgacccaacagttctaccaagaaaagtgtgtgaaatactgtttattaatttgtaacagaaaaaatataatagaatcgaaagaaacaaaatagtgaaattaccagagctgtgtagtattgggtaggcagctgcattaaaattataaagtataacaattagtagtgtgatatccactcttaaaataaataaacataatttaagtgattttaaaaatgaaaaatgttaaaaacttgttataattatcaactgtgtaaaatatattttatatggaccaccgtactgaaaatcactaaacaccttataaaactactcaccgtcgccggttcaagaacacaacccactagattaaacacatctctgcacaaaaataaataagataaataaatagaaaaccctttttttaaataagcatggattatggataatatatatgtatataatacgaacccggcaatccaagtgaggagaaaagcaagagagacgccgtggctggacttagttttgaaattggttatgatttgtgggatctcagctacaccccaacaaaccaagctgataaggcccaaaccaaaggacacgtcgtctttgaaatcacaaaggcagtctttgaagtatttctcaacccacccaatacatggtttcttctctttcacgcagtaagacattgatgatgacatttctgtatttctttcttcttatggagattttttaagaagaaaatgagatggaaagagagagagagagagagagagagagagctagtgtagctaagagagcggcacagaagtttatggaggaaacaacatatatgaaacagcacacatatatagaatagaatatattattattattgaaaatactacacaggttattataagactctttataattatatatatagacagacagcaacaacactttgtcctttttatgagggtaaattgtaattttattttgttttatttttataataataaaaagagtattcattcaggaatcctataaggattattactagaggactcattatcaagagtagtgtctctgagtgtcttgctagctcagttcatatttatttgtgttttttaaaaataaatcttattgtgtcatgctacataaaaatatgaatcttgttcacataaggcccggtatttttgtgtcatgttcaaatttgtatcatgctttgctcctgccgactcgtattttttaaataagctagtctatttttataccgggcttaattttatactttattttcctatattttttacaatgattaaattatgtttatatgttacgtacttttgaataatattttatagataattatataaaaaaaaataattaatataaatactcaaatttttatatcacactttataaatgaattaatatataatcttagtttttcacattttaattatattaattataaaaattataatattcttgtatttaagttttattattattttaactaatttataattgataaatttatatcttattattattaataataaaaattataaaatattttaagggtaaatactattttagatcttgtatttaacaaaaattatcaattagactctctatgttgttaaatgataaaatggactatgtattttttaaaattgtacgtacaaataagactatgaactgtttttctgtcaaaataaaacttaataatatctaatctagagatctcatgacaaaattggttagatttcatatatatgttcgtgttagaaattgtcttaaagtttagttatattaaaaaataaaattgtttaaaattgagctcttgatcatttttactattagaaaatatatggtctattttgtcatttaacaaaataaaatgtctaattggtaacttttacaaaacataaggtccaaaatggtatttacatatatttattttaatatgtcataccgtgctttttaggcttgtcgtgtatcatgctttttgggctatagtttattcgtgcttacgtgctgtgtttttcgtgcttacgtgttgtgctttttgtacttcttgtgccgtacgtgttgtgttaaaaaatatattttttcgtagcgtgtcgtgttaatttgcagcatcgtgtcgtgtcgtgctcaagactgtattttttcgggtctagtcatactcgtgcctttccgactcgtgctagtttcgtgtcgtgtcaaaattgcccaacgtattacaacactagtcaaaaagtgcctcgtgtttcgtctctactccggcaagatcggcctcctgagataggtgaaacatataaaataaaaataagtagtgccctaagcacaactctgactcacttgccgaatttcggttagttaatatctatatattgggtaataattaaaattatatattaaaaataagatatatgtgtagtgtaggatgtggtagtagtagggatatgggatattcttacacaatatattatgatacatgatgtggtggtggtgtgtagtgtgtgtgtggttggcatattctttggcatggatgccttttgtttactgtgtgtgtgtagtgtgtactacttccacccccaattttacggtccacatgcattcactttctctgcatatatatatttaaacaatattaatgtggatacgtacaagatttcattactatgtcaacatttttaccaaagccatattattacgtactgttgctgcataagcattcattgtttttcttcttattaatttcactaccgccttactcttttttccttttatttatttataaaatttacattattcattaaacttatgtatatctaaccctccaaaaaatgtaatatatcttaattagtaagttagttatgtgtgttgtgatgactaaaaaatgctaaaagtgctctctagaaagatgtgtgtttaagaggtgattaagaatgctaaattaatacactctgtatttccatttctttgcactttttaaaatcaatgattcacacatgtaagtcagtagtttcgtaatccgtaaagagaaatattgggtaagctgtacaatcccacatcgtctgagaaaggtcaagtgagatgatttcgaaattgtataagtatggaactacacatttgaaga

SEQ ID NO: 18999 - DNA, 2845 bp, Cannabis sativa
attatcccgttaatgctttgcaggtatcacgaggaggtcagtcagtcaccatggtgggaacgagcttggtcatttttggaggacaagatgcaaaaagaactctactaaatgatctgcatattctcgacttagaatcaatgacctgggatgaaattgatgctgtgtaagataatttttcactttttttttggtggggggttcgattttgggatctcctctttgtgaggagaggtgtagtaccactaggttatgcctatgaccacaatgatatatatttatatatttttttggtgtgtgtgtagtagagtggctactggctattgcaatgttgtgtttgttctttccttgtgaattggtatataacaacaggacaatccatccattaaagcagtcatgcttattccttcaacaatattttgtaattgaattctatctccgacatcttttagtatatgtagttatattttttatttgacctattctttgatgagatactgagctgaacttaccacagccaatatattaagaaaagaagacataagataataatgagcccttcaaagaaaattcaatcaaatatgaagcctgccactccttttccttatagtagactgtatacaattgcttcaagttattcccttcttccacattcagtagttcatcagtttttgggattaatatatgtcaactaatttgcaggggtgttcctccttctccaaggtctgaccatgctgctgcagttcatgctgaacgctatctccttatctttggtggaggttcccatgcaacttgcttcaatgatctgcatgtccttgatttgcaatcagtaagatgatcaatctaatatacttttctgtttatttagataaatatatattttgttaatttcttctctggtgaaactattaatgtagtcttttatacatttggaatgtacagatggaatggtcaaggcccacacaacaaggtgacataccaactccaagggctggacatgcaggtgtaacagttggggagaactggttcattgttggaggtggtgacaataaaagtggtatgttatagaaaacttttgctctagacgtataatgaaatagttattcttctatgtggatcatttgatttaaacttcctagttcttggttaataccttctgggagagaagtcaacacttgccaggatgtctctaatagtcaaaatgggagatgccatgactgctcactttagaacaaaatttatgctagaactgcaaaatattggggaagaagatttgtcaatgcctataaacttctgttagatttaatgagcgtagctttgtaagaagttaaacatatattctgatatttctattttggaggctagttattcaattcttatctttaagggtgcaattgaaaaggtactataaaattataattgaatgtaattcagattaattacgaggtttgatgtatttgtttaggcagataattacatagtaatcatgtaattggatataattgaggaaaatcaactctccccatgcctcccatgagaattgggggtgtaattacacactatttaattacaaaacattaccgttgttagataatttatattatttttctatgtaattgcaaacacatttgccgaacattaaaattagaattcatatgtaattactacatgacattcaaatacatcacgtgttttaaaatatagtgtaattactaattactattctagtaattacacagttacttccaaacacactctaaaactggttgttttcagaaaaaccatcatgaattttaaccaagaaatgtgtaattttctagaacctgtcaactttttctagatcgtatgtaattcactgcagatgcaaatttcaagcatactatatgcatttgcaattgttctcagtaatctgtgtagaaataggattgatgtatatttataattaaaatagaaacaccgtaatgtcaccattccaactttccaagatgttttatctctacttacataattatatttatcaaaatcgtgccccaaaatagatggaaaatctttctgtttttaaatttatgatgattccatggaactgttctactgcctttcaacttacactacctctcttcttgttgatgcattgcaggtgtctctgaaactgtcgtcttaaacatgtctactcttgtttggtccgtggtgactactgttgaaggccgggttcctgttgcaagtgaggtattttgctttgaaaaacttctgtaagctcaccacaatcgtctaaaagttcctgttatagcttgttatatttgcaacttgcaattagtctagttgcttttcctactgtttagttgtgttacaaccagaggtgagccaaggaaacaatggaagtcatgcagttcttttatttgtagggcttgagtgtggtcgttgggtcttacaatggggaagacatacttgtatcttttgggggctataatggacgttacagtaatgaggtgaggactatttttatgaaattttctggcttcatcttttgttttagaccctaactttccttcccgtctcatgttagatcaacgttcttaaaccaagtcacaagtctaccctgcaatcaaacatgattgaaactcctgttccagatagtgtttcagcagtgccaaatgctaccaatgcgactagagatttggattccgaatttgaagctggccaagatggaaagattagggaaattgttatggactcgccaatggtttgtattattgacataattggtgtttattgtgattatttgaaatgtgcataaaagatagaataattggtgaaaacagatcttttttcatatcattttgctaaatca

SEQ ID NO: 19000 - DNA, 2415 bp, Cannabis sativa
  modified_base (1469)..(1474): a, c, t, g, unknown or other
ttttaattaaaaattaaaattttagctaatcacgatttccgtaaacctcgttgattagcaacaagctgcacagtacgtttaaaaatcacgtaacacgcctaagctagttagagtgttacatcgacatttcacaaacacaaaattataaactcttctcttattatttacttgaacaacttaagtatatatgaaattaatacatgcaataacttggttcatattttgattctttatttttcagattggctagcacgttctacatacatgagatcattaaataaatatatataaaaatctcatcaacttttaaacccaaagcaccgaatgaatttatgagaaaataactgagataataagcccttgttttcaattggggtgataatcatgggatctgtaaaaccagccttctcactaagctcttcaaaggagtcaacaacattctgaagcctagccacaaactcaatcaaaagtgaagcaaatgtagccagagacaaggcactcgcgctctgatatgtcttgctctcaatatcatcattatgattaccctcatcaccatcatgatcagtagtagtaccattaatattattaccaaatgacaagggtagcggccacgaagtttgtttggtcaacacaaatatttgatcatcttctgacgacgtcgttttaatatattgttgataatgatcagatttatgatcatgatcctccttctcatcctgatgatcatcgcatgtaatgttataattagtccccagattaagcactgtctcgctcaatgacttaaaacccagcttcccaaaattattatgatccttaatattagaaatgttttggtgttcatgatgaatagtagtattagctattactcctccaatttcccaactctctgagttgactaaaagataagatctttgatcaatcttcttttggagctgctctgctgctacgtgaacctcatggagtatgtccccagccttggccccaagtttctccatgttctcaaccttgtttcccagtagacgaaggactttggcaccttctgacccaaccctttgtagctcactacgaaacacttgtcttctctcagctggggcctacatatatatacacacacaatcacccactgagttcaaatttatatcaaatatatgaattatagtaggtgaccttatgtgctagaaaattctagcttttattttacaaaacaaattttacaatcatctattaattttttagatagttgttttgtgttttgtatggggcttggctcaaattgttagaagtttctagttaatgtatgaatgactaatctagacaattccaaattttaagggtcagtgatgactctttagggttctggtctttcatttattgttgaaacagattgcattttaaagtatacgtacacaaatacaatactttttcaaaacagcttcattcactctttactaatttttatatatatatannnnnntatatttatatatatatatctttgaggctcctatatatagttattagaaggtggattctgtcattgtttagctaaatatattagcaattatattggaaggtaacaaagttgtgtggtgaccttgatagtgatactatcagtcatgtgagcatttttccgttgtattattggctaatatgcagccttgattgatcaatgaaattttcattctattcacaaaaagaaaattacttatatggacccccatataataatacagcattacctgactttaggtaataatatcacatgtcgtgttgaaagccatcctcctaaatgctcatacctcctttcaaattatataattcttctttttttaacaaaaaaatatttaaaaatttttgagaaaaagaaatcaatatagatactttataatgcttctttatttgcaaatgattattttactaattattggtcattaaatattaaagtgttatgagttaaatgtttagatactttaactaatatttttaatttattgataagctaaatttaaaatactaaaattaataacttaattattaggttatacattggtagtgattctcaagaaacaagaatcactttattctcaattgagaaaattagagaaacgcaatgtcttgtatttttagaagatcatcaccacaaaaatcatccatatcaataatttaaggtactctttcgttatatttaagtttctctttttttttgaatcatcaagggttttctttaaatttatgtttatatacttataattatatgtaatatgtttgtctacaaaattaaatcataatatttcatattttataaattaatgataaaaaaactctaactaaaaaagctataataatttggagagtgcatgtgctacatatcgtcatcaatgtgatgatcttaaaatgttttagctgttgatcatt

SEQ ID NO: 19001 - DNA, 2442 bp, Cannabis sativa
  modified_base (2280)..(2288): a, c, t, g, unknown or other
aattaaaaaacaaaaatattaccaaacggcataatttaatatattatgtcttatttattttaatttaataaaaattttaaaaaattactaactaattataaaattcatctcaaagtgatactacataatttagtgcacataacaatgcacttcacgtatttaattttattattttggcaacacatataatggcaaaaatgtatgatcttggaaactgtggagttaaatacataataataatttggagttaacatcacatccatgttccaattataataattaaaattaattactaataatattaataaacaaaaatattgtcaattttcctttaagattccattagcattatatattttttatatatatacatatttatatatcaggcgccaccactcgtgcaaggattgcaaatacatgagtttatatatataaaagaatctctaattaatactaagtgtatacatacattagttataataaatattggggtccaaagttgaaactacaatgagtgatctcccacccacttagtaggaataattagaattaggaaacggaaagaaatgtaatcatcaccgtcatcatcattagatgaaaattatatttaataaatagacaataagtgacaggggtagtgtaattatgtttattatatataattaagaaagtagtagtcatttgaaattatatatatagatgtatgggattaaaaggttattaagagaaattaaaggtagtgagttcccaccacgaggaatgtgttgtttggtgtaattaatatataatgagatattgagattgcgatgatcgtcaatcacgccatgctcttcgcagcaactcctgcatttgacccattctgaccctatccagcctcttgtctctcttttaaattttgttatatatatattttttgggtttatataaaatgggaatttgttgtcttcattatcaccgattcttgtatttttggaccaacaaacacccatgtgttgtggcttatggctgccttttgtcgttttataccgatcagatattagattagatcgattagatgtggatcaaacacagttcacaggagaagaatgttgggagttactttaattttgacgttgtgttttgagttttaggatcaaatcattttagttttaatttgatttttagcaaggtacatatgcgagagtttgtctatttgctacagcacctaaaatgacttataatgcaataatcggtgggtttccgagttcattcaaaagaaacatgtatatacattggatcaattgttatgggcatcttcgtaccagtctcaaatcttatacattttaatttaataaataatataaatattattgagtcatttataatatccattgtaaaattatcactaccaataataaaactagacatcattattaaaaataaatgaggatcattatgttatattatttattataatataaattaaattaaatatttaaatataacatattacatattataatatgagattaatatatattatgtgttgaaagttatattatatcatatatagtataataatacacatcaaaattgtaacatataaggagtaaggatcacaattgatattatataattaagtgagttattacatatgacagttataaaatcaatgagataagtttctagttgttagaaactgttacaatactccattatatcatttaaatgggtagtgggacattggagagagatttgactcagaaaggagttataaaaaccaaatatttagttttctggaaacagttgttttatggttattattatgttattttatagttgtttttcgaacacttagaatcagttttttgaaaatgtccataaacgtacacatattaattgaacatgttttcagctctctagtccaacgtttttatctcattaaacaccaattaaagtgctggtaacaaccatgtggtgaaaagattttgatttccatatgtgatcttcaaaacactataaatagaggtcttgggttcattttgtaagacaacaagtttctatcaagagagcacattgctggaaacactttaggcttgataaatctagaaagttattttcattcttttctttttcctaagtgcttgttgtagggagaaataagcttttggacaaaggtgtaagaccttgttcaagtttggtaatttccctattatacacttgtggtgtatgtgatgttaagattgctctcacatctcttttatatatatatatatgctatttatatatattgtgttttannnnnnnnntattgctttgagttgtaattcttctctctttatctctactgtaatacccgaaattaaaaaatggattaggaaaaccctaactagataattatgtataatggaggaattatattattatatagttcaatatatgtgatttatatgaattttaata

SEQ ID NO: 19002 - DNA, 9678 bp, Cannabis sativa
gcgcaaggagccgcactcgaaaatagaacatgccccatacggttggaaaccaaagcccccatccctatttttcaattctcaacacacaccttagcatccataaaaagattgaactcaccaagaatcagatcagtctcagttgaggccaatcgattacttgcattgccagagaccagacccttaggagctaggccaatattattagcattttgatatttccataaataatccatggcccatacactaaccatgttatcagagaggagcttgtgatcatgcagaaagtatttctcctattccaaatacgccagccaagggttataaactgctcaagttcctgtcttctcaagatattcatacaccctagtaacaactcataatagcaagaagcgtccttcaaggagtcgaagccactcaacaaccaatccgaacaaatagacttaagagaaggacagagccacagagcatgaatagtactttcgttattctaagagcaaattggacatattgtcgaaaccttcataccatggcaagataaattggcataagccgggatgaaattcagacgtaccttccacacaaaattttttatcctaggcaggagattcagcttcaaaagaattttccaccatatcaaatttattaattttaattgtatgattaagattaattagcatcattatgtgtaaaataatatgtgcaatttgattgcatcccaatcaagtgtatatatttatactgttcaaataaattaatggtactttatatggaattatctttgcttacaatgatgtgtggtacaaccatgtggaataaattcacatgcaaattttgtgatagttggacttgaaattgaaacttgtaccatgttttagttgtggctattaatttacattgcttgaattatgatcaaacatcataatggaattagaatgaataaaactgaaattttcataggaactaattaattttcaactatatccacattgaaggggttattttcaaagaataataatacaatagaatcctaattaatttacataaatacaccattgcaacaaccaaaagctaattaactataaactcattaatccaatcatatatatttttttcttttcaaaacttttgaatttaaaaggagaagtaaaatcaaattggatcaaatgggtaactttttatttttaactatgactaaaaacattacaagcaaaatgtgaatagtatagtatgccaatgcaaattgttatatacattcacacaaacccaaccctttaataacaaatcacaactaagaacacatatctaaactattcataaaaaaaaaaaaaagaaaccataacaaaacaagatctcttttcttcttcctctttacattctaatctttaacaagggagtgaattagaatacaggcttcatcagctgtaggaacaacatcatctagtcatattaagaataaaaacaatgtcaaacactaaaaacgatgtcgtattattattattatgcatcaagaaagaaaacaaagaatggtaaatggttaccaaaataaaatcaaaatagttacctggaattgaagttgggaaatgggaaacaatggtgtcaataataccaccaccaataccatcattctccttttcacaatctggttttttcacttctttttcattctcaacttcaatcttagaaaccccatttggaatgtcaccattttgagctgaaacctcctctgttttgggacttgaaggagagactaagttggataagaaattggttataagcccaccttttttttcatcatctacatcattttcttcttcttcctcagacttggaataatccccatttggtgttgtttcagcttcattttcacacttttgagatttgggactagaagaaggagagactaagttggaaatgaaattggttataagcccactttttttctcatcaccattttcttcattcaaaggagtgaaatgaagcttagtttcttcttctctttctggcatgagatcatccatctctgatttcttgacaccaaaatcaaatgagagagtaacaaaagatatttgtttggggagaatggaatggaagaagtgagcaaaaagattggaactttaataaaatacaagccaagaaagaagattatatataggaaaatttatataataaaataaaaatcaccgcttttattacgcgtattccattgttgttgtctgatgaaaatggtagaccagtgtacagagaacacgttacaaaggtaattttattattattattaccatttaccatttatcgatgaggaaagtcggtggactttatgggcttctactacccaacccatcaattgggctttcccaatatgggcctttaatttttggttgagctagcccattatggaaattagactctgtaccaacttttacaaagttcctttttagttttcttcttacctattttactcatacaacctcaaaatgactttaaagtttggttaagataaaaattgtttaaataaactactcaattaataacagctttaatatttgtcctaaatatatggttttaaattaacaaactcatcagtcagtggatgaatcttccttagctagttattaacattgtaattaacccaccaaaaaaaaataaaaaattgtacttagttggcaatatcttttagtgtacaaaatttagtgtaatagtttaaactaaaatgaataaagagtaagtccaaactccaagaaagcttttttgagctaaatttacttgatcataaacaaagtccaagtttgaacaagtgtgtgataatgctgctaatgtaagaacaatatgtttcacaattaaggtaattatgggaaatagtgcctggcttttttccatggtcataatttagaagtgtaacaagagagcctaaaataaagaacatgatttatcaaatgaaacgaccccataattggtttgattgatactgaatactgatatctacttattattatataatccaaaagcatgaaaatctgaagttgctatttgcatggttaaacagtacaagagttactcacaagtaaatttgtaatgaattgaaggtagaatcttgcttgctactaactcaaaattggattattcttgtgatcatgctaccgaccacgagcaagtcggcgaatcaattctttctcttcctgttctttcttctctctcatcctcttctccttccttttcttttccctcactgaagcatcagcaaggacactttcgagtacagtgtcgaaaccaggaattgtctgtttcagtttttcgtaaacatgggtgctaagcaatgtataaacatctatcaatctctgcaagaacaaaataagacgagagaactcgttagaggtttcgcacggcatcactgaaacataaaagtcatgtaaggaaaatgaattttgaagtcagaagccagtgtatatagtaccatgacttccttgttccactcctgaatgtatggagggcctgtggtgtatgaaccaagaggttcacggtaccattccccgccatatgttatttgatccattgcttgttctacacttagaacctcccatggccttagaccagggataattccagccaattgacgcctgtcccagataagcaaatagtgaattagtatcataagcaagcagttcttatcaggactcgtgttacaatcgaaaatcaaaagttgggtttacaaagcatttttgttatttgcttttttgttaaaccaatacctaacatcttttggaatgtatttgtttggcatgtgatcggcttcaagaattgtcgtgagttcagaaccgccagcccagagaaatagaacatgacttggaattctaacaccaggccaaatcccatcattagctttcagtactgctaaatcacgtcttttgctttcataagcttcttcttgagcctgcttataagtcttaggctcacgaccctttagaggaacccaaggagggatacctttttgtaatttgtgaaggaaagcagtagcagcagctccaaatctaactataaaacaagaataaggacaagtttgattctaacaatattcaaaagataaaatgacaagaggcagcataacaacttattaaatggcaaccctgcaatatgttatgctatctcaaaatatctgagctaatcagagattcaaaaatcgctatcattaccagcttaactcagcctatgatttgattcacattttgttttgacagcattgcatcagaaaaccaagacacaatttttatagtcaaccaactggctcaaggctcaagcaataatgcaagaaaagctaacaaaccttcccaagtggcaatcgcacgctccatgccgtaaaccatgtgaattggcgcccattcatccatgtcttcagcccaaatgaaagtatccttatcaataatgccaccgccccacgcagttttgagggttatcaattcacaaggccccctagtacggcccaaccgatccttatagtaaaatccaccactcctcattataactgccatcagtacataacaataaccacattaacatatggtaacataacaacattctcaacatattttctttctttcattttctcagggaattctcgggtcctacattacagtcccatctatacagaaaagctaaggtttttcttagagaacatgataaagaaacaaactttttcactaaactaagtaaaacagcattatcataactcctttgaatctcttaaataagagctagaacacatgtctcaaactagtttgaatattccatttcatcaaaaataacaaaacacttacaatcatagtaccgcttctcgagtctcttgtacccaatagcttgagcaacatcaatggggcgcccaggcgggtaaggcctctgtctgaagccccaaagcccaaagaagaactgcctggcaaaatcccagaacttatcatcagattcctctctggtctttatggctttcctaggcataggccggccatcaagcccaagaacatgaggaaccgatttccatagctttctatcttctcttctgtaaggattctcattctctttcagctccatttcattgtacttatccgcaatctcctctgcttgggctaaaaacttcataactggattagccctgattgcttccaacaacttctcgttctctctaatctcttcctcggttggattttccttcttttcccaaaaagggtcttcctttagaatcttctctacttctggtgtgtacctgtaatcaggcaagttctcacattcccagaagtactggtccagcattttcccgaaatgacctttttcctcttcgggctctgcattttcggacttgggttcttctgaattcttgtttagaggctcgttggcttgattgaagaggtttgaggagctgagtgaagcgaattttgtaggggtttgggtcttgaggaagaatgagtcggttagtctgaggaggttcaggggaggaagtggcttagggggttttccgaaccagctttcgaaagggttgaagttgatggacgccattgaagataattcttaagcttccgagtctcaacgagtttgaaaattgaagactgagttggactcggtgcaagggaagaagaaagaagggttctctatacggataacagttacgagaacgagtgaaacgaagtttgggccgtaagaaagcccattatgtcctacatgggccgtaagaaagcccattgtgtgctacatgggccaacagtttacgtagtttgtgattttaacttcataattatcacttttcttttataaatttagaaaaatacagtaaatttaggggatgtttccggcaaatatagtcaatgtttcttttgaaagtaaaaatatagtcaatgtttaattaacacttaaaacatagttttataaggtatgttttcattgttcttatgaaaaaatattcaaaattgataaaacataatatttaaatacctaaatatattttttttgttgaaaagatacccgaaatgttaaactattgcacatttattaccccaaataatttttacaaagttaataataatatattttaatttatataaaatatagaaaaatatatataaaaaaaaaacctaaactaatagtaaaattgaagaaatattttattttataaatataatgtttatcatttaaaaatgttaaaagaaaaataaatagctaaaacattattcaaaaagataaaaaaaaaataaaaaaaatattcatataataataataataataataataataataattcacttactatatttattaaataatttgtcataaaatatcagcactaaataatttttttaataccaattaatgatcagatagtgaataagttatgctatattgtttttaaggaactttctttttataactaaatttattttctctatagcaaaacaaatatatattcactataaattaataattccaattccatttaaaaataataataataataataattccaatttgttcaaaagaaaaaaaaaaaaatttttgaccttcttaatattttccaattctaacctacaagtcattttttaaccaaaatcatatttgcaaccactaatctccattctccactgaacaaatttcacagtaaagcatctatggaaactgaaaataataacaataataatgcttcatttataataaaaaaaaattaaattaaaaatacccaaaataccctcaatattaatgtctcgaaatcgttatacgaccacaagaattctcaatagtgataacattttggtaatttcacctccaaaaaaaagctaccccagcatcctcattcctcattcattataagatacaaagataaaaaagcaaagcaaaactcacaacacaacacataagagaggttggattcgatctcaatctcatcactgacattaatggcgggtgttgtatcttgttggagctttttgggttttggttacttgatactatttctgtgtataaacccatatgggtgtatgggttctaataacaacaaggtccaagtttcattgtactacgagtcattgtgtccgtactgtgctaatttcatcgtcaaccatttggtcaagctcttccagaacggtttaatctccaccgttgatctcaggcttgttccttggggtaatgcttctcccaatcctgatggctctatctcttgccaggtctcattctctctctctctctctctctctctttattatttaattttgggttactttttatgaaaatttggaatcagaacagagaactgtgtaactttattgccaagtttggtttgttcttttggaattttctctcttttaattaacattcctttctctattattctttttattttactctttttttgtaagagagagagaattttactcgatttctcatgaaataaaatcatccatttagaaatatatgacattttttaagaggaagagccccaaagaaagtaattaagaaaataagaaagtttattgcactatattttttttgaagaattattgcactatatttaggatttagcttaagggataatttcaaaaaacacaaaaataataaaagagaaattacaaaaatacgttttgtatagagtttttaatatttttatgattttttagattttatttacattataattttttagtgtaatttttttttttgttatttgtgtattattttttatattattttgttgttgttttaatgttattttcttgttaatttttagtgatttttttattgtttttttgtgtttttatgaaataagtaaaaatgtaaaaaatgtacaagattttttatgtaaatatctgttatcttaatcaaattaaataccaattatccataacaccaaaatataattaattttataaataccaatttcttttaggtgatcaaattttagtttgctactataactctaaaattatatctttatctatcacaatattagacttcatatttattttattattataaattaattaaaatttgatcacctaaaagaaattggaattataacattaattaaatttttagtgagttatggataattggtaatttataaaatcaatttgattttttggtgggttatgggccaatgacataaatggtgtagttgaccattctttataatttgggctgtaaatactcatgggtttctcatttgcaagtgcaactactaactatgttgagagttgagagttacatttatttttctctgaaaatcaaaataaaaatgaattaatttcctttaattgatgggttgtattgaaatttttaattgatttgtttggttaaaattttatggtgcagcatggagtagatgaatgcttgttgaacacaatagaggcttgtactattactgtttatcctgatgtggtaagactaattaacaaaaattaatttttgaaatattttaacatgcacaaaaaatcatgcttaataataaaattcccttactttaaattttttgttgcatatatatatatatttaattatacctcttaaaatttggttctttctctgcattgtctagaaattagaatattttacaaatttttgaaagtttgtgaatattttatgccataaacaaaatcagacaacatattacacgtgtgcttaattatttgtttttttttttttttttttgagggaagcttaattatttgttttaatatgcatatccaatgcattatttggatcatacttttagtacatttaacttattttttttaaaaaaaaaaaaaataatagcataaatatttaatatttcacatttttttaatgacataagtaaacaatgtttattttcgttaatttttattagtacccactataatggaactgttaagtggttattgggtgaatacatgatctgttattatcagtactacaccctcataacattttttaaaaaataatctaaattaaattaagtcatttaaatattaaattaattacttatatcgctattaaaaaaaaatgaatgcctaatagcaatactcataataataatatatatatatatatatataaatatttacaatttaaaattagggctaggttggcatgatgactagtgtagatgatgatgatgatgatgatgaatttggtttaaatattggtttgtatgcagaatcgacactttagatttatccactgtgtggagagactgagtttgcagaacagacacaatgagtggcaaaattgttttcaaatttcagggttgggcactgtccccattgattgttacaacactggctacggcaatgtggtaattagttactagttactacttacttagataatgattattttacaaataattattaaaattagaccatatacaaactaattatatatgtataattatttcatatttaatgcagcattgttattatactactacattatcagattttgtttcgtttaaatatgcattttgttcatatttataattcattgctaataatgttggttttgatagattgagcatagatatggaaatgaaacagctatgcttaaacctccacatagatttgttccatgggtcatagttaataataaaccaattcaagaggccagtaatctttccatactattttatatataaatatatatatacatattattaaaagaataaatattgttttt

SEQ ID NO: 19003 - DNA, 2165 bp, Cannabis sativa
aaattcaatttgtcatttaaaaaacagaaagtccaaatagtccattcaaactcaataactttacaaaaagcctaaaagtatttatttacccaaacataaatatggaattttttatcatcactagctttgttatcctgcaaaatctttgagcaacttgacatagaaaatattccatgatgcttatagtggattattcccaatatatatatagacatgtagggtttagttaggtatgtttattaatatatatatatatatatatgtatatatatgtagaaacttctttaaagactagtggctattagtaaccttacttacttcccaaccaaaagaaaatcattttcaacataactacttaaaaaaggcaaaaagaaaattgcaagtaaattaacacctatcaagagagccaagtgggccaaaacactgtcttaaccatttgttcaatatatacaaactgagaaaagccaagtaagaagaagaagatgatcacagaccaataataagagttaaggataaagaaacaaggtttaaggagataccatttacagtttttttttttctttcttatatatatataaatgtgtacacatgtactttgacttgtctggtcccagcagcactgcacagtgttaaatgtttttatggtattatgtctttgacttgtctcctaattggtccattcttcttgttcctgtgttgttttcctaaaccagcaaaaacaattaatggacatgttgtctcttttcctgagtttggtttgttcataagattcatacctcaacagcttcaacatcgaccgagttcgatcgtcccctcctcggagaacatttgttggatttaatgtatccaaatgaccattcattcatatcgaaaacccttgtatgaaagagtgttgtaagaagctagtaatgatcttttttgcttttctttaacatcattgacatgtgattgatgtactcgttgccctttcgagtttcgcccattagccactggagagcttcagctgctgcgtctttttcggcgctctttttgttggtacaaggatggcccactatttgcattccattgaactctacggttgctaggaactgacagttacttagttgcttagttttgtatgtgggggtattgtatcctgctcgggtgagtaacgtttggagctgacttttagagttatcacccccgggtccactttcggttcttgaaggtgcaaccggctgtgtacttgtggtaacgcatgacttagtagatttgaggacctggtgaccaaatacgaatttgccttcgcagttgacctcagaaatcagcaaccgtacagccgataagagctcgtgatgggtgtttatggccattctcgggttcagtagctgccatattccccaggaatgaaattagtgaaacaggagatgagcaaagaacaaattgagaaatctaccaaactaaccacattcaatttatactgagcgaccgttcataatggtcattatatggtcgcacagtgtaatttttggtcgtttatgcgatcaaacatgtttattttgctgataaaaaatttcataatgactataacaaaaaactcgaacaaatctaagtattcccaatgtattttctttccattaaacatttgcggataattaatttctttggaaatctacttactttgctttgaattagatcatcaagctctctccttacacattgatacatctcggccaccgcaggtttcataaaaaattcgaggtatcctcccaacattttcaagtgtccatccttccaaagataaaaaaacagattgttgctaagtcatcttgactagaacaatatagagaacgacagatcaagatgcatgatatcgaaatacttacaatatccccgctagatatgcttccaccgaataagagaagcattgaatcattcacagctgttgaatcccggaggaatacagagttcacttttatcttttcgttgaaaacaagccatggataaggaattttagcttcccgggaattgactgagttctaggcaagccaaatgaagatgaaattaaatacaagcataacaagtagcatatccaagccaagcaatacattgaagtaatgatcgagaaatcataccgaatataaaagcacctggccatcctccatggtttttagtgaaaacgactt

SEQ ID NO: 19004 - DNA, 1779 bp, Cannabis sativa
agagcaatgtggggtttggggttatgtaaataaagatagataacaagtatagtaaatgtgggtttcttataattaatttcttctgaccgctcctttgtcctatatctttgtttttgatgtgttgaaggaatgtgcattgatttcattgagagtcatgattcgattgtgtgagggttggagtttctctatccagcaattaatgttttttaggaccccttattaacttttcctctttttgtctgtaaaaaaagaagaaagaaacaattccagagaaaggggtttacatacaactctcagatttttggtgtggagaatttaatgcctcctcgagagtaattgccacaacactcctctttctctctgcacatttggtcaaaataaataaataaaaatttccaatcactgcccaaaatgggacccacttttatcctgttagataaatgcctttatttcccgtttataccattggatccactcgtggatttggttcattgaatgatggtctagttgagaacgctacgaaaactaacaggtcaccaaccctccctttcacattcaaaataaattaattaaataataaaccctccacattaaagctcgaataggatcttgatagagacatgggaaccttttatgttccatttctatggctcaaatccactttagcattttcgtcagccatgtgaaattgtcaaacaccagcagcatcatcatcatctgcggatcgatcccataaggcaaaacactactactactacataacccattatgcgcctctctctctattaactcgtacacattattatggccatcaaagtccgtcttatcaatctaaacagaaccaccaccactatagtcatcaaatacaagaaaaaaaaattgcagggtatcatgagtttcttaaaaacctatctattgaacccatttggcacaatgatgactataatttaaagccaaataagtgcaacctccaaaaggtttataagttagtaaaacaatcatagtaacaggtacaacctcacctagcagaattgagaagcattcatttgaatgaaagttaaagacatcataacaataaataatcaataataattagagacaagaaagatagcatcatttgctttaagtatttgagaggagcttcatacattttggcttatatgacatatctctgttaacacatcgaatccaaatctgaaagaaaatacaacgagaatattttgttctataataaactaattaaggtcactttaaaatattcatatgtgcatgcatatataaccgagcaggttaggtaaacatatacaatataagaaacattgaacagcacatgtaacccaaggccaattttttctacctgaacctaatatgcatgccttttaaagccttctccatagttctcaactcagaatgctgcgcaaattccttctctaattcaagaaatgaaagacttaaacacaaacaaacgaaaaatagaaaaagggtgagaatctatctctttatatccattctgctgaacatcaattaataagaaaaatgtgtattacgtattaaccatgatagaccccacatcgactacatttactgatttacatacagtaatcgacataaatggtaattactaaaaaagactccttttatccaacaatgctattcataaagtaaaataaaatacaggtagtgaggaaaatagggaaatcaggctgatcttcgaacttcatagttggattgttaaaactattctatattagaaagtaacagctggggaaataaagagag

SEQ ID NO: 19005 - DNA, 2563 bp, Cannabis sativa
cactaaatggatctttttgacatgcttaatcctccatccattgctcaaaataaaaggccacctatagaccattatttcaaacttgtcccaaagtctatatggtaccatacgaccactaccactactattgcaattctactccaataataacataataattccacctaatcattttttttcactatttataaatactataacataaaatctctaatatatgcttatattcatgtttgagctaaataattgctaatactcaaatctcttttattttagaaaattaacacaagcatatacttataaaagtatcatttttctaacaacttattctatgaaattactattttcactcgaaacttctagactaacataaaaaccaaatatatattttggttattacaaaagatgatcatgactctcttctatcttctcacaaacagagcaggtagagctctccatgtgtggcagcaccttttgtaaaagatccttagtaagaagttttccattaacagatttccaaacaacgaactggttcttaggcacaatgaagttattccaaacaaagttatgatatttaactctttcatgttcaataaattttttatagaacatgcatactctgaagtttccaccgtgacatgcattatcaattgcataatgagaacactcatctcaaatttggcacaacttgcaccagtaccaacttgaatcggatttaagttggtagctctagaaattttggccttttaaatagaccgaattgatccacttcacccataaagtttcttgctggtgatttatagcccaaatatatttaccaggcattgccttgttctaattgattccatcaccgaactccgatcccccatagatatttggtaagcacacatttgacaaggaggtaaggtggagattgcttctacaacattatttctccacagaaactataagcaaagtttatcaatctctttgacaatgctctacagaagcaagaagatattcatccaataattctgaagccctaaaagaatagatgttatgagttgggatcttcctgcataagaaagatgtctgcttgcccaagaatagagtcttaatttgatctttttaataataacttcacaatccttcactttttattttgttggtctcatggggaccccaagatatttcaaagggaaaacaccttcttcaaactataaaatctaaaccagagtcaccttgtctacctttggtacacctccaaaaaaagacttgcgattttctatggttagcctttagatccgtgctactgcagaagctgtcaaaaatccttttgatacatgaatcagaggctcgattagctttgcaaaaaatgattagattatcaacaaagaaaacattaataatcttaaggcttttttacacgtaggatgaagcatacgagtaaaagggatatagggtctccttggcgaagacctttaacccattgaaaactcccttgcatgttccattcatcgtaagtatataagaggaaccctgaagacaaaccataatctattgaataaatttggtaggaaatcgcaagctggttagaaaattctccaggaaatcccaatcaactgtatcataagctttgcctaagtctatcttcaaagcgcatctcagggaagtattcttcctgttattgatcagatcctgaaatataagaatgttatgagccaaggatcttcctttcacaaaggcgccttgattttgaccaaccaagaaaagtagcagttcaacaagtctgctactattcacttttgatatacacttgtaaagagtgttacagtaggaatttggtctataatcaaccattttattaggaaatttaactttaggcaccaaggctaaatctgtttcatttaattcttttgggatcctacccgaatgaaagaagtcgagaatagccttagagatttcatcccccaagtcatgccacatttccctgtagaactcagaaccatagccattaggcccagggcttttggagctaactatactaaacagagccttcttgacatccgttttgtaaaaatacctaataaaacttagttgcatctcaatgtgtaagcaaggaccaagctctatacactgagtattaatcggcattgaagcaaaacttgaacttcccatataactcctacaatgatgtagctagaaaatatttgataactttattataatcatcaatcaagcgaccttgttcatccttgtaagagacaattcgtttctcatctcttctccttttaatacaagcatggaaataggagttattatcatcacccttttgaaactaagtgatttttctgcgttgcactaaaaagtttctatacattccaaaataaagatgatacctatttgcagcttgtttctcagcctcctgaaatttgagattcctagtataagcttgagttctaaaaagggcctgttgatactcatttttagcaagatggtaaccatgctcaacatcccatatttccttcctattaaaggaatttagtgttagaatttataaaacactcaagaaatatatatatca

SEQ ID NO: 19006 - DNA, 3708 bp, Cannabis sativa
attacaatcacgagcaacaaaaaggtcctgcacaacctcctcatcccactccctcctccccacctttatcaagatctgcactgtaaaattaatcaaccttgggtgatcaaatcgtaataaaaagattagtttcatggggaagtcaaggatcaccaatgatattaacagaacttccagctctaatactcacatttgcatctgctttaatcatatctcatgactcataaatgcttcaccaaacaaaatttagattattcccaagtttagcgaacaaaaacgaaccacagagataacacctttctttgtaaatgcgaccaatcatggaattttcagacaacaacaagcgccaaccttgctttcctaataaagcatggttatagtaagacttcaaaacccaaggccaccgttgttcttatgttgacaaagccgattccaactcatccagctaacccacgagaactagaggacttggatttccactagtatttagccatcattctctccaaccaccacaagtgtccaaatgtaaaacaaaaaccaacatcacataattaggaggagcttgggccacagtctttagaagtagctccttttccgccttagacaaaaatctcccctcccaactaagattcttttttgcattttatcctttaagaaactcaaaatagcaatcttcttttagcccataatacagagaaggccaagataaaaactgttattgtcctcctagactctgtgtcgagcatcctcaagagtattagaactaaaaaaaatatggaagacatcccataattaaccttttgaccagaggcaacctcgaacaaacctagtaaacgaataatattggaagcttcacgctcattagcccaataataactgtagctatcatcaacgaatagcatgtgagaaataataggtgctccattaaccactttatatcatttaagatctccattcagctcaaatttcttaattaaataagagagtccttcagtacaaataagaaatagataaaagggaaattggatccccttgcctaatgcctcgttgaggaataattggacccaaagcttgaccatcacgaacaactatatattgaactgaagaaattgtagctaagatgagatcaaccaaacgctgagtaaaacccatattcaacatcatagcacggagaaaactccactcaatacgatcataggccttacttaaatccatttttgaagccacgagaccctttttaccttgtcgcttcctctttaggtaatgcataacatcaaaaggaaatcatgatattatatgaaatcaatcatcgtgggataaaatcaatttggttatctgaaataacttgaaggagaacgattttcagcctatttgcaatcactttataaatgatcttatataagacattacaaagagatattggcctcaaatctcccatattaggacactatttttttttttggaatctacacaacattggtattattcagcccacaaggcacatatgaagatgcaaataattatttagcctccttgctcgcaatatcccagcacttctaataaaaagccaggtatcattccatctgcaccaggagatttttttggttgcatatggacaaatgccttcttgacttcttcattagaaataggagcagttaattcgaaattcttttgcaaagaaactgaagggttaatacaatccacaactggctacttaaagtaaaaatatcaaagaaataattggtcaccaccttaaataagctcgagtcccgattaacctaaacatccaaagaatcttgaagcttttgaattgtattatttttcttacgagaagtagctttttcatgaaaaaacttactgttttagtcgccttctcagagccacaatttcttagaacgttgacgagaaaaaacctcattttcaacaaaaaattcagtcaacttcttctcagcttcttcatactgacagatagaaatggggtctctaagttgtttcagccttttaatttctttttttgcatttgccaattcgatcttaaaaaactttcgtataatcatgaccctaaaccatcaaattcttcccaaaaaattttaatttacccatgactacttgattttcacttagaacccaactatctcgaacaacttgtaaacaaagaggctcacaaagctaagcatttttgaatctaaaatattgaactttgggtgctaaattaatggtagtcaggtttaaaataataggaaaatagtttgagacaatgacttgtaaattaaacaacttggtagaattaaacaaatgaagccaattatctttcacccttcctcaggtgtaatgatagtctaagagaggaaaatcatgaagttgaaaattaaccaaagtttgagtgaagccatcaaccaaccaattcgggtagggattacctcccttcttatcctcccgagaagcaacattggttaagtcaccaatattacactaaggaagcaaataatcatctttaagagaccgaataagagcccaagtcttctgcctctaatttctattagggtaaccatactttaacttttattttgaataagctcaatactaattgatactaaataaaactatcaaattggttattttattttagcaacctagtctatttaaatatatatatatatataaaaataggcttcctatatgcatctaagcccaatggcaaacatataagctcacatagataattgatttgaatgggccctatcatgttactaggtttatcatgaaagaaaattacaaaattacctcttataaattatttatttgatctattgactattgactatgattaatttaaattataggatctatcaacaagttaatcatagcaatttaaactaaataaataataggtttattaatttttttgaattaaataattaaataaacaaacatgtaacaagatatggaaaattggttaagatatttctattttaataaataaaatattagtaaaaaattatcttaatttgaattcaaattaggtagttaaaaaatatttaaaaattattaaatctaataaaattctaaaatatctcaattaaaatttaaatattcaactaattttcaaatttctagcttatttaaataataggacaatagtctgagaaaaatcaaataagaaaataaagactgagagagcaatagagattaccttcagtctttgtagctaggaatctccaaaattttgtaacccgagtttgacatttatagtggagaatcaagctacttagagggtcgcttgacggagacgtacctcgtgatttagggggaactccgatatcaatcttgtgtgatctcttggttgatttctgttgtgatttatgttttctcttctttctctaaatcaacaaagatcggttttagatctttgttgctgctagtttttccttttgttttctggttttgtatttggctgttgcaggttcggagcttgaagaaggagcatctgtggggggtttttggaagctcaagataagagcttggagaagaagaggagaagaaggttttggctgctagggttaggaggaaataaaagaaagtgttgctagggtttgctgcaacaaaaagattagttctatactgctctaaacgacagtgttttgaggaagggtactcttgctccgcacaagagggaaaggtgatttttgaccttgtgtttctgccttt

SEQ ID NO: 19007 - DNA, 14190 bp, Cannabis sativa
atttttaaatagtttacagtatcatcgaaaatatgtttaaagttttatgaacatgcgtggtaaattagaatatcaagaactttatttcggaaggtaaattatttagagttttttaaaaaaacaaaaatgatattgtaactataacgaatatcgttatgaaaaaatattccgacatgtaattttaggcgcagtaagaggttgtaattaatatttctcaaaattaatattaataataattaaaattaaaaactatagaggtagcatataattaatttaattattatttttgataaatattaatcacaacaaaattaatcaagattgataacaatattcattgaatcataaatcattgcatcattggcaattttttttagaggaatctatgttatcaattttgagcaacataaagtattatgtttttttttttaatattaaaaacaaagaaataataataaaagaagaagaagaggaggaggtgtcaaacacgcgctagagaaaggagagtgaaacagtgaatgtgaaaaacctttttctctcagtttccgcgaagctgcacgtgtcaacgcgtcatcatgagctggttcctaatgacacgtgtcatcttctgacaggttgaatcccagtctccgaagatcccatcacagccgtctatttgatcctatacaagccgacattacccttattcggatgtttaagagagagaaagagagaaaagattgaaactttagtcaatagagagagagatagagagacccagttgcttgctccatccacgggtatgtatgtatacatgtatctatagactgtatatatatatgtattgttgggtttattccttttctgtaaatttcttttcttgaagcttaatttgtctgttttgatctcttaaagtttcttcctttttttttggtttgacttgaatagagagctactgtggttgaagttcttctggggtttatactttctctgattatgcttggtttgttgctctggtatgttaattgattctcttctcttcttttcttaatttggtttagtcaattgggttgaccttaattctttcatgtttactttgaaaaattctatgttttgggttttgggttttgtggtttaatcttcttgtgtttcttaattttgctaaagttataactttgaaaaattctatgttttgggttttgggtttttatcaattgggtttgtggtttaaccttcttgtgtttcttaatttagatttttctctctaattttgctaaagttataatttagtttatttagtgtcaaaatataaataaatttagatgatgaatagtgagttgactcattgaggatgatgttgttatgttgtgttgtgttgacttgtgttcttcattaattttgtattgaagaattgatgggttttggagtataaagcgatttttagaagcaaattatgtagtaatcatggtggtacatactacatagcattaaaattaggaagaaaatctaaacccctttgtcctgtataactgtatatagggaaaatccaatcatctcttttgtcttggcttgtgtaaaacatagttaacattcatgattggtggcttgacaagcatttaatgaaatatactcatttgtttttatcaaatttgatgattctgttgaacccttactcgagttagtcctttagtttgaatctttaatgtttttcctattatgttgtgctttttaaggtgataaaattatcgccattacctcgaatttgtggtcccttttgattgtttttgacaaggttcttgtgttgcttggtttgatcagaaggggtttggtttcccagctgatgttttcagatcaaatcgattgtacatatcacacgtttagatcaaatgccatcattaaaaatgaagacccaatcgagcacgggctgtttaagagaaagaaatggtcttcgtgtttgtcaaaaatcaactataatttccaaaaaaacatgctctcatgtcagaattcctgatcatactgcagatctcgatacttgcgtacaaagttgtcaagatggtaagccattgaacttgaaagaagattgtgttggttttcatttttgttgtaaggattttgatagattttcatgatgattatatttctaagattgtgttggtttcacttattaactagtcactttcataatcttttgagggtcattcatgagctttctatttgtgttgtttgaatttgagattatcagttcatgtgaaatatttcatgtttactttgagcaattttgttctaagcatttattgacatgaaattttacattcatatttgaaaactcattgaacttttctcatagtatgttcaagtatccaactctctcccgaggagattgttaacgatgaagaggttgaccatcaggaattaccagatgaagaaaagtctcagtctttgaaccaatcttgtgattcaacaaccatggcacaaatggtaaaaagaaataagaaaaattgtttccttttcatatgacattgtgattttctctcttaataatggcggtttttgtacttatgtatcaacacttcttcgattattgcaggagtctagccatgctttacctccgcgattggagactattttttctccttctttggagtccattgaagttcgcagtgaagcaaataaagacaatgatgcaggtttgagcgttcgatattaactaatttctttaaattttctgctgagaaaaagcagttgtagaagaaaaaactgtaattttattcgtcttatatctgatttgctgttctttcatttctcagcggtatgtagtgacagctatcccgatatttcttggttagaagctgatgaaagtgatgataatagaagttcgggcgaccttcagtattgtgatgtgtcggagttctacatttctgacatgatcgtttcagactttacctttgacgcgactgcgtttgataatactagtgaagcgaattgctttactagttacgaacatccagagccaaacatgttgtttggtgttgccgagcaattttgtgttcttcctttactagaggaatcaattagaagcagtagtgccaatgatgagaaatcggatgaacaagcaatgatgggtccaaatgattctagcttgtacttagcaatcaatcagataagaccttgtgaccaggaatctgctgtcaattcttttgactcagaccaggccgagtgtttcgatccacagatttttataaagaatttgcctgaattatctgatgtggtgtcgaatttccaatccaattcattgcctaaggaaacttcaagaaggaagcttatcactctagttcttgatttggatggtaggtggcattgagttgcttgaatttgagcattgttattaggcatcagtagtgtccaacacgacgttgcagttatattttagttaaatatgatatttaattacatcaatagcgatatgaacaacgtgatagtgtaagtatacgattaatatttagcctcacatttccatacatgcagaaacacttgttcattctacattggaacattgtgaagatgcagacttcacctttaatgtttttttcaacatgaaagaacacaccgtgtatgtcagaaagcgtcctcacctcaaaacattcttagaacgagtcgctgagatgtttcaagttattatttttactgccagtcaaagcatatatgcagaacaactccttgatattctcgatccagatggaaagatcatctctcgacgggtttatcgcgaatcatgtatcttctcagatggcagttacactaaagatttgacagttttagatattgatcttgcgaaagttgcaataattgataattcccctcaggtacatctcataattcttcgatcttcggttcactctttacttcatccatatttggtttgatggggtttctagatcagttaaacatgtcctaggctatagctacaaatttagtatttttataggttaaatcatatgtagaaaatgccttgttttagtgaaaagacgtttttggaacaggcgacaagatcttgtatcgtacattgatttgattcgagctaatgtgtattaaatttatgagaggcaggggaattataacgaacttttattggtagaattgaggtaaaactgcggaaggaagcaattttttcttctcgcactttgtcatgtacttaaattcctaagccttggtctctttttgaatatttttcaggtttttcggttgcaagtgaataatgggattcccataaagagttggtttgatgatcgaacagactgtgcactaatttcgttacttcctttcttagagacccttgtagatgcagacgatgttcgccctatcattgccaagaaatttggtaatgaggcataagagcctttgccattctcaattttcttgagtatagcagctccttatcccctttgcctattttttagcaaaattcggcctctaatcttagcataaatatgttcggtttttttctttctttctttcttttcgcttagagctctttagatattatttgcattgttttttaagttactctattgctgctttctgttgtcgtctcagctggaaactcttcgggatcttctctctaagtgttgttcaaaggtaattttagggctcgtctcgtcttttatttttagttgtacagtttatggggggtgtacatgaatgaattactcttatatattgtgaaatgtaattcttgcagaattgttttctttttctttactatttttgatctaatttacttgcatattactttagtttgatctcacaatagaatagagcatagtttagttgatatgatgaaatgaaaatgaaaatctcttagaattgacttaattttgtaaagcaagcagcaacaacattcttgaaacataagcttgatatagttcttgtagataaaaaagggttatttgcagcgaaacctctttatggtttgattttttactcttaacttccttatgtttactcttatttgtaaatttgaggtgccaattgaatattaccgttgaatactaactggattattactgtattgtctttaaagtcttactttcacgtatacacaggtgttatacagtggtcatccagctggtatttaatggtgatatttaactgacgcctcaaatttgtaaagaaaagtaaactcaacgagattaaatgtataaaaattaaaatttaaagaggtttcgttgccaattactcagataaaaataataggattagtaaggataaaaataagtgatatgatagttaaacactaaaccagaaaaatgtcttgttacaaaagaagaaaaaaagagaaaaaagaaaagaaaagaaagaaaaagaatgcatgaaagaaaatagagagaaatctgaaggtgttgtaaattctctatcttcgttcccatgtttgaggaggtcggttttagttcgtaccaccagagctttgccggtagctgttagaatactattattattgttgttgttcttctcaatctctcccttttttttagattaattgtgttttttgatgattcagtgaacatagttgtgcattagttgtcttgaaacagatctttcccatgatttaatgagctcgagttaccgttgcatacaaggtatgtgcgtatgtatgtatgtatgtatgtgtgctatatatatgtatgtgtatgtatgtagaaaacattatgaaatcacgttgagattgatgaactttggttatcatgctgaaaatatggaacttagtaggtacattacataaccacttatctgttacaatttctctttaagaatcttctgtttttggaaatgagaaagcagaagatatgaaattaatatgctaataagccaaactagtgtatatatagggttatttgcaacgatatcccgttatgttttgattttttacactgaatcgtcttatctttttcttttttgtaacaaaaccctctcatgtttacttttctttgcaaatttgaggtgctaactaaatatcaccgttatatatcaactgaattattattgtattgacttcgaagttttactttcacgcatacacaatagttattcagttggtatttaacggtgatatttagttgacatctcaaatttctaaagaaaaataaacttaaaggagttttgcctaaaaaaaaagaagggggtcaagtgtataaaaattaaaacataaaatagtttcgctgctatagatcagtttatccctacttgtcttttgcaggtataccctgtgaggtaggtaatttgtcttagtttatgtatcaaaacattatttcttttcacttcttcgcttttaagattcttgctcgattaccattgcttaaaattctgaattccgagcaaacatgttgattttgcttcgatcaaaacatgtttcgtgtgtgtttgttatatgcatcgatacgaattaatatgtaaatctcttaagtctactacaatgtttcaggacactgctctctcagaacattgctctataattaagtgtatgtttctttatgagaattagaactcgaaaacttattgatgaaccaaatgatcaaaactagatatgctgttgttatgtttgctctgattatgaatacaaaaaagaaaatatgttggctttaaatttcattatcttgataaatacttgaccgattaagggagaccaggtgatgctttaacaccgaaaaatttacaatttttacgcgcattgtctgcaggtctgtgtgccgagaccagtaatagctcttctgctaatgccaacattagtaggtacacagagtttttattgttcttagagttagatgtttgtatgtagtgaggcattttcaggaacaaaattttggtttaacttctcattctcaagtaaatataattgaagaagtgatttgttcttctttttaatgtaatgatcttatctcagcttcttcttttttgtaaatcatggtataaatcagtgaatgtattacttgtgtttatgatgattaaagataactgggctttagcttttgttttgattagaatcattttctcttgataaaactttgcatttgtattgttgtatatctatgactattaatactctacaatttgggttgcttctagtttgagctagggctgaatatcggatgagttgatcgggtttcgggtgaaaaaaagtgaaccagtatccgtatgttcacgtgttgtgggttggtgggtttaaaggttgtgatgaacatacctaattatatttaaatatataattaaattctaaacacttacctaattatatataaacatataattaaaccgttaaatttaataaaatttataaacatatggacttttaacacattcatatattcatatgtattataatatattttatgtatttttttattttaggaatgtgtgtatagtgtaaacttgtattattattaaagtttagataagagtaaaaaaaaaaaattgggttagcgatcgggtttaggtctaggtagattggttgggactgggtcaaattcggtaaaaatgttcaatcctagtttaagcatagtattttcacttcttaaaaacatattttttaaaataaatttaaggaaaaataatttttttataattttgttgggattggaagtggaaagccttcaatggtttttcaataatagaacttttgcaaaactcgctcttttgtaagtttggatagaaaagtcatttcaatataattttaaaaaattattaatttttccctgtattaagttttaatattttttagtaagttttttaaggaaaagtcattccaatacaattaaaaacaattattagtttgtacctatattaagttttaatcaattttattactaaattttttttaaaaaaagtcattccaatataattaaaaataattattaatttttaccttaagttttaatcgatttcattactatttaattttgatggaaaaatcattccaatacaattgaaaataattattaatttttatcttgagctttaatcattttattactacttacttttatttattattattactcccaaccaaacacaccttaatttcttaacagaaagtgttatctataaaaagagtattggcacacttgacatgtatgtatgagattatatgagattcgatacaaaaaccaattgtaaggcactgtttttaggtgatgttgacactactaataccaaacagcaatgatcgtaataatataatgatgtatattaaaaatttacatatagcgatatgataagttataaattttttaactaatcacatttatttaaattgagatctaccgtttaaaaatataataacatgttacaacgtctaatatttcagtgcatattttgaatgcacatgcctatcatttttttcttttgatatctgatgcacatatcattactccattgaaaataatactaattataaataatagtaaagagaataatttacttgtttatttcctaaagaaattaacatatatttatacacaacttaagcaatctattctaggaaattaagagaataaagaataatgattagcctaattatgttgatcatgccaaatttgttacaaaaataatcaatccacacaccattaagaagtcttgtaaagatgacccctagttgctcttcagtcttcacatatcttgtagaaattaaaccttgttgaatcttcttacgaataaaatgacaattaatttcgatatctttggtccgctcatagaacacaggattagacgcaatataaagagcagcttgattatctaatgaaaattcaaataaagagaataggggtatcattttcttgggattaaaatgttaaagttagtaacatcatattggtgtgagattctcattcttcttcatttttcgagactttttctaaaggaaaaacaaagaagacaattgccacctttcattgatatgtgatgatattacaaagcaaaatcagatgttaacaccaagcaatgctattttcatcttttcaaccaaattactctaaaagtttctaaatcccttcttccatcagtcatcgtgatcctacattgacttgacatatgtcattgttttttcgccggagattgctcaatggaatttagagttgtaacagtttcacttgcttctcttgcactagaagtatgtaatggcggctttgcttcgtcctataacagcaaaaaaatcgaaaaaaagagtggaattttagcatgatattgcaaagttgttccaaattgaagacaattaaaagggaaaagcacagagccttattaagaaaccgaattagagtacgggtgatggcaagtgatcggttttactcacctgagaatgagatgtcatgttatgtgttgctgctggttccacccccgattgattgcttccatcaagttccaaagacgggtcctattgttaataagaaccgatagttacttagcatagttcgagatatgaacacagaccatacttacttttgaccactattgttaataagaaccaagagattttttttaatgaccccaacaaaattactggtagatccctataatgaaggtatcttaggactatgccgagttgctccctatattcaaatgtgttcaggttgcaatgttcattaaaaaaataacattaggttgcaatgacaaacctgttgatagcagttttgattccactcctgaattttcgacagagtactttgttgctgttgttggtcttgtctggcttgttcttgttgcggttgctgtggtaattgatgtgtgtcgggctgctgaggctgctgctgaagctgttgctgatagagatattgttgctgttgccactgaagatattgttgctgatattcttgtgacagattcaaattctgttgctgaggttgttgttgcattaacatttgttgttgatagtaataatattgccacatttgattatatgcttggttgttttgcatttcttgctcttcactaccttgtaccggttgagatggtgccacataatttggttgcgccatactttgcacaggccaggtaaccggtggaggtggggatgttgtttgaaactgaatttgagattggctgccttgcagaatttgatgattttgtggggatgcaatttgagatgggataacttgaccgataggaattagaccgctcaatccagcttgcgggtgttgttgttgtgtagaacctttcctgtgttgatgtgatgatctttgtaaatgcccttgaaatccaaactttgattctttacgaactttagcattatttgctcggtgccagttctttccacgatttgcaggcttactttgctgataatatctaggttttgttgaagtaggattttgatagctcttagaagatgatggattgactacttcattttcaatttgaggggaattagcttcagcctttctatggatttgcgtacgatgatcttcgtcattattaggctgattgctctccaccatgctttcatcagaaatgcaggtttcttgaggcatagaaaattttgagtctgacgatggttcggcctgagggtgtaacgaaagaccttctagtgaaagtggcttcatatctcgctgaggttcaaggccgaaagctcggttgtgatcatttccatttgggtgttcatttaaagtttgtaaagattcggttccttcagcaacttccagttttaaacttaatgaaggggaacctactaaatctaccgacgatacatttgtttctggtgaatctttcttggattgctcggtaacttcaagagcaagcaacgtcactttctcccccgaatcactgtgagcttcttcagaaggaagttgatcactagttggggtttgttcgaacgaaatatcatgaatctcatgagctggaaacttcggctctgatatttctttgtcttgtaaaggcatctgaacaagagagtcaagattagactcttcaggtggctgttgatgcttagtaacaatgttaatctctcttccctctttagcaaatcgcgatgatttttcatgtttgaattgctcatcaaccgctgttctgaaagaatatggaaaaaggcgaacgtgacgattccatgccttccttacttcatcaatagttccacaaagatccacaaactgattcaataaccattatcagcactagataagagctcaataatatttgctttttccgagaatgaaatgatgttaacttcgaaagggatttcaattctaacctttaaatataagctcgaaacatccttagcgtccttggcattcaaaccttgagacgcgtctggccctggagatattacattagctatgacagagtcgatcacatgtatgtgacgcttccctccatgcagtgtagcaaaatttatcaattcctataaaatcgacgatcatgaatctcaattttctttcttagataagaaatgaagttacttgtgttccaccaattcatgaactcattaaaggttgtttaatcattagggtaagctattttcgaagaacataaatacctctaaaagtaagatgcagctcggtaagcatttaattccttctattaaaatatctcttgcagcatctgcattttcagttatctgtatgcaagaaaacaaaaactttcatacattagaagagaaaatttaactcgatggaaatgaaaaaggcgaagctgcttggagactaattttgtagaaaacaatgaagctcaaaatacacaccgaaaacagaaaaaggagaagagttactcaccatgtatttaagtctagaaaagtgaacatataatataggaagagtatccaaatttttgttcagctcagccatttttagtgcttcttcatatatattagtagcttcaacaaaatttccctgaaaatttcgaaaaagaacaaataagcgtaaatgaaaactaatatgtctttttatatgatgataatgtcgatttaccagacgcctttccatgttagccttccttgcaacattttctacgaaattagaatctaattcttcgtcacaatgaagaagtgcagctcgtgcgccaattgtatctccatcatgctctttaaatcgggaattaaaaagatgcatttctggcactctctgcaacgaacatacatacgaggaggaccataataaacatctccaatcatgtataaagcaattcagtcaagacatcctataaaatgcagcaatcaagcaaatgacaaacaatgacactctgaaactaaaattggtagatgacaatatcttagtagactaagagaactctcccaaaatcaaaatcccattaaattcacaaatgcaacaatgttggggatgcggctagcattttttacacatttgtatgaagcaacggattcatctatactatcaatagagtttgtaagaccccataatttcaaaaaaaacacaaacaacaaaaaaaaaataacataattgtacgaaattttaaatatttttaagattttagtatgatattgtccgctttagatctaagtcctcacggttgcacctttccaaaaggcgtcatactaatggagtagtgttcattcttatatacccatgacctttttcgtatttagctaatgtgggactttggtcgcacacccaacacttccatgtggttttgttgttgttttctcgtgtctttatagaataccataaaaatgtaaaaaaaaaaaaaaaaaaacctttgaacgtaaaaatgtaaattttttttaccagaattagcaatttatgtaattttcccaaaatctttaccattaaaaatttatcaacacattttatgggtgtcaattagtacctacaattctatgaaccattttgaaatatgaaccacctaactactttctactcacattgaggagacaaatgcaaacctcccaagaagtttgctaaacagagaatgttactcatcctgaacttgagaggtttgttcagaagttatggtcgcgtttaggaaaatgagatttttatcagaaaaacttatgctcggtactgtaactgatagaaatatttctatagaaaaagctacttccttaaactagaagaacataattttggtcaaagaacacaccttaagaaaaatttgtgttgctcggttgagagcgtaggttgcaatctctcttccaccctttctttccatgaattctgcgtaacgcatccaaaactcaggataattcgcacaaggaatcaaacatttctcgtaaagtttaacggcctaagtgacaatagaaaagagatttagatattatatgataacatttcataaacaaataaatggtaaaaaaaaaaagaaaagaactaaaaccaacccagtcgaaatctccttgcatcccaacaaagtccagatacctatgccaattctctaattgatcaacatcaagagacttgacatggaagtaggaccttcttatcttcatctcgaaagtgctaattttttcctccaattgacatgcttctcgatacaattgttctccgatgtaaagatatttctgaagtagtgattttgatcgggtcaagctgatagatggctccaataattcgttgataacggaagaaatttcagttgtcgtataacttttaggaacttcgtcttcaagggaagatcctgagcatgaatccacagcttcgcatcccacctccttggtacacaagttagctaacttcttaaaactgaaaaaaaaattaaaacaaaaaaaggtaacaatgcagccatacaaacaggtagatctttaaagttcaaacaataaattcaaataggaaaaatagtttggaataatgttataagtgtcgggaattaaatttttcacacttgggcaatttaattaagagaaatgctaaaaagcaccagtaatggctaacaccatcctcggtgtcatattactattaatttaatataataacttttagagagtatcgctaatcaataacaaggagacacgtctagaaagtgttaggcagtagataacagtactctttgattaaacaaaagcaataaaatttactattcaatataggaagttccaacaatgagatagaaacatgaaagtacaaatgatgatacctatcgtaataacgatgtaactttttagtcggaaatctaagagcttcaacgtaaatgtgggctaacaaactccattgctgctgagataactcaaattcaatgtatttgtcccataaagcatggcataagtaatccttaccaacatatgacaag

SEQ ID NO: 19008 - DNA, 5245 bp, Cannabis sativa
ttgtcatttaacaaaacacagggtacaatcaataacttttgtaaaatagagggtccaaattagtatttactcaatttcaatcccttgtgtaaaatattatgcaaaagatgatattttctttttttttttttttgagaaaaatgtaaataataatatatacataggaaaaaaaatctattttgcttattactccttttagattccactagttaaagcttattcttcaccatgtgaataaaaagcaacaaagaacccaaaaaaaatcaaaagggacagatagagagagagagagagctaccattcaaaagaaaaaaatagcaaaagatatttgtagagggcatgacattttatgaccatatgttgtacaacacaatatattctttaatttttcttttttcttttccttcaaatcaataaaaaaatctttttcacctaaaattcttatagaacattgctattagacaacaatagtacttaacaatttctataagtagcgccccacaattagttaatgatattttctaaaacttattttcttaaattatataaaacacaatagttaattataccaataattgtataacatcgaaactacacactaagtaatactttttatcaatcattcttatgcagtgtcataaaaggttattgtgctttttttttggtgagtagtacactatcatgctaccataaaccaagtaccgacaactataatatgcaaatgtcactttctcactaagaagcttaataagtatttttcttttctctaagaaagaggcttcatttccagctagacccatatgagatttttttctttttgatcaagtgaatgagattttagaggtgtttgtagtgttatagtatagtagtatatagtgttagtagtagtactactactattagtaggggaccataaaagacagatggctaagtaaacacattttggaggtatcttctcaatctcatctccctatgtatatatatgtaagtattctttcttccattattggagcttgttatgctacaacaccaatcaatctatttctcctcatcatctttcatttcatgcttcattttcatgaaaatatatagtactacaacttataatttggtttctgtcggattaggtgtcgctaggttattagtttcgttatgcaccaaaaattatattttatgtctcattttctgtaaattcattattactatcgacaacacataaaacataacttttggtacataaccaaaccgtaccgttagctctatctcgaattcctaccttagattagggttctggattcgttgtcaataagaggattgttccaattacgtaccaagaacataaaatataatttttagtacataacaaactggaattgtaccactagatggcatcgaatcgaaaaccctaccactactaccaatgagccccacttgggtaatgtcatgccagctaaatctaccacctatcatactcacaacaagtgatcatagatcatgacatctcatgttataatgttagaaaaaaaagcttattctattatagtagcttaagaaagaaagaaaaaaagcatgtaatttcccttaaaaaagggtaaccttagatattggtagtttaagtaaaatagagctaagttaacaattagccaaaatgggtttctcttgaaaaatatttttacactaattgggtaaagtttggtcaataagattcatatctctttttctctcttttcttttttcccctcatattattcttatcaaaactctttagcatatttctttctatcctaggtcacattccatattctactactcattatatatatgcataaatatataataggaaggaacaaaagggtagttaaaataaatattttttcaaaagaataataaagaaaagaaaggattcctcttcttctaaactcatagaagttgcctaattttgcagcccaaaaaataaacaagtaaatccacttcttcttcttcttctagtacaagtttcactattcatcagaaaatgacttttccttttatgctcccaaatttatagcaaggaaaaagatgttaaaaaaatcaaatcaaattcaaacacacacaaacatataaatatatataagttgttgattttcaaaaatatcccaaataatcaaacttcaaatagttcaaaattcataacaaaacatcaaaaacagaagcaaattataaattcaaagcataaaagtttgagtcttttttcatatatataaaaaaagctcaaacctttaataacaattcaaacaaacaaaaggttctaaattacaactaataataataataataatacataacaaactgataagagaaataaaaagaacaaacaaaaccaaaaggaattgaaaaacctgaaattttttcttcttcccaaatttggtttttgttcttttttttcttttcttttgtttaatgccccattgaaccaaagagaatgagaatcatcatcatcatcatcatcaaagtcttctccaaaaagcttcaagaacccgaaaaatctgccaattaagtaaaaacagcattagaaaaactgttgtgtggggtgtcttaaagctttgatttttatttgattttgattcaaatttctttggttaatggtgtgaatcagaggaagcagaggacggcttttctgaaatgccgtcgtgctcctcttcttcgccctgaatcctcgccgggaaatgaaacccgggggatgaaaatccacctccaactcccccaccaatgaatcccattgatgagtattgttgttgttgttgttgttgttgttggttgtggttatggtccgccatggatggtgatgaagaatctatccaagcgcgaaccgagggcgtgttactggactgaaggggtcccctctgttgttgtgtaaaaaactggtgattattcccacggccgaaaaacggctgtggattcaccacagggaatgagttgaaaacaaacccagtggtgttgttgttgttgttgttgttgttgttgttgttatcgccattgatatgaaaaccactcgggttttgttgttggggttggttatgatgctctaaccaactcgaaaacccaggtgagtaaaacccttgttgttgttgttgctgttgttgttgttgatgatgattaaaaattgggtcttgaaaagactgaagagaaagcctcagatcttgattctgactacttgttctggaaagcaaatccggtggattattataaaattgattaaccgatgtacagagttgttgatgatgatggggttgatctggaaagaaagatttgatagtatcagcaattgaatcagaatccaaagacggtggaagaaaccctccaccaccaacttcaaccatatcagcagccgccgttactgaattagaatccaaacgcctaacatcaccagttgtaacaatcgtctgtgcattctctgtagttaccgcttgacaagttattaagggattccacgcgggaagctcatcgagttcatcaatggcggcttttgccttttttataagccaatccacagctttacttggtctgtcataacccaatctgtcttgaacatcatagaattgaatagctgtatgagctgaaagtctcactcttctatctcttggtcctttagctgtacacaccttgctatgcctgtcttttcttcctgttgatcttacaatgtgtcctccttgaacttccacaatctcaccaccaacaccaccaccaacaccactgccaccacgtgttcctaatcttgatggtgttattggaatgactgatttttgtgaagaagaaggagggtagtcctccatttttcttgcatattcgattcgattttcacctgagtttaaacaagaagaagaaggttgaaagttgttgtgtgataaagatgtatgctttttttgagtttgggtatttataaccccaaaagattcttccttttcttcttcttcttcttctcttacatgatttaatattgggtttagctgaaaaaatggattttgggtttgatttaggtaattattatagtgaagatgttgaaaatattgatgatgattattatgagaatccagactcaatcttcttcttcttcttctttgcttttcttcttcttcttcttcttcctccagctttattattataattacttataaataacaataattctcagctgaataatcttcttcttcttcttcttcttctttccaaatcaaaattttcacttccattttcactcaccaaaaaaaaaaaaaaaaaaaatcagcctaacccatttcactctctctctctctcctctttagtttctctctctaggttgtatattggttcagataagtaaatgcccacttgacccaactaaagcaaaaaaacactctttaggtttttaggtttgttttgagagtaaagttttgatctttttctctgtttcccaaacccaaaaaaaattcagagaaaagagaaagaaagagtgttttttgtttagtgtgttgagaaatggcaaaatagtaaatatatatataaaaaaatatagagagagaaagagaaacagatatatatattatagagagagaaagagaaatagtttaattttggggtatagaagaaggagtgttgatgatggcagtggtaagagggtgtgacagtgtttggtcagaaaggggattaaagatctctgtgacctcatcactgcattttcagtactaatttttttttgtattattattattattattatttaaaaaaattgaaaaataataaatatttatttaatccactttttgatactttttcacagttttcactctagtagtagtctagtctagtctatttttttaattgttctttctttacttttgtagttacaacaaaaacaagttgaaactattggttagttagtggagttgagttgtgacttaacttgttgtgtttttttgttggtaggttacattttagattttgagtttttagttaagaaaatgagtttttactggctaaactctataattatcgttttattttatttttacaaataaaataattaaaaaattaaaatagagagttacttttattgtttttcgaatggtattttttattttaatttatatttaattattttaataatattttataatttaaatttattaaaaaataattatttttttaattacaataatattaaaaaaggagtaaatagtggcataagtactcaaagttttaagtttgtaagtggcataatctcaatgtt

SEQ ID NO: 19009 - DNA, 7222 bp, Cannabis sativa
  modified_base (735)..(745): a, c, t, g, unknown or other
tatatatatatatatcttcttttcttcttctttctactcgctcaggttttctcacaatcttatctttttcttcttgcaggtcgttgtcaaatctgggagatgcggtcaaatctggctcgagttcgatcggatttggactgagtcaagtcaaatttgggctgggttcccttgcccttcttctcggttccaatggcggactgacccacaaaatcgagatcttagtcgttctccacagagatctcaattgtcctccctccctcaatttgttttttagatcacagcttggtggatgggttttccaaatttgtttttgattttttttatacttttgggtataaatctgtttatatggatatttttgtattttttagattgaaatctaaaaaatataatattgttggtgatgattgttgtattggggtttcaatgcgacggtgtaatggtggtggttttggtatgctgtaatggtggtggtggttgtggaagagaggagttgggtggtggtggtttcagtgtgatgtatttatggtggtggttatgggagagaggggttatggttcagttttgtgtggtggtggtggtgggtatggtggtagtgggtttggggataatgggagttaaaagagagcgagaagttgtatttgggagagagtgagttacgaagagagacaaaaaaaaattaagtaatttttttaatttttaattttaatatgatttattttttatttttttttnnnnnnnnnnnttttttttattttttttaaataatgtaattatatggaacaataagattgtgacacgtgtatagtgtatacatgtgaacaattcaatatgatagttaacaaccaaaattggatggaagtgctgctaacaaaatataagtattgggggttttaccgccaaaatttgagttttgagagttaagtgaaagtattgggggttttgccgcaactaatcattttttattttgttatgtataatagtggtatataattttgttaatataatacaattattttaatgtatgtatataattttattagcatgctacatatatttaattattatttttatatattttaattgtacgatatgttatttattgtaaataatatctaattaatttctattttattatatataatggtgatatataattttgttgtcatggtatatatattttaattgttgtatataatttggttagtatgtgtacatatatattagtgttgccctcttttgttccaatatacgtggcagtcccgaaattaaccaagtgacaagtgcgtctaaatatcgagaaatacttaagataaatcctaagagaatttatcttaatttgatagtcatgtctgggaggtctctccgagagctgcaaccacatcctgatgtcaaagtattttgttcatctttgggagctaggtaaagcctccagggctggtcattaggtcccggacgtgaattatataggcgcattaaatgtggtataatggaagcatctgtgaatgaatctaaaaagacatgttagaggaattaaaactattatttagtgattacactctaatctatgagctttatgacggctgcataatgaactatcacattaattaaggaaggctaagggcttatcttacctaacacctagctaaaacctatgcaacctatcatatagacatacatgccctattattcaaacctaggagcttgtgcaagccatgcttcaacacttgcgacaatagtgacatttttgctctctttatgaagttgtaaatactccaactatattctgagaaagaggtcggaaaaaatattgcaaaacatcctctataagagaaactactatattaaatagaagtgactcgtggactaagggtcattaatgccccaaccacataaaaattattcgcattaaatctcttccaatcatttaaacagttctcattaattaattgtcaaaaatcttggtcaatattttagtgctttcattatgagttgtagaaggctttacgtaagaagaatatcaaaagtaaattcttggtacgatggtggaaactagaaaccatgcacgccaaccatgtccacctcaaggccttaggggcaaacaaagaggaagtggctttgcaagtagatgcagaagtgaagaacaagatgaaaccaatgatctagaatacgacgaaaactaagatgagtacgaagcatatgataatggtagctacaccgaagtgatggtgttgaggcagaaagccgctgaccatgaagccgagttggcagataaaaatgagcagaacaggaggatgcaagaaataatgatcatcatgaaaaatgtgatggaaattgtaggcatccatgtgcatccaaatatcggacccattgggtaagacaaaacaagagaagaatcgccactgctagataatcaaaggcacaaaaattgagatccaagccctatctagtacccttcaaaaggcttcccaaagacaaacccaacgaccattcctgaaaataacaagaaggctcaagatctctggaaagttcactctgatctctctaaaggaaaagatccgcagaggagtaggtttccaaagggaaatgctggccctcaggaccaagaagaccagaaaagcgagtctgtgcattaggagccaggggaagagaagggggaaaaaccataaagacctttctgtcaatttgagacaaatactcaacgccaaacatattgatcttaaaaattgcctgaagcaaaaaaaaaaagcaatattagtcttggaaagtgctctgaacgaggggatcctgacctaacatgccattctcaggaaagatatagccatagtctcttacagacataggggaaatgatttagaatcttattgtgaggatcgagaaccctgtgctagaaacattcttgaagcggagttctcaaagaattttaagatgcttgaaatgacattgtacttaggagactcataccctagtgaccactcatccatgtttaaccgcatgatgacattcatgagagttagcaatgacgtgaagtgtttgtgtttctagctgccattaggagggtccactgaggagtggtttaaaaagctagaacctgtatccgtggactattggaacaagttgcaagttagctttagaagacagttcgtggtagctagaaagataaaccttgaagtcaacgctttgacaaacatcaagcaactacctgttaaaactctaaaaaatttcataaaagatttaaggaagaggcttccaagaccaaaaaggtggattttaaatagtaattagcattactacaagcaggaattcaaacgggaaccccttttgtaatgacctccagctggaaagagctgctagcaatacatcaattttgaggaagcacaaataactacttttggaggatattatccgattggcagaccagggtatgctcccaaagtgaaatttcttgaaaaaacccttctagttgcatcacaggcaagcaaaacgcctggtgtgcaattctcagcaacactaggatacacccctaaccttgctcatacctcgacttaatccaattttagagcactatcgagtaacgtggctcctggagtaagttcaaaatatccctcttaatatgcacctcccacagcaagtgcaacatatgctcctcgaatctctcgaagtaagagatcttcaaaaggaagtatgtggacatagaacaagaggcaaaagaaaggttacacctttcaggatactcagtatactgatttagtggagaccaaagaacatgtgtacttggccacaaggaaaaacaccaactaccgaagatcgcctcctttgtacaagggtatcttgcatagagaccctaacaaaagatgtgaatatcacaatgatattggccacactaccaatgaatgcaagaatttgaaagatgaaattgagaacctgataaggctaggtcacttatacgaatggatcaaagatagggtaccacacatgaatggtgggcaagtcgaagcaccagtgtctctttgagcacaagctcaagtctcggatgggcaagtccctccaggattccttcctcaccaccatatagtgcatgaacagccttctagaccaaatgggatggtggccataatctcaggagggccaaatattggagggaccacacagaatgagttaaagcattacactgaagctctggatcatgatgaagaggtatatgatgttaacaaactcccgtcgcaaaggccccaacttatggatctatccatcacctttacaaaagaggaaacaaggatggtgcattttcgtcatcacaaggccttggtaattgaaactcccatcgccaacaagattgtcgcccggatcttggtagacaatgggagttcagtaaacctcctatttaaagatgattttattgccattggactcactaatccaaacctctccctgagtggttcacaactcataggattcaatgggactacactagtccccatgggaaaggtaacactcccagtaactttgtgcctggacacccccagagtacgttcgagtactgcacctttgctatagtagactgccccacaacctacaatgcaattttgggacgtccaactttagtggactttggagccattacctcaatcaggcacctgtgcctcaagttccctacttaagcatcgggagttggatatgatcctggaaaccatggaaaagcgagaaagtgctataatgtggctacgtagcaagccattttcatggtccgggggactcaaaaagtaatcttgcccaaaggacaagatgaattggatcatcacatttgctttgaaaccgtattggaacctatggaggagatcgcggaagcaggcatttgtgatcaagacccaactaaagtgacccgcttaggaaaaggtctgggccctgatgagaggagtgaaatcatagacaccatcaaatagtcgaaagacgtctttacgtggtgtcatggagacatgataaggataagcccgcatgtcatcactcatgttttgaatgttaacaaagatatgcctctagtgcaataaaaaagacgcatttgcatcgagtaaagtcaacaactttagaaaaggaggtggataagatattgtcacacacctttcattagggatgagtattacgccgaatggctggctaacccagttcttgtacccaaacaaaaaggaacatggtgaatatgcattagctttatggatctaaaaaaggcttgtccaaaggattatttcccatttcctagaatagattagatggtggatgccacctccagttttgagctattgtcttttatggatgcatactctaggtacaacaagatcaaaatgcatttgacagatcaagaatgtacgagcttcagaaatgacaagggggtatactgttatttagtcatgccctttggattaaaaaatgcaagagccacatatcagtgtatggtgaaccggatatttaaaaacctatttgtgaagggatatggaagtatacgttgatgatatgttagtcaagttcaagacaagtaagggtcactcggaagacctcaaagaatgttttgacgtggtaaggaagtatgggatgaagctcaatcccaagaaatgaacctttggcatcaaattagggaaatttttgtagtttatagtaagccaatgagggataaaggaaaatccaaaaaatatacaagccctactagatatgccttcccccccaaaagcataaagacgtacaaagcttaacaggaaagatagctaacttgagttgtttcatctcctgatccatcgataaatgtatcccattttttaacattctaaatattagtcaaaagttaaaatggaccgaggaatgtgaagaagcatttgggaagttgaaagaacacatggctaagccagtagtgttgtccgaaccggttcacaaggaagacttatacctatatttagccatctcagagaacacggtcagtgcagccctcatctgagaggagggaaaagtttaacacccagtgtactacgtcagtaagaaaatgataggggctaaaatttgataccctttgatagaaaagttagcttcctgcctcttaattgcatcaaggaagctatggctgtactttcaagcacacacaatcaaagttttcacaaaccatccactctagcaagtcatcttgaaactgaaagcctctaagaggctcctcaaatgggaaaaagagctcagtcaatttgacataaaatatgtccctttcatttcagttaaaggataagccctcgcagacttcatggttgaatgcaatgaaatggaagcaactgctgacttgccaaatcctattattcctacttgaaaagtatatgttgatggcgtgtccaatgaaattggatatagagcaggaatagcaatgatatcctcggacagggtgaggctccaagctgccttgaggttcacatttccagcctccaataatcgagtatgaagccctattgccaggcctgaggttagccaaagtcaagggagcccacaagatataagtctttagtgactctcaactggttgttaaccaagtattgggagaatataagactcaaggagagaagatgggtgcctctgtctcaactgcgagagagttactccaagaattcaagagctcaaaaattaagtgaattacccgagaaaacaatgcccatgtagaatccttagctaagttagcatcaaaccaagaaacgaaaaaactttgggtagtccctgtcgagtacatcatggaactgagtattacaaaggctgagattgtggcaaatgagcaagtatccagtttgatggacccaatcattaactatttgacaaagggggagttacctcaagactaagcgacatctagtagaatacaatactaatctacccgttacctcatgattgacgttatcttttacataagaggccttagcatgccatattcaaggtgtgtgtcagaccctgaagctaggcaaattgtacaggagatccatgaaagattttgtggagaccacactgagggtcccagcctctctaagaaatttttaagacaaggttacttctggcccactgtgaagaaagattacacagattatgtcatgaagtgtgacccatgccaaaggattgcaaacatcccaagggccccccccccaaagaaaatcatattaatgacaagcccttagcccttcatagtatggggattgaccttatagaatcc

SEQ ID NO: 19010 - DNA, 3301 bp, Cannabis sativa
attctgaaatgctaaataattaatgtccttaagtaccatatatatcttcaacctcttgagtttgtgcaccaagaaatacattaaagtcccataattggttgtatccaactttttgtcataatctctatctccacattcaaaagtatttaaagggagatttccttattgttaaaaccccacatcataagccaagggtcgatcgttagttccaagtgccaaatccaataaatctttccatagttcctctctaattgatttttcattcatgccatatacaaaacatacttaaaataattcttttcctgtccttacaatgaatttgttgacttgagcaaataaatttaatattcacttgaaatatttttagattacagctgtcatcctggatattaattaagcattattagatataaaacacaaactccaaaatatatttacaaggttccaaagttaggagcctttacaatcgtcttcagcataccaactgaactcactttcattctagagcttaagaaaaatataacatttcatttacacaatttgtttttaaccaataatatatattgtacaaaatttattagtttatacatatattgtatgtataagcatgatatataacctatgtataattaaacaatcaatataatgcccaactttaaaatcccgtatgcatgtttgcatttttttttaaaaaaaaaaatatatatatagataaatatatataattgttttgacatataatcaatattatatatctttattttttagtgaatatcaaagtaaattaatattgtatatcacataattgcctccaccaaataagagctgttgataaataagtcaattaattagattaattatggctaatgttataaggtgctattatataataagtaatagtatatcaaatattagttttagctttttttttagagaaaaggtcttatgtagtatatattcttgataaaatatatatatatatatataattataagagcatctacattactcatattctcacatatataggcttcaaaggtatatgaggcatgtgacaaagggaatctaccaaatattatatatatatatacacactcacaaatcacaatgataccaatgactataatattattcaatttcacgtggaacaacccttatagtgacacttgtactttaagactattaattatgtgaaaagtaatatgcctataatcctaattaaatgatcctattaataattaactctcattttcccttgccacatatatatatagtagatgccaaaagctatatatataaggatataaattaatatatatacatatatagcttatttgtctgtcacacacacatatatattcaataatggatatatatgatcaatcttaagaaaaagtgtcatccgtgccaagccaaaatcatagataatcgacatctatagtctatagatatataaatatatatatatgattggcttctcaaaaaacttaagtgaaaatactcgaaaattaatagcatggggaaactgaaaattaaaggggcaccctatagggccaatttttattttattatatattgtgtagattatgttataaaatattaaaaatattgtgaaattataataaagataatattgatattgcgctttcgcatgctttttctttcttctatattaatatatataaatatatgttagatcaaatgaactgcatggaaatattcgtatattatcgacttatcgtaattcgaggagtaacattgttgttgttgttgttcatgaatatatgaattgtgaaattatatgtatgtgtacgtagaatctatatttgtattattaaattatattaaatgacatattgaaaagttagcgattagtactgttttgttgtgtcattgtcttattattgtgtactatgcataatatataacaatagtaataattatggaacacaaaacttgttaattacttaattaatatatatatattgatattacgttactactaataatatgttatcgaaacagtactcataataaacattaattgatcaatatcaatatcaatgaagattatttataagaagaattaaacactaagatcacagctttttaaaataattatatgaattaattaataaataagctgtgttgtttattttggtaacatgatgatcatttttatgtatacagattccttcttaatttatattcacttcgacggatgttggtccccctcattatctaaaaaagattattatatgaaatttaatcttatgaatagcgtcctaattataatataaatttatatatataatatttgaccattggtaccatgtacgtagcaactactaattattagttctatactttgtctatatataaatttagaccaaagaggcgtatttggtggcatgaagtttgcaatacttttcggtaaaaatatagaagaaattaaaaaaaaaaaaatcccataattatgactcaagaaaaagaaaatttcaaagaaaaaaaatatatattaatgagaagaaaaaaccaaagtgtcatttttgcatttatttacataaaaaaaaaaaaaaaaaaaagatttaaagctctatacttacgcaagggatcatgaacactacaagcaacacaaatatgtatatatttatataattaattaataaagtgtatatatgtctggcttccatgtgtcccaaaatgacaagaacatgacatttttgaaattaaagtctctcttgccagagaatcatttttgtatagcaatgtcttcttatacatcaaagttcaattaaacccttgtttttttgaatatgcataataataataataataatttggatgaagaagaagctttttatccaattacaatatgtatatgtgtgattgtgattattggagcacatgggtatgttatccatttggaaattggaatatgacttttacaaatcataactcaacttcccatgtgacctttgttgttaaatgattaaatgaatgagtttttttgcctgtttttcccacctggcatcattctcttcttaatattgtatacccaatttttttaattgtaagtctttatatatttatataataattatatagtgatgagacttctttcaaattcattcattcattcattcaattatatatgctacacctacactcaatctaatcatctccactttgacaacaaaataaagtacaatacacagattttatgtcaaaattttacagagaaaaaaaaaatcatagaagagagaaaattcattatctcataataatgggaagtatatat

SEQ ID NO: 19011 - DNA, 9321 bp, Cannabis sativa
  modified_base (3955)..(3966): a, c, t, g, unknown or other
  modified_base (8243)..(8243): a, c, t, g, unknown or other
aaaataatttccaacagaaggttgtagcaccaacgaaccttcaaaaatggtgcttggagcctcgagcatatcagggctggagcaatccttttctcagggagtacttcaaggatttctgcaactacctcgacatcgcaccattttagttggcaccaaattcttgcaggatcattgcttgtttaaagtctctttaccacatccttaagtgggaatgtccaacaccactggagattttatatttttattctgtcaaggctttaactgcaagaaaagacggagcagaaggcttttattatcttgggacccacattaatgatcgtaagatcattatgaggttacccaataaaaaggagttcaaagatgacttcttttggaccactggtctttatcccatcaacacaatcaaatttcaaatcatacgtaagtaacaactccccttaaattcttggttttgagttttttaggatttatttttcttacttttaccaattcttttttttttgtttctagcgatcgctaggagacccatccctaccccagagatcgagaaaaggcacaagatttttcttggccttccttatggtttgcaagtggttgattttctgctacatgataataacttgaaggcatgcgcccttcttggcaaggatcaatgtgttaggctatttttagcttaagttttgggtcgatttcagagttattttttttttgttaatattatcttttggaataattttacgattgatttcccttatttcatgttcctgaggaattaaagttcaaattctactaattggtaaaaagacgaggcaaattgaaaaaaaaatctcatgaagctggaatttgctctagtagtcgcgaccaccacgttctatagtcgcgatgaattatgtggtcacgactatggtcgtgactatggaagtttggcagagagcatgctttttgagattagcctatggtcgcgactatggtcaaaatggcgtaggagaccttgtttgcaatctcaaatgccatagaagtatcaaaaggaacctgggaagcacctagcgcccaagttgacacctgaactggtgcgttagtttctacttattagaattcgattttgttttgagcatttaactataatttatagtaaacaagagctacaaattgtgacaggccaaattcacaccttgagatgtcacccttttagcaaggtgggatatcgataaaattagggagtttcgaatcttctcaatttcacaaaatagcgacattttcgaaagctgatgaacaactttaactaaacattgaatttgagtaagcgatgtcaacacatcacttaagcatcaaaaaatacaagtctaggacgttttggcactcactcggcgtccaggttgacgttaaaatgtaactgggcgctaagtgtcaacctgagcgcatagttgttaacctggccgtaatgtgttgaacaaccttcagtaaaacagccataactcactcaatattgatttgattgaagcaattcaacttatattttgaagatatttttaagatctatcaagtcatgtctcacactcacatcataattgtgaagatttagggtctaaaatatatcctcaataaagttgcaatttttccaacaaataacttgaaaataattcaatggatgagattcgaagtccaaaaattgacaattttcaccaagagtcaattttcaccagtggatcatcatgaatcatcgtcaatggccaagatcatatcaaaattattatttttttttgatttttttttgtatttttaattattatttaataagatctctttccctataaaatgagagctcctcttctagtttatttttcacattctgaaaagttctcataaggtctaaacatctctctactttctccctagaattttgagcgccaacacttagtcaattctttgtaattctcgtgagaaataaaaactcaaagtagatgtagctccattaccgttgcgtcacaaggagtgagctactataaatttgttatgtctctgttacttatacttaactctgaacattattgtcaatctagcgagcaggtgtaactagatatgtgtattctgatgtcgatgccaacaaaattttatgcgcataaaaatataaattaatttttttcttcatattttttcaaattcctcattaaaatagtttgcaaacaaaagttgagaaaaaataacattatacttttcaattatgtagaatttttggataatttttagggtagcttggattgatgatgctctaacaatgtccatcttccgaatataaataaaataaaacccaacaaaagaaaactaagaagtgcccatactttgataaagaaaatagaaagtgacaattttgtagtaataattaaaaagaaaaagttttggttactagaagtagaagtgaccaatagaatagaacatgacctttgggaattaaagaggacaaaagaaagtaaaataataattaaaaataaatgataaagtaggcacatagtttgttttattgttttgggaacaaaacaaatggactagagagaaataagccaaactacacaaaagctaatacccaccgtatcaaattggctataggcaatagtatgtgactttttaaatttaatcaattcatattctataggaaatattacatgtggataatattaattatgatactaataattataattgtcaataacttataaaatgtcaagctacattgttattggtgtaaatattgagacttgagagttttttttttttctttccataattataaaatgagcattgttattaggcactagagttttttttttttttttcttttcataattataaaatgagcattgctattaggcactagtagtatctagtattttctcgacatgtcgcgttgtgattaattagcgatactctttaaaaattattataataaattatatggggttcgatacttagttaaaccaataacgatattgacacataggagggtgctatacaccattgatactctttagcatttctcttataaaattatggatgtaatggtacagttttcttaatatttttagggatcataaaattttaaagaatatatctcagtaattagtttgcttgaatttatgtattattattaatcattcgtgtccaaaatcaaggaattatggtgactctggttcacaattttttttttcaattatgtatatttttttacccaataatgtgtaattaattttatttacacaatgtagtctcctatataatcattatctattataaaaattaaatatatattattatgtgtaaaaagtgtataatatttttttatgtggttaggtaactctcttgtatagaggagattaattctctttaccattcctttttacaatgtaataattataatttttaaaaaataggtaaatattatttgaatcatgtattatgaaaaaaattatgggataatgataaaaacacataaaaataataaaaaaaaaatataaaaatacagagtttttaatacttttacaattttttaaatttgatttacatataaaatatggtcctttttttttttatatttatatgttgtattcttgttatttttaggggtgtttacggtgcgggtggtacgatttttgattattttttcaaatcaacttgcacatgcagtttttccaattttccaaaccgcatctgcattgcgaaactaaaaaattgtagaaaccgcactgcaaaaaatggtacggtacagtgcggtttttgcgatttctacggtttggactatcaccaaataattaaattattacaagtacaataaaacttgagcaacacttgttaaaaataccataagacttaaaaataaatatgaaaaaaaattaagtttcaacaatacaataattagtggattttgggctaaacattcacatattagacctaaataaatatnnnnnnnnnnnnttttataatgtgcggtgtggtgtagtttgaaccgcatattaacaattcaaaatcacaaactacaccgtaccgcccagtttaagaaaaatttaaactgcgacgcaccgtaaagaatttcaaactgtaattttttttttgcgatgcaggcggtttgagtggtttgatgaaaagaaaaaatattcaacaattaaaattacacccaaacaaataaataaagaaaaaattataaattttattgatttttataaatttttttgtaaaatatgatttttttaaaaaagattattttataaaaaactgaagaaaaagttaacagatatgaaaaaattaagtaaaggtaactagatatcctaagacaatcaaatggataaccaaaattactatgagggattaactagatattttatgctaaaaaaaattaaatttttataaatttatactttaaaaaccataacaatgaatattatggacattatcttatatgaaataaatagtagagtattgaattatatataagaacatgtactactccactcaacaccgattgaatttgagacagaacctcataattctcaacatggtgtatcagagtcatatttcttgcatgcaagtgattctattcgatccgtacctatacagatagtaattatgtccattctaatatggttcaagatcggtgagcaaaaaaaaaaatagctatcatttaacgagaatattataaatattgtcccacataaaataaatagtagagtattcagctatatataaaaatatagactactctatctactcatcatcaataatgaaaattgattaaaggaaataaatagaatagaaataaattcattacattctattcaccgcgaccagatgtatcaattcgtgtattaaatttggacatatcttttcattgattttggagacaattctattaagtagtgggaaaaaaaggctcattagagtatcatacaccattatcatgcaaaattccaaaaaaacttgtgtatcttcattgaatctttataatgctatgaatgtgtcaaaaatccatcttcaaatattttctttcaacaaaaattttaaaatttttggcgaataaaccttgtaatatgatatacatcttaaataaagatgattaattaattaaaattacttgcaatataaatatgtatccaatttatttatgaattatgtgtgtataattgtatatatcatcactcttgaaaaaaaattaaaaattagtaaaatatatgcttttactacaatgtatatgttatatataaatttataatttatctatgtgttgaacatatagacaacatagatagatctaccctttataaaattgccctatatattattataaggacttttattaattacttattaggctaatcttcttggtcttgtgtagaaaaggtttccctagaatgtaatgattattgaatttcaaaaagactttttacagatatattcaaaggatcttttcatgaaatcctattttcaagtctagtgcatatggttttatcttctaacaaaaagttgagtcttttcttgagtgatcactattattcactatactagtccaacttgctaatactatttatttattttttttatcaaaaaaaggttacaaaatatgacaaaattaaaaaatttagtgctccaccaacagtttctacataccccacaaaatatcatatctataccattttgcaaatcttgttaggtaaagtttacaaagattcaatttttattttccctaaagactctttttggtgttaaatgagaaggttttaattattcttaattatcttccaataaacttgtttaagcatatgattatgttatgattatacaaaattatctcatctacacgcgtgaaagccatgaaattattttcttaaaaagaaagaagttaaacccaactagaaatcaacaaccaagattctcaatcttatttccacaatattcttattgagttctttacaaaaatctcaatattttctaaggttgtaaaactatgacacattaaaaaaatgataaaaacaaagggctcaagggatttgttaccacatatgtagttagcacaaccaattattattttaattataaaaaggaaaaaaacattattttattttcttcacaatgacataatcaagtatgtaataccatgaccaaataatataacaattaataacattaatcagtaggtttggtatagactcataagccatccttatcttccttgacaccttttaataccataaagtagtctataaatcttctactttaccaaattaaagccttttcaggggagcattgctattaaggaatattgttgccaaagtatcatcatgagataacactttgtaataggctaataatattttataatatttattaaattaaattttgtaaaatctgatacttaattaattagataaaatgtgataacaaatattatacaaaaaatacaataattataaattataaatactaaattaaatattaatatgtaaatttatttttatagaaatttatttttataaaagcaagagtaacaataatatttataattaacgtctaagtagttgatattattcctcttatcaataacaatatgacatcactaaactgtagtaccttagctcaattatagtcctacatacatattatataaaacacttctttggaaatcaattatagtcctacatacatattatataaaacacttctttggaaattttaaacaataactataattaaacattaattttagaaataataatttttaaaaatttgattaatcaaatgaccaataattaaaaaaaaaattagaatttttacgcttaattttactatttaattaaaaagtatctctctttaaattaaatttaactttttttggtctatctcgctccaataaaacaacttcagccatataatgtaaaaataaaatatttattttaattagatcgcaaaattaatcacaaaaactcaaattttcataataatactcattaatagatattaatcattaatggttccttcaatataatgtatagtattatattgaattatacatcatgcaatattttttatgtaaaaatatatgtggtattgatttgtatgaggacataaatatataatattttaatataaattaaagtttaacataatattatatgaaatatgatatataattaaatttaatagaataaaatacgacctaatacaacgaactaaaaatgcacttatatatatgtgtgtggggtccatatagacatttggtgtgtgcccatgtgtatgtatatatatgtgtaagtatatatataggtctccattatatggcttacaaagttgctgaatcttttgtttggtattatggaaacaccaaaggaaatgttaatggtaattttgttaagtcattattattatagtactactactacttcttcttcttttacaaatgttggattttatcatcaacaaaagttttatgattatacaacttataagaagagcttcttcttctgatcatcatcaccatcaccatcatcatcaagatatgaagctgtgaagaaaaagctttcttttttatttcagtggtcaaagaagtgctcactttcgtaaatctgtcaagaaaaaagaaaaagaaaaagaaaagagctaagcccactcacccattgatggcttactttctttcttctttaaattagaatcatattattatgtagaaattgtttgtgagaattgttcttatgcttctctctgttctgttctgtttaggtttcaatatatatatacatatatgtatgaatatcaggtgaaatatttcattagcttgattcatgctatggaaaatgaatttaatataattattattattatatatttgtatgtagtaatgattttcttaagtttttgttgagatctgttgtaatgttagataaaaaaaacagaacttttttctttcttttcaatataattgttgaaaaatgagtatgttatcatattgttctccaattattgttataggttttctcttgtttttgttaattaatcatgaggttagttattggattaaaacttagcttcatcaaccaatttaacaagaaaaataatattagagcatcttgaatggtactatctgtttttttagttaaaatagctaaaaaaattaaaatagagtcatttttatcattgttgctccaattatagtatttaattattttaacaatattttataatttgaatttgtcaaatataaattnattttataaaataatgaaaaaataatgatatttttaagggtaattaagatttttgcctcccgaactttgaagaccgttagaaatttctcttgaactattgagattgttggatttaaagatttttgtttaatcttagtaagaaaaatctaacatagatgaaagttcagggggtatgatttgacacatatcaaaattcgatggacatgatttggtagattttaaagtccaagaagtatgatttagtacattgacaatcaccgaattagtaaaatcgaatgaaattagacaaaagtctttaaatctaataatctcaatagttcaggaagactttttaatggcttgaaaaattcaaaaagtatgatttgatagagaaaaaaaaaattctaattaacttattttgactgtaaaaggaaaataaatatataaaaacttatgattttttttttttttttttttttgtgaagaagtccaaactccaaagtagagtattctttttttttttttctttttacttgtcgttttgtttaaatacaaagaagaagtggggagtgcttttttttgtttttgttattattgttgtttaattttggtgaataagatgtggagtggagagtgtttgattaatttggaaaaagttctctgttcaattggtggatggatctgccaaacttttgcaacttttgagctgttttactgataggccacgtgttcaagttaccatatgtttcaaaatttacaatggaaaaaattacatgttgtgtgtagtagtaggaattatctttattggttttggttcaagagttggaaactcattgacttcacctttgaaggctagcttgttgtaagactaggtggtgacatattgaatggaaacccttgagctattacttatgacccaattaaagtataagacatttatagctaacatgtagttctcgaaattatcaaaaagaatgaaagagtaggaagaaatttacaccacgtgatctccttttagtaataaaaaaaattacaatggaaaaatgttaaaagtaaagttatgagaaaaagtatcgttatttgatactttaaggtgtct

SEQ ID NO: 19012 - DNA, 4542 bp, Cannabis sativa
tactttgtgtatcttattatatattgcaaattaagtttcttcaaccttaaatttctgggaattttcccctgattctttcattatatccaaacaattgaatttcttgtttatgataattgatttacctgttcaatttcattctgtttgatctctgtaaattgagtttgtataacaaaagggttagtttagaaatggatataagtaatgaggctaatgttgatgcttttcctattggaccttccacattagttggtagaacaattgcttttagagttttgttttgcaaatcaatgtcccatttgagacatcaagtattccatgtttttctccaactgttatatagatttaaggattttttaggtcccatgttatcatggttacatcctaggaatccacaagggatattggcaatggtgacaatcattgcttttgtattgaaacgttatacaaatgttaaagggagggctgaaatggcttataggaggaaattttggagaaatatgatgagaactgctttgagttatgaggaatgggctcatgctgctaaaatgcttgataaagagaccccaaaaatgaatgagtctgatttgtatgatgaggaattggttaggaacaagcttgatgagcttcgccatcgtcgccaagaggggtctcgaagagacattatcttttgtatgagagctgatcttgttagaaatcttgggaatatgtgtaatcctgaattgcataagggtaggctgcaaattcctaaacttattaaggattacattgatgaggtttcgacgcaattgagaatggtttgtgatactgattcggaagaacttatgttggaagagaagcttgcttttatgcacgaaactaggcatgctttcggaagaacagcattgcttctgagtggtggcgcttcgcttggagcttttcatgttggtgtggtgaaaacacttgtggaacataagctattgcctaggatcattgctggttctagtgttggatccataatgtgttctgttgttgccactaggtcttggcccgagctgcaaagctttttcgaggattcttggcattcgttgcagtttttcgatcaaatgggtggtatattcacagttgttaagagggtaatgacacagggtgctgtccatgaaatcagacagttgcaaatgatgttaaggcatcttacgagtaatcttacgtttcaagaggcttatgacatgacaggtcgggttctcgggataacagtttgctccccgaggaagcatgaaccacctagatgccttaactacttgacatcaccccatgttgtcatatggagtgcagtgacagcctcttgtgcttttcccgggctttttgaggctcaggagctgatggcaaaggatagaagtggcgaaatcgttccttatcatcctccatttaacttggggccggaagcagggtctaccccagtgcgtcggtggagggacgggagcttggagattgatttacctatgatgcaattgaaggaactgttcaatgttaatcacttcattgtgagtcaggccaatcctcacattgcaccattgttgagactaaaggagttttggagagaacttggaggcaactttgctgctaaggtataaatctagacccgaaatctgttatcttataagtgcatcaaatacctttgtttgcctatctttttctctattgtatgtgttaatatggtgtcatgttatgaattacaatgtgatctttcgatcctctcgtttgcacacacgcagaacatcctgtattttagagctaggttgctttttgtgaagcgattatttaaaatgaatagcttgttctttttgtgttagatggcgattcgaaaattaattggtgtttacatgtataatttgtgtagcttgctcatcttgctgagatggaagtaaaacatagatgcagccagattttagaactcggttttccattaggtggacttgctcggttattcgctcaagattgggagggtgatgtaactgttgtcatgcccgccacacttgctcaggtaactattttcttggaattccattaacattataaccgaaaaatttgtgaagaaactcgggaaaaaacacaaattgcagtcttgttattgtttctaactagttgttgtttgtattcgttgcttatagtactcgaagatcttacaaaacccgtctcatggggagcttcaaaaagctgccaaccaaggaagaaggtgtacttgggagaagctttctgcaataaaagcaaactgtggcattgagcttgttctcgacgagtgtgttgcgattctcaatcacatgcggagactcaaaaggagtgtggaccgagctgctgctgctgcttcttctcacggcctaagcaccaccgtcaaattcagtggttctagaaggattccctcgtggaattgcattgctcgtgagaattcaactggctctctcgacgatgattttctggctgatgctgcttcctcgttgcatcatggaacaagcgctttcactgctggtggaacatctggtaaaactttccgaacccatcgtggtccacacgatggaagtgatagtgaatccgagagtgttgatcaaccttcttggacaagaaccggtggccccttgatgagaacagcctcagcaaatatgttcattgattttgttcataatttggacattgatagtgaattgaaccgaggatcgcttgttactaacactgaattttttctcagcccgagagggacaacatcagatggcacagactttgatcaaagggatcttagaaaccgagttaccataaacggatcaagcattgttgtctcggaaggtgatcttttgcagcctgaaagaaccgaaaatgggattgtgttcaacattgtaaagaaagacaatttatcgttgtcgaataggagtcaagactcagaatattgtgatagcgaagctgttgaatgtgtacaattggattgtcccgaaaaggagagctcagcatctgagtgtggcgatggcgatgttgcccccgaaagctgcacaaacgaaaccgaaatcgaaaccaaacccgattttaattctttggatacatcttgtagagatgatttgaaggatgaagagccttgtgcatagaagtttggactcacaatggttcatacagtttagtgaaaatgcaaagaaactgtttttggtttatagttacatattattaaagatgggaaggtttacacttgtaaatactatatgatattcaattataggggctaatgttgtaaccatggttcatatataagctcaatgaaattgaaaatattccatctttatctctattccatattccattgtctcatgtgtatcaaaattgaatgcactagttaaattttacttttttaattccaacagtgagactatagctgcaaatatagtgtgtatttacagtttacgctatatttatatgtgataaaaggattacgctataataaaattatattttgatgggtattaataacaagtcgtatactataaaagtataatttgatagtgtaaaaaattttacagaagtaaaaaatactaattattttaatatatctttatatattaaaagtgactatgtaacggaatttcttggtttcttggtttaacagaatataccttaaaaataaaagaatattctgttaaatttaacgatgttaatatgtttgatcttccgttaacaaataaacccaataattaaacccaaaaattaaataatctttttttaaattaaaaaaaaatcatcttaggcacatatctctctaacaaagcgtatcaaataagactgttagtattattattatctaaatatattaatattaatgttttaaaaattaatattattttgaatcgtatatgaattgtataaccctaacacgaaaagccaaatctaatttttctcagtcacatcatcatcgactaggatcagtcgactcccactccctgtcgactaatacaccggacttcagttcctctctaagtgcctcctccactctttctatgaacaccgagccatgaaattcaaatcggataaatcccattgaacgatcaaatatcaatgttcaatccattttgtggcactcctatggagttttaaaagttttattgaataatttgatattaataaagagaacggtgcattcttcttcttggccaggtgagtttcaactttcaattttaatggacaatttcaatttcaagattttacaaatggttcttaaaggtacattgattggatttcaagttttttttctccctttgaaggattattgaataacgattatcaataattaaataattatctagaatgaatatactctcatatggcgcaactcatttgtttcagatactgttgcgcctaatacttcggtagttaaaaacaaaataaaacgtaacccatttcaagccacgactcatcttcgaccttctctctcatctccgacccagcacttccgcccaccggccgagcacacaatcggcggtccctctagagatctccgttaagttctatttctagatctagatttaaatc

SEQ ID NO: 19013 - DNA, 6220 bp, Cannabis sativa
gaatggagagattcagggagagaatagggaccgctgccctcttttgcctagccaaaaagccttgaacaataccgagttgaaagaataaagaacttgtactgtgtcctcttttgggcttgcaacaaaagggaaaaatgtaaaggaataaagaaaagaagcaatcagacttgagaaattttgggaaatgtgattgcctagcaaaattctgttcagacattcaaacaattgtatccaggagaggcatctattttcattccattggaagaaacccaaccaaataacaacagaaaaagtatttaaggcaaggccttacctactacacctatagaacattatcaatgagccaattgccagagaaaccgcagtccacccccagaggccaacaacagcggtaactttcgtcatattaggagctaacagtagttcaaatttagtcaccgtgattagtaaagaaaaaccacccattctttatttaaaagaaaaccagaaaagctgtaatttcattacctgcaagaactgaattcatgaagagaatcaggggaccaattattatacacaataaaataggggcatacccattagtaagaatcttcccactaataaatctgtctctccaactcttgctattagcacgctgtgcattagactgcagatgaaaaaaatgaaaaattctttttaactgattccatttaagaagaagcatgacaaaactaagcatagtatatacaagaaaactacatttacaaaacttaaaaaattaaaggatataattggccattatggtggatggaaaagagaagaggaagagtgatagtacgagagtttatcttctctcatttggcaagagagactgtgagagaaagaggagaggtgggagaatcgcaaatccttcccaatttaccatttagaatccttccattgatggaatgattcactctccattcttaattatttattacaactataccctcctaaaaaagaattataagagtaatataataattttatacaagagtaatttatccttccgattctccatctctcttaccaagcaatttaaagggataattactctcctctctcttccttatattctccaacctctttattccctttcaccctaccaaacatagtgtaaaagtttcattccttaagttgaaaaatacctctcaaatatcttaaataagtaactccagctttataatcccacgaaagcaaaataccaatatttttaagaacatgaaggaaagcataagtaaaaactgtcatctgttctagtagtgtaaaatagcaggaaaagagacgtgtgcccacatacatagctgcaagcattattgaagaaagaatatgaaccataatgaacaggaaaataggttacgatcagcaatatctgtcatttaatcctatcttagcacagctttcataagatactcagctgtccaaaaccattagtcaatattaagattcattgcgcacacatgcatacgaaaaataccaactcttccacccccgagatagaaatgctattagaagctacttcaatacaaaattacatacaagtacaagagcgatactccgatgacctttatcagatgcaagctgaactggagtaaacccagcattatctttcaccattaactcctgcttagtgcccgcatgtacaagcacagtgcaagcttccacatgacctctcattgcagcccagtgcaatggagtacaacctaagggcataaaatatcaaaatcttcacattattcttgcgaagaaaaataactatgaaaagttccaaattctcccaagtataccttctttatcttttctcgcttgggatgcatctctaaacaaaagtaatcgaatggtatctgcaaatcccttataagcagccctaattaaaatagtcataggagtcaattttggtaacaacaagcttaaataattcttttaatatttagaaaattccatcacctcacttcctaatttcttaaacatgaatagttatttgtttcttaaaaggcatatagaaacagcatgccatattttgtagaatttgataacgaatatacattacacaccctttaaaacacaaaacaagttcctttcctaaaaaaaaaagacaagaaaccagtttcaggagcagtcattactaactctcaactaacttaaatgtcattctatggagaggtaattcaacatggtaaaagcatcagattttccgaaagatatatatctgatgttctaaagattctgcaaaatccccttttcagacaaatgcagggaaatttatccgttacaaagttcagagtggattgcttttcaagtattaacagagaaactgaaagcatagtcaatatgcaaaatttcattgttcttgagactaggtgaatctacgatacatcttataaacaactaaagtacaggagatgcattcacaatgtccggataccatcaaaacatgaactgtgcaaaatcaaaaataattttataccttttcataagacaactttgatcaaaactctagagatagaattagttggtgtatctatgacttatcaaaagactaaaaacaaagaaccacttttcaaaatttatccactaaagtttcttcaaaattcagaagattacttaagaagctaaaaaataaataactataatatatcaatttaaaagcaataatacacacattcacactatttttttatataccaatgaagaggacttctcccctcgttatctggtgcatcgaaatcagcatgatacttggcaacaatatgattcaagaaagctgtttgtccatattgagcagcaacatgaactgcctgcagcatgcacaaaaatctggtttacataatagctttaggtaccactcaatcacacaattccaaatcacataaaatagaattataaccatgttacactggctatgaacacagttttcacatgacgactcacacacactcacacacacacagagtcaaattaaatgattacccggtaaccatttaaatcagaggcctcaacccgggcaccattctgcaagagcacatctgccacagcaatcccacctcgcactgccgcccaatgcaatgctgtttgttgcacattatcagctgcattgacatcgcctccgtgctttaagaacattaatcaaaagacaagaaatacaaaatacaacttcagctaaccaattccaaatcaaacaaataaagatatacaaaagttatccttttatgaacacttccattaaagttttctagaaatttcctttgcagagaaattctttgtggcacaaggtcatttaaagtagtagggtcacatgaaggactcccatcccaggaaagtccgaaacagcaactgtacaatttggaaaaagatgaggttcaggtatccctggaaagcaacttctacttttcacaaaattttctaaggattgggaggagacttagttttggggaagaaaagatatttcagtgcgtgaggtgccttaggcagtatccgtttctattatagccaagattattctaacaaaaacagacctacatcagattgtaacgagatttagagctgttggatggagataacatagtaaggaattttcattatgtgcaaaaaaattttttttttctttttcttttccccaggtcattttgtgcaaaacttgaaataagttaagtgccgaaactgttggtttggaaaaagtgtgaacgtgtagtaacactcataaatctatacatgtgtggtttggaaaggatgagaatgtatagttacattaatgaatcgatacaagagtgtactgccacgaagcttatacatgtgatatggttataagaaagcctttctaggctcccacctggatgcccagatggtgtgtttgatttgaatggtctgcagatcacttatgcattgtagtttttcattaaaacagatgttccaagttctcgagaattcagtgtgaagtgtaatgtcccttaaagttgcattagtttctgggtatgagacaaatcttacacattaataaaaccgggaaatgtttaaggtagttgttttggctacatattgaaccacatttggttagaaaggaacatgacaattttttagacaacttatgaaacataattaaatttctgggttttctctttggtcgtttgattttaatatgaacaaattttagggtgttttgattactgatttcataagtaatcgaagtctgcttttgtaaaaaaaccttttttttgttccttatgaagctctacagcttcatcaaaaatcagtgtaactaaactagaagacattaaaaccaaacacaaaaattctaatttcaccaatcacaacaagctcagcaatagtcaaatctttacatctacctcataaacagtacaattcacctaaaattgagaaacttcaacttataataataaaaaaaaaacctaaaccagtattcaaatttcgtcacaattactataattcaactaagtccataaaaaatggaagtgaaaaagaataaatacctcaatgatgtaatgagcaatatggggaaaattattgagagcagcccactgaagggcgtaatagccattgttatcgggattagtgagagaagaagcatcttcctcaacgaagattcgtaatttgttgaaatcaccataagcggaagcggagaaaacgtcgaagatgttgacttcgttaggaggaggaggagattgggacttggattccgatgaaatgacctcaatctcgatctcagaggaaggcatttggtttggtttggagctagttgagcatgaaaaagggggttttgttttacgaatcagaattttgcgattgcgtttccaatttcaacatctttcttcttcttcaacttctttattgttattattattattttgaaaaaatgcctaaattttatggatgatgcctcaaaactattaattagtttgttaaactgctcacactgtacaaattgctcgctcgcactttaagatattatattgtataaaaaatacggtttgaaatattttgcagtttgtatttttttaaactggatgtgcgtcacggtttgtagttatgaatttaatataataaattagtattatatattatgatgttaaaattttatattataaataagatttagagaacagccaaacactctcaactcttctagtttcattttttatatttttatttttgtgatgagagagtttattttgtgaaaatttagagtgttctactaagttttagtctttgttttgttattcctatactcttcttataataaggtgaagagcttaattgaactagaaaataatttttagaaaaagatttgtacaaattttatttcgggagaaagtaagcacacacacataaaaagacgaaaagaatttaatgtttgatagtgtttagaaattagattagcagaataaattacaaaagattacgataaaattttagagggattctaaacttatttaagttaattacatttataattgtttaagattttactaattgatttcattctttgagcgtggtcctatggactacaaatatttaaaagaacactgatactatgtataattctcttgtatatctgtgttatgcagtaacaaatttctaatttgttattgcagatctttataattgtatttttctttattgttattatagaaatttattgacacatacaaaaatacaattttttttaggtctattttagtgaatcattaaggtctagtaaaatataaaaatataaaaaaataaaaaatggtgaggttaatttatatttataaagctgaattttaaaccttttgaaaaagaaaaaaacacacacacaaatttaacaacaaatatgtttgtcatccaaaccacaccaattaacatatattttgttaattaggttgcatgataggttatatttttatttagccccacacaaagtatagattctcaaatttcccacataaaactcatatcaaacaactttatttagctattacctttattgacactcaaccaacaaacaatccaaacttttcaattttcatcatgattttcattaataggaactagtttacaatccaagccttagaaaaataaagaaaaaagaaaacaactaggccagccaaatgctagatgtgagtgcttctccttcaatattgtccaaatttctatttaattattttttatcccacatctcataaaagtaattttcttcattattcac

SEQ ID NO: 19014 - DNA, 1885 bp, Cannabis sativa
ctaagaaatcccactcaatggtatcatatgcctttcgtagatccaacttgatcacacaactaggctttgtatttcttctcccataattcttgattagatcttgacaaatcataatattgtgtgctatgaatcttcactatacaaagcccccttgattttgtgccactaactcaggaagaacatgtttcaatctggagcatctcaatttagttgcaactttgtatatgacattgcaacaaacaatgatgtagaagtttttgacatcttaaaaatactactgttagagatgctcggtgaagacaacataaaacacaaagaaattaattattcaaataaacaacaacatgtgtcgttcattcaatggccaaaaacagctcgtaccctacccgtgggctcttctcaagccggttcaagggtaggacagcaagaactcacgcctaatctattttttttaaaaaaatactacatttaatattttattaaaaaaactcaatttttattttttaaatactatatttttgatttttcaccactaaatatatatatataaaaaaaaaaataaaaacttttacataaaaaaatctaataatgatttttctcacccaaaaccactaattagcttgagagagacctagctcttcttaaaagataataatcgagtactaattcagtgcttcacatatataatttaacaaaaactaacaatgtgtttacgtgtcaagttttaagagaataaaaataaagtcctataacatgagactctttaatattcaacaaaaagcaatcccaaagttctccttcatcttctacattttatattaactattacgtgaattgctaaaatatattattagtgtctaacacgttccttagtattaaatgttattgatgtaattaaatattgggtctcatataacttaaaaaaataatttttaaaaaatattgctaattaattatgggatactacctataaaaaatactaaatactactggtacccaataacaatcctcatatattatatgtacaagtagaaatattatataagttgatttgaggtttgaggtttgtatgattagcaaataaaatataattagctaattaataataaagcttgcattattgccattttaattaatatatataatatatatttgggttcccctcccccaccaatattgatgatgagaaatcaagcttagatttttggacagtttaaggatttatatatatgatgtccaagtaaggactcatcaacttaaagtgaaagctacacacatgaaataaaataaaataaaataaaaagaagtactacaaggttttctttttttcctttatttttaaggaataaatttaacaatcgaatttcaaaataaaaataataaggcttcaaaattctttgtgattgattatttaatatatatatgaaattcatgaaatttatgagggtgtagatcctttatctattttaacatttaatatatatatgaaatttatgagggtgtagatcctttatctattttaacatttaaaaaaaattatttattatttttttatataattatgtatgttatagttatttaagattatttatatttttttaaaaaaattaaataatttattgcgctaaaaattaagtctaaacagttacttaccagtatcacgcgtataagaaaaaataatcgtgcgtactaacttttttttttcatgtacaacatactatttgaatattatttttaacatgtttgaattttttaaaattttattagatatcttaaataattataacatacatatgcaactaatactataaaattttttatttttaattacaacaaaacttgtgactaaaaattagggctgtacatcggtcggtttagtcggttt

SEQ ID NO: 19015 - DNA, 2958 bp, Cannabis sativa
cctgtggttcaacctcacctgtgtaattttactacttgattacatgcacttgcgtattgttcataattttcgtaacatactaccatgtaaaactttgtttctatgtgaccatatcgcccacatggtacaaatgataagctcaaagtcagtttgggaatgtagagtggaaaggtggaaaagataattaccattatgcatgagttgcgctttcttagaatccatggataaaccagtgtgtttccaaactgatttggagtgtgaacaattgaaaagagcatgcctaatggattcccatgcatttgtacacatcaaacaggcagcgaagtcaataaccttcttacgatgtagagctgttgttgttggaagggcattgtgcattaccttctaagcaaaaattttaatcttagatggaagattcagattccaaaatgttttccaccaattactgtgcaattctgaagcagaagcctattgttgttcatctaagttggcagctaaatgaaagctcgacttgactgtataaattcttgaggttgtgtgatgccatattaatctgtcattagtaagaaaaagctcaacggtattgagacaattttttcaatatcaagctgatcaaaaaaattgttgagaaggtctagattccactccctcttatccgtgatgaaatgagcaacaacaaaagaggtaggtccggtataagttataggtcgaaactcagtatgacctagaatccatttgtcaggcccacattgaatatggaatccattccctactttgtatctaagccctttgagaagaagatcacgaccccaatggatgctctgtcatgtaagagatggagaatggcctacccgtgcttccaaaaaagagttgttagagaagtatttacacttcaaaagtcggtttaagaaagaagtacgcatataaaaaattctccaagcttgttttgctagtaccgcttgattataataaaaaaataaaatcccattcctccttcaaattataatttacaaagtaatttctatcttttccaatggattttcgagccatctttattcgatccccaccaaaagttagccatcatactttctaattgttggcaaaaagtttttgttaagcggaaacaactcatagcgtaagttgggattggttaaaggactactttgagcagaacttcttttccaccaatgaaaaataatcaacttccaaacacactctttgatatgactaaatagctcttttttgtcccctacctgagtaagaaggcagtccgaggtatcgctcatgatactcactgataggtatgtttagagtttgatggaagaagttttgcgttgcaactggagtgtttggagagaaagacatcactgacttttgattattaagcatttgacccgaagttcgatgatatatgttcaatgctctctttatcgccaagggagaagtattcgttgtctcgcaaaagcatgctatcatcaacaaaaaggtgtgaaacagaaggtgctcttctggtaagacgtaatccttggagattaccaatagcttcttcattctgcaacagtcttgagagtccttctgagcaaattaaaaatagatatggtgagagagggtcaccttaccgaaggcctcaagatggtttcacatgacccgtgacttccccattaagtgagaatgataaacttgaagatgacaaacaattttgaatcaattcaatccaattccttgcaaaacccattttctccataacaacccaaagaaaatcccactctactttatcaaatgctttactcatgtccaatttgagagtcgaataactttttgaacctcttgttttgtgttagatatggtgaacgagttcaaaggcaactagaatgttatcagttattagtctatttgagaggtaggcactttgagtctcagagattacaagagggagaacttccttgaaatgcaacactatcatttcgaatatgagcttgtaaataacattacacaggctgattggacaaaaatctgccataccaataggtgaattgatctttggaatcaaggtaatgattgcattattaatcaaatccatgtcgtggccatcattaagaatccctaaaaccactttagtaacggaagaacccacaatatgcaaataattttgataaaaaacggcagacataccgtcgctacctgggcttttgtcaggactcattgactttaaagctattaaattctctattgtagtaaagggctgagtaagagtatcattgatttctgctataatggtggttggaatggttgctgtgactagctccaaagcttgataatctattgctgaagtagagaaaagatcagtaaagtagtctgttatgattgtggccattccatcctttgaggttactttggttccattgcgatccatgagagaaataatcttattccctgccttaattacgtgatgaagcatgggcacgaaaaaactttgtgttttgatctccactttgtaaccaatcaactctagaccattgttgccaatactcttcctcttgagccaataactcatcaagaacactttttgacttctttaattcttccatgagtgaagttgttctgacattagcattattcaagtttgaaacttgatgttgtgctttggaaatatttttcttgaagtttccaaactttgaggcatgccatttctgtaaggaagaagcacaagaatcaattttattcaaaaatatctccatagtagtacccgatgtagaagtcatccattgctgctgattaatggttaaggcttcttcttgctgtagccaaatttgttcaaatttgaaccgtgtgtgcttttgtgatgctaaagttcaccattttttgggttgattgtgactgcaatggctctatggtctgagttgtaataatccaaatgataagtcataataggatcaaatatgtgttgggttttatgcc

SEQ ID NO: 19016 - DNA, 2977 bp, Cannabis sativa
  modified_base (376)..(377): a, c, t, g, unknown or other
aatagtccaccaacctatccagttaatatggtgtgtggaggaattgatagtaatagcaatagcaatgctaccattcttgacaaaatattttcaggtcttaaagcttacttctccaataccaataccacttgttatgtcaacaaacccacaaaccttactgaaactgatgagggttggtcttggcaggtattattactttaattaatctctcttaattaattatattctaaataaattacacaagcctcacttaataattttatcggatagttacacgcatttcagcctgtgaaacaaaatttaatttattatagaaaatttttacaatactttcgtatgatcacgtacgttgtagttatttaagacatcctgtaannttttaaaaaattcgaaaaaaatttaacacaccgaaaacagagttcaaacagtgtattgcacgcgtgactattttattttatacacgtgtgagatagaattttgaacactggtttttatattataaactattttaaatttctcaaaattttataaaatatcttaaataaaaagtaaatacactaaaaaaatcttctaaaataagtaaaaaatcatgtatcagtacatctcttttaaaaacatacacctacattacaattatatacatattgtgagattataatttattcacatatggaaataagattgtgttcccattgatagtatagtaaaagtggtatatatatatatatatatatatatgatattttttgtaagaaaataaataattattgatattgatgtatatatatgtaaaagacttgtagtgagatggtgtttccaataggcattgggaacaatacgatgtttgaatctcagccgttcgatctacaagattacatcaatgattgtaaagactactatggaatttcacctcgtccccattgggcaactacttactatggaggccatgtatgttatttatatttatatatattttttaattaatttatatttatataattatttcaccatttccattacaaaacaaaccattagccatgtatgatacacactattgatgtcatttagtattttttatagtatttatgtcttttcttagagacccttaaacacaattaatcatataattataacattcgtaaaatatataaattttagtattttcatgaaaatattaatatataatacttaattatatgataatgcaggatataaaactaatactaaagagctttggtagcaacataatattctccaatggactcaaagacccttacagtagtggcgggtacgtgtgtatttataaatatatacaataatataaatatttaatttctaattgtaaataaatatataaatttaatttttaagagtaattatatttaagatataagtttaaaatttatgtaggtactttgattttaaatgttaagtaaattgtcatgtggtaatttttgattggacaaagtcattaaatttttatatttttttaaattatcagtttaaatatactaataagaaaatgacacgtaaataatgacttgacacttaataatcaagtacctacggagttttagaaagtagaattataacttaaatatattattacagtcaaaaattaaacttaataagtatttttacaataaatcaaaatatgtatatatataattatcaactaattataatatattaattactactaattaagcttgtttaatctcttttaacgttttttttaatacatgtaatatttgattttttattattagggtcttggagaacatatcagacagcattttggccatcaaaacaaccaacggtttgtacaaattaactcctaaaaaatatattacaaatatatataattttagaggagtgttaataataatttcttaatcaatctcaaagcctgaaattatatgtcaaaattttttttatcaaattttttttaataataatattcgttataattacaatattattcttgtaaatttttgaatttttttttttgaataatttaccatactggaaacaaagttcataatattttaatttacagggatgacatgttatgacttgtgagtataacaaataccgctatgaaaaaaaaaatattttagtgtgtgtttccagcacagaagttgacagtatcatctctcgtttttatatataaatatatatagttatatttagtttaatatatataattctaataagaagagttaatttttttaattttattattattttgcagggtctcattgtttggatattcgtccatcagaaacaagtgatccagattggttagtgaagcaaagaaagattgagatcaaaatcatcaagaaatggatcactcaatactatgcccatcttagctctattaaaatataatacaaaaatgagttcataatttcaaattgtaatacatgccacttattaataattctattgtcttttttctaatagttatattttttttggaatataagatacattttaaaaaaatatttaaaataaacaaaattactttgaatagacactaaagtgaaaagaatgcaatatttgagaatcattaaagttatcgagctcaatttgaaaaaaaaaatattttttttatatataattttgaattttattagcagaaccattgataaaagaaagagatgttgtatatgaatcactcacatattgttagagagaaactctaaaacatattcttctgaattatatgtatctgttgatttaatttggaaaatcagtaggaatttgcaagaacaaactatttttattggaaacattcctctaatgaattccctgggaacttctatagtaaatggaatatacagaattactataaaaagacattaggatataatttaaatgtatacagtatttaggacattgttttgaattagaccccataatgtttagaaaatttctatagtagacccctgtaaagagtagttttagtagattc

SEQ ID NO: 19017 - DNA, 4142 bp, Cannabis sativa
aacttaatctaaaattaatactaaaaataacctaacaatgtcttgggatcgtatggctgcacataaatatgacgatggcatgggttttcgtcatttactgacttcaacattgcaatgcttgctaagcaaggttggtgactgctttgtgatccagaaacctttattgggaaagtatataaagctagatactatcctcactctgacttcctgtcagcagagttgggaagtaatcctagtatggtttagagaagtatttggaatacccaatctctactttgacttggcactaggagaatgattagatcaggggacacggtcagcattctcaaccacccatggcttcctatacagcaggattcatatgtgtctactaaacaccctagtttattgaatcaacaggttaactctctttttcatatgcatagccgctcttgggactatgatccgagatatgttttacaaccatgatgctgaagctttttttggcattcctttaagctcaaatacctccaatgatacatggtcttggttaggagaaagagagggtgagttctcggtcaaaagttcttataagttgattcagaagtaagtaacgacgtggtggctgcaaactcaggtttctagcattaactattgcaactgaaaattcccccaaaagttaaaaaattcttatggacagcggctacatgtacatcccaacttgtgtttagctagtgattaagcatgttgatgttccagtcacttgttcgatttgtaactcacaacctgaaaccatcaaccatgttctcctttcttggcagcttgctcttgactgttggcgtaaatgttcaactccattcatttttaaccctggtggttcttttggtagctagttggagaaaatttttaagaatgttgcaacagatatggtttttctcattgccatgtattgctgggcaatttggaaagctaggaacaaggtagtatgaaaaaaaaagcactcctttgtcactggtgttctcgcatcagcacaagtagctcttgatcatttgattaaagctcaggtaaagtttcgttgtcaaaatggagtatggctagtccatgttgttaaatgtttaattcttttagcaatgacagcaaccagaccacttcatatgttgtacttgacattgctctatactttgcctcaactgatgatctagaagtagtatgttgtttctttcttttccatgacaccagagacttgcctagaaacacacaaaaaccaaatgttgatcttctggtgtcgataaagctgcccaatcagcatctgtgtaggcttctagtctgttttcagattctgcagggtaaaataagccttgaccttgactggttttcacacattgcaagactctttgtgcagcatggagatgattaactcttagagaggttaagaattgactgagtttattgattgaatatgctagatcaagtcttgttattgtcaaatactgaagctttctaatcatcctcctatatagtttaggatcaaccaattgttcttcatcatcttggcttaatttcagattgtttccatgggggtattggcaggtttacttcccaagtagccaaaatcctcaagaggttgcaaagcataaagcctttgtgaaagaaatattcgttgttcaattctggaaatctcaattccaaggaagtatttcaggtcaccaaggtcttttagtttaaacttgttattcaagctaatctttaattcattcatagcttgcaaatcattcccagcaagtataacatcatccacatacacaagtagaatcaaaatacttgtctcttgctgtctaatgaataaagaatagcctgaagcagagtgttggaaaccttcttcaataaagttgtggaaaacttttcgaaccactgccttgaagcttgtttgagtccatataaggacttttgaagcttgcatacaacattaggaggaagcacccccttagggatatacccttgaggtatagtcatatacacttcctcatgtaagtctccatgcaaaaatgcattattgacatcaggttggtcaagaaaccatcctttgatagctgacaaagcaagaattagtttaacagaaacaagtttagttacaggagcaaaagtttctgagtaatcaatgccctcttgttgattataccctttggacacaagtttggctttgtgtctttcaatgctcccattagcattgtacttgattttatatacccacttgcaaccaatagcatgttggtggggggtaatgaaataataatccaggtgtgattatcctccaatgctctaatctcagtggacatggccccatcccaaactggtatgccatgagcctgatggaaaattcaagttcaaagtgactagaaatagcaagatcaagagcacgaaactgtggagacaatctagtgtaatcaatgatttcagaaataacatgatcagtgacagctttagatgattgactgtggacagtgttggtggacaagaagcaatgataatcttgaagataagatggttttctagattgtctaacatgtctgctagttgttggaggatcaggatgctgctgaatatcaacagtatgcacaatatcaggtggtgtgagaagggttgaggatcagttgtaacaatgatgttttgatcagtattaacagctgtagaagtagcagggaaaaattctgagatgtgtggtggtaacaacttagcggatacaaaatatgtgttcatggaacacaacatctctagaataaaaaaacacgattggtgttaagatcaaggaccttatatgccttcattccaataggatattctaggaaaacacatgcagtagctcttggagagaattttaatcttgcagaccctagggttgaaacataagcaagacacacaaatgctttaagatgactataatttggcattttggaattaagaatttcaaaaggggttttgtgttttagattgggagtgggagttctgttcattagataagcaatagtactcacacactctccccaatatatcaaaggtatgtgcgattgaaataagagagctctagcaacattcaacaagtgttgatattttctttccacaacaaaattctgttgtggtatttggacacaagaatgataatggatgattcctagtttagaaaatagttcaggaaattggagctctttagcattgtcaaacctgatcccctcaatttgagcaccaaattgagttttaacaagttgtatgaaagctggtatggtagtttgtgcatcaaatttgtttttaattaggtggatcagtgtacctagaacaatcatcaactatggtgataaaatacttgaaaccttcagtggtttgtgtattatagggtcccctatagtctatgtgaatcaaatcaaaacattgtttggaaatattatgattagaaacaaaaggcagcttcttttgtttggcaaagtgacaaatagaacgatataaatttggacaaggaccatattgaaattttaagttttattcaatgaatgattttttacacaagaggcatgaccaagcatataatgccacaaggtttcatcacttatttcagaattaacaacagaaaaaatagatgacaaagtttgatcatgtaagtaataaaggttgccaatcctttcacccatcccaatcacttgattcttggtaatttcctgaacaatgcatttggttggcataaataaaaagagtaattagatgaatcacataaggcacacacagagagaagattgaattgaaagttgggaacataaagcacattatgcagcaatatgtcatataaatgaactgttccaacaaaaacaactttggcataacaccattaggcatgccaatagaattaattctagagtttttctaaataaaaataaccaaagaagggttataacagacatggtgtgtggcaccaatatctatgatccaactagtttttggaatagaaaagacattaccaaaaatgctagaaatagtaggctgttggttgtggtcaatttggcattgattagtttgagttggggatccagttggttgggatgtagatgcttgagactgagattggatcctttgtgctatcatttgttggattttgtgccctaaataaaacccattac

SEQ ID NO: 19018 - DNA, 1461 bp, Cannabis sativa
tttggttggaggaagaagaagacacattgtctagacagactatatatatatatatatgcatataatcatccatcgtgtaatttaacaaaaaaaatagtatacatattatagatagagaaacaaaaattagctcatcttgtcttgattatggagttaattaataaatttatactatgtgcgatgttgatgataaatgtagcattttgcagcaacaacagctccataccaacccacataagtggttgcaccaaccagttatgcggagatttcgaaattccatacccatttggccttgacaaaggctgtttcatggaaccaccatacctgttccagatctattgtaagaattcaaagccgtaccttttcaactccggtttcagcgtcagcaaactatccgttgcagccggcgaggtaacactcatgctgcctattgcccaagattgttacactgagaacggcacacagttgaaaaataatgtctcagacttcaaccaagcctttaatcaatatttcagcgtttcctttgtcaggaacaagttttactccataggttgcgataatttggcaaccatcaatggctttaggggcgataataactacacaacgggctgcatatcctcgtgtaggctgttgcaaaacttcgatccccagtggacttaatagctaccgttttagtttgagaagtaacaatcatcatagaagtgtttggagttttaacccgtgtagctattctttttttatggaagaaactgagtttaatttttcaaggcttgaagaatttaccaatcttactcaggttcctgttatggttgactttgctgttgggttcgaatcttgtgaagttgctaagaagaatatgacgagttacgcttgtaaggagaatactgtgtgtgttgattcaattcctagggatggctacctttgttggtgctcaaagggttatgaaggaaaccctttccttggttgtacaggtaacatggaaaatgagcacaaaaaatatcttaatttgattgtatataatataaatgatcccattatttatatgtttttttttagatgtcgatgagtgtaaaaaagaaccaaatctctgcaaaaatggaatatgccaaaacacaccgggtagtttcaagtgcttatgccaaaagggatatttgccacaaaatgaaaccatttgcagtctagatgtgaaggacaattccagaaatcgaattgttgactacatcatagtgagtaagtattcaaacatttgatctactaccctctatgaaaatatataaatatgtatatttatcagagttaaatcaaaattaagcaaacacatataatatagactcttacaatgagttcgagagacccaattcacaagaaaatagattatagaatgtctggtttcatatgtaactgtgtataatagaaaatagaataactagcagggtatagaacattccactgaatttaagt

SEQ ID NO: 19019 - DNA, 3110 bp, Cannabis sativa
aacccaataccaaatgagcaatcagcccaaataataataataataaacaaaacaattttaaaaagatcaattttttgttttatttattcattgaataattttattattatctcagaaaataagtagagcagaaattgaataaactaacaagaaagcgagagattcaggaagccattaataaagagtaacaaagaaaatgccctatgcagagagaagagagatgaaaacttaaaagaagaaaaaaaaaaaaagatgatcatgaaaaaccattcttgagatgtgaacagaaagagtccctaaaaaaaagtaatatatgcatctataatctgtcttattcttcagccttactagactacgtatcactagtatccattttccaccctcatttcttaataacatcaaagaaaatgcaaatgcactaagaaaatgatataagattgttgatgtgaaagtagaagagcatcattgtgatcacattccatgctgcaaatgccaccaaaatgacaccatgactgaggtttatttcagtcctaaaagaacatctttttttctgatgagatcttgggaatggtctctccttctaacatcatttctggttggatttgatttctggttggacttgattctatcccttccactacaccttctccatagccattgttgactgatttattctctgtctcaaaagttgtgagctcaaacttagaaagcacagttggaggtggttggttgagttcgaaattcggaattttcatctcggcctgaatcaaactctttctagtgccggagctcaaaacctggtcttgaaccttagacttctcaccaacaacttcaatgccctgagagataatagctggtggaggtgtgtgttcctcttttgattctttgttttcctttatactgtcaagtcctttcaccagtatggatgtttctgtaaaaggcaatatctcagaaactggtgcaagtgatggctcaacttctgaacttctttttgtgtctacttcattaggtcctttcaccactgtggatgtttcaatatcaggtcttctctcagaaactggttcaggtgatggttgttctgcttctgaacttctatttgtgactacttcattgggttctttcatcagcttcgaggcttcaatcttaaataatgtgtcaacggctttatcacactccattggggccattacatcgctggttcggctatccagtccaggctcatttgagggcggtgcaacgaaagttccactcaatgaaagatcagtattatcctttggaatacaatctacctgaggtacaatatcaatcaaagacttgtccttaagtgccacaaagacaccaggctgagattgagaaggttggctttggtctgttaatgtaggtacttggtctttcgcctcagtagattgcttattgctgttttctgggtgcgcagaaccggaaggctgaggatgcggattgggagttgggattggcatctcttttcttttgtacataggaacaagaggagccacatcgtttgttggattaactggagtgaaatgccccggtagaaaaacaacacccctgagctcagtatcagtgtcacctatcttcacattaagcagatatccatcatcaaatgaaccctcaatcactcctgaaaccacctgaccaaccattttatcaaccccatcacctgaatccaaacttagtctgcttttcttcacactctctgatcctgccactgcctggacgctctcccccttgaccaaactttcatccttacgaggacgtccacgtttccgcttcaaggggaggtccccaggcgataaagcattagccccttgaatctgttggttcatcttgctgaaacaaatgaaaaagataaaattttagaagtgtttactgtcaaaaaaaaaagttttatgtatctaagtgatatggaagctttcacacaacgtttatttttaccccataatgtcaagcactttactctttccaaagagaagtaacatgcaagatagatattggcacagataatttattaatttctctgccatctaagcaaatgtcatgcatatgaaacaagtaatatgcttttaaaacttcataaaaaattgagcaatgtgtagcaaaggttttatgcatgtaaagaaacgactgttttgtcaaagtttgattgccttaacaaaagaaagaaaagacaaattctttcacattttatggaccattctgttatgggtttcaacttcactaagtttgtggatcatcaccatgcatgaataaagaattaacaagtaaattcattctgtgaacgatctccattctgtaattagtcttgatcaaatacattgcaataaggaaacaagagcctactgtaggaaatggcaaagtgtttatgcattcatcaggagagaaatattgcagtagtcaagttgagaatgcaaaaccaacaaaaacaaaggacaaaaacagcttgaatataaagacatgcaaccaaccaatcaatattttttttattataaaatgaaaacaaaaaatcgaaagatagcatcaatgaattaaaatatacacataaaacaccttaaaaatgatctgaatcaaataacagccacacatataaaagtttcgattcacctacagaacaatcatgtgcgtagaaactacaaggtcacacttacattgtcataaaatcattattacaaacatatagtggacaggcaataatgtgaagaaataaaatacaaaaacaaacctataaattaaaatcaaatcataaataatgttaacagacaaatgagataccaaacaagaccaaaaatagagaagaaacttcgggaatttagatctaaaacaatataatcagatttgaatcgttgtaaaagagagggagaagagataaacgtgaggtaatggagtccttttgaacgaagaaaatgagtgtgaatagcaatgcgcctagatattatcagtcattgaagagagggctccgtccatggagttcatgcagagctttcagaacaagagaaactgtttcatcaattttctattttttaattgtaaaggagagaataataataaatatatataaaaaaaaatcttgcttttttatataaatatatattttt

SEQ ID NO: 19020 - DNA, 7272 bp, Cannabis sativa
aaaataaaaaacaaaaatcaggggataaatttttactttcattcaaaatcaaaaaaatgagaatacttctctctctctcaaaaaaaaaaaaaaataaataaaaaaatcatgagaatactattatgtcacaacacgtattcgtcggcacatcacactaatttaactaggtcaatatacttttcatacaacattagttttttttggtcacacaacattagttttttttagtgttatttgatcgcattacattactccaaaacaaattaaaataatcggttactaaatcatcatattttatcacacgtaattatgagaggtaataattaattatttgatctaattaatacattaaagaatatttctttttacctttatttattttcgtttcccgttagaatttagacgtgccattgtcggtatcatatttacgctttaccatgagtataaaaatcccctttttcttttgcaattatataaactttatatataaatacttttcatccatcgttattgttttcatttccctacaaacaattaattattctttctttccaaacaaccattaataataaaaatctagtgaaaagaaatcatatatagctacctagctgttagcctgttacagaaatctgaagaaacgacaatcataaaaaatatatcaaagctggcttaaagattgtgcataattgtcgtgtgataataataattaataattaatcggtccaaataaataataaaaaaaacgttaatgttcagtcaaagtttgactatcttaagtttaaaccaataagattcgaatataaacatgtttatgtaagattgagtgtacatgatatggcttccaataaaaaataaatacttttttttttgtgctgaataaaaaataaatacttttgtgtgggccaaatttgattctttcacgccaaatttttgctggcttacaggctagcaaaacccttggaatgaagaataatcccaacggctcctatatgaggtggccacagataagtgaccgttgatggggcccacgtgtccttttatttacaaaagttcattatatataaccgttactttcttgtctaggttcttacaaactaaacctcaagcgtaatattttcttttagttttctctcttcattttctgattgaccaaacagccaaggttgttgtttttttttctttttcgttttctaacttgggtttcttgggaatttttctgggcttttgttggaaaaaatgactgttgaggttaaggttgaagttgaagagactcaaatgggtgaagtttctatcagtgaagaggtgtctagcaagaagcaagtagtacaagaatctaagcctacaaccgttcaaaaaagctcttcttacaaggaagagagtaactttctttctgatcttaaggagtttgagaagaaggctttgattgatttgaaggcgaaattggaagaagccattctcggcaacaatgtttataagaaagaagaagagccaaagaaggatgagaaggcagtggaagaaagtgctgaagagaaggaaaaggcagtgaaggaaggaggagaagaagcagaaaaatcaactgaggaatcgaaacccgaatgtgctgaaaccgaaaaggaaggagagaaagaagaaactcatgaagtggttgttgaagaaaaagcaaccgaggaatcgaaaccagaatgtgctgaaacggaaaaggaaggagagaaagaggaaactcatgaagtgattgttgaagaaaaagttgaagtagtggatagagatatttctctttggggtgtacctcttttgcctagtaaaggagctgaaggtactgatgtggtccttttgaagttcttgagggctagggagtttaaggtcaatgaagcttttgagatgcttaagaagacccttcaatggaggaaggattctaagatagattcgatcttggatgaggagttgtgtgttgatttaagctctgctgctgatattaatggcgttgatagagaaggacatccggtttgttacaatgtctttggagtatttgagaatgaagagctttaccaaaagacttttggtacagaggaaaagaggagccatttcttgagatggaggtgtcagcttatggagaagagcattcagaagcttgaattgaagcctagtggagtctgttctttgcttcatatcaatgatcttaagaactcgcctggaccctctaagaaggagcttcgaatcgcaacaaagcaagttgtggggctattacaggacaattaccctgagttggtggctaagaatgtaagcttactttcatttttttttttcttttgatcaacatagcatatgtttgttctgtattgattgttttctgttatgtttgttttggtatttagatattcatcaatgttccattttggtactacgctctcaacacacttttgtcaccttttctcactcaaagaaccaagagcaaaattgttattgctcgccccgcaaaggtcacagaaacactcttgaagtaagtaattcattcttaatattacacttacaaatggaatacattacgttaatgtgaattcaatgactaaataacttgtatggatgaaacaggtatattccagctgaggaaattcctttcaaatatggtggtttcaagagggagaatgactatgaattctatggtgatgataactctgtttctgaactctaccttaaagctggcatgactgaaaccattgagatacctgcaccagaggtaatctatataagaaaatgttctgattttcttttttcaattgagccctttcggatggtcacccgaaaaagattgattttaatatatgttttttgtctttggtaataggctgatgctacattgatctgggatgtgagtgttttgggttgggaagtacactacaaagaggagtttgttcccaatgatgaaggatcttataccattattgttcagaaagggaagaaaattggttcacaagaaggacctcttcgaaacacctttagaagcaatgagcctggaaaggttgtccttacgattgaaaacacttccaacaaaaagaaaagggttatgtatcggttcaagaccaagaagagtccctcttcataagaaactcaaaatatacagatggaaaatagtggagtgggggaatatgctgtgttgttcaatttttcattctttttaacattcttttgaggggtacaacaagaaatgagtgagaggatagtgaaatgtgaaaaattcattcttttgcaggattggaatcatgaaatgtagtacgtggtttgaaattgtttgctgtaatttacatgtgagtgaaataatattggtatatttgttttaaaggaaatgtttctattattagtattgttttttcattttattttgaaaaaaaaaaacacatgttgaattgcttgcttacaggctatggctcccaatcaagtgatatcctgaatctgccagttgctttttctttttttgaaaagatgtctattaattagaacttaacctcacgatcattacagaataagtttttcgagtaagaaataggtaagcaactaaacctattggtgaaccctacgtagccacagttgcttcctgccaagcaacgacaaactacagcacacaacaatatgatattttcacaaaagatggacttttgcaatgaggattataaactgatatgttttcttagtgaaaagttgcacaaaatcactagattatttaatgattcctccttccatttcctgcttttaagcgagtatttctcttttttcttttcactgatttaggccaccatccttgtccaacatattcttcaatcacccactcaatttttggatctgaaagcataacatatcccatagaaatcccaaacacaagtcctcctgcatacccaatcagtgcaaatttccaatcaaaaagccttgcagcgtctgtatcgtcttctggtgagaagtccattccaactggtggcggttgtgtgctgtgctctccgcatccctctgacaatggaaatccacagagtcctagattttgaccatacgaatcattttcaaatgtgttgaactgctttccggttggtatggctccaaccaattggtttcgcgaaaggtttaggacttgaagagatgtcatatctgtgaattccactggtatttctcctccaagcttgtttgatgataaatctaaccactcaagattagtcaagttagccattgatgctggaatagaaccattaagcttgttatgtgagaagttgagtcccttgagtgacttgagatttcctatcatctttggaatatgtccctcaaaattatttgatgaaaaatcaatggttgtgaacatggattggattctgaccatctcaacagaaagacctttcaatacaactgtcacagagtcataataatatccggctctctgataatattttcccatgtattccaatgtttctttatgtgaatccatcatagctatcattatttcaaaatattttgtgggcaaatgaccactgaactgattgtgggaaacatcaagaattcgtaaatatcgaaatggtagccatcccaagaactcaggatagccaatgggaccatggaagttattagatcttaggacaagaacagtaaggattggaagtgtttccaaccagtaggggaagctcccattgatcttgttgtttccaatgtctaaaatctccaagatcttgcagttggctaagctttttggcaaaccaccttctaattgattaccattaaggttgagagtccttaaactgccacaatcttcaaatgttgaagggatcatgccatgaaacttattggattgcaaatttaagatctgaatggaacttaaattagtgaggcaaggaggaatcatcccagtgaagctattattggccaaatctagtacactgattgtttctagcttgcaaatcaaagaaggtagctctccactaaattgattgcttgaggctgaaaataggtatgtggattgtgatgggattggaagactcccttgaagcatgttggaacggagatcaagatataccattcttttccatgaagcaagctcaatgtttgtcaaaaaattatgggaaagatttaaaaagtacaatgagcttgtccctacttctccaacccatttgggaacatttgcagcaagttgattatgagaaaggtctaacaactctatatttttcaaggcttttataaagtgtgggaactgatttatattgcatgaagacagacgcaagtttagaagctcaggcaaagtataattaatggaaccagaagaagctgtcgaaaaattgttaaatgaaagatcaagagaccagagtttcttcatctttgagaattggctaaactctatggcaccagacaatttatttgaagaaagatctaaaactgaaagatttaattgctcagaaattgatcttggaattgtgccttctaattgattatgatgtaaatcaagccaaactaaagaccgggtttggaattcttttatgaagccactgaattggttgccatgaagatctaaatggaacaaggaaggagtagcatacaaccatgaaggaagggtcccattgaacatgttatcaaacaagtctagagaagtcaactgcaatggaacaacataagattctggaagctccccttgaaaattgttgcttgaaagatccagagaagtaattcctttgaaattcaaagagtaccatggaacttggccgtgaaaattgtttgctgagaggtctaaggcgataatctgtgtgaaatcaccaagcaatataggatatgatcctataaatttgcattccctgagcagcaaagtgttcaaattccttgaattttttgtaagatgagctaaatctatagagaattgagttgaagaaagatctaatatcttgagcttactagtccagttagaccttggaaaagagccagtaagattgtaattttcactcaaataaagctcttggaggtttggaaagtgaaaaatattttctgggaaaataccatgcaatccaatagattcgagattaaggtatctcacagaggatgacaaatttacaaaagaattagatgataaagaaggtgtataaatattgtcatgcagatcaaggtctataagttgagttaagttttcaacaattcttttcatggttgaagactcaaatttcaatcccaaagaatataaatgaagtgtgttcaatttggacaagtgagaaatctctactgggacatgaccagaaaaatcactactagagaggtcaaggtgagttaaatgagtaaacttactgaattgagatgaaatagtggaatcctcaaaatcattaaaggagagatttagtctccgaagatggctgagggagaaaaggctgttatttgagagcaaactcccttgaagcccggagcagctgacatcaaggttggtcacgtgaccagtcagctcgtcgcacgtgattcccttccacttgcagcaatttgtaccatttttccaagagcttattttagtaacatcacaaaagctagtgtctacaatggaaaatgagttcttgaagttgagcaaagcagaattttcatgaacatgacataatggtgttgcagaggaggtaatgaaaaagttggattgagaacaaaataggagaaggtgaaaacataataggctaaatgataacttcatattaatcttttaaaattgaactgagaagtttgttcacatatgaagctttgggtcacgataagattagtatttatttccaccaagtcgtcgtgagtctttctgtcattcattattatttttgttttcaaagatgaaatgaaaaagcaatcatagctagtctatgaaagcaccattttcacgactttaagttttcaacaaaggaaatattggcttctcttacataaagtacacacaaatttataagtcttaaatgatgaattatacttattaaaattgacttgttaaggtggtgtttggtaacatttttgttttttaattttaaaaacaaaaaaatgaaagtagattttttgcttttaaaattttgtttttaaaaaataaaaatgtgttctataactacttttatttttaaattttaaaaacaaaaaatgttctataaccacttttattttataattttaaaaacagattacaaaagtggtgttctgtaactattttattttttaattttaaaaacaaaaaacacaaattttgattttttttctttttttaaataaaaaattatgaatataatttatttttatttttaaacaaat

SEQ ID NO: 19021 - DNA, 2313 bp, Cannabis sativa
  modified_base (400)..(407): a, c, t, g, unknown or other
ttttgttatttttatgtatttgtaaaataatccaaaaaaaaaaaataatttaactataatttttttttattaaatatgaaaaattgatctttattttcacaattcttttttcttacaatttttttttcattaaaattcaacttctaaatagcctatatgataaaattgtcagactaggaatgataggtataaaattagattttattaacatgttttgtacttaaattatatttatccaatttaataatcttatctcactacaaaaaaaaaaatacttttataataatttttagttacaatataaatattttataactaatatcatttttaattataataaaaaattatttgtgactaaaacatactttttagatacaaattgttactaatttagttttannnnnnnnaagtattgtgactaaaaatatacttagttacaacaaattataatttttatgactaatactcttagttattaattttttagccacaacataaaaataataatttatatttagttataattttttaaaaaagtttgtagtgtctggaaaaaaaaaaatgtatcatatgaattcattgaagaaacatatgttaattaaggctaggttgttgacttgaccagacatggagacttggagtgttaaccatgcttagtaacaataataatggttttagcttcatacaagcaaaaactaatttattttagtattttaaaattagatattaatatagaagtggagtggagtggagtgaaggagaagagcttaaataaatgtcataattataatgatgtaagtcagaaatctattatgtatggttggtgtcagttgtgttaatggaacgaatatatggtattaatggttataatattttcaaaagaagagatctagagcccaattcattatgatcaatgacagtcaagcccatggaccatttaattcattagcttctaggcctttctgggtagttggtagttattgtagtaaggataatatatatatacacacataatatttatatttatatatagggtcctcggaataatcatcatgaaccatcatcatcacattcacattcataatttagatgagagtcaaacttagtcaaaggaatggtaaaaaaaacattgctatgggatcatataatatgagactatgacagtgtatatggatattctatgtttagtataattacaatcttggtttatggtaacactattgattttatgttaaatgttaaaaatgaaaagaaaatggcactcaattagagggtgctcttttatcgaagaaaagaaacacaagagtgaaatgagggattggcgtattgaactaagaaaggcatttaatgctaaaataactcacaaaagctcaagttgaaatgagacaaaacaacaccaatttccatactcttttggatcacaactttcatggaaaattaaatgttcttcggtttttggaaaatgggcttaatttgttttttaatttcacaatattgttgggtcattatctcactaattaccaaactaaaacgattaattaattagttatatacttctaggaaatgtgtataggtacactagctccaaaattttgacaagtaaaaacctgcagtgtgtttgtttgtttgtctggaaagaaagagaaatgattgtatattataaacttcatcttcttcgctaaaaccatctcatgagatctcagccatcaaactagtaactaaccaatagatgatatgatcattatataatactcacttaaaaattattatatagctcattaaatgtcaattaaaatttggagggagaaacaaacattaacaaaaaattctgaaccagcttcaaaattaacaattataattatttaattattactccaaaaccatgagcccctaaatcaaaacattataatattatttcaattgcaaatgcccatttcttattatacaaagtttaaaatatcaacttgcccttcttacctttaattaataattaattaatacataaaccgaaaattttggcataataattaggttgaattaattgctattgatcatgattaatttttttagatatattaaatgctacgcatggaaatggcacatcatataaatcacaagggggtttctatgctaattaatgagctacatgaggtcatgatatgagacaaattcataattattttgcagtactcatttatacataagctaataaattgttgagctaccctgaaattgaactgggtcaaaaattaactataataatatctatgttaattaattacttaagtaaaataagcatatattatatgaaga

SEQ ID NO: 19022 - DNA, 4063 bp, Cannabis sativa
attcgatacaatattattttactctattaattttcttagtttctcttaagttttttatcttcacccttttatatttgattttataactaaaatttagttgatgagttcttactgcaaacatgtattttaaaaaataaaataaaaaaattattgagagtactgaaagaaagatcgataatttattttttcaacaaacaaattttttattttatttaagtactattatttatttttctcacatatttattattattaataatctcaataaacaaaatttgtttttagaataatcaacattattacaaactcaaacccagaaaaaataatgtttaaacatgtcacacaacattcaaaacatagaaatttagggtaatgttataactacttttcattaagcccttataaatttacttttcgattttacccacaaatcatcataaaatattatttataattatacatgcatgatcttgtcaatttttaattaatgtgggattttctttttaaggaaattaatgtgagattttagttgcatatctaaatagttactaatgaattttttttttgaaagaagttactaatgaaattaatgctctctctctcttctctcttgtctcaatgggaactaataaagtgggaaattcctatttgggcaagcaaatttcttggagatttatctaatttaaggataataaacattataaataaaaaaaatatagattatataaaaataataatattatataatgttaataatttacagtacaagaggttttgtaaattcataaagaaaatttataataactaaaaaatactattacaaaatagagtaatttttttttgcgtaaatatataagtaattctcggttgcagataaatatttaagtttaattttaaacagtaataatacttaagttatatttctgaaattttcgtaagcatttgaccgtgtgattttcttattattatatttaaataaaaaattaaaatttaataaactgtaccaatcatagattgccacgataataaggtacctacgtaaaataaaattataacttaaatattattaccgttaaaattaaattaatgtatttatttgtaactcagagttaaacttaattacttatcctacaaaataatcttacaatatattaaaaatcaaacggcacccatcgggcagcagcagcattcggatggtaaattaaccccattcacacccccatttcttatttagacgacaaatacccttcccaatagagttgggtatccacccagcctatcccgatacccttatgaagtgtaatattattattggtacaatttaatatcaaatcctacttatagtaatttaataaaaattattaattaattataaaataccatatcataaaagtgtgttagacaccttaatatcccctaacaatgctcatattcttatggtacacatgtgaaaggtaaggtaattagataatatgattttgagaattgttaaaagatatccaagtactaccaataaaaagtgcttgacaccataatttatcatttccaactaacttgtgcataaacagataataattaaagaaattacaatagaaaaacgcgtaagttgcaattcaagtcaaattcttataaatgtctcctcttgacttaattatcgttctcacctcataccatatattccactccaaatttgcttttttctatttgcctaattacattgggacccaaaaacattattatttaaggaatacaaacacaattcacaatcataataataaacatatcaatatcaaaataccatatatgatgatgaaacaaaccttcttcatctcccatggctcacccactctttccatcgacgaaactcttccagccaggcactttctccagtcatggaaggaaaccatcttccccaccatacccacctccattttagtcatatcagctcactgggaaacctctgttcccaccctcaattttctcaacaaccgtcctaatgacaccatctatgatttctatggcttccctcaatcaatgtacgaggtcagtaaagtttgcttttttatgcttttttgggctgaaaaccaacctgggttgcctcaaattttaatctttgatctgattttcctgactttatttattgggggttgaatgaatttgagatttaaggtgatggctccaaatgactattattcataaatttaattatatataattatctatttgctctgtccaactatatgtgctttaggggttgaatgaattgagattgaagatttgagcatttatagatttgtttttatggttttgacttttgaaaatatgttcccaaatgactattcataatatttttggctgtgaatttatcactttgttcattctttgatgcataatgttctgtaccaaactactatactattttcaggtcaatatcataaaatggattttgggtttttcaatttattgtctttgagcttttctttctcttgttttttattaacttttaattagcacatacctcaatttcaactctcaactacatttaaaagggtccctattacttcccttatacagatcagcttgattctaattctcaatctcacatctgattttgcttacaatccttgttttgtttgactctatttttacaatcccttatctgattttgtcaacataataatctcatcattacagctcaagtatccagctccaggggcaccacaactagccaagagagtaaaagacattcttttatcatcaggctcaacaaaacaagtcaatgaagacaccaaacgcgggttagaccacggtgcttgggttcccctaatgctgatgtaccccgaagcccaaatcccagtgtgccagctctcggtgcagccacacaaggacgcggcctatcactacaacataggcaaggcattggctcctctcaaggacgagggtgttctcatcattggctcgggaagtgccactcacaacttgagacaccttaagcctcaagatggtgtggttccttgggcgatggagtttgatacatggcttaaagaggctttacttaatggaaggtacgaggatgtgatcaagtatgaggagaaggctcctcatgctaaagtggcacatcctcgtcctgaacatttttaccctttgcatgtggcaatgggcgcggctggtgtagatgccaaagctaagctcatacaccatagttggagccttggttcactctcttatgcctcttaccagttcactagtgctccaacttcatagtaaatttgttgtgtgaaaatggattattggtttatacatatgtaacaaaggttcttaaataataaggtctctctcaaccaggaccaaaaatattgtaagtaactctatatagaatggttatcttatcttatggtgttttcttctaaaagtaaattgttattttaaagaattatttaaaagaaaggttggtgacaatgtgacatatcaacaaagaactatatgatggttttttctttctttctttttttttttttttaaaaaaaaagtaatggtgtaaggtcatctccaatgggaaaatttaaatttggtgttaaatcaacactaaaaaactactatttcaacactaattttttttttcaattccaaccacaacactaaaaattacaccaaattttatattctttattcttttattattttattaatataataagaatattttaatactaaatatatataattatttaccttttcttctttaaagtattatttaactattaatttttttttttaaaaaaaaatggtgtggtctacagtgtctcactaaatttggtgggacactgtagacaaagatttatgaggatagatttagtgtcctgttggagtaaatatagtgtaaaactacactatatttggtgttttagtgtcccattggagatggcctaagtaaatgaggttaggtgacaaggaaaactaccctttggaaaacttatggcatgtttactaataagtaatgtgaatcaatagtaaggtaatcattctcttacatttatttacttgtattattaaaattaggaaa

SEQ ID NO: 19023 - DNA, 2605 bp, Cannabis sativa
taataataatagtaagtttaatgagaaattataaaaagtgtggctatatattgtatttacataaaaatcaataaaaacgaaaacaaaatcttgtatactcacttttcaaattaaaaaataacaaataacaaatctgaaacactaattcatatttcatagtagtaaaatgagagtcacaaacaactaataactaaacaagttagaataaaaacttaacccacaacaataatggcttcccttccaatattggtgaaatcaaatcttttaaatttggatttgattattgaaaaaaagcgaataaagaaagacaatccaattaaacaaatagcaatggcaagagcattggaaagtgacaacactgcataggtaccggtaacaaatgctatcaccataaatgccatagcccatattgttaaattcatagacttgatgtagttagatacaaactcctcattttcatcttcacctaatgatgctatagttaaaaagaggttgataaaaacagccgtagtagaaaggactagggctattgtgtctgttacgatgaaggcttgaaacgctacgttattccttaaaaccgcgctaccttgttgttgttgttgcttattatcgtccccgcttatgttacctcctggtaatgtaaatcctgctgtgaatgttactgtcgcaatcaatgcagccgcgactagagtagactctctaaaatttgcaattttagtccttaatttttccttttgctcaatctttttcttctcagcattgttcatcatcttcttgtgactactgtcatttaacatgtgtgattttcgcaaatgactctttagtactgtgtatttgtcgaagagttttggtagttttctctgtcatataaagatttatatatataacacaagattataacaagtaataataattagattaatttgcagcatatatattaagtttaacaccgttaaatattaaatcattattcacgtgttatttttttattagtatatttaaattaatttttttaaaaaaataaaaatttaactacttggaccaatcaggaatcgctacatggcaatttatttaacacttaactgtcagtacctacaaaagtttcagaactataacttaagtattattaccgccaaaatttaaacttaagtatttatttgaaattaataattaaactttactctatttattattttggcattttaaaaaattataattcaatttttttgtatgaccgtctacgttatagttatagtaggcatcgaaattctaatcataatttatgatgtcgaaaacataattcaaagatatagttgtacgtgcttgtttctttttgcactggtaatgtttgaattttgttttcaacactatcaattatcctataaatttttaaaaaacagatggtctttatctactataactacaatctacacaatcatgcatatataaaaatttagtttatatattcaataaaagatggaacattacctcatcatactcttgatcatcaaaatcataggctgcatcaaaaatgttgttgctttgtttgttgaatgacatgttattcactcttgggtgagacaacaaagcttgtaagatttctgaatccataggcctttctgaagtggcaaccatatgaagcaaaggagtatttcctctataatcttttctatttaaaaggtaacttgtaaatggaaaatgttgtaatatgagctttaatgtagacagagattgtttcatcacaactaagtgtagaaaattgttatcatcattatcaacactttcatagctatctggaaatcttgatagaatttcttttattttttcaaaactacctcctctgtggttcaaagctgcaatgtgaagagctgtactgccatttctatctttgatataagcacttctttcatctttttctaacaacattcttacaatctccaaattattattattacagcaaaataaagacacagcataatgcaaagggattttacgatctttatctgcttctttagtcagatttattaattcttctttttccaaaagtactcttgtcactcctgaaaatttataacatgcatcttcaattagtaatccatttacaaataataatgaaaaaatatatacaaaataatcatgaatttacaagttataatgaaattattttgtattagctgggagcagggtcagtccaaacatttcgggagccttgtgcaaaagattaaaattacgttttttataaaaaaaaaaaaattgtctacattaatttaagacctccattgctagttttttaaagatatgtttgtaaatttttaaatataaattttttaatgtaagtataataataataaaaaaaaaatcctatttaaaaaataggcatttaaaaagaaggagccttctgcaatagcccaaactgcccaagcttgtgctagccctggcttggagcttagtttgaaattagcgtgatgtcattaaaataaagaaaactagacctcatggtcattacataatgggttctccggtaacactgaaaccgggatagatccaaaagactcttaacaatggactttagttatatcaggtcgacctaagcatatgacagttt

SEQ ID NO: 19024 - DNA, 5616 bp, Cannabis sativa
cctgcagaataaatcattgcgaccttctccctgctgaaatttacgcagtttgtgctggtgtagcagcagccaaggaacttggattcaaaaatattgtgtttcaatgtgattctctaaatgcagttgcagctctaaactgcgcatcccttgaagtttgtaacctgcattacaacatccaggagcttgttttaaggttctctgaattggctacctctctaaatctttgggaaattatttggactcctagatcctgcaatcgtgtggcccatcttgtggctcaatgggcaaatcgtaacaacaaacttggggttatcgatttggccagttttgatgactccctgcaacttgttattgcagatggtcatgtggtagattagtctgttctttagtttttctcttttttgtttccttgttgtttgtttccttttctttggggctggccttgtttagcctgttttagtttctctggtttttctttgtgtttggtttctttgtttgtttcgggttgtggttcccttcataaccactaatcaaaaaaaaaaaaaaaaagttatacctgcatttatttgcggtactagaagtctagaacatggataggatacaacaccttatattttgcaccaacattaattatgaaaactatttatactaccaaattagaaactactattattaataacatttgaaaatactttattttcttaacattacattataaagtgaaaataaaaaataataataagaaaaaaaagttattaagtgaaattgaagcatcgttaaattttttttaataatcattactttcaattcaaagggttgaaatttaaaaagagaccccctcctccacccagagtagaaatatatatataatatctttttttttaacaaaggaaaattaagcattataacagtcctcagccataacaattttttccaaaacagaaggagcattcagctcattgaaaatacaatctgacgtaaaacaagaccctctagcaacacaatgagcagctttattggtagatcgataaacaaaagaaatcgaaacatttcgtaaagataataaaattgaatgacagtcagccacaacaaaccaaaccgtgatggcatagagtctgaactgtttattgcttgaactaccatcaacacgtccgactcaataatcacatcttcccaacctttatctttaacccaacttagcgcttctttcattctaatcacttcagcgatttcaggaaaaacaaccccattcctactcgctgaaatagcttcaagtaatcttccatttacgagccacacaaccaaacccaaacctttgatacgcttcaaaaatagctccatcgacatttaccttaacctgaaagttctctagtttacgccaatggttgcaatgaaaagaaacaccagtctgaaataaagactgttgggatctagcaaccgtccattgattaaggacctgcctagccgacttcactactctcaaagttgtagcaaattttttctgccataacacctcatttcgggtcttccataaactccaacttaccattgcagcatcaagtataacatcaccccggtcctcctctagcagagcaaaaaacaagctgctgaaatcctgaaataaactaagattggaggcagcgcagcagagaggttccagcagcttcgagcaaacccacaatcaacaagaacatggaaaattgtttcacactcaacatgacaaaatggacaaaataaatccacattgacatgctttgtactcagctgaaccttagttggaaggcaacctgtacaagccctccataagaagtgttgaacttttgaagggacttcaagtttccacaattttttctagcaattttcttcttccaaatgcaaccaattcccagcagcagattgcaagaacttgtaggcactcttaaccgtatataaccccgaatgttccatatgccaataccacaaatcctcctcagtcgagtcacttaaatgtatgctcataatcaagtttttatccctctccacaaacatatcatcaaggatctttaagtcccatgacctctcacccacaatcatcaaactagcaacctttttatccacagaccttgatgatctgaaatgataaaaggattactatccataggcagccacggatcaagaaggatactaacagatgagccactaccaatcgagcgtcgagcaccattcctgaccagagcttgagcttcccaaatactatgccaaataaagcttggattttggccaagttcagcttgcaaaaaagaaccatttgggtaataccgggccttgtaaattctctccaccaatgtatctttcttagtgagtaatcgccatccctgtttgcccaagaaagaaagattataatcacgaagatcacgaaatcctaacccaccgacatgcttatgttgacaaaggcgcttccagctaaaccaactaacacccttgcttgaagaattagattgggctttccaccaaaaattttccatcataccttcaagactagcacaaatttccttagtcaacagaaacacactcataccataacttgaaagtgcttgagcaaccgacttgatcaaaatttccttactcgctttggacaaaaacattagtttcccaactaaaaatacgctttctcattttttctttaaagaacccaagaattgcattctttttcctacccattatacaaggtaggcccaagtaaagactattctcattagcctcaaccaaacccatagttgcacaaacttgtcttcgaacctcctcacttgtatttttactgaagaaaactgaggatttatcgaaattcaccttttgaccggaccccaattcatagcattgtagaagttgaatcactctctaagcaaccctatcattggccttgcaatacacatagctatcatccgcgaagagcatatgggaaactctgggagcacctctagccactttacaccaagttaaccactaatgtctctcatactttctcaaaatagccaaaaatccctctgcacaaataaggaacaaataggtgataatggatctccttgccgcaagcctctaccaggacaaataggacccatagagtgacccccatgagtgacattataagttacagtagaaacacagaacataatcaactccactacccttctatcaaaccccatccgaagcaagagagactcaataaaagcctattccacacgatcataggctttactcatattgagtttgacagccataaagccctccttcccaatcttctttcatttcaagtaatgcattatttcaaaaaacaccattacattatctcatatcaaacgtcccggaataaaagcactttgattatccgaaataacagtaggcaatactccttttaaccgattggccaaaaccttagatatgatcttataaagcacattgcataaggacctagggcgaagatcagtcattacctcaggttgtctcttctttggaattagtacaatgttcgtgtgatttaattctttcggaaagataccattcgtgaaaaacttctaaacgaaagtcacaatgtcatggctcaccgtactccaatatttctggtagaatcccggtgtcatgccatcagggcctggggatttatccggatgcatctgaaatagtgctctttttatttcctcatccaacaccggttcaagaagctttttattttgatcaatcgtgactgtactgggagcacaatcaaccacttcagcaaaattaacagctgaaggagtgaacaaatcattaaaataatcaaccacaacttgcaagagtcctccttgccaatcgacccactcaccagtagcaattctcaatctttggattgcattttgacgtctcctagctgtagcagtagcatgaaaatacttggaatttctatctccttctcgaagccaaagttgtttactcttttgcttccaaaaaagttccttttgcagcagaatattattcaagttattaacagcctgctgatacttctcaaccaaacccatatcactcccttttttccattgaaaaatctctttcttacactcctttatacgcctagaaaaatcattagaataatccttcccccatgtcttaagattctcccgacaagcctttaatttctcaagaataccttcattatgatgcaaagaccagctatcagcaataattttcaaacaaatatcctcttttaaccatgagttttcaaaacaaaaattctgatttcttgcaacaacaacttgattaacagggcgtaattgtatacggcaatggtcagatgttgaagcttctaaattcaaaagcttagccgaagggaaagatctaaccatgattgactcgccaaagctcgatcaatgcgcacctccacccagtccgaagtgccacggcgacactcccaggtgtatggatgtccgaaaagttccaacttatgacgcccacattcagtcaaaacatcattaaatccctcaatcaaccagttcggataaggattgccaccacgtttatcctcacttgaagtgatatcgttaaggtcaccaatgatacaccaaggcaagttttgtttattattcagcacagtcaataactcccaagtctttctccttaaatgtctttttggctctccatataatcctgttaatctccaatgaccataaacaccatcagtaataatagcatcaatatagtctctaccaaattcaagcacctgaacctcctcctcaaatctctagaataaagcaacgccaccactttttcccaaaggatcgacagagatagccccatcaaagccaatagaaacacgcactttctcaataatctcttttcgggctaaagtttcacataagaacaagaaattggatttcttttggatcacaagatcctttatgaattgatgagcccatgggttcccaagcccatggcaattccaagagataatgctcatgataatgggtgggcctgagaaccaaggccaccttcaaaacgttttttgatccatctaagtcttcattcattcggcccatcttgacaccagataattcagattcagcataggccttttctatttcagtacgtctacgcttattctccataatcatcaacaaatcatcttcattcaatactgccttagtcaaatttccaccattactactatcaccagaatgttcattattagtgccatctgtgcccattaaaacacttttattcttccctacaatcatggaatcacgatcctcacgcccatcaacactgtcaatctccatgattttcggctgcataattgcaccatcttcagccccactcagatgagaaaccccaccctcacctaccatcgcctccgactccatacccgaacgaagccactatgctccaattaagtagttctttttccttgtttgagcccgcattccaatctcatacgacttaacaatttgatcaagaggttgatcaaaccttctcagacaaaatctcttggaatgtccgatgatttcgcaaacaaaacagaaagtaggtgtaacgccctgtccaacagggacgccacgtgtgtgcactttatttaaaataccaataattatataagatgtaattatacta

SEQ ID NO: 19025 - DNA, 8926 bp, Cannabis sativa
ataaatatagtattagacacttacttcttcccgttcgataaatccagtttgcctcaaatcatacaacctaaatgcgactgcaactcattacaattataagagaaaatagtaaaccatattaacataatattctacaaaattgagaaaactttatgagagactacacatgactataataagtagtgtacttacaatcaatcttgtccacgagaggggcactaggatgaaatatactaagtgcatgtacaaattcctcaaattcaatgacaccatttttcttctcatcaaaaacatcaaatacctatttcatattatataactcagatatcattccacaaagaaattaagaaagaaaaaaagtggtagctagctagctgatctagtttactcactctatccacaaaaaggttttcaccagcagcagttttgaatattgctaatctaagctcttccttcacattattaaaacccagaaacaaaaaagtaagtataagtacaaatataaaatcaaattacttttacataagaatcaaagtttaccttatgaattaggccatcgttaatgatcgagttacttaatttgttgaacagttcacgcaaggcctcaatttcgttaacactaactacataatccaaaatttaaagtacatctatttattgaaatcaacaacaaggatttataaacaggggaatttaaataaaagaaaatggacgaacagagaaagttgtttgcaagtcgaacgacgtcgttgaatttgtaagagaaagactttcgtggacggtggagaccaaagcaacagccagagattgtgaatatcaaatcaataagatcactaattaatgttgtcaccatcgaacaaagagtattgcccatccccaccgagctcgagctcgagctcttttatctcacatcaaattaaagcagttttagaaacgtttatttatataattataatcttttgtttgggagctcagaaaataattaaccattttttaaaaaaaaaactgtgattttataatttattctcggttatatagttatatgtatgaatatataagaaaagagagagagagagagcgtgagagtaccatagagctgaaaaaggagttcgtgtcagttcttgtaaatagaaaacttggtacctgtctttcattcatggcgttttcaagctttttagctcaatctaaaaagataaattagagtagttataaaacaataatgtgcattgtagctatatggacacattaagcaaatacaggtggagcatctccaaggtattttttatttttagtcaaataactaaaaaaaaaaattaaatgggagagttatttttattaatcttactccaattatattctacttaagtatttaattattttgataatattttataatttaaattttataaaaataagttaatttagtaaataagaaaaaaataataatattatttgattaaaataaatattaaaatgttttaacaaaaaaaaataatgattgaatttaaaaaattatcaccgatttaatttaattagacatcaaagtatttttttaattgatattcaaaatattttttattattaactaaaaataataaaaaattactttaaaattaaatatcactatttatttaagtttaatactccataagaaattatttttgcaattttaatacaactaaaaattggaaataattaaaataacaacattgtcatgtagaacaaaacatcatgaaaataattaaacaaaacaaataagtattacaaattcaaaaaaaataaccactaaaaatataattaaaaaatatatatttttattatatatataactaaatataataattttttaatacatataaatataattagattgaatcagtttttaattgagattgacatctaataatcgatcaaatttaactagagtttaacttttaatattcaatccaatctaatattagaaattttttataattagattgaatttgatcaattcggatttattggattaaattggatattgtctacctatcatattcattttctattataagagtcattttttatatgattgaagctaatttttttaaaactcacggagttgtatgtgtgacgagatctcgataaatagtctctgcattcattttaaaatgtatctcacagagttataaatatttttttaatgtttaaacaacataatttttaagatatcttctcaccatagtctttggaaaaaaaaaaatgtaagtgaatagcttatacttacataaaaagaaatgctaaaaagtactatatttatcacccttcaacatgttatattgttattggtataattaattatcgagtttcatataatttaacatcataattttaatcgctaattaagtgcaccacctctaagtactattggtgtcttatatataacaatcctcttacaaaaatagacaacaatctttcttatttataatttgcaaacacttcattgatgttttactggataaagaacactactaattaatttgtataatacctaattaattaaaaggcatacttattatctaccaaataatgaatgcttaaaatatatggaaagtctttacttcagatttttttccctttattaatatattgtccaagataaaatcaaattcgatctttattaagagtccattttgtagcatataaatttgattaatgacttaattttaaattttggataaaatatttttgaatgaacttgcttatacgtaatgtataaacatataatatgttctgtctcgtgtttcatgttctaacctcggcacaaattattaaatatgttaatatcaatcaaacattattaggtattatatgaatacaaggccccattcacaatcttgtgtggctctaattattcctcaattcattgtctatcaattaatatataatctttattgttgttcagaaaaaatgatcattattacattaaaaaaatcaaacaatatcaaaaccatagtgttatttattttatttctatatgcaaccaaatcgctagcaataatggcattaatgatcataattccgcactaatggcattatttattcatattaatttatgataaggtccctcattagtagtaatgaccattgtacacgaatacaacactaaatgatcagatcatttgtccaattaattctactaaatattcaatttacctttaaaaataatgttaccgatttaattgaatgaacacaaataatataatactaataagtactgattattttatttatttacacaagcaaaaggaagaatgattatctccattaatataaaaataataattacgtaaatcgaaatacataacacgtggataatatcaatttattaaaaaaaatgctaattagctatacatttgaaaaatattaaggtatccatcatatatatatgaaatatattattattagtgtaaattaatattcagttccatatagtttgatttaataaataatataagaaactattaataattaatggtactcttcattagtaagatattgaatactgtataatgtctaataataatacttgtatatatatggcatggattagaatgtaaataaaaaaagaaatagacataccaaatcctctcttattattatcttcttgtatatttatcacatgtaaaaattgaattgtcacgtttgaattagtggataattaactagtgttacaaagaaagaaatgtggtgaagaagtgacaaacatattaatattattacataattacattttcaagtggtaaaaactgggggtagaattttagatcttttccccttaacaggagtgtttgtatcaggaaaaagacctttacaattatcctgatcatgatcaacatcctcaatttgacccatttcagttacataaatgggataggaaacgaggtggactccatccatgtccactacttcatcgccactgtaaatgttccacatttcctccccaatcctacgcattttcaaaacgcattccaagctgtgcggctctaatttaaggatgtcttcgtttgagcgccccgagcccacgtgctcgtaccataacgatgcacggaagtcacgaatgtctgtcgatcgaggctcttgttggtagcaacctatggcgatttccgtgtctctttccccatccatcgatcgctggtttatgtttgcagagcctatgaggatgtactcgtcatccactgaaaatcaaaacagagtttattgaattaaataataagttcttttcactttaattctaaacttgtacataggatatgtgcaaattttgtacacacctattcagaatgcttttaattgaacattaattaattaatataaggtatcatatgataactaaaattaataatttaattaaattaaattattttcaatatctgtggctaatatttatttaacactgttatttgcaagcatttatctttggtacaatgtgtaatacttttaggaaaatctgatttgaaagaaaaaaaatagaggaaaaacagtataaagtaattaactggttactaactttggttacaataaaggtaggagtaactggtaaccctaaactcttttccaacattttaaacttttttagaaattttttcataaaatattttttaaaaacaagccatatatttctgtaaactttgccaaaaaaaaaaatcagaaaaatgaaaatgtgcaaaaatgtgtattcacataattttaatcattagacatttatgtaatatgataacaagatatacaagttaatgtatttatatatatacctatcatgagcttggagtgaacatacaccatgaacctcctatggttctgggcattccaataatgagagcctcggtgaggagaatagggtggaacatattccccagctattttggattcccgattagcaaggcaaaagaaattcaagtaatctctagggtgactcgaacaaccactttcttcaatagcttctccaatcagtttatacatcatagtcatagtttctctagtccaatacaaaatatcctgaacagactcactctccggcactccttctggccacataggaatcaaaatataaaccgcaaatctctcctttgctctaatcttattcaccactttaagcgcaatctcaactggaattagattagtacatccactgtctctgtttttctcccacaaatgacaccctccaatgaaatattgattctcaatgtatataaacttgtcagctctcctaatagcttccacgtaagcctcgtgaatgctttgctcaacggtcaactttttgaacaattgggttgctgacacgtggtcaattgatcgaaacacttgaactttccagttccttggtcgatgaatatgatcatgatctggggtagtactagtactatttggcgatgagatataattattgtggttgttatcataagtattgttaatgagcttagataatgtacttgtagggaccaataatgaagggtccaactgttttgtccatctttgctcaaaattggttaagatatcccaagcggcttcccctgttaggcaagcgtgagagtcatgccaaggctctcttgggccacctttgtgaaggttggcaccagcaatgtttgtttggtaaaaatcaaagcaatgtgactcggaattgagcgtgcgaaacagtgagtgttgctcggtgtcatagcggccgtcgcagaggtctaatccccctatgaagctcataatttctctatctgtacttgtggaattggacctgttgtctactgtgatggttttttggtggtgggaaaagaatgtggggaacttgttgtgtagtcttggacataatctgcatacaactttggagtttctgaagtaagccaatgcatcttcgtcgtgtgttctcattacccctttgttcttgattagtggtaaggaggtttcatcgtcccaaagcattactcttactgctacgccttcttctgcttttttctttagtaaatctcctagttgtacccctttcgcgtgtggaatatcaacttgataatctctaacctgctcattattatattatgtcaactttagatatgatattgacataaatctcaacacatcaaataatatagggatattttcatttcttgtggttttaaagtacaaatttatatataaaaaaaatatagctctttttcaaaaaaattaaaaaaaaaaaatgagaaaaaccaacactaaaatattaaattgcaaatgaaaatacatcgaatctactaaccaatattaaattgcatcgtaacatgtcatgtaatgttggcatagtgggatactagtatagttaattagcaatattcaataatataggcacacgacaatacatatacatataattttttatagaacatgctcaaatgtaagattaattgtcttaagttagttgaattaccagaaccattttaggattgaaagaccagcctgcaatgtaaaccaagtacttagctccctcaatggctttgtacacatcttcccatagctttctatgcgtagtcccacaaatatcaagtggaggctgaaaagttgagcaatggtgagcatcttggtaaagcgtgacatggatattagaccgttgtggaaaagaagcattctttagcccttgaaattcatcattactatgtattgttctttcccatgttggttcgttttctgctggtttgaaccacaacaagaacctgagcttgagctcttgatccttaggctgctttccattctccaatgaaagagggaagaacccattaatcaaactcgattcctctaatatttgatgagcttggacttggaactttcccaagaatgagcatgaagtttccaaaatcaaggtaatagttgagctggaagaatgagcacataagatttgaaagctttggttccaaacgcgctcgctttctgatgtcgttttagctactattttgtcgtttatctttatggtcacatatgcaggctttccatttgtaaatacacactaaagaacaaaatcccagattaaaatttttgtaattatttccctatgcatatcgaatttgcaaactttataataatattacttacattgaaggggaaaattggagtgtaaggtgtggcatgaaagatcgtagcttcaagtgttccatgaaaaaacttatgttttccttccattggttgctagctatagaagaattaatcaatagagactttttgtttttcttttactttttttcgattcaaagagaatttattttggttttggttggtatatgcgtttgagattatgaggaataagtggtccaacattatatattatataatgagctgactttgatgatacaactgaagaagtaacataaaaacttggagcgcaaatattgaatgaatgttgtttggccggttaggaaaaacttgtgagagtatgtataactagtcttaaaggcaaccttagtgatccaaataatattttgttagatttaacgtcaagttgaagacttgaagttttttgtgtctttattattatcatcacaacttctctatagcttgccccataaatgtggatatttctactagaatatataacatataaccaatcaaattgttgaaataaaaaactaaattaataattaataacaaacacaggtcatctgctaataagtaatggccaaggccaacccttttactcgttcgtggcagatcatcattattagcagctgactttggcatgtttgataagcaaaatatttaagaaacgtcaaaggctttacaatatatagctagagaggaatggatatacatacataaatatagccacggaattaattattaatatatttatatataagaaaagaccctttttaatgaaaaaaatgcgtatttattttaaggttcttagatcacctatatttagttccacaattaaatatcacttcgcattcaaacaacatattatgtataattttagaaatttcattaataagagatcatatttcacttttttggtcataattaacaataacatgtaggtcgtttggagatctgaattggctaaataacatcatgttttgttgttgttgttattaacatgttcatgtttttggctttgtccattcaatattttgaagttaaaattaggccgactaaaggtcatatatgatgtattatcatatatatctatatactcaaatatcactttcatcgatcgtttcgtctaacagaagcaagtgtttgtgcatatgattaaaattttgtagcatatatatatatgcttcaaagtgatgtataaatattattaattattattttactttacatactaattattaatttatttcaattaaatatatctctcccgcaaatacgtttattatgtgacatgtcgccacgtatagtactattgatgacatatcaagcatttttaaatttctgaaatcagatggacgaaaattcttttatgaattaatatagttgtagttattttaatccttttttatttttagttttgctaataaatgcgactttacgttctctaattctaaatttgaacatcgtatatgaaatattaaatttgttcaaatttttgttactccatatatatatatatatttttaaatttacggtttgaatttataaagtggtttttgtatttttattatgtgggttgctatattaattttgatttcgatttaagttactctaataggaatttctaaaatttcgtaaaaatataacaaaaaaaaccattttaaaatgtaaatgaaaaaaccttaaaagaaaatgactaaattttttaattaaatgccgaaacacaagtgtatataccttttagatattatatgacatatattcatcggtgcagggtgttactttcgttgccaaacttcatgtgagttgtaaggcatgtatacttagttttatg

SEQ ID NO: 19026 - DNA, 5539 bp, Cannabis sativa
gtaaaataaaaatgttaaaaacacttacttaccacttttatacgtgtcaattcatattaatgtaattaagtacaaattttatataggttaatataatacttttaaagaatattactaaacaaatggcaagacaagaaaatattttagtgcttaagccctactatccccaataacagtgctcctcagtccttctaaaatggcggccttctactattcaacttgacattatgtaattactgcacacattaggctcagctaggtagccagattagaatttagaagacataagaaaaaaaattgcaacttttcaatcttcttttagaatacaatgtattacgagggatttttttaattattataattaaaaatatattatttttttaattgacaacgacagacaatttttctaattattgttattaaagatctccaaatccactgttttttgttttttctcctccttaaagtcatataaaatgaaattgaaaaaaaaaattgtcatatttgtcggtaacatgtgggattcatttcattaaattattgttgttgttttcttaactctataatgatctgtgaatgcagttgctgttggtgatggatttatagcccaagacataggtttccaaaacacagctggcccagaaaagcaccaagcggtagcacttcgggtcggggcagatcagaccgtcataaaccggtgtcgtattgatgcttatcaagacactctttacgctcacaccaataggcaattctatagagattcttccattacaggcacagtggacttcatatttggaaatgcagctgtggttttgcagaactgtaaattgattgtccgaaagcccatgaaaggtcagaaaaatatggtcacggcccaaggtagagaagacccaaaccagaacacaggtacctcaattcagaaatgtgacatcattgccagttctgatttggagcccgttaaggcccaattcccctcctatttgggccgtccatggaagatgtactctagaactgttgtcatgcagtctaatattggtgacgtcattgttccagctggatggttcgagtgggccggggatttcgctttgaaaacgttgtattatggagagtatttgaacacaggcccaggagctggaaccagcaagagagttaaatgggccggttatcgtgtgatgagtgcagcagaagcccaaaagttcacagtagcccaattgattcaaggtggagtttggttgaaatccactggtgtgactttcactgagggactataattaagttattttggatatggcttaggctttatttattctagaattagttggttttcgtactattagcaacgatggtgagttgtatgtatatcattgttgtcatttaaataagtgcaatgccgaggccttaattttctaaatttcaagtaggtcatgaaactccaagtcttcaacaggtttttatgtgaagtaaaggatttgagtaatcttatcaagtgattttggcactagtagtattagtaatatgaaatatgagctatttcattctattcacattagcacaatgagcaaaagctataccacactaaaagaaatgtcaattaatgtcaaagcaatttggacactgaaaaagtgagtaataataataatacaaaacgtagcacatattatgatattaacaaaaaattgaatcaaatgaggttttttcattgtatcggaaatgcacaagtactctggcttttcacgtgatcaacttaagatttgttctttgctaaaagacactaagatctattcctacattttcattatattttggctaaacgatgaagaaacaaaaccaagaagtagcaagcaaacaaataacaatgttttctaggaaaaaaaaaaatatttcataattatacaaagacaaaattttatattttttatgaatttgctgtttttttatatatatttttaaggagttttttttaaacggagtgttgttttttattgttttttttgttgttgctacaataaagtagtgtgaatttttttgttttcaaatataatgttgtttttctgtagtttcaaaacaatgttgttgcttgagaaaatattaaaacaaatctgtaaaaatattaaaaaaaaaatctatttttaaatttctattaataagaggaaacggttttatacactaatggatattgtaattccaatgacgatttatttttctcttgagtttttacaccatatattgaagtattaaattttgtttcttttatattgtggggtaaattttttttcaaaaatactgtaattttttttcaaaaatattgtgtaagttttagggtttagggtttatactgtatactgtgttaagtttttatgtttattctacggttgttttctagttgttttactactgttgttaattgttctgttttgttttcttatcgttgttttataaaaatatagtatttttgtaataaaattcgtatagcagtaaaattataaacttttacccaaaatctagtatttttgtaatacctccttttctcttcgctcatttataaatcggcccgtaatggaatcgggcccatttggaacctctcattcgggccacatattttacgggcttaaatttgagctttcagttggcccatttaagtataaaatcagaaaatatattgtgttctttccacagtaaaggttctgattatgatttttctctttaatcagtgtcttcttctactttacggattgtcatgttcagtgttgattatggatattttttcttaatttccacaaagacaatttggtgaatttacatttaaatggttactaaaatttgctgagttaggtaacagaagcttgcatgtaaatatgcccaactgtttactcaaatagtacctatccatgtagaaaaggaaatgatcaatagcaagaaattaatgagccttgcctaattcgaaacctgaaatgtaatggaccgcaagctcaacttaaactcatattaattaaatactgttaccacaaaaaataataaacatatcatatgagaaatgctcaaggacactagtggtgtctagttagcactttttaaatagttaatcgttattgatacaattagattttatataatttaataaaataatttttaagcttaaagttaatttgtaataatgaaagaaaaatgtagcaaaaaataaatagtgaataacaaaaaaaataaatctaacttttcaaatttaatagggaaaatttgttgaaatgaatgtttttatatgtattttttttttctttttatacagaatttattatttattatttttcattttttctctctgtattttctctattttttttcctcactaaaatccaacttccaaatataaaattagagaatttcgctaaacaattgtaaaacgcctcctttatgtggtgttaggtactattagtgttcaataataatatattatttttcatttttttttctctgtattttctttattttttttcctcgccaaaatccaatttctaagcatagatttagagaattttgttaaataatcgtaaaacgtctcttttatgtggtgttaggtactgttaatgttaataacaatatattattacgtaacattatgtatatggtttagtgaagaaaaataggaattgattttttttttttcttcattcagatgtgtaaaaccaatatactccaagaaagaaaatatttaattttggatcatttattaatatttaaaaaaaattgcagcgaacaaaaaaaaaaaaaacttcaacatggccatttcaatattttttttttcattattttcagttaagctaagcttgaaaaataaacttggccggctaaatatttgtaccaaaatagtaggaggacagtataagctcattattatttgataggcagcaaaaatttgtggtgccatgattacgttatattaattattaattaattttattggtttcttcttctattcgatcaatgatgtcccagctagtcagttacatcataatcttcaattttaaactcttttttataaattcaaccaaaatcagtattgactttaataattttcaatttcaatatactttactatataattatgtctgcgtcatccaaaatatccattgtgtatccgctgacccaataaattggtgacccatgtcatttgccatatataattaaattaagagaggttactattaatgcactatgaaactccaaaattaattataccaacatattatttagaatctgaaacctaattaatttattattattattgtaacataatactaataataattagttatgaagagagagaatgtcaaaatctcaatttatatttaatttttgaaatcaacttgggtacaataagggaaccaagaaatagagattgtgttgcagtttaagcaacaattgtagctaaaaaacgtgcctccaaccatttaaaacaacatctattttggttaattaattaatacaccaaagcatatatttacaacatttgataactcaacttgattattacaaatataaagatacgcgtatatataatatataataattgctctcactataattattatatgtatatttttatgcaaaataattcagaaaccatatgacagcgccttaatcaaatccatttctttatttatttattttcaggtaccaatcatatccaaattaagaggattaagtgaaatcatgacgtttttagagcacgaaatatttgaaaatagatcaatggacagttatatatattgcaatcattaatgatttacgtattgaaaaaaggttggcaagacattttctttttcttttgtgtgtaatactaatgaaactgttggacctttcccaagaaatgtttaataaagttttaaaaaattgtttaaagtaataagtctttttagtagctagatgtatctatccattttcaaagtggacctatatatatatatatatatatggtacagcgataagtcaatttatttacgaaatctataaacaaaaacagatatgtttcgaattcgaaagagagggaaaattacactgtagtatatacagctataatgaacattgtatttcaatggtgctaacatgtgcttataaatatagagataattattgactctccattctacaaaaaaattagtttatataagtaaagtactatatattcttaaattttatatttctctatataaatatttttatttaaaacgatctataaataaagtcgtttaagtttctatacgagattatcgtgtctttagtagaaattctttacttgatctatgtttatgcaactatatagttttggatgatttgtaatgaaagttgctaaattatttagaaaaaaaaaaaaaaaaaaaaacctcacaattcatttagttttgtgaataaaatttgtcccaaattatttaaaagtctttccgagcttttgagaatatttggcagaaagaaatactaaactacatataatatttctggcacacaaattctctctaaaccattatttattattgatataaaatgt

SEQ ID NO: 19027 - DNA, 10887 bp, Cannabis sativa
  modified_base (3091)..(3093): a, c, t, g, unknown or other
tgatgttaaataaaatagattacattgaaatggagctttatttggggcataaaacccagcagtttggtgagaaccaaggaaaggggcagagagagtgataggaaaggagagagaaatcactaaaagaaatatcaacatcactggcgaagacattctccagtaaagaagtcgaaatctgctagtttaggtcattaccggtggggtcgtacccctactgatctgtgggtaatacctggtttgtattgcacagcaacagcaacaaactgacacatccgccaatattaattattaataccagcagaccaatgggaaagggtcccaccactattaagcccgtcagaaaaaaaaatcttacacgttaataggggtgggatcccgtcagtattatgtttttaaaattagtaaaataattaattataaaatttataaaatatataatttatattactgctaataacatatatataaagcaataaaaattttaataacaataataatttaatttttaattaaaaataaattgacattaaactaattattacacacataattaattaataattattcaacatactacattaaataaaaaattattattcacacataattaaaaacttaaacaaataattattttccacacataattaaaaattaaactaataattattatgtacacataattacaaattaaactaataattattgtccacacataattaaaaactaaaactaattattattgtcttcatcaaatacattatctaaaaattatgaaccgacggtgttcaattttaaataagttgtttgtgcattgtcctgagcttgtgatattggcggtcaaaggtaatatggctgttgcaaagataacatctcaacaaattgtcaagtttgtggttgttgtagagtcggagattgttgttgttgtgaaaaattcagagattgttgctgaaacttactaggaaaaatatatggattttttggacgaaaaatttgatctggagaatgttgctacattgaacccccaaatatcatcggctgctgagatgagctcccaatttgatcaaacatcggctgctgtgactgtgatcctttaaacaaatcaaagtagaaaaattgaggagactaggaggagcatccaaacatgttcagaataagagaaaattgggaggaacttccctgtatgttaggatagaactgttgagtctgttgaaacggttgttgttgcggcttttgataagttgcactaccttcaagttgtgttggtaaatattgttggaagaaactctcaaattgcgtgtcatacaaatcagaagtgttgagtcccggtggaaagtgcacgcaatgttttaaatatctctgccataatatcaacatcttgggaaagagtagaccctgcttgagattgactttgactttgactagaagagtcaaatgttaattttttccccttctttcctaagttgtaaccaactccgcgtatatagtcacctatttttctttagcagcgtcattgacccaagctttgtcattttatctagtatgactatctctccaagtatggaagacatattaatctggctccttttgtattgttattagtgttagttttcttaaaaattataattttattaattaaattgataattaacttacaaattcatgatgctgaggtgtcattgatttttttgccttgatttgttttctgttattcttgttttgatttgaacactataaattttgggctcaaaaatatatcaataatttctctccaatgctctcttattacatactcaggcttagcattgatagccacctccatattagtagggttaccttcgtaatatttttaaaagtaagtatgcctaattttttttctttctgaatatctttttcacatctcatgataaagagtcctcatcactttttgggattttgggtggccatcaatatcataataatactacatctaaagaaattgattattagttggttgtccgattatatataaataaaaattattttgaccatcaattgtttaccttcattctctaaacaacttgttccttaaaatgttaaagtatatcaccataatataagtagttccttgaaaataatgtactcacttcgacacccaactaacggataagagcttggttctccaatccaacaatattttctgttgcaggatcaagcgtaagtggcaatggtccctaatttccccgccttcgagtttctaatggtatattactagcaacaacacgaccttttcttttgggtgatggagcttcctcgcaagttgagagtaccttactaggatctgatggatctaaaccaccaccatctccgccgtgataagaagctatatcggctaacattatgactctttaaatgtaaaattctatgactaaattagtacggatgtaaattaacaaaaacatataattagtttgaattaaaattaacatcatcaaattcaccatttacaaaattattacagaatgtttaaaacatatgtaaactaatagtcactatcacacttatcttttttagaaataatatggtcttgacatcgatcaactagcagctcgtcaccttcatcatctattacatcatcaacgtcgtcatctacaacattttagtaatatcccaataagtctaatagtaagtaattatgatttataattatattatgaattaatcaggcaataagtgggattatgatcctactaatctagtccaacataaatttcaatccccaataagtgagtaaataagcgtaatttataaattacagagatttatgtagcatgtgtgaataaaaatattttcaggtttggcgaccttggagactcaatccggggccaaaaatgtcataacgagtttaattattacttttgatgggaatattgtgataagttgatagtgtaagttttggtgtaattaggagtatgtagaatttaacttagcgccctaaagtatagatttttaaatggctaagaaataataagataattatgaataataaaatttttactaatattattgataattatattattattattattattattattaatattatattatnnntattaatatattattatattatatataaaaccacgttaatagttaacagtatatatatataagttacaagtttataaactacgaatacgaaacaaaccctcgtcctcctctttcgacgaaactctctccctcctatattcattttctttgatttttaactcaaaacctagcgatctaagctatggtagtagtgggatagtaaattctcggagcgagaaagcttaaggtaaactttaattttattttaagtttaaaacaattggatttgtatagggattttgtgaattagaatagttatgaacatttcgaccttacaaaattcttctcgggtagtcatgggacgagtttcgatatttacttgttcaatttaaggtagttttgagttagatagagtttggaactttttaaagcttatgaccaaactttaatggcgtttttcgtttaatggctctattttaatttatgttatgtgaataaataagcgtaatttataaattacggagatttatgtagatgtgtgaatgtaatataagatatatgtggaataaaaaatattttcacatttggcgaccttggagactcgattgggggccaaaaatatcataacaggtttaattatttattttgatgggaatattgtgataggttgatagtgtaagtattggggtaattaggagtatgtagaatttaacttagcgccctaaagtatagattttttaatggctaatataataagaagatgataattattatgaatagtttttattaatattattatattatatatataaaaacacgttaatagttaacagaaccctcgtcctcttctttcgatgaaactctctccctcttagattcattttttttattatttttaacccaaaacctagcgatctaagctccggtagtagtgggatagtaaatttttggagcaagaaagcttaaggtaagttttaattcggttttaagtttaaaacaattgattttatatatggattttgtgaattagagtagttatgaaagttctgaccttataaaactgttctcgagtagtcatgggactagtttcgatatttacttgttgaatttgaggtagatttgagttagatccagtttagaacgttttgaagcgtagggtcgaactttaatggcattttccgtttgagggcttgattttaatttctgttatgtgagtaaataagtgtaatttataaattacggagatttatgtagcatgtgtgaatgtaatatgagatatatgtggaataaaatttttttcaagtttagcgactatggagactcgattgggggccaaaaatgtcataacaaatttaattattagttttgatgggaatattgtgataagttgatagtgtaagtattagggtaattaggagtatgtgatatttagcgccctaaagtataaattttttaatggctaagaaataataaaataattatgaataataatgttttttattaataatattatattatatatataaaaacatgttaatagttaactgtatatatataaaagttataagtttataaactacgaaacgaaccctcgttctcttcttcgaagaaaccatctccctcctatattcatttactttgatttttaacccaaagcctagcgatctaagtttcagtagtaatgggatagtaaattctcggagcgagaaaggtttaggtaaggtttaattcggttttaagtttaaaacatttagttttgtatagggattttgtgaattagaatagttatgaaggttatgaccttataaaattgttctcaggtagtcatgggactagttttgatatttacttgttgaatttgaggtagattagagttagatcgagtttggaactttttaaatcttagggccgaactttaatggcgttttccatttaagggctcgattttaatttttgttacgtatggattgttgtatatatggtatttatgtgtccagtgtagtttggaatgatttggttaggtttggagctaatttggagggtttacaattgaggaaaatcgtattcttggctgttcagaactgaaattctggatgtaccaaccaaaattctgtttggtgagtttttggaaaagttgaatttcatattttgaccataactttttactcgggtgtccgttttggacgttctatatactgtttcgaagcttgcgatgagctctattatatggtgtatcttctagagcaaaaatatatgtttcattttagggaacttttacttcgagatttggtaagaaatcttaagtgttcctttacagttattaagcagtgttttgggataaatacttattggtttatcatcgttatgacatagggcatgggatgatcaatcattctccaagcaggtcagccaacatacctaaactagaaattgaggtaagaaaagtatattatactgcatagtacgttatattgtaatacaaataatattgttatacaataaaagattgattggttaagcaaatataatgtgatgatactatggatgtgatatatgggctcatttaattaggtgatgtgatatacctggtggcataccgggcgtaggtacgggtgtcagtgacatatgatgagtaccgagtgtaggtacgggctcacctgattaggtgatgcgattctcctggaaacgtgtatatacggcgtcagtgacatatgatgagtaccgagcatatgtacggactcacctgattaggtaatgtgattctcttggcgacgtgtagatatggtgtcagtaatatgaaaatttcgaggttatggcatagaatgaaaccattgtagggtctcctcctggagacatgtagatacggcgtcagtgatatgaaaattccaagtttaggtatagaatgatattgttgtatggtttcctcctaacgaggtgtagatacgggcatcagtgacatatgataagtaccgggcgtaggtatgggctcatctaattagacgatgcgatatattggtgcaaaattgtggagcgggctcacctgattaggtgatgcaattatgtaccgggtgtaggtacgggctcgtctgattaggcaatgcgttatattggtgccacgttgtggcaaaggctcacttaattaggtgatgcaattatatgatatatgggtgcagtttttttttggcacaggctcatctgattagctgatacatttatgcgatatatgggtgccatgctatggcacgggcttgcctgattaggcaacgcaataccgaatttttaaattaaagtatcgacttgcctgattaggcaatgtgatgtaatgaagatgattaccttatgaggtaacatatagatacaatttataatattaaatgaatatgattcatattattggtataatggttttgtattaccaaatatttatatactgatgcttattcatggtagatgccaatagtaatttggatttcatcttatgaaaatgagtaatggtttgattctaattgtgtataaatgataatcttcaaataataaactatatgattattatcatttcttttcttgctgagtccttatgactcatgggtgcattgtggtgcaggtaagggcaagaaaaagttagagctgccatgaggtgactaccttctctagcaatgtacatattgaccccactggcctgtgtgttgagttgtcaggagttattttggactggttgtatctactgtattttgaattactattgtctatagtcttttgggtaaatcttttagaacagggattcccggaacccctttttactgccgttataatgtccattttaagtcttttattttagtcaagttttaatattctcaaaattttaaattattaatttatatataagtataatctagtttataaaatcacaaacgtggtgttcctatggaataggacgttacaattttcatcagcttgattaaccttcaaattttgtgtagaatcaatcattgtcgccacttcagaaggttgtaaaattaactcttcttgatccatagtcgactgagaatttgacgagcttgaatcatgtacaacatcttcatcaacttcatcctcctcaatttcccaaatttatcgatggtttacaacctcgattattttccaatttttacctctaagcagatcattgagataaaatacttgcttagcttgggtagcaagtataaatgggtcatctttgtaccattcaccactgactttgatactagtgacattattctcagtgattgtttcttcatggggatcggtattaaatcgtttacaccaaaataatgtcactgaatacacaccagtaaaagttaacatcaatacatcttctagcatcccataacaattaaatccttctgatcctgccacaaatactctgctattttgtgtgatatgcttcatatcacgttcagctaccataaaacgaacaccattcactacaacaccttcgtgatatgttactaaatgatttgacccagatgctaaagcttgaaactcttcactattctctaatgatccaagcttgtgtaaatcatatatctaaatgaataaaattatattagagtgactatcaagtaatcatgatgattttgaaagctttaagagtctcatatcaccttctcatgaaaccatccctggaaaaaaattgtgtagaacgttatgatctccatctaggcacttaagctttatctcttctaagtgttcaatgtaattcatataacatcactatgttaaatataactatttagaatgagaacaaattttaattgataaaggaaggaactttctcaaaatatggtctaaattcaggtgaattatcaaatatgaaccaccagccttttcacgagtctttcgctcgagaggcgtgatacttgcctttgttaggggactatattgtgatagaatgacgataagaattctaggaatcacatcatcatgattgtgatcaagttagttaaatctggtttctacccctttaaaatacatagaacaaaatatcaatgcctcatctgcaacatatctttcacctatcgacccttcagggcgagctttatatctaacatagttctttaatttttttatgtatctctcaaaagggcacatccatctcataaatacacgtccacccaaaatagcttcttcagaaaaatgtaagaccaaatgaatcatgatatcaaaaaaagctggaggaaaaattaagtctaacttaaacattattaaaacaaggtctttttgtgcttcctccatatctttaaaatttatagttcttgaacatacttgccttaaaaagttgcacaatttagaaatagttgttgatatatcttttgggagaaatttgcagacacggactgacaatagtcgttacattattacatgacagtcatgacacttcaactcaagaatatttgtaaaatcattgttcactttcttcttcaaatttgagcaaaatccatcatgaaacttcacatccttgataaattgataaaatttaagtttttatcaggtttgagaacgtaagcggcgtgcggcttcatcaacttaccattgtcattttcatatatccatagccattcctttactcccaacttcttcaaatcatgtcttgcgttagttgtgtcttttgatttatcgttatgtaggattgtgcccaagagactatcacacatattcttctcaatatgcataacataaatattgtgtttcaaagtgtttgtacaacaataatcaagctcatagaagatacttcttttcctccaattttgatcttctacaacctgtctacgttacacgcctccaaactgctcatgttttctaggaacttgcagtacaagtttttttactcgttctaatattttctcacaaggaaaatgtcttggtggatgtcttctttcaatttctccatcaaagttggtgtcccttctaaattgatgggtactaggcaagaatcttctatgacctacataagttgtcttgccaatcactcgtaccgaagaagtgccttcgttacatgttggacaagctttgtatccctaaccactccatccagacaaactacttcgagcaagaaaatcattaactgtctataaaagggctgcacgaaacttgaatatagagtttgtcctacaatctcttgtattaaccccattaacccactactcttttagctcatccaccaatgatctaagaaatacatccatgtccttacttggtgattttggtccagcaataagtagggtcaacatgaaattattttctttcatatacaaccaaggtggaagattatagtttgctaacacgataggccacatactacattttaggctcatgtttccaaatggattaaaactatcagcagctaaacataagcaaacatttgtgggttcactagaaaaatcgagatgtttggcatcaaagtccttccaagctaacccatccaccgggtgagacatcacccgttcatcgtttgattttctagtatgctatcataccatgtgttttgttgaatgtcttgaaatatacaatattttcaaccgaggtgtcaatgaaaaataacgcaacaccttacggggtacccttcttccatcagatttctctaaagttaaccatcgactacttccacaaattgaacaaacatctttggttgcatgctctttataaaataagttgcaatcatgctcacacacatgaattaactcatagctcaaccctagtttccttagtctctttttgcctcgtagtacattgataaaattttattttcctgtggaaaagtacgattcaacaatttcgatgtatcatcaaatacattatttggattctttcctcatactttcaaatgcagtaactttgttagaaagttaaggaaagaaatccaatggaaaccaggatacaattcagcttcaatctcttcaaataacttaacgtaatactgaaatgagtcaaggttatttttgttgggaattattttaccaggatgtagatttactaacatatatattgattaacaccctaaatatgaattttctaaaacaatggaatttaacacaaataaagttaagaaaccttacattgattgtagcagaataatatgtcttcttccactcagatctctaacccttgttcgtttctatcgcatagtattatcaatatttgagtccaattctcctttaggtgttggattcttcacaatcttacatattatgattgagtactatacttgctatgggtgggcatgcactctttcactataaggctcaaaattatgaaggggaacaggggaaattcaaattctatagaagtaggttctcaagcttcctagttgtctgacagataatgaaaactaggtaaacttacattggatagaatgagaaccatcttattcctattataagatttctcctagggttagatttaaattatatggcattaaaaatgataaataaatggctaaatatacccttaagtggctggccataagatgggccccactagttaaaattttaccattttattcaacaatttgtcctttctttcacaaatgccctatttcataattttaatcatttaaatgtaaaaactatttatttaataattaaaattaatcatcaaataaaatttctatttgacttatttattaattagacttaataaagtctctagataaacaaataaacatcttcacaattaagcccttgctcaatgaaatcataaataagacatagtttagttttagaattgtaattgattaattaaaaccaattaacagagtcttacaagcagtattgtctc

SEQ ID NO: 19028 - DNA, 3658 bp, Cannabis sativa
tcaaagctaaagcttcggccatagctgaattagcacagcctattgcaggaagggagtaacccgcaataatgttgcctctccaatctctaagaaccgtcccataaagccaagcttgatttttctaatgtccaaaggctgtatcagtgttaagttggtaaaagccttctgccactgcaacatcctgagtatgagagtgattaggttggagttgcttgcacatcatgtaaagttcttcaaggctttcctgtaatctgagagaaaagagctagtccaaactacaatatcagtaggagacatatgaaatttttcgaataatttattatttatattgccctagatggtccaaagcgtagataataaaagtaacagattatctttttgtaaaagaacaaaacttgaaaggatgaattctctaatattattatttatgtgagaaaaattaaaatgactaaggggagaaactttccaaacctgagatgttttggaacaatctagcagagcatgagtggctattttattatgacagtcacaaaaggagcaacaagggttgggaaggactttcttcaagaacaggttaagagcagttgggagaatatgataataaactctaagagaaaactttgattttgggagggagacacaagtttcagagggcggtccacctttctcaagaaaagtacaatctgaagaggtgggagggagagaaagagtagctaaatggtaagcaattttcacagagaatatacttgagggatgctaattccaaattaaaaaatcttcctaatcaacaccaccaatagaaacctggagtatgtgagaaacaatagcatcatcaaaatattggttaagtttgcctaaatctcaatgaccttcatagttaataaagaaattgaccctgtcagagggaggctgaatatcattctgatacctgagaaatctagcccccgggatccaatggtcatctaaagttttgatggagctaccatccccaactttccaaactagaccttttttaaggagatcccgaccccagatgagtctagtccaagtaaaagaaggagaatgaccatgactagcttcaaggaagctgttatgcctaaagtatttagctttcagaataatagcaagcaaagaattagggtcaaagttcacacgccaggcctgtttagctaacatagcttgattgtgatgaattaaagatttgaaacctaatccccaaagaacttagagttacacatgtgtgttaggttgcttttagtattaattttagtgtatttttaatttagttttactcgtgtttggagtaattttacgcttgttatcttttatttttgtagatttaaaatagaagaatattagaaaagtatcaatggaaaaagacgaaaaaaaagagataaaagatggcataaaatatcactgtgcaaaattgggatctgcgtagaaaaaagatggtatgcgttgaatacgtgtgaaaattacacgtgtgccacggcccaggaatgggcatgagtaaaagcagcatcatcgtgtggaaatagcgtgccacgacccgcccctagtctgaagcaaaagaaaaagatttctcaacgtggatttattgtgatggcctaattcaaagctgaataggatttttttagcatgtgcaatttttctatcttttaggccctcaatggctatataaagagtgaacttcagttgatttcggtaagcaattcaaaaggaaattaaacgcaaaaaaagcagtacaaatttcagagaccgacgtcagagggttttcaacattctcttcttctctattttcttctcttttcttaagttaatatgtgtgattttgctataatgacattgagtagctaaacacttaattatggtctagatatatattgtttgacattgttttattgttcttatatgattttattttccctcaatttctatgtattctatttcattcgttcttaattacttttaattgtctgatcaccaattaactatctaaaattttgatgcgagatctgagaagtgagtgtcaattatgctatattgaaacagaactgaatttttatataggatgagagtacctgtatggtttagatagcttatagcatttctgtgtttaatgcatgttgcatgtttaatttatcacgagaatagaaaatttgcatataattgagatttatatatctgagaagactataaattaccttagtaaacttgttattgcatagaaattggaaataggaagataattatattaggccataatcaatagatacaattgaaatcgatagccctaactttaatcatcgtaaatttctttttgattcttaatttcactatttatttagtgattctaattttaattttcttttaattttgacataatcaaatagaagtaaagatttatttttaaagtacttaactgtaatccttgtgggatcgacctcactctttgtgagtctattatttataaacgacatgtatacttgcgtgttgaaattaccacaacaaggtgatgccaagctttccagtaaattttgggatccttccccatagagccccaccaaaaatgggccattaacttttcaatcttacgagaagtagaaatcagaagtttgaaacaggacatggcataagagggaatggcctggattacagctttcaacagcacctccttacctgctttgaaaaaaaatttgttgttccagacattaaggtgggcactaactctttggagactgaatacaaaattatttttttttagagcgcccaaaacattgagaaccccaaggtatttacttataaagagcttagaattcaaccccaaggtttcataaaagtagctcaagatggatggatgagtgttgggggagaacaaaatggaagacttcccataataaaccttttgaccagaggctaggttataaagaataagggcattctcctaagcattgcaagaggtatgggtagcagtggtgaataggagattgtcatcatcaaaaagcaagtgagaaatggcagaggcagtgcgagcaacaaatatacccatgagactacgtaccaagcctttcatgaatcttaagggcactagtaagaccctcataatagaaaaataaaaggtagggagagagatgatcaccttgcctgatgcctaatgcaatactaatcacttaattatagttcaaggggaattttcaacgacaaaaaaagttcagggggcatgattttgtatatgtcaaagtttggggagaaaaatttctaattagcctatatttttatactagagatcattaggatttttttagttgttgcagctatatataccctttctataataaaactcaagtgagatatcatggtgaatcattgtgtgtctgattgagctgaattatttcttatttaatttaaagttaaaccaacaaagctaatatggttaagtattttaaatttaaattaattttttaagaaatgctaattacaatctcctattacaacctcttagtcaacctccacgtctaaaatcacatgccgaaatattttttgtcaaatttttttcacaacagtattcgtagttacaatatcattcctgtaaatttctaaaaaaattctgaatagtttacagtaccgaaaacagagttcttgatattctagtttacca

SEQ ID NO: 19029 - DNA, 2564 bp, Cannabis sativa
ataattcctcaattatacataattatctagttagggttttgctcatccttttcttaattccgggtattacacttagggttcttgtctgtaaaccttgcccactcatggggtaaatacaaataacatattgactttgggtccatctagtgaagcccggcccatgatgcattgatcttctgctcacgtggatgctatgtcatgctgatagttgtcaaatcgtatcctactttgcggataataaagacacataaattcttgattgataattacttcatttccttatttggaatatctgattctcgaacacaatcttaaaaataaagccttgatattgtagaatttaataataaatgagtgagatactatgctcaacatcagaaggctcattaattactcttctaaaatcgctgcttgatgctatttagaggcctactgtgctagatatttatctttcctggacgagccatctgttcatcatctgaatggcttaacttcgctaatagatctggtccattatctatgttaggcctacccttgggcttgtataagttgaactaattagtcttagaattacatgtgtcctccttccataaacatggataacatttaccccctaagctttcagaactttggggtttcgaaggcttgactttttccttccagatggcatgaggacaagtaaatgcttaaatggtgaaaacctttttaaattccaagtagacaagttagggttgactgcctatcgctttttgaaatgaaatgacatgtggcatcatatctttggctcatgaaggttacacttattgaaaaggagtgtgcaacatggatttgtaaaatgatagttgatcatgtcagcgagtttcctgaggcaaatataatcatttgaatatcttagttccaagcaatgcataaaacgcaaaactgacaaattttttagactattagatgtatcttgtattttcttgggtgcaatcatagccatcaattttatggggcacgtggatcactatttttgctctataaatacaatgaaaattgcatgcttactacttttgcctctttttcattccgcgtttagattttcttagagagaaaaagcaaaaattccttctggtggatgaaccattacttcgacgagtgtcttcatcttcttctttggattcatacacgagaatacccagggagcaccatccccatctatcaccattgattcctcaacaccgttagaaccactagatcttcaagccgagattgaagccctcataaactaaactcgctcccttcgaatcagggttgtgcacctagagaaacctttttcggcaaggatttttttacgaccgacacacgaaattcgaatccattctccaaatccttcgccctcccaaagttcttcatcttcatcaattaatctttatgttttggaaattctaaacaatgttttagattacggtttttttctttgatgattgcatgtttgagttagttgttaatttagttgtaaccctctctacaataattgtaatttttttaagtattatgttactagttgttaatttagttgtagacctctttacaaattgaacagctatattagtacaatcacacaatagaaatacaaaattacaataatttcctaataaaaatattcattaatgttcattccagacatgacttagaatgatcgatataacttcttattggattaatgctccttaatttaacatgttaaacttttcacagcgtcactcaagcattgtcatagattcttctgcgtctacataagtataatatacattgggatcaaaaacatgaagtgtcctaaatgacttgtcgttcaaaatataacgaataagtttcccagttatatgagatcaagaatgagtcttcatcctttttagctacaacaatggaaagtactttaaatatgtaaaactattcagatgggtgagttgggtagctgtctcatcacaaggtaagtgattgccactccatctaaatcaaataggtatttgataattcattctaagtaatcttttttcatctcgtaaacacaatattttgtattttcactaatatttttacattcacataatacatggatattgcctttggaggccccaataagcataagaggaagactttctccattttcagggcttgcaaatttgcgcacttgctctgattcgagttcaaagcgcaaaaggatatttacaaaaccacttttacaacagattacaatattattacaattgaccccgtgattgaaatcgactgattctaattcctcaaatggtgttttaccatcaaagtgtttcaaaaaagttgtctcagataagaaaatatcaattactgttaaaatgtcctacacatttctagaatatttgtatcttaaaatattctagtgaaaaccttagaaacctagcaaaataaataaactagaaaagcttagaatatttagaaaactataagtaaccaatcaagaagattgtagaagaatgtaaatcaattagaaaagtctagaaaaattataaatcatgtagaactagaataatctagatgaaatt

SEQ ID NO: 19030 - DNA, 4579 bp, Cannabis sativa
aatgagaagaaaaatattaaattagatcgaataagatgaagaaaaatgttgaattagatcaaatatctaaccccactgtaaatataatacatagagaagaagaaactcattatatatgtaaattgcagcaatgaaagcatgtgagtttaatcacaatgatgatcattttatgaattgatagaccaaattaagagactagagaatcaatgcatcctcattcctcaatcaagttcagctttatcataacacttgaaataataatcgaatgtactattagtataagattatggtagaacttaacataaatattctatcagtaagaaaaaaaaaattgttaattttatatccaacgtttccagtcctatcaataaattgagatcattggaggacgtaatgggaattgaggcaattgatttctctaaggaagaatcaaaaaatgatttgggtgaagaacatgagattttatcttccaaagcgactaagagtttgttgaagagacaatttgaagctattgggttcttagagctaaccctccacttcaggttaggaaagaatagtttagaaaaaattacggggtggataaaattaggattctgaaacatgaaatttacataattcaattttgcactatggaaagtcgagataaggtgttgagtggaggataatagttttttgataaaagaaccctgattattagggattgggatttaaaaaatgttttatttgagaagaacaattcctgtttagattcacttggaaaatttggaacaattgtctctttcgtcacctcaagctctttctttgccttttggcattatcgagcaggaatttcttcaatcatataatgtagttgttgaataaaagtgatataattataacaatacttagtgaggcaacaacatcataagttcatctgatcaagataaatgagacatttatataatatgaagggatgaaccattagaaagggtaaataacaagttctttaagagtttgcaactcattaacccacgtactcatgagtatattgaaagactaagggatatgagcaaaataataaattgtggttaataaaataataaattgtttgttccatgagaagcatttgaggaatgaggacacatgtttaacaaatatgatttgtgaggagccttaaaaagataattagaagaacaactcgttaaaataaccactttcagataaggacaaaaaacagttactatcagttaattcatttatttcacatgttgtaaatatgaaacgtgaaactttttcacgtttcacaaacggttatctagataagactaaaaagaaataactctcattcttaaaaactatgtaaatgtggacaagacctatgataatagggacggtcaatttggttcgaagaaatcattccaaaagaacaggagtagaaactcagtatttcatgtagtttatattgatatacttaacaaaaatatatatatatatagtttatattgatattgaatatcttgtattttataaaagtttataacttagaaataatatgaattcgtgaattatgtagatttaactacaaaattacgtaaaaatcatcttggcttattcattctataaaaataagtctttacaaatttttgtgttagcacttcaaaatttaaaaattaatttattgatataaaagaatgaatttttttaaaaaaatatattattttgtatttaataaatagaaaatacatttattaatattttatatgcaaaatgcttaaattaatctagatgagataatatttacctataattaatatagttataaataggttttaagcatcttaattttagttatgaacttgtgattagtttagtttttcaatactaaaagtatttaataatttaatcaaaacaattcaatgtttgtaagataatatattaattagtgaaaactctttctttcatatttctaagaatataataactttatagctaattaattatttatagaaatgtaatttacattatttattaattaataaaaaattaatactatgtaatttaaaaccaatcaccaaaagtactagtaagtaggtccaagtaagaagaatatactaattattataaaaaagaagtcttttctcaaaaaattagaaaagtgtataaaatagagaaaattaagtagaatacagggccggccagagggtggggcagccggggcctcagtcccaggccccataattttggaggccccgaaaaaattaaaattgatataattacacatataaaaaatatataacatataaatatttagcttacaaaagtatatgaaaaacacatagcacaaatggtaagtgaatcatttattagtaatcatttattactattaataatatatttattattatttttttaaaaaaatatagaatttaaacacatttttttcaaatgtgttaaaatatatggtactttaatagagatactcttagtaattaaatattacttgatcgagttagcttacgttgtaaaaattatttattacatagagataaagaattaaaattaacattgtgtcaaaatttaattaaaatttattttaattttataaaaaaaaaggccttgtttaaattttgccctaggcctatcatcaccttaagacggccctggtcgtgatagttactatttcgtgcaaaaggtgatagttactatttcttgcaaaagataacataaaaggatgagatgttggtcttgttaaagttgtaacataaaaaaacaagatatgcatgtagaccattagttataggcacaaagctattatttataggcaaaatgctatatctggtgactttgtccactttctacatcatggagtgcatctactatgtatttgcactttatctctctagcaatttcttttgttgatggtttaagcttgatgttgtactttttctgaacaaggattgatgatgtttttgatatcctcattgccattctacgagtaaataaatagtactaattagtttatagatatgtaacttatgtaatgtaaattaacatatagtagattatacctctgttatttgttggagaagttgagttgtagagcaattaaggaacttattggcaatggagccaaataaagttgctggtagtgtagttgtgttgtcttttagatggacttgcatgcaagatctaccaacttcttttccttcatgtcccttcagtagtatgccccaactcattatgaaattgacaaaatttcgttgaatctcgtttatgtcttgcatgtctcatttctcaggtttgcagaatacaaccctgtgttcatttttgggaaaaatgttttcacgagtgttatttaactctgtgtatactgtgtaaattgaaacatatttgtcgtgctttttctgttcgctttttattgttagataattctctcgagtcatcttttcttttggtgtttgaaccacttggattatctagtttagttaagacggtacttgttgttgcagtactcgtgttgggtttacttcgcgagccagtcttcagtaacttcatcatgttccttgcttcttctttgtgcacaaatacttgcactctttcattaaactcattaatgttcctaactgggcgaccatgtaagtcatcccacaacttgcctctggccgtagaaaggtaggttgtgatccctacctgaagagtagtaagctgaatactgtcatttaggtttctaaccttttgcaacgactgtgctaaagcgactcaaggaatccttaagcgattcgcctggtttctactttatgttagtaagggatgatgcttcaggtcgcctgtctctagcagcttgaaattgtttcttaaagtccttggacagctgttcccaagatgttattaaatgatgagtaaatttgtcgaaccagctactcgctgctccaattaaagaagtcgggaataagatgcaacgcaaattatttgagacattattggcttgcatgtggtattaaagttattcaagtgagcaactgggtccgtagtcccattatactgcgagacatgtgggtttttgaatccctgggggaattcaaaagtcaaaatattaggatgaaacgactcagtttcctcatctgagtcataaccaggtaatttcccatgttccccatcctgatacatcctgaacttatcctccaattcaatgattcgaagttggatgggatccacctattgttgatttgcattaagttgatggcgcaagtgaggtgctttctgatttagtcacttgcaaagatcgggttgtcttcgattcaagtgctcgcgaagatctgtatatcttcgctcgtaattactcacagacctcatctctgagtaactctcagattggtagctttcgtattgctcatgctttcttggttgacataacgtcgaggtctacttccctctcgtgttttcctacccaatcgactgtgtccttgagaccttgactgtcccaaactagaacttgcttcgtcttgtatcggccttctacttcggaagaggatagatatacgccctctgtttagatacgtgtatactgttgggttttatgccctaaatacaactcatttca

SEQ ID NO: 19031 - DNA, 6616 bp, Cannabis sativa
agtacaaattaaatcggttattttgaattagttattttttaatattaaattatttaatatttatgttttttttttcacataattagcaataaaacaaaataaagaaagaaaaaaaattatgtgtatgaagaaatgtataattgtatgcagaaaaaaattatatataagaatagaatatacatttgatttattaaattttgaaatattcctttaaaaaaattgtaatataattgcgttatatgtattagactttaaattactattttatttgtacaaataattttttaatttttttataaatatatgtgaattagattgcattagttacttttacatattaattataattcaatccgtacaaataccaattttgaattttctaatccaatcagtacgaatgtccgcacatgaattggattgtttattttatgaacacacgttgatcacagcttcccatagacccaccaaaagttcgactagatccaatcagaagtgggcccagaataaccctggcccattaagggcccaataataatcgtaaaataaatctcttcagatgataagagtctcgatctgagagagacagaaagacgatgacctgaccaaatactatcccagtaattcagtaaaaataatgatgggcatttttggtataccagaaaaaccttgcacccaacgcgtcaaatcggcaaccggaaccggcaaaatcaagtcacttacactccaccgacagttccactcagtcaccttcaaccggttgtaaccggtcaccatgtccgtacacccccacaacgccacgaactcacatgccccaactccctcttaaatactctctctctttcgaccctctctgccatggaaggaaggcacgtacaatatatatttatatatacaaaataataataaagctataaatatagtgagagaaagtggaaacaaggacattgaagaaagagaaagtggaatagtttattttgataatcccgaaagcttgtttgtttctcctctctcttgctgctgttactgactgccattgttggaatctgagctttggccaccataagtaaaagctttggtctttggtaacaaactttcttcaactttattttcttgttgtactcttttggcttcttcttcttccttaatttgtactgctgttgaagttgacaacacagaattgaaaaatgtgaatttggggaaagtttatcagcaaaagaaaaaaaaaaagctgtggtccatccattgccattcgctttcatggctcattagatcttgttttggcttttctctcattctctggtttttgtagtttcgtttcgaaccttctcatttcaagctttgagtttctgaatttggatatatacaagtgtatgtatattatatataacgacttttttttttttttagtgatcttggatttttctttttgttcaagttaaaaaaaacattaattaccgctaattagtggcagttacgataaaagttcaatttttgaacggtgtagatctcgccattttaaacagttacgtcaccatttagagatgttgacggttggattctagtgacgtggcgttttcccgacgttacagtttcatgctagctgttctccgtgggagaaaattagtcaaaaactaaagaaaatattttcgtttttggttttgctttgattgaaaggtagaaaatttgttaatggtttatagctggcttaatatttatatataattttatttatagaattatgtgtagttggagtggagtgagatagtgaccgactcagaatgagtgagatgggtttgcgctttattaacaatttgttcattgatattttcttgtggtttgtgatatattgattccctatgctgatgatttttcatacccaagaatcttttcagaccatttatgccgttatgctgcatagtgcatcatcttctttttcccttttttttaatactatttggacttttaaacagtgtgagtacaaaaatagaataggtaggttgtgtaagtgcacagtgttgtgtttgaccatttctattccaaatattcgtcttcaacaattaaattatattatacatgtttagtactgtaatgccccatactgattttgattcccatgtgggtttttctgatactctgttcctcgtttgttttcgagattatatgacagtgagtgaacctgtttttgtttatatttaatcattcaactattgttttatgtttatggattgtctttcattctttagtgtcttcttagtatgctctgctctgatctttttatttttcttctccacattctttctacttttatgaaaacaaggtttatggtcatcaacctgttggaatgctattttggatttttgtgcactcaaataagatttctggtgatgagtctgatgacccatttgatactttgctttcaggctttgtaagctgttccagggtcactgaagaaacggccagaggaagaatttcatgaggtatgtgtattaacatggctataatatatgtctaatgtatagctagattgttgatttgagtctctttcctatggtatagcttctgcatttgattgtggttggagaactagatattgttagccatgaaggaagttgacaaaaagagaactccaaataataataataggacaaagcgctctactaataaaactgaaaagaaagaacctaaacttaaccaaggcaatcctggaagaactatgaatgggaaagaagctcaatctaaagcccctaatgctaagcaacagtccagaactttagtaagtaactcgaacactggcaccgagtcctctgaagtttgtgaaaacggggtggcacatcatgttgatgatgtcaacaaatctgaagttaaaggtgcaaaagccattgatatgagttccaaggagatcacagatggagttatggatggtgattctacagacttggataaagaatataagcagggtaaggaagaggtttcggattctgatacaactaaggattcagtgtcatctcaaggggattctctgacagctgaagatgagaaatttgaagaaatagctttaactgtacctgaaagtaattctaagaagaatttcaaagaggtatctgagcaacccaagtcatccaccaactcaaacaagaagccatctagtgataccagcacattttcttcccagaacaattcaacaaatttgagagtccttcctcaatctacatcagaagcttctgaaacatttgatgataagcttgtcgcagaagtcgatggaaacgatacattgaatgagacttcaaatggactcaactgcgttgctgacaataacggtcaagttggtgctggagaaaataatgaaagtgagaaggaagcagctttagagaaaaagatcaaatcaatggaaatgagaatcgaaaaacttgaggaagaattacgagaggttgctgctcttgaaatttctctgtattctgttgtgccagaacacgggagctcagcacataaggtgcacaccccagctcgtcgcctttctcgattatatattcatgcttgcaaatattggactcaagacaaacgagccaccattgctagaaacacagtatcagggttgctcttaattgcaaaatcatgtggtaacgatgttccaaggtatatgcatttcctcattatactttaaatgtatttgttattatataaatttcagctttcagaacatgatgatcttattttcggcatgttaaggttgaccttctggctatcgaacactgtcgtactgagggaaatcatttctcaagcatttggtggttcgcgtcagtcaagtccggcgatgcgattggctgagtcaaatgggaatggaaagagaagtgaattgaaatctgcaacaatgaagtggaaggcgagtcctggtagtaaacagacaaatggttttttccaatttgttgaggattggcaggagacaggaaccttcacagctgctctagaaaaagttgaatcctggattttctctcgggtggttgagtcagtgtggtggcaggtaattgttgatagtaactatgaataatcatatcactgtaacacaattcttgtagaactagagttccttaatgatctgataattgcattttgttggtggttgcatagctgtgttctctttaatagcttcttgtttgaattagtatcttagtatcagttggttttctgcacttttcttatttttcctataataaatattatttccaggctttgactccacatatgcaatctccaatcgaggatttttctaataataagacagctggaagattgttaggaccagccttgggtgatcaaaagcaagggagcttttccatcaatttatggagaaatgctttccaggatgcagctcacagactatgtccagttagagctggcgggcacgaatgtggttgtttacctgtactgacgagaatggtgtgtaatacttcatagttgccaaaaacttgttttcagttctcttgtcacttgcagtttctgccatcaaaatgtctcatcttcatgccttcttcagctttttatcagctcggataacttcgttacttttattaattattttccccctcatgtaggttatggaacaatgtattgccagactagatgtggccatgttcaatgccatcttgcgcgagtcagctcatgaaattccaactgatccagtttcagatccaattgttgattccaaggtcttacctattccagctggagatttaagctttggatctggtgctcaacttaaaaattcggtacatatctattctctttcttctggagtgaaatatacatgttagcatagctttaataattgttaagaattctttcaaattagttgaatgcttccatttgggggatggtcctctgacttgtcagcaaggtttaagcatggtggagataaattcagctagatataagaggttttgtttctctagaggaaagtacttggaaaaactgtaagacattgacaacattctaatgaggattgtgacctcgataaaatttgtgtctaatgatgtcaaaatatgatatagataagtagctagtacagtaaccccctagaatgttggcatttcacttatcatttttatctgtactttgggagttatgatctgtgtggaaagataataattgcaagggttttttactaaagaagggtgcttgtgatgcagattggcaattggtctagatggcttactgatatgtttggcatggatgctgatgatgcgccacaagaagatgagaattgcagtgaggatgacgacaaacagcgtggagatggtgaatctaaatctttccttcttctcaatgccttgagtgatctattaatgcttccaaaagacatgcttatggaccgatcaatcagaaaagaggttgatatataatcaacttatcttcataccatttgcattgagattacacaacactcatgtttactttcattttgccacaactactaacttttctcttctgatgtcttataggtgtgtccctcaattagtcttcctttgattacgcggatactttgtaacttcactccagatgagttctgtccagatcccgtcccaggaaccgtattggaggccctaaatgctgaggtatgattgtctgcattctagatttgaataattagaaccacattcttggcattggcaaaaagtagacaaataataaatctctactgaactttcttttgtagaccattgtcgagcgtagactatcaggagacaatacgaaaagcttcccttatacagtagcgcctgttgtgtacaccactccatcccctgctgatgttgcagaaaagtgcgacgttgcagatgcaggaggaagatctgaaatggcaaggaatgtatctgttatacatagaaaaggatatactagtgatgaggaactggaggagctggagtctcctcttacatcgatcatcgacaagttgcccgcgtccccaagtgtaacttcaaatggaaatggtaatggaagacacacggagagcacaggctttgcttccacaaatgaaaggtatgagctcctcagtgaggtttggtctgtgtgaatgttggaagagttatttattttacacataaatatatgctgatttctgtatcagtttcagcaatgaactgttgagagaatacatagattaattaaagttgtttatattggaaaatgaatagtaccaaatcatgatcattcattacaaagtctttagaagacttaactaaaatgtggtcaggtcacagctttcttgtacatgatatgaatttttgttatcatataaacatttaataagatattacattccactaagtaaatttttacttattgttgtatcatattaagtccaatatttgttgttaagaatttcacaaccagaaagggcttcaaattttcagatcattgctgataaatgtattctctagtacttgattttgtaaagaagctaatttcttttaatcattggatttcaaccaaaacaaatagttataataataaatatatcatttgttaattccttagctatgcttttcacatgacagtttaatttatcacaatttaatattggaacagttctcttagaatttgctcaaatttattccaaagcact

SEQ ID NO: 19032 - DNA, 3241 bp, Cannabis sativa
aaaaaaaaaaaaacagagagagatggatttttttttttttttgacgtgagatgggatggattttagttacatattcaaatgaataatcatgtttttaaaaagcaccccattatgtttttgtctttagacaatattatcaaccgttgtgatattaacaaaggtaaataaatctacccaacaactagataataaatagaatggtaagtagtacacttacactatctaaaaaggagggtcagtggaattccaactcagtaaaatttggcatctctgccatactttttcgattagattatacaatagtgaagtaccataaggaatgctctatagagggtcatgtttggttagaaaaacacatatttgcctttcatttttgagttacaattttaatatatttggaatattatttgaatagaataattattggaattatttcacaaatgcacaaaaataacaaaaattacaaaaatacagttatacggagttttaaatatttttataatttttataatgttatttacaaaaaatatgaacttttgatatatttttatgttgtacttttattaattttttgttatttgtttgttgttgttttaatgttatttttatgtaattttcttgttatttcgtgttatatttatagaacaccgtataaatattaagaaaaaaaatctttgaatgtgaaaatatataaaaaaaaaatagtattttttgtaaaggtttttttagttttattaatttttttgtatttttacggaaattcacatagcaacacacataacaactaatggaacaactttaatcacaagcaaaatttacataacaacttacataaaaatcaactggagcaactaaaattataattttttttaaaaaaaataaaaaataatataagataatttcaggtttctcctgaaaatcacttatttctttcatatatactcataaaatacaaatgacaaatgatttgagctctccaacgagcactggcagcgcactgaaagtgaaattaaaggtcccccaacaaggtataatcactttttctaatcatgcataatattgggaagtgattacatttgattttttatttttaaccttttttttttcatacccccaatcagtctgaaaaaaaaaaaaaaaacccataacgtgcatggaagtgctgaagagaatcatatttggtaacatgaactttgaatttgcaatggaatgtttattttggttacttttattgggttggaaagtgagacaacgaagtggagcccattactgagcctttctttgcacggcccatttggcttttttcagcgtgttgttgacgattccttgtcggcctcgtgggccttggcctactactggtggttgtcttacttactaataataagatcaagaacaagacaattttagtatttgcaaaagctaaaattctcttttgtctcaattccaaatggtacatatgacaattttaaacttctaaaactaataaaagtagttagttgtataaattaaaaattcaaaaccaacgatcatataacagtgtaactaaaattccaagcctttttctcaatttgatcatccgaccacttatatgtattttgtgatcaaaccatgccttttgaattgtttgttatataattcaatattaattattattattattattattatgtaaaagttaaaattataaattataacaagtaagaaagtattaaataagagtctaagatttagataaaaaataaccaatttaaattaactaattcaatatatatttttgcaaattagattgtattagttttgaaatagaatgttaattggttagattcaaaatataaaataggaaacttacaaaaatactagaatttggattaatttttcaaaaatactgtcacacggaattttttttcaaaaatattgtgtttttatagaacaccagtagaacaacttaaaacaacagtagaacaactaaaaaacactagtagaataacagtgaaaacttaacacaatatactacagtatgaaacttataagaaaacacagtaaactggcagtatttttgtaaaaaaaaaagaaagttagtataccatgtaaatttccctataaaatatgcacttatagtttggtagggagggagaagaggaatgatggctaagttaggaaggataaagaaagtcaatgaatggaaatgagagtggtactattctatattgtttggtaagttaggaaggagaaagaattaggagtgggatgtaaaagagttgtaattataaaattactattgtaccattacattatattaaatgtttatattttttattttaatttttttagttattacacaactacatacaaatatataattatttcattttgttttaaataaaataaaataaataaataatagactacaaattttttgaatgtccaagtgttgtagctaatatatgggagcctatatgcttagtatgtactcaagctctggaaattataggctcgggtatgagagcatttctcagtaaagtttatgttgggtttcatatacatatattaaatataaataaaaaactcaatttcaatataatcttatttactaattaataaaagttccagaatgattttatgttgtttggttcacatattactttcataataatatgtttaatatataaattttgctaaatcctgaatatatggatattaatgattatagtgttgtctacacagtaaaaaataagcatgatcatatacttcaaactatttaatctcgcgatttatcagtgcactagatttacactataatcaacgatgataagtagaatgtctttttcaggacattagcaaagtaaacttgtatcagatgtattggctatacatcgaactagaccgatattgtcagtaaaaaaatattataaacttaatgttatatcttttctaagttaatgtcacttgtttgatcttagatcaattgatctcaattctaagatgattaagctttaagataattgtagtatttgaattctttaacttgttcgttgcccgcttgctcgtcgaactaatccatacttacatcttgggaacttagtaatgcaattgagggagcattaatcatagacatgaaatttatagcttctataactatttagaagtgcaacgatgattttcttagagcttcgctaaatgagataaatagaagagctcttattttgataatatttttagtttactgaaatattatttacaa

SEQ ID NO: 19033 - DNA, 2942 bp, Cannabis sativa
tttttttttctaaagggcccaattttaaaatttcgcacaaggccccaaaatgcttgggccggccctgaccctgagcaataaaattagttattatgctaacaaaaaattaatagctacacaataattcaataatttataattaatacatattattaaatttttatttttatttaaaaaataatttaaatatattattaataaaaaaaataaagcttgaataataatttaacaattaattacaagatagctataaatttttttaaaatataatttaattattattatcgtaaataattaaatttaaatatttatttacaattagaaattaaacttaaacatttacctcataaattactttttttaaaataatatttaagaaggatgtgcgaacaagaagacattattaagttgtaatgtttattctttttcatattgttaatttaataggtaatttgtctgatatatttatgctattttattagaatatttacactttttaatattacagaaaaaaaaattagtgtctcaattttgtttattaatttatttatatatggtggaagcgtgtgaattttataaatcgggtatttgcctcttcctcgtacaatccctagtattaaaaagattaaaatatgtttacactttcttcacttccagattattttactgccacacatataaaaaattaagaataatgatacatggaaaatttagaaagaatattttaatatattcaattttttatcacagataaatatgtatatcattactcttatgataatgatacacaatttttttaatgattaagattatttaagttatgtgaattaggttactcaatacacttctcatagttataactaaatattagatatataaatcatataatataagctagaacgtttgtttaccttttctttttatttgccttatctgtagaaaaaataaaataagggttggattttccgacgttattatgcttagttatttcaattaatattgatgatgttgttgtttttgtttgtgaaaatccccttctatcttcaattgtttctcattgagtacgtgagccttttatcattagatcaaaattacataataaatgatcgtatcccattttgtgtgataattaattaataatatttcgtaataattattaaattaaatcatacctttgacacttaatttaattaatagctctatatattttaaaatatattaagctaataatttttaacatttctcttcataatagtatatatcattacttaaaaatatattaatcttatccgtacgtaccatattccatattaaaactattgaagttatttatataggggaagacttcatttaattaacattataattatttaatatatatttgccaattaatttggaaatgataaactagcttgtacagacggatccatcctttcacagtttcaatctttcttgttgccaaccatgaacggccgcagattacttctataatcaacaatgatgattaatttaattggtttaataatttttatgcatagtattattccactatattaaatgaaataaatgattgacaaataatcaaacctataaaaataatttgacttaaaatattttctttcttatttcttactaaactgtgttatttatataaaactaaaagaacaaagaaatgcatatagtctctttgactttctttagttatttcccaaactcaagacttggtcttcaaagaaaatattaatattaaaaaaaaattgttccaaaattaagtattgtatctatgttcgatggttatgtttgtgccgttaaccacaattttttagtaaaattgaattttatgaatcgaatcataatcgggcttagggatggaataaagacctttgtttggttttgtttgcttcattatgttgttgtaataaagagcaaaagagctattatatatgattgttaatgacgaaataatattaaattagagaatatttataattaattataaataattttaggtacgtacgcctaaaggtatcaactgtgattagttattaatgagtaaaagatcatgttgatacatctacatatattagaatttagatgatttataaattagctacaaatcatttaaattttaatatattaactgctatttatttatataattataaattatgtcatatattatttatgacatagctacaggggtagccgggtaggtggccctgcctaattattattatttccggaattttttttaatatatgattgatgatttgatatttggagtattttctttaaaaaaaaaaaaatgaaatgtacacggtatgtatattaactggaattatctccttaaactaacatcaaaacttcaaattgaagatgtatttttcttgtatatatcgttataattttctgttcagatcatataataactttgtttttttatgtacgtgttcacatgttaatatgtcacactacaagaaattaatgtcactttgaattttgatagtaaaaataatttttatcaacatatttcgcaaactgtacaagcaaaaaagtcaaattttatttttgcgagcgcttttcattttatgctggcaaaagttctaataccaacgttaatttgtcaattcctttcgtcaacacatcgaaagtaaattccattttaccagcacaataccaaacttttgtcagcacaaaaatatacagacaaaagtgatatttcttgtatatcctattttaaaaagaaaatataatatcataaatttaataaacaaaatattcaactcaaatatctaaatagaactaaaatttggaaaaaagtaaatacctatttggtaccttgtgttttttcaaaatataaacttgctaccttatgcttctaataattattacttggtaccttttatttagaaatcctaccgacttggtaccctttctttaaa

SEQ ID NO: 19034 - DNA, 3066 bp, Cannabis sativa
tatattaatgcattgtcaaatgaaacatagatttaataaacacataaaatatattccttttttgaaaggaataaaatacacaatactaaagaaaaacaacttaataaattaattccattttaaattttatgctggcttttagaaatttcaagggtggctgctaaaatcttcttctacattatatatattaattcatcaattagtaatatcagtcacaaatcacaactcctaaaataaattatgaatatcttcttctttcttttcataatctcttgtccactttcatcatcaatctctgatactttacatgcaggttcatctttatctgcagaacaacaaaacgtcgacgttttagtttcaccaaatgggatcttctcagctggatttcactccattgggaacaacgcatactcatttgccatatggttcacccaaaagaaaaatcccacagtggtttggatggcgaatcgtgaccaaccagttaactccaaaggctcaaagctaactctcctcaaatctggtaacctcatattaatcgacgcttatcgaatagtcgtttgggccacaggaacgacgtcgttttcagtacctcaattgcgtttacgcgacaatggaaactttgttcttataaccgaagacgacgtcgttttgtggcagagttttagctcaccaacgaatacccttcttccagaacaacctttaacaagatacaaaggagggcttgtttcgtcaagaagtcaaagtaacttctcttctggtttctataaacttttttatgacactgacaatgtcatgcgcttagcgtttgataacaatgacgtgtcaagtgtttattggcccaatccgtggttgttaacttgggaagctgacaggtctacatacaataatagtagagtgggagtgtttgattacttgggaaattttagctcgtctgataaatttactttcttgtcaggagattttggttcgagggttcagagaatattgaaacttgatattgatggcaatgttagattgtatagtagagaaaagtcatgggagaattgggttgttacatggcaagcttttaccaatccttgtaggattcatggtatttgtggtgctaatagtcgatgcatgtacgattttaatggcagaaaatgttcttgtcttccaggacataagatgaagaatcgtactgattggtcttatgggtgtgaaccaaaattcaattccttctgtaccaaaaaccaaacttcaagatttatcaaacttttcaattctgagttctacggctatgattatggtatctacaacaactacagttatcgagattgtgaaaatttgtgtttacagttttgtaactgcaaaggtttccaatactcatattttatcaaccttggtatttttaaatgttatcccaagatgttattagttaatggataccatagaccaggcttttcaggaaatgtatacttaaggctacctaaaacagatgatcatatctcatcatatgaaaactcaactgaagaatttaagttagacttaaattgttctaacaaagccattacaatacagatagccaaaacttatactaaaggccaagtgaatatggcattggaattcatgttttggtttgcatgtggggttggaggaattgagattatttctattttactcatttgttgcttgctgattagaacccgaaaatactctgatacacataaatttcaggttcaacttatggctgcaactagattgagaagatttagctattctgaactcaaaaaggccacaaaaggctatgctgaagagattggaagaggagcaacaggcattgtttataaaggtgtactatccgattctcgagttgcagcaatcaaattactccctgaagcttaccaaggtgaagctgagtttttagcagaagttaataccattgggacactaaatcatatgaacttgatagagatgtggggatattgtttagaaggaaaacataggattttagtgtatgagtacttggagcataaatctttaaaagagaacttatctagaaatgtgcttgattggaacaaaagatttgaaattgcagtaggaactgcaaaaggtcttgcttatttacatgaagagtgtttagagtgggttttacattgtgatgttaagcctcagaacatactcttaagctctaattatcaaccaaaggtagcagattttggcttgtctaaactactaaagagaggagagcttagtagtcaaagcttctcaaggattagaggaacaagaggttatatggctccagagtgggttacaaaccaacccatcacatcaaaagtagatgtttatagttatgggattgttgttttggagttattgactggaaagagccctacaagttgtgttggtaatagtaatggtattgaggaaccagagcaaataggacttgtaaagtgggtgaaagatatggttaatggagctggagaattggaaaagatcatggaatcttccatggaaggtgaatgtgatatgaaaaagtttgaaactcttttgaatgtagccttaaattgtgtggaggaagacaaagatgctagaccttcaatgagccaagttgttaagtccctcctacattttgaggatgataagtagtgacaatcaatacttctatcttttcataagattatgaattttgtgtattgtatttgtggttgtatttgtacaaacttaataaaatttgtaatatatatacatataaatttgtaatatataaatacctatcgttttaacaagtaatactcacaaagagtgaagtcgatcccacgaggattgtagtttaaaattaaattcttacttctatttgacttaataaaatttatacattctagtatttgaaacctgaaattaaagaaaacaaacataattctattccaaaaaatgataataaaaaagaaaattaactctaaaaataacataaataataggctaaaaatatcctaacaataaagagtcatttgttattaagttggaactcatttttgatactaagttttccatttgtagaccaagcacaaatacagagagatacaaaag

SEQ ID NO: 19035 - DNA, 1769 bp, Cannabis sativa
taataataagtagttttcaacctctaattaactgggtgatcatgatgatgatcatactggtttcatttgttgtactgtggagactctttatttcaccttctctagcacacatgaaacttaggagaaatggtttcaatggcccatctccttgtttccctctcggtaatacaactgatattatggcaagtatgaccaaaaccaatgcctctaaagatggtataaaccatgatattcattcaagggtgtttccttactttgctagttggcaaaaatcctttggtaagaactaatataatctaactgataatcttactatatatatacataaataattaatgactgatcgtgtgtgtgtggtatatattataattattgtagggaaagttttcatctactggctgggcacagagccatttttatatgtggcagacccagaatttcttaaaaatgtgtctggacaagtcatggcaaagggttggggaaaaccttctgttttcaaaaacgataggaaacccatgtttggaattaacggtctcgtcatggtcgaaggtgaagattgggtccgtcaccgccatgttatcactcctgctttcaacaaggccaacttaaaggtcctctattcatacatgcataataaacccatatatatatctacccctttttcaactgttatagcataatatctaattgtaagtacgtacatatatatatatatataaacaggaaatggcatgtttaatagtggagtcagccacaaaaatgctggatggctgggccacacagataagttcaggcaacccagaaatcgatgtagagagagaggttataacgacagcaggggaagtcatagcaaagacaagttttggcataagttacgaaagtggtaggctagtgttagagaagttaagagctttacaaaccactcttttcaaaacaaaccgttttgttggggtccctttcgcaaaattcttatgcccaaacaaatcccttgaagcaaataaactgggcaaagagatcgacggtcttttgtactctatagtggaagctcgaaaggtagagtctcaaaatattacaaaaaataataataagaataatgacactcatcatcgtcaagtacacaatgacttgcttggcttgttgcttaaagaaagtagtagtaatggagtaggagctgttaagggggggagcagcttgagcacaagggaacttgtcgacgagtgtaagacgttcttcttcggcggacacgaaacgacggcgttggctatcagttggacaatgctacttcttgctatgtatcctcaatggcaagttgagttgagggaagagattaaacaagtcattggtgataaagaagtggatgccactttgcttggtggcttaaagaaggtatgattattattaatcgtgttttttctacaactttaatatattatatttttgttaagattagttatattatgattcagtgtttttttctaagttaatttgatctgttatatacggtataaaatttgtttgaacgtacgtacgtagcgtaatttttcatatattaaatcataagaacgaataagcaattattgcaccaattttgtttgttatagtaccttataatatatgatgtagtagaatattccaatatgtaatctccatgtatagccgcatcttttattattaattctatacatttttttttttataaatattagtactttcataacgatcatatcatatgtatttacattcagactcagactatcatatacaaaatg

SEQ ID NO: 19036 - DNA, 3647 bp, Cannabis sativa
atatttatatttattaaataattggtttagaatcaatcgtaatgaatatgaaatattcatacacgtaaaagtcaattaaatgattttatacttaatatagaaatattctaatatttttgtcatattgttagtcgaccttggctgtgttattggattctgcattcaattgctttacttggggagtctctagattctgaattagaacgtaatacaattgattttcttggccgttgtcaggtatgtttgcaaatacatttgcatctcatttagttgttgtgcttttcgtaatgcaaaacgtacatctggatttaggtgattcgtttttatacatttgtattattctactttgcaggaccaggatggtggatttggtggtggaccaggacaggcaagtaaactagtctagtatgaggcgaggtggtttaggcgcttagccagtctttaaaattatatcttgtgttggttacaaattgtaactgtttaacatttggtgtgtggaaagcatttgattcttaccagctgatacttatcaagctgtatttgtacatatacaaatataatattagtaattaatttttcgatttggaccgagggcggtgtcaatatttattacaatcagttttctttcagatgccacatcttgcaacaacttatgccgccgtcaattcacttattactgttggcggtcatgaagctttgtcttcaattaataggtggtcagtttatacttttttttgtgaacttctttttacagatataattttcttttttcccttttcaaatgattgactcaatgtcttttaatatttttcagaagtacattgtacatgtttttgcagcggatgaagcagccaagtgggggcttcaggtatgagatcatgtctaactgtgtagtttgaaattagaaattgtcacttaatgtgaaatattcatttttaatgcttctaaaccggtttttatgagatgcattaaacaatcataagtcaattagtataaattttaatattgttgggtgcattcatcaggatgcatgatggtggagaaattgatgttcgggcctgctatactgccatatcggtaagtctctgcacttgtctttgcaatacaagcatgtctgtgtttatgccatgctaattcacttatgattgtttaacctttgctctgtacagtgtattctaatttttataagcagcttagtttatgattatctaagtccttttctgatcaggttgcaagtattttgaacattttggatgatgaactagttcagaatgttggaaattacatattaaggttggccttgattgctctgctcttctcaatatagataggctccaaatcatgctcctcatttgctcaggagctgtttgtcttgtgaatcatgattctcaagtctcatcaagattatgtttaatagcgtcccttgtgcatgcatttggtatcactgttaagtcttttacattaatattgcattatgtatagttgttgatttctataaataattaaagttgcacaatgtgctgtctctttgcagctgtcagacttatgaaggtggcattggtggagaacctaacactgaagctcatggtgggtatgtttttagcaagctacttaatactttgtttttttgctgtgaagtaatttatctttgtatgaactgattttgggaaattaggtgaattattgtcattgtttattcaattcaaatgaaatgaaacataactgattgatcaaatcttggacggatgttaggtacaccttctgtgggttagctacaatgattctgatcaatgaggtccatcgtttggacttgtctcgtttaattgtaagatatgcagtcttcttgtcattcttagtaccttgccattgcaattttcttattgatcttactttttgctatgttttaacgatgttttctattctaggactggctggtatttcgacaaggaagggagtgtggatttcaagggagaactaataaattggttgatggatgctattccttttggcaggtccttttctgtcttttcactttttttactactattccttctggactataatggggttaacaaaataataccgaccagggaggctcttttgcattgttacgaagagttggttcatttattgatgaacaactggtgagaccagataatgttggatgttgcagcacttccacagtatctggtatacccgaagagggaggtaggcaagtttagcagagtatacacgatatggtatctgttcttgatcatttttcatttgttaggttctgatatttattcttttactttctcatttccatttgcaggtttaaatgcttcttcccatgtgaattacaatgatattggtcataactttatcacaacatgttcagtaatggagcatcttttcaacagccatgcattgcagcaatacattcttctgtgcacacaggtttgtattttagaaatcagttgttaactttgagggctccacttgattcttgatgttttaagtaatgtcaatattttttttagctaaaacatgtaaagtagtctggtttgagtttttctctcctgccaattcaataagactagcgaatcatccttagtagactctatactttgttaccggtagaagatttttacttatcagaaattaaatccatagtagtttgcaatcttttactccggtcaatgcaggggcaagaggggggactcagagacaagcctgggaaagctagagactactatcacacttgttattgtctaagtggcctctcggtgtgccattattaccgatcaaaggacgaggagactcccccgccacccagtacaatgttgggtccctactcgaatctgttggaacccgttcatcccatttttaatgttatcttgaagaaatactatgaagcacatgaattctttagaagccaatgaataaccaataatgtattatttatctttttatctatttatgaccctgcaaaattaggcatgaattcatacttgaagtatttttttttttgggtcagacacacaacaaactttgcattgatcatatctaaggttaataaatatgacacgagcagtgaaataatgcaaattctatacgtgtattttatctggggagtggttgaattgaattgaattcagccaatttgcatggtgttaagatctcatctctactctgccaagtttaagggtaggtcaattttggtgtcatgattgctttgctggaggtctttatgatattgactaatactactaatcaattgttttttcaatccaaaatatagtattaaaagtttattaggcttagtggttattttttatattatttattaaacatttcaaaattaatccacagggatgatgttgacaatgacatttaatcaacctaaattgggatctattagtgtttaaaaaaacagtggcctttgatattgctatggccaccgcccatatggcccctttgaactttgataccacaaaagtgtccaaagagtgagagtgacgtcggttttagtggtcccttaatcaatcattataccttaataatgaattttaattcaagagttttacctaaaggagtaaattttaaaatttgtgatacacattaatagacactgcacctaaatttatgttggcttcctcttgtcc

SEQ ID NO: 19037 - DNA, 3467 bp, Cannabis sativa
tcaattaatacaagtcaataccaaacattgtattgtattaaataatacgaatacaatacaatacaatacgatacaatacattacaatacggcgtaccaaacgagccatttaggtacttaatgccttaactcttaatatttctgaaaagagaaaagaaaaaaaaatggactagtgtagttggagaagttttacattatttcatagtcttgtttaaaattttaatactgctggttggtgtggcgttctttactatgcctcggatggtgcacaataaattataattaatgtcgttgaaactacatatattcttgtaaaaaagttaaaattattgaagacattaattattggtataaatatggctcatatattatatattagtactcatcattccaatataagacccaaattgctgatttgttttaattaaagactacattttaacatatttataagttttcgagatgggcctgggtttctggacatcttatggagctctttttgcaggaattagtctcttctttttttattcttactgttactcagagaacggtgcgatgatactattaattaattttgcataattatatcctccatattaattaattaaaatgttgacactgtattaagttattataatttagtacttaattattccgttatatcattattatattctcaattaatgtgacatcatgatatatatgtatacagatcgatactacacatttatgaaagatgcaacgtcagcaccggcagttgaacgctacgactacataatcattggaggaggaacagccagctgtccactagcggcgactctttcacaaaacgccaccgttttagtccttgagagaggtggctcaccctacgacaaccccagcataaccaatataaccagctttttgtccactcttttggacctcactccaaattcacctgcccaactcttcatctccgaagatggtgtttacaaccacaggccccgcgtcctcggcggtggctcctctataaacgccggcttttacactcgcgccagcgccgagttcgtggagaaggcagggtgggataagacattagtggaggagtcgtacgagtgggttgaaaaaaaggtggcatttaagccggtgttggggccgtggcagtcggcggtgagagatggtttgcttgaagagggagtttctcctaataatagtttcacgtttgagcatttgcatgggactaaggttggtggaaccatttttgataaacaaggtcataggcatacggccgcgaatttgcttcagtatgctgatccaaaaaagattgttgtttatcttcgtgcaactgtgcataaaattcttttcagaaataaatcaggtgagaattcatttttttattttttttataggataattaggatttttgctacattgacatacactaaattaggcctatgaacttttctgatccttcatgctcccaagattttaaaatatactaaatcacacccctcaaactttgatatgtgtcaaatcatgtcccttaaacttttatcacttttttttactaaaattagacaaaagtacttaaattcaacagtctcaatagtttaaggggaatttttaacgaacaaaaaaatttatgaaatatgatttggtaaatgtcaaaattaaaaatcctaattagacctttttacatatataagaatagtttaatttaaaaacaatactattattactaattttgcaggaatgtccagacctgaagcttatggggtaatttataaggattggaatggaggtgtgcacagggcgttgttgattgataattccaaaaatgaaattatagtgtcagctggagctctcggaagcccacaattattgatgttgagtggtatagggccagctaaccatctcaaggctcaccgtatcccagttgtaatggaccaacccatggttggtcaaggcatgtctgataattcaatgaatcttgtgtttataccttcgcccaatccagtagaagtctcccttgtacaaactgtgggtatcacaagctctaatagcttcatagaggccgctagtggattgagcatttctctgtcttgggccaaaatccttacaaagtattttcagccatttataaatcaggttcatatttctaacctaatttatcacagcaaactaacgttttccctttttcctctataatctaataaaaggataaacatatttataaataaaaattttctttgcgaaaagaaaaaactcttttttgaggataaacagcattttaataagaaattttgagtaataatacacatatattcaaatattatacacttgtgataagaaaccatatggtgccgtaaccggctaaccgcccaagacatattcctcttttgtaataagctttcatatattttaatttaaaatcagttatacaaaacccaatactcattactcattagcaatcattggtcactaaacaaatagcttattattttatataattatgattagattgaaaagctagggttagtatttgatgatgcgtgaaattaaattgtcagattaatatactattcttttaattgtaaattaattttgagatgaaatttattcactttattccaaattctaacaaaaccaaaagcagacttgtagcttatgttttgagtacaaatattgtctagctaaatactttcactaattttaaacaatgcgtcatcattatttttggaaaaaaaaaaataatctacactaagttcatgatcaaattaaattgaggactataaagatggtgtatgtacatttttagccatgtttataaaattaaaattcaatactagcgtatataatgtaaaacttatattatatttagcataaaaaaattattttgtgataaatttacatcaatttttagcaatatgcttcaatgaaaaattacaaaatatgatgcaaactttaatttttagttaataattttattaaaaatttaaaaattctaattttttcataattttattatgtaaaacaataaaataatataaatacttcataatttaataaaacaatataaataacataaatgtaaataaagaataatacatttatttattgtgatacaaattttacattataacaaatattaaatttgaggtatatacttcagctttctgtcacttatttgcatttttaatatgaccaaatttaacaaaaaaaaatatagcatgagttaaattttacactacaataaatataacttttttatttatacttttcccactaattaatgtaattaataacctttttaaattttatttatatgtttagaacatttttattaagcaacagtgctcagcactttttatagatgacactctattattaattaacaatattctataaaaactattttcttaagctatatgagacccgctacttaattacacaaatagcagtatgacattagagaaggtaggtgctaga

SEQ ID NO: 19038 - DNA, 7242 bp, Cannabis sativa
cgtagtccatggtcgaacaattacaggttttcgatcaaattggatcactccattctccaatacctgatccttagtagcctcatcattgaacctagccatagtcaggccttttgccattcttgcaatctgaacgattccaaggtgcccccaaacacgcttatgaatccttcgaatacaatgagaggtggattggcacctaataccatacagataatagctaaattccagcaagctgcttgttcctgaacttcattaatatcaacttgagcaattttgatgccattcttgatcatcggttccatataagtaagtttcagagcatgataggaagtgtgctccttcgccaacacactccaatgattcttagccgaagcttcaaacgtcctttgattaatcacctattcctcatctttcacgttttgtgcccagctaccagtcgatcggtcttcgattggaatctcattcccagaagcagagtcttgaatcgccacctcatgccctaattttcttatttctgcaatttcaaccataagattcaatccatcgatcccagacgattctcccatttcaatctccttgtcaatcggatcagtagcttgaattacaggctttcagacagctctcttcttcttcgccatggaagagagaagaacagagtcgcacacgccttaattatctactaattttattaactaattaattttaagaaaattgtacagaaaattaaaaaataaaatcatgctaattactgtattttcaagtatataacttaataattgaagaatgtcttaaaatttataattatatattattaaagaacctaattttataatttataatttataattattgctaattaaaaaaattaaaaatttacctaattataactctaataatatatatatgtcattcttatatttttcttttgattaattgtatgttatatatgttttaattagaaattttttataatgtaataattcaaatgatgtataagatgatgtaatgataacgggtaatataaaatgaggatatcaattttaaatgatcaggatataaaaaaaatattatacgaattatgtcatacttttattataaaaaagaaattttataaatacagattaggctatttgtatctaacttatcatattattcaaaaaaataaaattgaataaaatattagtaatgttaacttattacttgatttattttatatgtacatagtaaactttttagtgagatctaatgaaaaatatgtaatatacagtgatgagaataattttgaatgattagaatataaaaatgttataagaatcatgtgacacttctaattttgtaaatatatgtgagcagtttgtacacttaatacacctaatttctcatgttatttaacaaagattatataaaaaaattagtaatgttaaattttttaaatatttaccgcgaagcacgagtagttttctagtttaatataattttataatttattaattattattaaataaattacaaccacaataagatcaaacttttatttatctaataaaaaagctcaaacttttatatctttgcccaatataaaaggtaaattttataataataataataataataataatttatttagcatatccaaaatataaatataaaattaatatatgtggaatttttttttcttaatcactaaattctaaatgtctcataattggtagctataaaaaaaatgtctcataattggcatgtgattgtataaatttagactaaaaatctgtttagacccaaaaaagaaaaagaaaaaaaaaaaatccaataaaaaaaggtatcatctttattaagtatagttttgattgtatagtgtatatagtaattagtattgagtaatagtcatagtatatatagagaccagagagagatcatctaaacaatttttcttcccttcctggtcctggggcttcctcagtcttcttcctcgacctgccacgcggagagactgacagagaggacaacccagacgaaacccatattagatatcatcaacaccgccctcttcactactttaaaccactggtcttcttcttcgaacttcgtctctcactcgctatatatcccaagctctttgttccaatcaggtttgctttgtttcgttatcgatttcaactgctgttaattggtgatttttttttcatttgtttttgttttagggggggtgaggttggagttgattatttatgtcttttgattgtgaaattaaacttgaatggtggtgttggtgtggtggtacggatgtattaatgtgtttggttagatggggttttgagtattgaaggtgtttgatgaaagagaatggtgaatttgatttttatttggtaaagtttggccgaagtacgaggtgggtattgatgaattcttatcatttttattgaatcgaaaagggttttttcaactaatcaagtttgtgaattgtagatgcctgaaagaagcattctttgttggctgtgctttagttcagtatcgagttcgacatttttgtaactgtattctcttttaacaaacaccagctttttttttaatgaaattgatttataagtaactgaatatttctacatatttaaattctggagattggatttgtattttgtggtttgtttcatctcttttgatgcacttgcaattctaaagttttaaactaactaagtgcaatttttcccatttctattgggttttggttgtgtctttcaaattgatttgttgtgttcaatactcacaactatgaaatggatttaggaatattgagttaggatagaaagaatcattgatttagaagaaagaacttttttttttgttgcttgtttatatgtatgtaccttcaatgtgtcaaagtattttcgtttgtcaataataactatatataatataatatccatacttaccgaaagggggcctcttttttgctcatatcataacattttatttcatgattcgttcaaaaaaaaaaaaaaatcacgcatcttaagtttatcctacatttgcatatcataagctatgaaccatgaataaacatttgattattgtttaataactctcttctcctattctcacctcactataatggaaacaagggtataattctgattattctcattttgttcttttcaggtataaaggtgctcttaaaagaatggcaagcaagggtgttgatctgattcctgactgtgatgcagttgaagcatctgaagctgacattgagattaaaattaaaaccttggattcacaaacttacactttaaaagttgataaacaggtaatgtttctaattgccctttgtgcaattccttaaaaatctagtttcaggtcttaatgatcgactcttaaatgattacagagacactttctatcagtatactgatgagctgacagttacatatcaatgaaaaaggaaaaggaaagagaagatgaattttaggaaacacagggatacttttactagttacatttccttgagtataaattttcaattgttgcaattggaaagtggtcttgtttctctagtttatgtgtcgttatgcttgtggcagcttgagatggctttctttgatagtattacaattaacaatatttggtacatcacaacacgtgtgccagcacttacatatatttgttgaagtttcaaagctttataagagcattggcatctggttttacttacagtaaattgtatacgagtaagagttttaacagtcaagggcacaaggcattgatgttattgacattttcttctcttcctgcaggtgccagttcctgctttgaaagagcagattgcttctgtcactggtgtgttatcagagcaacaaagacttatatgtcgcgggaaagtcctaaaggatgaccaacttctctctgcttaccgtatcctcgtttttctgtgtttccaactatgaaaacgttggtgtttcattgctgtacttcctatttgggtgtttataatttgctcatggagttggctttaatggcagcatttaaaatctttttaaattgtatattatatgtcctttgtcctgctctttttattttttgggtggtccttgtaacttctggtactcagagatgtcttaaaaaaaacccactttacaggaatgccaaaatctgtttgctattatagcttctcttatttttaattgttgtactctcccattgaaatgatttcttttacttaacaagaattagatgtcgaagatggtcacactttacatttggttgtaagacagccttattcatcgccacctgagggtttattgaatcatccaggtttgataacttaaaatcattttttggcacttgtaataattgcacatctttgtgtgttcaaccatacatacatattgtcacccattcttatctttctttattctggaagggaaatataaatgagtggcttagcacattgatggattaactaacaaaggtaattatttgcagccactgatcctgcttcaagcacaagtcgtagtcacagtactcatatagcacccggtgtagtaattgagacttttagtttgcctgtccaaggagatggagctccaccagaaatcagtcgggtgagaaaccttcttagctttaatagaaatagctttgctgagatctacataaaagattctaatctctattggtgcaattatgtctcatctcatattgatgaatttatttattctttctatgtggacagattctatctgctgttctcgggtcaataggtatttcaaatgttggaagtagcaatgaagggatggacaacagggtaaatattaaacttcctaagatgaccattccagcctgatggttaatttaagtgtgtattttatgattatcagtgatcatgtttgatgatacattgtctttgtaatagcagcatcaatgatcattttttatgatacattgctactttgtaatacaagcacaaccacccacacacacacacacacaaataaacacatacaaatagatgataaattggagtacctatctgtgtgaaatataaggcatgtcttcacttgatgaaatgctggggccatcttatagatggaagaaagtttattggtcatgttctggattttaacttattttagggacaaacacacccatgtgtacatagtacatacacacgcttatgcatttgaacagttgttgagaactgatagaaacatttaagccttaatcttgatttatttttttcggttggtgattctatactaaaggaacatggccctcaaagatctgaaagaacttcaggtgctagtagtttcttagattctctccatcttcaatctgatcaaagtggttcaaggatggcatctgatcgatcacttggtattggcacctttggacattcatctgcattttctttggggtctcaactgccgcctcatgtgagttgtgaatatttttatttgctttgtttaatttttttcttaagactaattatctattcttgtttttgtaggtaattcctgattcattgacaactttgacccaatatctaagcaatatgggacgagaatttgatgccataggttaatatctgtcaccctccaaagttttctgtgtgattcttgtaagttattctgtgttgcatactgatgatttggtttttacattgtttctgtcaggaagagatggggcagacggtcgtcaagaaagtgcatccaatgtgtctgaagacacaagttctcaatctgcatcaggaacaagacgaggacttcccacacctgcatccctagcagaagtcatgctttctgcgagacaattgcttactgaacaggcctcagaaagcctacttgtgcgatctcaactctagctttattttttgatggattaattaatagtattaaagttcttattagtttgcctctgtttatttattgtgattaacatgggagacaatgttaatttccatgttattgttgccagcaacttgtgggacaattggaaaatcaagtgaatgttacagatgtgtctttaaggtcaaacattcagactagtacaatgagaagtggagcattgtttcatagcctcggtgcatttttacttgaacttggtcgcacaatgatgacattgcggttgggtgaaactccggtgagactttcctaaattctaatgtcctttgtatgacatattgtccactgtcttgtggtaaggagtgttggaaagtgctgttaggcatttgttccaagttcaaatcccccgggctcaaaaccttggggccactggggggtttttgggtgaaactgccttggcaaaagtttttcataataagctaataaataaatattgttccctgtcatactatctgacctggttttgttactctatttttatacagtctgaggctgtggtgaatgctggacctgcagtttttatatccccaactggtcctaatcccatcatggttcaggtgactatcttaagttctcttcttcacatatgtatttaatatgaaaagaaatctgctaattcaaccaactttctttagcctcttcctttccaagttggtacgagtcttggggccattcccatgggagctgtgcacgctggctctggtcttgttaatggtcttggaaatgggctcctccctaggcgtattgatatacaaatacgaagaggtattctgtaaagaaactctcatcccatgctatttattataatccactctattttatttgtattctaattggttcatattttccttctatttctaaggctcgtcaacatccgcagccaatgttaatcgccaggaacaagggaatggccagcaaccttctgggcaacaaaatccagcaacaagcgctggtggagaaattcctgtcaatcaaggaactgcgagggtctcagatgcacctggttttgcaggagaatcagctgtacgggtggtaccactcaggaccatggttgcagcagtacctggtccttttggtcgtctaccaccatcagactcatcaggtaattctatgggtttatactatcctgttcttggtagattccaacatgttgcacctgggcatttgagtggtgatcgaggagcacaggcatctggtgagcgtcatgcagctcatgctggaggcttgcatcctgagcagcagtctacagaatctgcagctcagcagcgtgcaggagattctgcaagagatggtaagatccaattcaacattttaatgaaaaataattgtcctataaaaattaagcatgtag

SEQ ID NO: 19039 - DNA, 5304 bp, Cannabis sativa
tatttaattttatcatgaaacgagacatagtggacaaaaattgataaatagatgcaaaataaatacatttcaccctttttactttaatgattaaaaaaataagaaggtggaatacatcaaatttgaacacttgaagttattcattttagaaggtgaaatacatcaaatttgcgacatataataagaaagaatttatttatttatctaatgaattttatctgtgagcatgaccccgtgaactaataacaatatgcaaagattgttaataccacgtataaaaaccttgtgagtttttattttttgctggtttttctgttctacagttacagagtcatgttccctagctacacaataattgttgcattatatttattattttgtatttataaattaattaaagaataaattagtaagtataagatttcatatttttattttcttataaattttttcacctatcaattttgaagacatttgtaactaattttttcttcttaaggtacatctcaataactcatttagaaaaatcgtacatttcaattaaaaatgattagaaaaataatagtaggcccaaagaaagaattgctcgaacccaactacacttaccaaaaacaccaaaccttttttatatgcacgcgcccgcgcgtggtactcactcaattgaagaaatttccattttcaattttttttaaataaaaataaaaaaagttttatctctttctaccacaatttcagtaaaaatcacaaattataattatttaatttaattaaaataaaaaaagaatgggccaaaggcattgtagaccacaatagtagatctaagaaagtagagagaaaagagaggcaagtgatgtttttcgggctataaataagcattacaccaccatttctcaactcgtgccgttctcttcttactaagaacacaatccaccgtaagagaagagaaccttaaaccaaacccaaatttcatttctttctttctacctcatctaaggtacgaaggaacaacactccactcttcttcttctttctcattatcttcattcttcttctgttgttgttgttattgtattcaattcagattttgaactgagatctgcttgtttagtgagtgttttgtgatacccttttggttgaatcgaactgggaattgcccattttcttgttttgtgttgtatagatctgtagatctgtagctaagatgtcagatctgtaatttaaagaataaagatccaaactttatggtttttagttagtggtgttcatttgaatctgaataatgtgttaaaagagtgttaagatccaaactttttatttattcttttctcaaaaaccaattaccaatgagttatagtaattaagatccaaactttatggttttagttagtagtgttcatttgatttctttagaatctgaaagtaatgtgttttaaagactgttaaagatccaaactttattgtttcttatctcaaaaaccaattaccaatgagttaatagcaattaagatccaataccaactaatgttatgattctttgttttgaataggtttttgtttagatttgaaatttagatcttgtgtgttgatggaaattgactgtgttgtttttgtgttcaaactgaaacagaaagatggcttcccatattgttggataccctcgtatgggtcccaagagagagctcaagtttgctttggaatcattctgggatggtaagagcagtgctgaggatttgaaaaaggttgctgctgatctcagagcatcaatctggaagcaaatgtctgctgagggtatcaagtacattcccagcaacactttcagttgttacgatcaagttcttgacaccaccgctctccttggtgctgttccatctagatatggctggaatggtggagagattgagtttgatacttatttctccatggccagaggaaatgcctctgtcccagctatggaaatgaccaagtggtttgacaccaactagtaagtagtactactcactttcatctcactatgttgctaatggttttgttttgtttgtgtattgacatgattttggttaattgatttgttcccacagccatttcattgtccctgaattgggccctgatgtcaaattctcttactcttctcacaaggccgtgaacgagtacaaggaagctaaggcggtatgttcttttgttcatttgtttgttttatgaaacattctatgacatgtttgagctttttcatatgtatagttattcatgatacaaatactttggattcatatgaacatattgtttaattggttgaacatagtttagattggaaaggagtatgtaacttgtagtttaatattatctttgaacctattgcagctcggtgttgacaccgttcccgtccttgttggccccgtgtcatacttgttgttgtccaagcctgcaaagggtgttgagaagaacttctcaactctctcccttctcagcaaaatccttccaatctacaagtaataattcgtgacctgagataaaatcatgtgcttactctctgttattatatcgatccattgtctctaatttgctcttttgttaatgcttttttcagggaagttatttctgagcttaaggcagctggtgctaccactattcagtttgatgagcccacacttgtcaaggatcttgaagctcacaagttgaatgcattcactgaagcctatgctgaacttgaatcagctgtttctggtttgaatgttattgttgtgagttactttgctgatcttccagctgaggcatacaagacccttacctcattgaagggagttaccggatttggatttgatttggttcgtggagctaagaccattgacttgattaaggctgatttccccaagggcaaatacctttttgctggagttgttgatggaaggaacatctgggctaatgatttggcctcttctcttgccacattggaatctcttgagagcattgttggcaaaggtgtttaatttatggctcttttgtcatgtcatggtgttgcatagtttaaatttgttatgatgtggtgctaatgattcttttgtttgatacagataaacttgttgtctccacctcttgctcgcttcttcacaccgctgttgacctagtcaacgagaccaagctagatgctgaaattaagtcttggttggcttttgctgctcaaaaggttgttgaggttaatgccttggccaaggctttggctggtcagaaggatgaggcgtttttctccgccaatgctgctgctcaggcttcacgaaaatcctccccaagagtcaacaatgaggctgtccaaaaggctgtgagtgcttcattgtctattctttacttatatcaaagttgtcagtgtgtgggggttcgttttgttcatttcggtgaaattttgttgtttctcaggctgctgctttgaagacctctgaccaccgccgtgcaactaacgtgagtgccagacttgatgctcaacagaagaagctcaaccttccaatcctcccaaccaccaccattggatcattcccccaaaccgttgaacttagaagggtgcgtcgtgagtacaaggccaagaagtgagtgaagctctatatctcttttattttcttataaaaagtgagttggttgtgaaacacttgttaacattgctgtgttgttaataggatttccgaggaagaatatgttaccgccatcaaggctgaaatcaagaaggttgtcgacctccaagaggatcttgacatcgatgtcttggttcacggtgaaccagaggtgagtttgatattttttcatttgcattagtagtatttttgttttggaaatcccgctaacctgttgaattttaaccagaggaacgatatggttgagtacttcggagaacaattgtcaggatttgccttcaccgtcaatggatgggtgcaatcctatggatctcgttgtgtgaagcccccaatcatctacggtgatgtcagccgccccaacccaatgaccgtcttctggtcttccaccgcacagagcatgactaagcgcccaatgaagggtatgcttaccggtccagtcaccattcttaactggtcctttgtccgtaatgaccaaccacggtatacccttttctcaaaatcgaatcttgattatcaaattgttctatatgaacatgtatctaacacaatttattaccttttccagatttgaaacttgctaccagattgctttggctatcaaggatgaagtcgaggatctcgagaaggctggagtcactgtcatccaaattgatgaggctgctttgagagaaggtttgccactaaggaaatccgaggaagctttctacttggactgggctgtccactccttcagaatcaccaacagcggtgtccaggacactacacaggtaaaaatcaaaccgaaaactttatgtcttataacttaacattttcatttgcatcaagcatttgacatgacattattatcaacacacagatccacactcacatgtgttactccaacttcaacgacatcatccactccatcattgacatggatgctgatgtgatcaccattgagaactcgcgttctgatgagaagcttctgtctgtcttccgtgagggagttaagtacggtgctggcattggccccggtgtgtatgacatccactctccaagaattccatcaaccgaggagattgctgacaggatcaacaagatgcttgctgtcctcgaaaccaacatcttgtgggttaaccccgactgtggtcttaagactcgtaagtacaccgaggttaagcccgctctcaagaacatggttgacgcagccaagctcctccgtacccagcttgccagcaccaagtgagtggtttgaaaatggttggttgttgaattggaagatgaagaagaaaaaagaaaaagtttttttttttatttgttccaaaataattgtgtgactcaaaatacttagtagggttaaaatgctctgtgagcaaatttcttttcattattttttttgtgtttttttaatattttggcatttttgaggccctgtcttctatccttttttctaaggcatcaaactgcttaatgtatttgagaagaaatatcattgtgagtttgtgcaaatttttattattgtctaatatttgtttttaatcattttatgcaaaaagatataactaaataaagacattttatcttaaaaaagaaaagagcaaattcaatacataatgagagaatggagaagcaaaaaagggtatgatcgtggaatagtgttggaaaaaataaaaaaaaaagtaataaattaatacgtaaataagatgaa

SEQ ID NO: 19040 - DNA, 4517 bp, Cannabis sativa
tagacacaattacacaatataaacattaattgatccacaattcacattaaattcaagcttaaagatatgaaaataactctaaatcttagagttatcaacgcttaactgtagaattttttcatgatgggctaccagaaaaaaagatgtaccttattgatataggtagtaccaatcactccatttaagctctcttcgactgtgtagtcccatacctacacagtcttagaatcatcacacttgacctttcccaggcagtgtgagattacacagcttacccagtatttccccttacagatcacgggactactaattgtcacactggtgtatttgatccactccttaatgtgagatcttttgtaattggtgttgtacaccattgatgagtgtacttgattttggaaactcttgctattatgtgctaattactaataaagaatccattatttttcttctactaatttcaagctaagcttcctctctgttcttgtattataatttggtttgactttaattcagtattgaatgtttgaatatttgattcttatgagttgttattaatcataacaacaacattattgtgaatttaatccacaacaaatggtaccaaagcacgggttctagtggaaggtttcaagatctacattcaaagtcttcaagaatcacattcaagcttccaagattctaattcgaaatttcaagattcagactcaaaccttcaagaaccaagtttgtaatggctaccaccaaatttgaggtggacaaattaaatggctctaatgattttagctagtggaggattaagatgaaaggttttctagttcacaaaggtatctcaaatgcattatatgatgaagctatgaatctcatagaagaaagaaagaagaagactaagattgaggtaaaggcacacagtgccatccttttgagccttggtaatgaagtgttgagagaagtatctagtgaggaaaaggcacttggtctctagaacaagttgtcatcaatctacatgaagaaatctctaacaaacaagttgtaccttaagaaaagactccatacactttggatggatgaaactatagaactaataggaaacacctagatgattttaacataatcatccttgatctcaacaatcttgctgtgaagactgagaatgaagatcaagcaatcatactactcagttatttgcctaagatgtatgagtacttcgtggacacaattttttatgaaaaggaaatacttaccatgacagaagttaaggttgctctcaactccaaggagattcaaaaatagggagatgacagaggtgagatcaatggtgaaggtctactgattgtcaagggaaaatttccaagaaatattactagagaaactagaatcactcaactggttacaaggaaaatcaatccaagacaaatccaagaggccagccaaatggatcaaatccaagaggtaacaactggaaaacagtgctactattgcaaaaaatgtcatttcagagattaatgcctagttctaaaggtaaaactgaaaagagatggccaacaaacatgacacaagaacaatggagaagcagacattgtagatggacatgagtatgttaatgtccttgtggcatccagtcttgactcaggtgaagaatgggtactagacttaggattctcattccacatgacccctaacaaggatttgttcaactcattctcagaaggaaacaacgacacagtactactgggcaacaataaatcatgtgacataaaaagaataggcactgttatgatcaagaaccatgccaactgtctgaaatcactacaacaggttaggtatgtaccagatcttaagaaaaatttattgtctattggtatgtttgataaggttggatactctattaagagtgaagatgatattatgagggtaagtcagggatcacaagaatttattaaaggccatcttcacaatggcctttacatcttggatgggaaatcagtagcaggaagtgttgcaccagcaatcaacaactcaagcaaaagttcaattaggctctagcatctcagacttggccaagtcagccagagaggacttcaaggaaaaatggaaagataagattgagttttgtgatgagtgtgtgattgggaaagcatgcaaaataaaatttagtaaaggtgagaatactactattgaaatgttatcctatgtacattatgacctatggggaccctccaaaataccaactatgggaggtgcatactactttatgaacataatagatgactataacaaaaaagtgtgggtggcccttttgaaaagcaaagaccatccccttctgactttcatcaattggagaaaactcttggaaaaccaaacatgcaacaagttcaaagtcctcagaactgataatggacttgagtattgttccaatgagttcaaagctttttgtgcaagagaaggaatcatgagacatagaactatggcgaagaaccctcaacaaaatggagttgttgagagaatgaatagaacaatcatggaaagagttagatgcttgctgctaggagcaagcttggagaggccattttggggagaggctcccataacaacatgttatctaatagataggtgttctttagtggctaacaactttaaaatacctctagagatgtggatagggaagccacccaagtttgagcatttgagagtttttggttgcacaccctacgtgcatatcagacaggataagttacaaccaaggccaatcatagggcgccacctatagaaagtgttgagcaccactagtgctcaatagcaatgctctttttatcgcatgctttcctttttttccttttttgatttgtgggttagcctttggcaatgagcactcgcattacatgctttaaaataaaaaataattaaaatatttaaatgattaaactaattaaaatatactatattaagtgttctaaacttttattttaaaatttattatgtatactctacatttataaaatattcattgttataaatatatataatattttttaatttctttatatgggaatgtttgtatacatcatttatatatttaaaattaataaaatacattaaaatttgaaaaaaaaaaaaaaacaaaaaaaaaagtaagattctggtaatgtattttaaagaaactagcgtataatgtaatataaacgtttgaggtaaaataaaaaaaaattaataatataatttagagtagagaagctgatgagagtcgatgaatttttggtgtgtgagatgtaattacaatatatctatataaaatgtgagatagagatatatgcttttaatggtgattaactaattggaaagtaatccaatctttttttctttttgaaagaaaaatactctaatagtgcctcactaattgttacataaaatcattagtacataatatgtaccatgtatccaatatttaattattagcttaagaaattagtagggtttctcaccaaatacattacccaccggatcatagttacaaatcataaatgtatctttattgtcacaaataaccctagcacaacccactttcttagtattccgccacacaatttgtgtataatggccacacattttgccatccgcgcaactattactatcgtacgagtagttattttcctcctccatccatatttttacagcatcttttggtgtccaatcagagccactacccttaaatatgttctccccgagtgtgaattggccatcctgaaaggaatgctctagctcacaatcagatttccttttcaaggcccaatcttgcgcgtatttagcaagtttagagtcccacatgagcggcatcaaccctttcttggcacgagccaagccatgcgcagccagaaactttgacttatcagctagatcatgtgaagcccctttcgtcttatcattaagataattcgatattttatcatctaaagattgttgcgagtattctattgtgcaaagaatgatgagcaacaacaatgataagaaatggggtttccccattttttttgggggaggggagtgggtttgtagggattgagattgttagacaatattgaaatattttgtaaatgttagtgtcttgataattaattacatatataggtgttttttggagggttatttttgtatgcatgacacaataagacttaatttggttgtgttgctgagatgtgtgttgactaattttgattggtgaaaaatatagtattattatttggatggttaccatgtaattacattggttataaattgttgtgatataagtctcacctccaagtcttaaccacaatcatttaaaaacttctgagctagagaattagtaaaggctaatttaagttaataattattttcttcagatagtatattgttaaatatatcttaatttaattgagtaaaatagtaaacacaactacttaagtatattttccataaaatttgataacagtcatacaaaatatagagaacccttttaggcgtaacaaattagggattat

SEQ ID NO: 19041 - DNA, 5854 bp, Cannabis sativa
  modified_base (1334)..(1336): a, c, t, g, unknown or other
  modified_base (1380)..(1382): a, c, t, g, unknown or other
  modified_base (3792)..(3803): a, c, t, g, unknown or other
cgggttactattttcttttttcttgattgggcgggttgcacttagatttttataacccgatctttacattgggttgaacaaaatataccataaaccgaccgacgtacacccctaataacaagtactttcttcaaaaaaaaaattctttacattatttaaaagttatatgtttttaatattttagtagagtttatatatacgatattcatcttacaaattgtgatccatacaaaattgtaccattaatttctaaaaaaattacacaaaatacttaaatagcattttattttttatatttttatagatttttctttctacattttcagggactgttatttttcttaaaaaaaaaacattatttttatgttgttataacattatattatgtttttacaacataaaaacaacatttttttttaaaataaccaaaaaataataatttgcatttttgtaaaaaaataataattcgtagaaagataaaaaatactttttgtcatttttgagtatttataaaataatttttttctttcatgccattaaaaatgattaccaaactacattcgtagaaggaaaatgcttatggctttagaattgtggcttgtaatttgttgggccatcttgttgatctaatagctaaatatcatgggggcaattatccagcggaggtggttgaagctcttggtgttaaggaggcacttagctggttaaaagataaggaatggaatcaagttgaagtagagactgatagcatggtaacggtccaagcaatctttagtaatcaacacatgacttttgtttttggtttgattattaatgattgtaaaagtttattatcagttttaaataatgtaagtgttcgttttattagacgatcagcaaaccgagttgttcactttgttgccaggcgctctcggtttttctctgattgtagcattcatgggaatgttgttcctaatgagcttcatgctcttttgtatgatgaatgctaaagttcaatgaagttgatatttcattttcaaaaaaaaaaaaaaactacattacaacattgtaaagtgaaacttgcatcgtttcattctttctttaccgttgactaatagtgtagcattaaaatatgtttatgtgatcgtgttatttatagttcaaataggaacttaagtcgggcttcgagcaatattgctaaacatatattatctttgtatatatatatataaatatatgttgtattgattgagtggtataatataaaatataacattgagatgtttgaattataaaagaaaaaggaaaaaaaaaaaagctccttttagtgcacaacataatttttttgtgactannngtgatttttagtcacaacaaattagtcacaataaaaaattactnnngactaaaatatagtatttaaatactagatgtcactaatttaattttaattaagacaactattgtgactaaaaataaatatagtcacaacaaactataatttttgtgaccaatatatttaaccacgggtctttaagtaataacatagaaacgataatttataattactcactacttttttattgtttgtcgcaagttttgttgtgactaaaagtaaaaaattttataatgagaatagaatttagaaataaattttagtatttttgtaatatatagaaagatgtggttatttttttacaaataaagaaaagatggaattaacatagtaactgcatgtgtttttaaaattaaatagaagcaaaaaagaacagctcaactaattttagaaaagaaaaagaaacaattacaaaaataatttaagtactgttatttataaaatttttgacattttgtttgtggtgttcttagaattctttctccacataggtgactttaagagggtggatgtattaataaacaaaccataactttttttttcttctcaaataagtctctacttagtaaatttataaataagacgtagtctttatttagaattgtaattgattaaataaattaattaatataatctacaaaataatattattccagataatgtggggatcatgaacttatataactaaactcataattagtagattcaaaatttacaaaataaatttcctaactcattaattcctcctgactccactatagatttagaattgcactcctgattacataaaacgctctatttactaagaatagatacactataaattatccattattttaatcaaaacaatcaacgatcatctatagacggtttacatcgagtagggaaaaaattactattttaccacacttcaatgtattttatccttaaaacacttagctttttataaatcatatttccgtaaactaacataattaacgaaataagagctctttcatttatatcttttagctaagctctgagaaaatcatcgtttcacttctatatagttatagaagctatatattctatttctatgattaacgctcccgctcaattacactactgtgttcccaatatataactatgggctaaccctatgggtaagcagtaacgaaagaacatgtgcaatataaatatagttaagatagccaatacaatatgggctaatcaactaagtgatgcttacttagaaaaaatattacagtaaatttataaaatctttttcacagtaaataccggtccaatctaatatatagctaatacatctgatcctaatttattttactaatgctttggaaaagatataccacttagccaagtacgttgctgattattacgttagtgtaaatctagtacactaataaatcatggacctaaaaatttgaagcatatgatcatgattattttctacagtgtagacaaccagtgacaaacctaacttagaggttatgggggttgtagccctcaccgaaaaaaattacataaaataattaaatatttttattataatttaacaattatatatcaaaattataaaatagcccccaaaataattttttataacaattaaactcttttaaattaattaaatttattaggattaattgtattttttcaattaagtaagcacatatatattatataataattaagcctccatatactaaaatttttaggtccatcactataatcatgattgtccataagttcaggatttaatatgaaccatgtaatttatattatattaattaagataaattttatttaaggcataaaactccaaccaaagaagagtacatatatttattatattagattgatataaattacttaatttttgatgactaattcataaaaactaatttaatcactacactatcttataattagaaactacaacgtgataaataaataaataaataataataataatttaaaattacaactaaaaagtttttatttttattattccgtcaaaatagaaaatattaactctttttgctcgtataataaaaataaaatcatacaaatacatgctttaataaagaaatattattataatagaacattaattgacaaaataaatattaaaagctaattaggatttttatccccaaactttaacatgcatcaaattatgtcctctgaacttttttgaccattaaaaattccttatgaactattgagattgttagatttaagggtttttgtttaatttcattcaattttactatttcagtgattgtttatgtactaaatcatgtttcccagactttgatatctaccaaatcatgcctctcgaattttttgacatatactaaatcatgccccctgaaatttcatccgtgttagacttttttttactaaaattagannnnnnnnnnnnaattcaacaattttaatagttcagaggacatttttaacgaccttaaaagttcagaaaacataatttagtacatatcaaagttcggagtaaaaatcttaattaggcaatataaattcatctagtcacagttggttttttatggtttacccgtgctagagagtggtgaaatcttgcccgttggatgtcaaaaaagaacactcccaagtaatccaacacttgccaatctcttgaggtttttcactcctcaaatttaactgaggtatttcataattggcttattaaaacaaattaaaagaagtacaaaaaaaaaagtaccatatcatataacattaaacacattaaaagtatcaataacaaatacaaaaaattatttattaggaaaaatattattaaaaaacaaaattaaaaaaaaaaaaagtaaaaaaacaaccttaaaaaaacacaaaaggacaagaaccacttgtcatttgcattcttattatatagtagatatatagatttaacaaaaataagagtatttgaatctgaggtacaatttatgtttttgattagtttaaaccacaaaaatgaaaatacaatttttatttttgaaaaatgaaaacttgtttgataactatttttatttgtttttaaataaaagtggttttactaatttcttttttcttttactcaatatagaaaaagtagtgaaagtaggatgcaaatacaaaatcattttgattaattttttttttatttcaaacatacttttgaaaaacttatcaccctaaataaatttggtttgaccaacagtaacatatttgctcacaagggatagatattctggaaaatatgtaaagccaaaaacttctggataatactgtgaaagttgtaaagtagggttgacttggtccccaattgtgtagtatatattggttttattatgcaactacaagtattaatcaattttggtatcaaaatcgaatagaaattactaccccttcccctattccaaacagctttttaagttcttaattgaaaatattttttctaatttttattaggacaaaagaaaaaaaaaatatcaacaaataaataaataaaaccctataacaatttaaaaggtgaggaatctaatcaaaagtaattagtattctaaatatgggtcagattttttatcacaacacgacatcagtatgagtacaattcaacatgaaaaagaaaaatataagattgaaaacgacacaaaacgatattataaattggtacaatatgatataaaaattatgagcttaagcatgagataacatgatgttcgaagacaggacacgtaaacacgaacagagtaatccaaaagcacaatacgttaaaaaaaaaaaaagtctaataattttgatgataaatgttatttcaaaatttgcactaataacgcgttaaaacaaagcacgacatgaatagagaaactataaagtactgcatgttaaaaatacatccacgagaatagcaataaaacccttgaaaaccaagtcctaatggctcttgtaatctcggtattaaagggaaaatattcaacaataaatgggatttagtaattaaatttttttttttttgaatggagtaattaaaatttaatattatgatgtattcattctctataaatactagcattttacatattaaaaatgatctgaaattttgtactagcatagacgttgcataaatattatgagaattattatttaaagtatttaagaaattcgattggcacattttcattcgattttgaacactttacccataaataacaacttatgaggagtaattattagggattatttcacaaatacacaaaaacaacaaaaaaaattacaaaaatacgatttcacggaattttaaatatttttatgattttttgattttatttacagaaaatacggtatttttatattgtactcttattaatttattattgattttttgttatgttaatgctattttttgttgttgttttgatattatttagatgttattttcatattacttttatgtagttttcttattgttttcgtgtt

SEQ ID NO: 19042 - DNA, 10433 bp, Cannabis sativa
gaagttcttcgattaaatctagtcattcttgaagtaaagtgtggttccaggtagggtcataagtttcttgcatattggaatgacgaactcacaaccatatgccatagagtatggagtatgccccattgaagttcttttagttgttcggtatgcctaaataactctgggaagttcttccagccaatgcacttggcaggcttgcaattcttcttcaatgtgttttttaggatcttttcgatgacctccacttgtctgtttgattgtggcctggccacagtcgaaaagcttttgataatttcatgtttagtacaaaaatcggtgaagtgatcactatcaaaatgcttattgttatcggacatgatcttatgtggaaggccaaaatgacatatggtgttcttgattacaatccaaagccttcttagaggtgaccgtgttcattgatttcacttctacacacttggtgaagtagtcaacgacaactatagggtatttaactcatcctttcccagtttgaagagaccctactaagtcaatccctcataccacaaaaggccatggactactaatgagtgctatttcagtaggtggagcctaagggaccttggtgtaacaattacattgctctcatttttggaggtagtcaatgcaatctttttcatcatgggccagaaacaccctcgccggatgatcttcttggatagacttattctagacgtgtgatctccacaaactctatcgtgtatctcgtggataaccacgctgatcttggtcctggctatgcaccataggtatggtacaaacaaccctcttatgtataatttttttctaggattacgtagatgggagcttgatattggatttttctcgcagcttctctatctatcgagagctcttcgaaacttaagaacttgtagattgggcctatccaatagttggggtggtaattgacatttaccccagcatctgggtacttagtacaatgagacgagctatggggaccaatttatgttcctctatttctatatctattgctaacttagccaacatgtcctcaaaggcattatgatccctggagacctactggatagtatatgttttaaaattctagagcagttatcgagctttggagacataagtaaccatcttttctcccttagtttgatactcccctaatatttggttcaccactaactgggagttgctgtaaacttcaatgttttcagcactgacttccttagctagatgcaaaccagtaatcactgtttcatgctctgcttcgttattggaggcgatgaacttgaattggagggcacttttgagcccttgcagtgagatttgaattattcttgctctgaaacctttcttgttaaaggctctaccaatatagattttctaaatcaccaatcctggaactagttcttttggatcgtcgttgattccgatgcattccacaatgaaatcaatgagggcttgacccttgatggatattcttagctggtactgaatataaaattgactgagctctatggcccacttaagcagtcttcctaaggattctagctgcttcatgacttggcggagagggtggttcctgagtaccttaatggcatgggcctagaagtacggtcttaacttcctttaggctatcactaaacagtaggaaagatttttttatcataggatacttggactctacgccaaataatctctcaattacgtaataaatttgaagttacccttcatttttcttgcactaatgccaactaatgacttgatctgacatgaccaaatataggtacaacgacttttttcctcaactggcttcaacaaaatgggagccctagccaaatgctcttttaatctttagaaggctttttcacactcactggttcatttgaatgttttgcttccgcgtaagatcttgagaaatggaatgcattatctgtttctttagacaaaaatctactgagagatgcaatcctcctggttaagctgcctacatcttcatgctttcttaggaagggcatatctaggagagcccgcatcttctctgggtttgctttgattcctcaaaagttgacaatgaagcctaggaatttccttaaggagactttgaaggtacatttttctggattcagcttcatactatacttttagattatcgagaaggcctctaccaaatcattattgtgctccccagtagtcttggactttactaacatgttgtcctcataaacttccatattcttccccaaattatctttcaacattttattaccaaacactgataggtagttccggcatttttgagcccaaagagcattacaaggtagcagtacacacctttgtttgtttgaaagctggtttactcttgtcttgctacatgaatttttatctgattgtagctggagtatgggtccataatactgtggagttcatacccagaggtagtgtttaacatttagtctattcgcgaaagcagaaagcaatccttcagacatgccttatttaattttgtgaagtcaatgcacattctcaatgtcctatttttcttagggaccagaactagatagcaagacaaactggttatacagtttccctgaggaaatttatcgaggttaacttgttgacttttgccttcacattttttgagcgcacctgatcaagtggtatccactttcattttcctggttgggtcggcatctgaatctatgttcaaggcatgacagattatatggggactgatacatgtcatatatgcatggctccacaccaggatgtcttggttttgcttcactgtggacataatttgttcttttattgttgggggcagaattcgtctcattttaatgactttgtggggtctgcttcactattacatacttattctacatcccccaatggttctatcattatttccacccctataaggggtctgatttatccttttcctgggctgtccctggtgctagctaggcaagtgctctaggaattgtctcttccatattttgtgagggaaatgaacatgcttgacatcttcttctatgaatatgattggaaagttcaaaatttatggcctctatgctggtgttttcactagagcacacacttccccatcctattcgagttcattgagatacctcttctgggaattgttagtacttctggcgatatgtggacctctagaaatagtcacacgtgtccatctaccggggtggagcaacacttagaggttagggattccctggtctagaagcttgtatgtttttgagtgcttgtacatttgggaccccctgagggacctaaactcccagatcttgttagtaaactgctccttgaggagggtttatggctctatgttgtctgggaatgaccagttttccttgggctaccctttgtcttattcataagattgggattctcacccactcgtggaggcgcccattctttatgagattctcgatctcatcctttaagtaatcgcattcattcatagtatttcgaatgttattatgatactcacaccttttactaggatcagttttatgcttgcctccattatacatcagagggggcttttctgtaatgaatcgtgttgcacatggttttataaaaattatctcaagtgtcgatccaatttgtatactcagaatattgggcctcatatctctttcttcctttcttcatagcttcactcagactttgaatttttccacttctcttgcttcgagactagcttacacctgattctgaaactttctcttattggttcatctggatctacctagaagccaactacatctgatctgtgccactctaaagccagagaaacttgtctgtggaagcacataccctgaggtagtgggtccatagatggtcggagttgtgtactaagttttaggaggtagaatagatagaaccaggagttgtggtgcaaatactaacattgattgagggtactagagccacccctaaagactcgagtgtaagactcttccagactgataaaaccttgggctattgccaaaaaatcaatagagtgtcggacctttatctttgcatttcattcaaaaatagggaacctacaaaaatccccgactatagggtcactaacttcatgtcatcattaaatttagtctcgactgttgcctccatcatcttctatttttagccaaatttctggtggaatagtctagtttttctcaaaaataatcttttggagatccctatactcttaactttctctgaaaggtgcttcttatagttcaaaggtgggagtgcaaactattttcttgttctcatccaattttgcattaagactaataaggaaaatagtgtagaaatccatcatgttgactacatgtgttcctaatggataaataaagatgtgcctattgctgtgattcttttcctattcatactaaaggatttttttccactcttctagaggagcgtacatagacaaaatgtccatttgaattttgtaggggcaggcttaatttgttcttgtttgagaaaaaagactgtatagcagtgtgaagaggcatagtttggactttgacaataatcgtatagatgcatgttaagtaccaaaaaagatgggctatggattttggagtgaaaattttagtccggaggggtactagattggcaaaaggatactttgggtgaattaaaaaatcatgttgaaaatggggtccaagtttagagagaatggttgtgagtataaacagccatgtgagaggccctttcatttcctgactttttggatttggaaaggatgatctttgcatctcaaggaaatgagcgattcttttgtgatgatgatgatgatgccattatatatatggaatggtatgagaagatttttagatgataatctaatgcgcatgccatggagaattggtctatagaaattaaaggtacctccaaaagtgaaacattttatttggaagatatgccactcatggattctaactaatgttgaactcaataaacgaaagttgagggtgacacctgattctgatttgtgctcaaggaaacacaaagaaggaatctttaatactctctggggtgctcagtcaataaggaactatggaaacttaatgggctaaaagatgatataatgtcttgggctcaaactgatatactctcatttgatagagattatctcacctttgggacccaaataaatttaattttttttttctactggtttcatggtatttatggtctatatgtaatagcatgaaacatgggggtgtaagccgagagggagggatgttctagattggtttggaaataatttgaatgagtttcaggcaccaaaagataaacatgtccataaagaacagtgacaaaatatacgttggcaaccacccattgaagggtgttacaaagtgaatgttgatgccagtttaaaaaatgaaactccgataggagggataggctcggtagtacctaatgcacatggtagtattatttttgctgcatcaaaatttattcaggatgatttattgctagtcacaactgagctccttacgatttgggaaggcttacagattggcattcaatgacaactccctcactttactactgaatcgaattgtagagaagcaattagcttaatgcagggagaagatgggggttgtcatgatgtggatgttattctacaggaaattcaacgttgatgaatcatgcttggattgtcttttgtgtatcgtgaggccaatatgatggctcatattttaacaaattatgctttgattaacaaaattagtactatgtgaattggggttgttctccctcgtgtcatttatgctatataaaggttgtatggccttatccttttgtaagaatgtttcagtgaatgaattacctttcaaaaaaaggatataacatgttatccataaaatatctccaatagagtgttaaacagtgtattgttatattttaccacacttaaaattaatacaattctaatggtattctaaaaaatgtaccaaatttgtaacatgctgctaacaattgtaccaaatttaacacaagatataacatttactaaatttggctcacaataaatgccactttttgatttactattatgacatgaattattataatatattaacttttaaaaactttacataaattatttaccttaataccattatttatacaataaaaaagataaaaaaaaatgtattctcaattgctcatcaataataattaatatttctttttacttattttacaaattgtgtattgaagtataattgtaaatagtgggctaaatataacacaatctcatttgttgtctcaaatttagcacaaattttatagggatttctatatcatatactaaaattttctaccctttttttttttttttaattgtgggacagaatttttttcaaaaatattgtgtactgtattaaattttcactgttgttcaaggaatattttttagttgttctacttttgtttttaattgttttattttattgttttacggttattttataaaaagacagtattattataagaattttcatgtagcaataaaattgtaaatttttactcaaaatctaatatttttttataaaaatcccaatttaaaatctgtcttatatgaaaaatattaaatgcccaacactactacataaatgtgtttacaatttaatattaattaaatctcacaaaatttaatttaaaaactatactataaaaaattgcaactactacctattaataatggtgtacatttttttcaaaaaaaataaataaataaataatggtgtacatttatacttgtgtaagtactagcagtctatcaccattatgttatcatcattttctttctttcttttctttggttgatggatgagctttcttctacacaaatacatattctaaaattcaacaactaaataaagaaacataataaaaacattagaaaaaaaatgattgaaatgaaaatgagaggctaaaatttttgggagtacaaaaagaaggagcatgcatatataaaaggtgggtttctcttatttattgtttgttctttttcttaccttgaaatttctctttcttcatatgtttgtgactttatacctactatctctttatttcatgaacttagtcctctcccatcatctccacacacttgccctcttcctcttcttcttcttctttttcttctagctaggtcttttttctgaagaaaaacaaaatattgatcttgcaaaccagtcatgaaatcattactatatgtaaatttatctatagagggagatgggtggaagaggaaaaagaaaaagagatttaatatagactatatattatatgtagtggtaatttatgggataatatagactatatattatatatatatatataatatagtttgttttagttgtgggggtggttctgaaattaccaaaaaaaaaaccctagatcctaatgagaaggttggggtttatggtagatgtatgtagctatagctgtagagattcaattctaattaaggtacttagctataggaagctagaaaagggtgggtgtgcgttgaaaaactaacatgtttttaccataaatagtgtcatttctgggtacaatctcatcatttctcagatctgatgaatatatatagtatatattttctccactatcatcatcatcatcatatagatccattccacatctttctgggattaattagatagatcttgttgtatatgtatgtagtgttttgtatacatacacatattacaatatagataagcaaaaacaagtaaagggtttggattagaaggggatataataatctatatatatctatatataaaagatgagataatatacaaactgacagaagagagtgagcacacactgacaattgtatgagtgcataccttgttgacggtttgtgctcacttctctatctgtcagcttattgcacttttatattctctctttcccctttctaattaatttgctatatatatatataaatatttattcattacttcttcttcttctctagactttttttttcttacttttataatgtatgtatagtagtatatgtatatatatgttcttagctagctcttcttcttttttcttttttgttttttgttcatattatataaatatttgactgaatatggatctgtgtgttttcttctttctatttctattggctatatagctttaagatcagtagttttcaacacctttatctcacaataaatttttggttggtttcagtccaatattgtccctttaatttctatttgtttttgttgatagaaatataaaaaacaaaagaagaaaaacaagtactgaattggctttaatggcggctgctgctcctttagagagagataatatagcaatgtggtgatagtctagtctgatgacacatatatttcattgatcatatccttttgacacatcacccccttatatatatatatgatcttatctctataactttatctttcctttttatttttcttcacacacatcaatgccagaatttattagattttcttttttaatgtttgcacatgatatgatttttcaacagaaaatatagttaattttgtgctttccataaataatgaacaaattattaatagcatcttttcattattttatttgtgctaaagtatatttcatgtgattgaacctagttggagaatctgtataatttgtttttgaaagattgaaaaactgttataaatttctaataaaatgtttagtggagtatttaatttattatgaagtaaattaataattattttctatatatttctatatataaaaagaaaaaaaaaaagcgtgacttttcatggtccttcctttgttgaagatataaataatatgatggattagccaggtacattaaaggtacgcctggcactgttatttatttaacggaaaaaacccttaatttattcttcacttaattctcaaaatcgcttaaaaaggaaaaacttcttctctcttttcttcttctccatgcaaagataaggtaaataaaacagttttttttttttgtgtttttatttttcaataaaaagatctttcctttgttaattaatgagctacttagatatggggcttttgattttttttttttttgttggtttatatatatatatttgatggtgaagattctatttcatggtaataatgattttttttttctgggtttccttttcttaggtgggtcaacgatcataatgataaagatggaaacttttgttagtttcctattctgggtcgcaatgaaaaagctcgtcaaagaagaaaattaccttatggaggtatgcgattaattgctcatcaccttgtttttcttttcaaatttttgattctctttctttatttgggtaaatagtaatttaattattttttgatttccttttttcgttgttgcttggaacacgaaatagattataccccatatatataatacatatatgtaaacattttcttttatatatatatgatatatgagtgtctgctgttttcactacattgcttgttagtgttttgggaggcaacgttgaaaatattttctacttctaaaatttgcagcaggttagatattcaagttctatacttttgggttcttctatttcgatcttctgattttatgtgtggtctattattacttttgatgcatgttttaagtgtgtatgtatagtataatacttgttattttattttttttttttttccagatttgatttgcataaaatttcaatatttcaatctactgtaatgtgtatgtactgaaacgaatattaattggtattaaattggattttttgtgtttgtgcagtaatttgttgaatatataattaatagaaaactgagtaattccgtgcaagaaattgattgtatgtttcgttatatatatttccctctttttctttgaagatgtgtaaaaataactctatatgtatgtataatatatattaattgtatgtatgttaaatatattatttgtcttctgttgtaattgaactcaaattatttcacaagtaatcacttactccttttacttgaattcttttgaacattcttaatttatttgattttagttcatcatatacagtgatttttctctgttggattattaaccccaataaagtatggagtatggagttgtgtttttcttttcttttcctttttggcacagctattgtaaattctttaataattcctctcatgagtattagcgattttattttatttttttcctagaattataatctagctatttctattttttgaatagaaactgattatttattcaataacgttcagccattaaaatagattttaagacaggaggagcattgagctcacgaaaaatataatccgacataaaacaagactaccttctagcaacacaatca

SEQ ID NO: 19043 - DNA, 8103 bp, Cannabis sativa
  modified_base (6760)..(6767): a, c, t, g, unknown or other
aataataatatattgctattggtacatcacaccttcaattttaacaaataatataaaaaattgttaatcaattgacatcaaaccttaaaatgctaaaacatttgttatgtatggaagtgtacaatactataaaatttcgattgatccaatatttagagtatataatattgtgttggacaacaatattctattaactgcattaatcaatatacatcaaaatgatatatactagctagtaacatggtaccggcttaaatctaattttgtttttttttttttttctgcattttcctctagtcagctcgcaacaccttcataggtgacgagggaagtaggggagtgtcgggcggtgagaggcgaagagtttctataggtgttgacatcattcacggtccatctctgcttttcctcgacgagccaacctcggggttggactcaaccagtgctcacagcgtcatagaaaaagttcacgacatagcacgatcgggcagcaccgtgatcctcaccattcaccaaccctcctcacgaatcgtgcagcttcttgaccaccttatagttttggctcgagggcaactcatgtttcaaggcccacccaaggatgtcactggctacctcaatagaatggggcgaaaagtgcctaatggagagagctccttagagaatcttatagatgttattcaagagtatgatcagtctgaattgggagttgaggctgtagctgaatttgcgcgcacgggcgtgaaacccgccaagttaagggaaatagatgtttcggttatttcaacagtagtgccatcatcaccaacagcactacctcgccgagggagtcgtgatggtgttgcgaggggaggcaataaaaggcttcacttgcatgctagtaaagataatgcttcggattttgatcgtagtgtgaggagcccttataataataattccacgtcaaggtcgtgggctgctagccatagtggtgtggtggagaaactaaagtttactccacctcggcccaagaatactgctcatcaaaaagctgcaggcaaccctatgaggtaataattaagcagtacaataaattgaaaataaattaaagaaatatttttaaagattctttttcttttggatatttggagaagaaagaaaatggaagttgagatctgttattttaaggagaaatctagtttactatataacacaactttatcatgcccttaaaaatatatgacattagagaaacgttaaaagaaactttagcattacaatgtcatgtcgtttttttgaatactatttgaaaatcaaacaataatatataaaataggtaacttttattttgttaggcatttgtgcttagttatactcttatcaatcaatgcatatttcagtaacttattttaaccaattcctagcttaatttcctagagtttgactagtaaagtaacaaaaacaaaattgtagtgctaattatgaaatttcagtaactgatttttcatcatatatatttacatgtattttcaaatgatgatgatgattatcatcatatctaaaatgtacaaagatttcatgcatgcaccatttacacatctagatatttccacacaatgaacatatacaagcaataattatatgagatagggaataagttacaattaattaattgtgtgttttttcagttcatcaccgggatattacgcctactcaagcgagatcctaccaggcacaccaaccccacacagcagtgactacacagtaaacgagaacgattacatgacaccaggtgtgctagacagctccatcatcaactacggtcccaaattctcaaactcattcttcccagaaacatggaccttaatccgccgcaacttcatcaacatccgcagaacaccagaactcttcctatcacgactcgtggtcctaaccgtcatgggtttcatgatggccacaatgttcaaagacccaccaaaaacactccaaggcataacaaacagaatcagtttcttcatcttcacagtatgtctcttcttcttctcctcaaacgacgccgtcccagccttcattcaagaacgcttcgtcttcgttcgcgaaacctcttacaatgcctaccgcgcctcttcctacaccatagccggcctcataacctaccttccctttcttgctctccaagcactcgtctacgctctcatcgtctggttcgcccttaaactcgacggcccttttctctatttctacattgttctctacgttgctttgctctccaccaattcttttgtcgtcttcgttagctcaatcgtgcccaactacatattgggttacgcggctgtgatagctttcacagctctgtttttcttgttttgtgggtattttttgaacagtcatgatattcctgtttactggaaatggatgaataagatctcaaccatgacttatccttacgaaggtctgctgatgaatcagtaccagaacaccgtcgtgtttggaatcaatccgagtgatgggacacctgtgaatggacagagtatattgaagagtctcgggattgatagtgatttaggatctaataagaagtgggaaaatgttgtcataatgttgggttgggctgtgctttacagggttttgttttacttggttcttcgttttgcgtctaagaaccagagaacgtaagagaaatagatataatgagagaattatatacttgaaaattttattttatataggtcgacaaatttatgagctttttactttagggtttggctatttgatattatttttttttcttcatgaaatcatcagcttattaccaatgatcgcctattaaattttgaaatcgatgtttttaatttaacattcatattcatatatcattatgtggagaagatgcttcgatttcaagtattttaaaagataattaaaataatctttcaaaagaaagaagataattaaaataaaaccaattatataagacaattttaaaatttatttaaatgaagtaatactttttttactttctattttacaactatttctaaggaaaagttaatccatcaattaagtatgtgttttacatatcacttaaaatatcgataattaatcattaagaaatttctattaatttacaacgaattcttttgtgcaagcacagtttgaccaaataagggatatgatcaagggcttaattagctagttcgaaaccttcagaccttgagctagactggtcaaaaggatcaccattatcgacatacataaatgctttgcccttgcccaagtttaagataccggtatggaagatgtattataccgagcgagaagatccactggcacacatcaagtactttgagatgcagctcgatctccagaaggttactggtgatgtgcggtgtcgcatattgtcagcaacttttttcgaaacaactcaataatggtactttaagcttgccccatgaagattcaattcttaaaatgagttttcacgagaatgctacactcaactcttttcctcaaggcttataccatcacaactagaagagcttgtcaaagtcaaacaatgacaaggagaacctttgaaggattacatccagaggttcatggccgaggccaccaaggtcaaaggccttacagaagaaggtcgatatacggccatactggggggcatccttccattgagtgaattctgaaaagatatctagaggatctcaactaacaacatgaaagagtttctcgatagagctaacgactttatcaaactaaaagaagctatttgacaagcccagacaaggcaagtcagcaatagtcagacacaaagtatcctacaaccccatgacttgccaggcgcacaggtagataccagcaactctacccaaacctccggtggtaagaacactagtagcaagcgcaacaacaaacaattctggaagaaatagtggcaaaaaggagaagtttaacacttcttccacgtcagttctaggcaataaatcccctgttgaggttctattcaaaattcaacctgattatacagcctttaaaacatttaggtgtaggtgctttcccaaaatcagaccatacaatagcttgagtataggtcaacaccatgcatcttcttgggttatagcctaaaccacaaaggatacaagtgtctaaatacaaatgggaaattgtatatctctagggatattgtctttgaggaattatcatttccctatgaaacactctgtcaaaaaacatcttccacataaaaacaagacaagtttccaagtgtttctgctatagtccccacctgttctcatcatcattgttcatattccatgtctgatctgataagtcgacaacttgagattgatcaaaatgctttaacaaatactgtcacaccttatttggtttctgctactaatagttggctgccaagttaaccatttgtttttgatgtaggacaatcttttggacagcatgctgaaatatcagatgccacaacgtctactccacttccttcaccaacaggaacatgtggagtaggctcttcctcacataacagaactggtccctggtccttaaattgattagcatttggacacacacattccaaatacttttgagacttctggtgcaaccactgtccaagttgcagacaatcctagtattgttaatagtgccagcatatccgtcatagataacactgatattgctcctggttctgcaactcacaaggctgctgtttctggctatcacaaacctccaaaccagaacaacacacacaacatcagaaccagatccaagtctggtatacacaagcctaaagccctattagttaccagggaaccaacatcacttcaagaaacactcagtcagattgtttggaacaaaggtatgaatgatgaggttttagcttttgtcagaaaaaaaaaaacttatactcttgtcaaatcactattaggaaggaaagcaattggttataaatgggtatacaagatcaaggaaaatccagatggatcagtccttgaacataaggcaaggcttgttgctaaggggtttcatcaagaacacgaatttgactttactaagacttttagtccagtagttaaacctgtcattattagggtagttttgacaattgctttgacaaaaggatggcttattagacaacttgatgtcaataatgcctttctcaatggagacttacaagaataggtgtacatgatgcaacctccaaggtttgaggtccctgacaagatagatctagtatgcaaattaaacaaagctctctatggccttaatcaagcccctagagcatggtttgataagctttaatactcttgagcacttgaccagttggtgatgcaattggcaagtgaacaacgagtcttggttgatgactcaagcttgtgggcttgatagaagcggctatgacacttctttagatcttctatcattctagtccttcttccacatgagatcctatttttcctaactccatgtagcaccactatccaatgaaaaaaatcctgctctgtggagatgaacaataaggaatgtgtcccttggtttcacttcatccaagtctaatcactcactgtttattctacatacttctaattctgttacacttatattagtctatgttgatgatatattaatcacatgaagtgatcaaactgtagtggaagctattattacagctcttaatagtcagattgctatgaaagatctaggccctctcacatacttccttggtattgaagtgacataaactaatacatgtattcatttgtcacatgccaaatatgctaaaaatttgcttgttaaggctcaaatgagtaatgccaagcttgtatggttgtacctactccaatgacaagtggtattcgtttatcagttgactaaagagaaccattacaagatgttcaactgtatatgtcagttgttggagccctgtaatatctgaccatcacaaggcctgaactttccttcagtgtaaataaggtttgccaatttatgcaaaaacctttgtctacacattgttcagctgttaaaagaatacttcgttacataagtggtacaatagagtatgggctgcatctgcaaaaaaccagatactcttgagcttgtagcctagtgtgatgcagactgggcctcagacccagataatagaagatcaactacatggtttgatattttccttggctcaaatatgattgcttggaaaagcaaaaaagcaagaccatatcttgatctagcactgaagctgagtataaaagtgctgctagtgttacagctgaattgacttagttgcggtatctgctctctaaacttcgaattcaactctctcaacttcctactatatggtgcgataatctaagtaccatcatgctcacccagaattctgtgctttactaaagaacataacatattgagctcgacctgtatttcatcagagaaaaggtgcttaataaaactgtccagatcaaacatctctctgcctatgatcatttggcagatgggctaattaaagccatatcgagtcaaagatttaccgagttcagacataaacttaaaattgaagatcgttcaattatgagtttgaggggaggtgttgaagacggttaatatagttagaggttattaaagtttgttaagcacgtgtcaattatgtcctattgagtttgttatagattctgttattgaatcatttgtaatatagtgctagctatttggttttatttttttttaataatacttatgtgcagattaatacttataaattagggtaaatactattttnnnnnnnntgttttgcaaaagttactgattggactctgtattttgttaaatgacaaaatggactatgtattatccaaaatggtaaaaatatgaccctaagcttaatttattttgacaactttttttttaatgtagccaacttgaagacaattcttaatacgaacagatattaaaaatgtaaacagtttttgttataacacttttagatcggattataattaaattttattttagcaaaaaataaattcaagatcctatttgtactattttagaaagtacatggtccattttatcatttaacaaaataaaaaatttaattagtaacttttgcagtccaaattttaccctaaaaattataacatattaattatattctagtactttttagaattagttggtagaatttgtctccacatttgatattaaagtgtaaattaatgcattaattcatattttattaattaattaaatcacccgaatgacaacaatttgatgaaaaattaatgaatatttttggagaaataaataaaaatgattaagatattggccctttgtgagagagagatagatcagaaaatgattactccgattgcactttggaatatgccaagctctcagttagaatcgtcaatatatatatatatatatatatgtcacacatttatatatatttattatatatatccacacctattaaactttaatatataatatttgtttgtccattaataatttcaaatctttctctatatataaatatatgagaaatgttagacctaacaccatttatatatcaatttaactaataacttttagagaatattattagccaattataagacgacacatctagaagatactaaatactactggtgcttaatagtaatgcgctaaatatctattctaattctatacaaaatattactatgtaacaaaatttttaatttaacggtgttttttttggtttcctaggttaattttaatataatatcttattacttaacaaaatatttttttattaattttataatattattatatatattgaaaaatacaaaattaggtggataaaaattatataaatattttatataaaataattttaatttaaatttaaaatacttaaaatattataaattttagggaaaattacatgtggacacgtttttttccatttaattctaataataacgttactttttaaattattgaatataccgttagttttaccgtttttccattttattctatttctttatgtttggcttgttgagcacgtttagtggatgaggggggctgacgttagtgtcagttgaatgggatggagggcatgtcaaagtgggc

SEQ ID NO: 19044 - DNA, 2433 bp, Cannabis sativa
ttttttttcttttttgaaaataaaaattatatatatatatttgtttctcatattcacgtgttggtatgccatttagagatggtgggagtgtactggggggcgttcttaacaggtttgttctcttatgggttggctagatgtgatcagaacctctgtgttccttttcatgataacgttaagctaattactctctctttctctctcttctttctctcaagcccgtggtcatacagttcgtcaagtaataataataataataataataataatagtactatataacactactactactactctcatttttggtagtatcagtggggaaccaattaaagtttttgggaattaactttatttttattttggaaaattaaagaggagaaacaaaagtgggaattttcattaatgttttggtcaaatatttctgaaaaaacaaattgtataatcaggcgtttcaatattacttcttttgcattcaatgcatttagactgtaattaataatgaaatggctatagcttttaattttcatgtgtatatttttaggcttgattgttcacgtttctttgcatatatatatatatatactacatttctcttattattgcatttattgaacaacttacaggtcctgaaaatggtaagctatatatatttcgttgattgaatcttgttattaaattctatgcatcatgatttagactagtcattaattccaatcacatttctcttattaattcttcctatctttcacaaaatttctcctcaatacatatttattgtttcctcaaatatatatattcacgtgttaccaaaaactcactataacctttgtttcattaatcgtctgcattaaatgtaatacgtacgtacatatacttgtatttttttcttttttccaacttttcgatttatattttcttttacatttgtcggtgaagttgtccaaattaatcaatggaacatttgaaaattttcacactatatatatacgtccttatttttccttcatgacattcattacaaaaaataataatttaaattgcatattgtgttctattgaattttagaataatgtgggggccagaaattttctgatgagattattattattattattattatttcaatcgtttcctataaataatattcgatcacgagatgagcaaagcaaagctgttctttcttatctctatatactctaataattgtccttctatcaatacaacttttatgtgtcaattttctttagttcatacttattattattattattaataatgatattaaaattgaattatgtgatatttttgttttaatattataggagagacagcttcatcacacatagggctttctgcgacgcactggcgcaagagagcgcgagacaccctccaaatttgagcgcaataagtgctaatttgtacggaggaagcaatgcaacaagtttgggattatcacaacttggtcctcatcatcaattctcagctttacaagaccaaactcaccaaactacaggagatatgttacgcctcggaggcggtgggggaggcgcctcccatcatcggtcggctcatttacctcaggctccgtcttcggggcaattcgaacacggccacattctctcgcctacttcgtttcgggctcagcaacagcagcaacagacaccgggtgggttctttatgacagctgaaccgaaccaacagcagcaacagcagcattaccatcatcaagatgatcatcatcatagccatcatcatcatcatcaatctcagcatggtttcttgcctaataagccttttcatggtcttatgcagttctctgaaattcaatctaatgcaaacaacgtcaacccttcttcaggtggtaattatatattatttacttctctattagcatttaaaatagcatagtggcatagtattaatttagtaaatataatttattttgaatggacatatattgttacttattattttatttaattgatttcaataatacattaatccaattaccaaaactatatccaattacttaaatgcaatttaatatgatcatatatggtattattttgtagagcattaggcaccactcctaattatattactgatttttttttattgctgtagttttataattgtgtaattatattattcaggcctattgatttccaatcatttcaataccgaaaacggcacatctggcggcggcggaagtggtagtggcggcggaagtggtggtgatcagggaacaaatatattttccggacaaattgtaacaggcgatcaaataaactcaagtccagtctcatcactctacagcaattcagtccagaacaaccacgcagttgcggcggcggctcacatgtcagccacggctttactccaaaaagcggctcaaatgggctcaacatccacaacaaacaacacagcttc

SEQ ID NO: 19045 - DNA, 3953 bp, Cannabis sativa
aaccacgtaaaaatccttctctcgttttcttacagctcaatattataatcatattttagtagttgccgaaaatctcggtcaacaattttaaaaaaatacataaaaatatttttattaatataataatgtaaatcaatataaaaatatttaaaattaatgaaaaactaaataaataaataaatattgttatttaagagtaaagattttatgttttcataaaaataaaactttagggataaatttgttaaaaaataaagtttgagaattaatttactaaaatttatataatttaaggattactttatcaaaagataaatttagggacctgtcaaaatttatataattcaagaacctgaatacaaataagcagaaataacttttgtgacgtcgtatacgtaagcccaaagtcaaacaagagcagggtaagaagtagaagaagaagaaggaggtgaaggaaaagggatacccagggagtttgagagagagttatggggcagtgcgtgtcttgcttagacgaagagaagaagcaacaaaggaaagaagaggaaaggttagccgctgccgaagttcgtgccagagctgccgaagctgctgaaaaacggtttctttccctctaattctactcctatctttattaatcaaatttttttaatttgatatcagttttttaaaaccattaaattcagaacttttttctgtagtctcaccgtttgcgttaaccaaaagggtctatgactttccccaatttagggattttaatatttataatagacatatacatatacgtgtatgtatatatgtactgctgatatatgagttttgttagaacacattatttttattagccattgatcatccatgtttaattatttcgtaaatggattcactaaaataatttagtaaatgaaattatttcctacaatcccaattatctgtctttagggtaaattattaagatagtaattgtttcaaaaaaataccgagcttctttataagtaatggatcattgtttggcttgttgaatttggtgttgaccctttttagcaagccttcccaaacactatattccttaattgctcaaattttcatttgttctataatatctttgtcttaatttatttgattcatgatggattatggatacatcatttaagtacagtttaatatgctctggctcgaattctgcctactttaaattcaggacttgctccattttgcaactcttttgtggattagtctagaaacaaaaactaccacataaaagtgctaacgcttagtatcttagatgcaaatatatagtcatcatgtggctttgactggaattttctctaagcattttcttttaatggcggagtagatgttattctattttatttattttacgaatttttacctttaattttcttaaaatcataacttcaggcaggagcagtttgaaaaatctgcagcaggaagagctgcacgtgcacagcagcagagtcttgcaaagcaagctttaaacagtaacaaaggggaaccagtgttaaaggttttattacttcttgcactaatatgtctaatgttttagctctgaaggtccttagtactttccaactctgttatattgttatcttaagtaagatcttgacattgatatagaacaaaaaaagctatgattttgatatgcttaacagtacttgcaactatatattgtttgaggaaaacagatgctctcggttttgactattttgttcgtttgtcttgcgttgtaaaatgcagtggcagatgggtggttcttaagtatcgtttctgtccagttcaacaacggcttattgtaagttcttgaatattttttctaccttattgaatctaattactcagtgattagacatttagttatgtaaatgtttgtcttaaatgatttcatgatatatttatagagtattatatcataggttgagattgtaaattgatctactgaatgaacaaatagatttgctgtattatgacttttaggaattggttgtttagttttttcaaaaaaatagaaaaaaaaaaaaagaacaagaaaaagaaaatggttgtttagttttttcaaaaaaatagaaaaaaaaaagaacaagaaaaagaaaatggttgtttagtttttcaggggttctctcagcgcagaaagaatttgtatacaggataaagcacctttaaaagcgaaaatttgatgtgttgtgtgcttgcagtgtttcaatcatgttctctgcactgccggccggctcagcaattcatacctctatctaacatccagccaagggcgataaacatttaatttgtaaattaacaaaagatgtttgtaattatatttctttattaagatcaatggtaaggctgcaatgtactttgtgcatcttttctgcgtctccaatatgtttttacgttttatttttctctgtatctctctaaatattcattggtgctcagccaccctaacaaaagccaatctgattcatcctaccatgccaccaccttccatcaccattgacacattgtcgaagcactcgtgattttttttttcttttaatgtttgaaaacccaatccttttagtattctcctcttgtacaagatttattttggttttgtttgtgttaattttcaaatttgaaaaattaatatattttttttttaataaaacgcttttgcaatattacaaagattgtctcatcgagaactttatttttaggcaattaaagatactccagcaatgtttccatgagaacttgttttttttttttttgaggtcacaaggatgctttagcgatgttcctataaaataaatttgggcgaaaaatatgctcttgcgatgctataacaatactctcatgacactatttttgagatcaaaataatgcacatgtgatgctattttgtgagaccattgttgtgatttattttttttttaagtaaaaattaagtttttaatggatatcgttgtatcatcgttttgttcaaaatctgcaaatttttagttaggaaaagaaacgtgaacacttgggcaatgaggcctaccaaaataccttaaaatagcttggtgttccaatgaggcctactaaatagaaaaaggaagattgcggtgttattgtcaaaaaagataaagttgagattgcacacttaggcaagtaggcatctctcttttgtagggagaattcaacttattcattcggtgttacttagtcttcgtaactactggatgaggatatttgtccttcaaagtgtgattaaagaggttgaaaaactttgtcggggttttctttacggtgtgaaggataatagaagtaaaatccatgtggcctcgtgggaaagagtttgccttccaaaaatgtttggtggtctcgggtttagggaggggcctaaatgtaataaagcgatccttgctaacttcgtttgggctctctcggagaagcatggaatcctttgggttacatagattcattctatctacttaaaaggtaaatccttttgggagtactccttgaaatcagattcgagttggtatgggaagaagttatgtagacttcatttgattttcagcaaatatcaaattgtgggtgctggtgctaaaggtaatttcaaagcttccattctttataacggtacccattctcaccgccaacctattctttatgacaaaactgtttggagcaagtttagtctcccaaaatacagattcttgttgtggtaagctattaacaatcaacttcttgttaattttccatgattatgagctaaccaaaaacacattaaatgctaatcttcattactcataatcatcaaccaagatctatattttatttagagcatcacaaaacaaaaataaatatacatacctcacataccatccatgagagtgataattgtcaaagaaatcgccaccaaattcctaaccttgagcaaaagcctagagaacactttgtggagctaaccc

SEQ ID NO: 19046 - DNA, 1781 bp, Cannabis sativa
  modified_base (1456)..(1459): a, c, t, g, unknown or other
  modified_base (1598)..(1607): a, c, t, g, unknown or other
aaaaaaaatcatcgaccggtggtggtagcagttgctatcaccgtcgtagtcatcgtcagtccatcgatcggtgatcaaatccttcgatggatgcgaatttcttatgcaatagttcaactctcaatcctgaaagcgattggtgtctaaagggaaaagaattgaattacattgttgtttgtttcaaacaaagaattacccaaaaaaatggattgtggcaagttgatagtggtaacaatgtatcatttaagttattcataattcaattagccttaatcatttgcgttaatcgtctcttaatctctttctttagactccttcgtcttcctcgaattgccgccgaaattctcggcggcacattgataggttcgagtggaatcgctcgaaccccaattggattcaaattccttttccctcaaagtggggttatgattttagagactgttgctcatttagggttaatattttacatgtttttagttggattagaaattgatattagacccatttcaaaaacccccaaaaaggccttaatcatcgccgccgccggatttcttctcccttttccggtcggttacgctttacactacatgttcgtcggaaacgccatggattccggtccaatagcagctaaatacggtccaattttttggggaatagctctctccacaacaaatttcccagatctagctcaagtactcgaagacatgaagctcctccactccgaaatcggccgaacagccctttcagccgccgccgtaacagacgttttctcatggataattctcgtcgtaactctctcaatcgtgaaaggagttcacgttaacacaatcatatttggttcaatcttcttgatcttcaacgtaacaacagtccgaccgatcctccactggattctcagacgtaaacaaaaccaggaagaagattacaacatctacttcgtgttgaccggagtagtattattcggttacataacagattcgctaggacttcactccataattgggggtttcgtgttcggattgattatgccgaaacagaaagagctgaaaacgattctgatggagagaattgaagatttcgtttcggggataatgattccgctgttcttcttgatcgttgggttgagaacgaatcgtcaagatgttttcgaaggacaatttgggatttggaggattgttggggttgttgttgttgggttttgggttaagatatttagtacattggttagtgctgtttggttgaatgagatgagttttcgtgatggtttggctttgggtttgcttatgaataccaaaggcatgctttcattgattgttattagtgctgctcgcaacttcaaggtacttttccctaactatagtcttaagtaaatagtgacataagtattcaaagttttacgtttgtaagcggtataaactcaaggattttttttagtagcataagtacccaatgtttnnnnaactgtaattttcttccagtttcatcaatacagactggagcctctactgaaaaaaatagagaaaaattacagttttacaaacattgagtacttatgctactaaaaaaatcattgggtttatgccacttacaaactcaannnnnnnnnnacttatgccgctatttaccctattcttgatttttattttgattatatataattttgattaattttatgatgtactctcttaaaataaatgtattgatgtaccatctacttgtttcgatatctagatgaattttttagtctattttttttttatattcatgtacgttatagctat

SEQ ID NO: 19047 - DNA, 6931 bp, Cannabis sativa
  modified_base (6263)..(6300): a, c, t, g, unknown or other
ctttccatttccattccgggagatccagtggctgcaacaaacctacaggcctttggtgcttagccttcacttgctgacaagttaaacattttgcaacatattcagctatatcattcttcattccaggccaccaaaacatggccttaagatcttggtacatcttcattgttcccggatgaactaagtaaggagtcgtatgagactcatttaaaatttctcttttaatgtcatcatccataggcacacaaacacggttcataaaccgtagcatccctatatcatccactgtaaagtcactagtctttccagccgaaatcctatcttgggatttcactaactctagatcttgcaattgtttgtgcttctttaattcattctatctaaaaaaagagagagtagattgcagggtaatgttagccaactgccccacaataaactcaatcctagctcgggtcatctcatatgccaactgtttggaaatctgcttcactgcattcatcttactctttccttttcctgctcaggggcatcaacctacaatgttggccttcccaagatgataaagaatctcactcataatcgtttaccaactcaagccaatgtctttgtctcatgttcaggtctttctgggtgaagaagtatttcaaacttttatgatcagtgtaaatctcacatttctcgccatataagtaatgtcgccaaatcttcagcgcaaatagtactgctgggagttctaggtcgtgactaggatacctctgctcatactcctttaactgccgagaagcataagctattacctttccagtttgcataagaacacagctcagactctgtctcgaggcatcacaataaataacaaacttttccttatctgaaggaagagttaatactggagtggtaatcaagcactgctttaactcctgaaaacttttctcacaccgatcagtccaaacaaacttcaaattctttcgggttaggtccgttaggggtactgcatcttcgagaaaccctcaacgaatcgatgataataaccagctaaacccaaaaagcttctaagttcagtagtcgattttggtgttggccaatcccgaacagcttcgatcttggccggatcaaccatgatcccatctttatccactatgtgccctaggaaagagacacgtggtaaccagaactcacacttcttaaatttagcatacagcttgtgatctcgttcttctgactcagaataaaccagaatatgatcaataaacactatcacacatttgtccatgtaattcttgaatacccgattcataagatccataaatgacgttggggcattggtgagtccaaatgacatcaccagaaactcataatgtccataccgagtacggaacgcaatcttcgggacatcttctcgtcaatagagattggcgaggagatggcatctttggcgtgaagataacttctcaagtgcgaatgtgacatatggtaagaagagaagccttttttggcaagaaagttgcctagctataagggtgcctagcgagaaggtggccaggtgaaaagatgtgcttgagccaggtgtaaagcttgtcttggcatgtatcattctgacctcttcatcaaatgtattaggagttatgtcttaaaaagttgtgaatacattttaattattaaaaaaaagaataatttcattatatttgattattgaattatttaaaatttataatatataaatatgtataaaatttatatcatttacgaggatgtgatcttataagagtggaagagaattaagatcacatacaattaatatatttatcaacaacatattaaagtttagaatctttaatcaatagttgctagaacaatttattaagcatgttattcagtgcaagcaagttagatttaaattgttaatatatgtgattgcaggacgtattaaaattatgatcatattacttagatatagaatcttgacttttctaatggagattgattctctttcattgttaattctagaactaaaaaattatacacaaatttagaattaatttgaatgaacttttgcttgtgaataaatagtactagaagataaagagataattagaatagtaaaacaataatttgaccaattctaattattaattattaataggagtacataactacttatattgattatatcaataaactaatattaatgaacttaataatataattctataataactaatagtgtaattttatatttatagcggactaataataaaattaataaataaaattattatattaaaaacttcaataaatagtttggtatattagagtttagtattgtaggttctaaattgcttgtatactacattaccaagggtatggatgttacaaaataaaagataatgataatttattttgtgggacaaaatggtttttatttctttaaaaataaataatttatcttaaatttaatattaaataaattagaaaaacactattgtctggacaaaacagtagtggcgtcacacaattagtttaattttggattatttaaattcaaatattaaatatttatttaaatttaaatttaaaagcttgattatagatatttcaattgtgatattctctctaaacaattgagaaattttcttactggattattaaatataattatttattttaaaaaaactaaatttaaaataatatcaataagaaaaatcagttatgataattatttaaatattataatttttttatttcatatttaataaaaaaaaaattactaattaattttatcttaacctaaatagtaattttattagtagtacggtagatttagggcttacttgtattactcaatattttccatcctagaaagaattattgctaatgtgcttagactaaacgagatcctcattattttgtgaatcttattaacccaaattaaagtgtgagcttctcttttattattttttaagttaattaagatttttaccgttaaactttaacatgtattaaatcatgcccgctgaatttttttagttgttaaaaatttttcttgatctattgagatggttagatttaaagacttttgtctaattaattattgttcatgtactaaactatgctccagactttgatatctaccaaatcatgtcctcgaactttaacatatgtactaaatcatacctcctgaactttcatccatattacactttttttactaaaattaaacaagtctttaaatccaacaatctcaatagttcagggggtgtttttaacgatcttaaaagctcaagggacatgatacatatcaaagttcgggagtaaaaatcttaattagcctattttctaacatgttggataagaagagatcgaaataaatacaaaaataaaaatatgacccttaataggctacatatggtatttttacatggattatcttggagttcggcataattaaccgtaaaactaacaaaatgatggcttcagttggggtagctttgggattttgccttgcagaatttcgaggttaacagaataatctctttttagagatgtaattttggatgtataacttaaaattgacacgtccactcctataggactggaaagaaaaaaagacttaagggaaataaagttaacttagaaaagactttctttgttcttttgcatttgatattttgatgtttccatagaatattttaaaacccataatagttcaaaataaagcatacaaaaatcccctcaaaaacagagcaaattatactctcctatcttatgtaattttcagcagaaaataagaatctatctaagagtgaaactcgaaaaaaaaaaaaaaaagacttgttcttgaagcaggcaatattgcgaactcaggctttacatcaccattccgccatcaattgtaaaaacctaaaatgaaagaacacaaatgcatatcaccttttctggacaagctatttttctttttggctacaagtgtttcggaagttgcaagtaaaggattgtacctgtccagtaatataactagctgcagagttaagtgccaagaattctaccagtccagctacttcctcaggttgaccatatcgtcctgtgagagtgattaaaagcttaatcgtatcctaatttgactgttataactataaaaaatgcaggaatttatttagctcacctaggggaatgatctccaagatcttcttttctatgtcttctccaagtttggaagtcatatcggatgcaataaaaccaggagctacaacattgacctatgaaaaagaaggatttattatttgcttcgaggtatatcataatcaagaacaagaaacttagaatagaaatgtttctcccaatacaatttataatttgatcctagattacttacattaatattcctgctggcatattcttttgcaacggacttggtgaaaccaatcacaccagctttcgcagcactgtagttcgcttgaccggcatttccagccagaccaataacagatgctatattcacaattctcccctgtaaaagaaaagactatataatgaactaagggagtgcagaaagggaaaaaaaaaagcacaaaatgtaagaaaaatcattctgagactaaaaattaaacctctcatctttgtgaggtgccaaattgtcattaaaaggaaaatttatatatttggggggttcgaatttgtgacaaaatattctgcttaaaaaatcttcagacttaccttcctctttttcatcattattttagctgcagcctgtttaagagaagaaagttagacggaataaacttcattttcatacatcggaccaccactcttgttcttttagggaaaaaaaatagaaaaggtagtacaaaaataaaaattgttgcacacctgagtgcaaagaaagacaccggtaagatttagatcaatcacatcttgccactgggctttcttcattctcatcaataatgcatccctagttattcctacaaaacaacttatacagcaaagtcagctgaaattaaaagacaaaaaacaaaacaaaaagttgatagaaaagtgataactgcaaacctgcattattgatcaagacatcaactgttccccatgcatcaactgcctgtaaacatttaagtgagggtgagggtacctgcaaatagattttctttttttccttttatagtaaagccaaaggaggtttacttacagttttgatcatcaactctacgtcttcttcttttgagacatcaccaccaaaagtaagagcttcaccaccatgtgcctcaatctagaaaacacagtaaagtttcagaatactatctcacatgatcaacattctggaacagctttcatttatagatgtatatatttcatttttaaatgactgaaaaatagaaagaggcgcacagaaatattaaatcgatgtcaccatcaggaatgaaatggaaaagaaagaacaaactgattgaacacaaaagaatggtcaggactcagagactacaatcaaatgtcaaaatggctataaacacacctccttggaaacttcttcagcctcctttgatgaccttgcataatttacaagtacctgtaatagtaattgaagctcataaccactaacaacataaaggtaaaacaaaaaatcttccattacagtacacagcaaagtaagattctgagcatgcactagaaaatttacaagggttttatgatggccataatttataaggaagtttagaacttgttttcactcaatagataggaaactcagctacattacttcatccatagttaaaaatattgtaatctcaggacatacttgcagacacttggtaagaagccttcgagatgttatttgttaagtcttcttagttattcaactatttgttttaatttaattttgaaatgtattcaacaagccaaatataaaagtaaacacattaatttaaatgtaaagtaattatagaatattcagaacataccccattttaaagtaaaagattttaaaggatttgttttatacgccgtattaaatagtataatataatattatattaaattacagtgtatatcatataattgtataaaagtatatgaaattttgattcatatcaaaatattgtagatgtgtatatgtatatgtatacaactcaatgccaaacataattctatataaaaatatgatatataatacaatttaaaatactaactggttatttatagttactattgttcatttcacagaatcaaatttagaacgaacataataataataacaataacaataacannnnnnnnnnnnnnnnnnnnnnnnnnnnnnnnnnnnnnaacaataataataataataatgattagagaccttacaaccagatttgcccaaagtaagagcaattgttctaccgatccctctcgaagccccagtaaccacaaccacaggcccctccaaattcttagctacagaagcaacactcgattgctcaacggctgcaacctgagtcttgatacctgagaaagaaatgaaaataaatcattcaatcatgtaaaaatccaatttagattgaaaagacgtagtcagaaaactgaagaatgtaggattttaccagatgatgaaaatgaggatgaaggtgtacgttggaaagaaagaccaggaagaagctgagtcgatgatcgaaggccaccgaggagaggagaagagcagcgaaatgggcctgaaagtttagccggagctctgacaacgttgaaggcaatagtggcggccattgagaatgcgaaagcaaagtctccagaagaaaaagaggggaagattgaggaattgggaatggagggaaaacctaaagagactacattaatggcggacggagattactactgctcctacgcctagtttaaagactcacttcttcttttaatttttctttgaaacattaaggtgtttttcgaagtaattgtgtaattacta

SEQ ID NO: 19048 - DNA, 2302 bp, Cannabis sativa
aaaaaaaaaaaaacatctatactaattcaaatttcaatataactcaagtttgtgtgtatttttatttatttttttattgtaattttcaaataggtacgtacaaaatatactaaatttattttttgtttattgatgcttgatagataagtttgaagattcttcgaagttctaaattctaagttttaaactgatatataagttaaatttaaatttgattacataatttaagatttattatagtaaatattatagctaactaattttctatcccatcaaagaatatacaaattcaaattcaaaaaatcttgatttaaatattttctctctaaaacttatcaagttatgaatattttgtgatgtttttttttttttttttagtttatgaattcatatttgatatacttttaaatttgattagaccataatatatatatagtttgatttgatatactaaaagcagaaaaatcctttcaaacttatttatgattttgctcattttttatttaaattttatacatttaatatattattatttatatgaattaaattaatttactattaattattattaattgtaaaaaaaaattgtagtttgtataaaattcaaatttgtaaattatattacatacaataaaatatgatgtagtataaaatgtaataaaaaagtatgtatgtattaaatatttttataattaagtcaagtttataatctttggataggtataagaaataaattaaatttaataagagcattaggagatagggctcaatatagagttatagacgggattgagatttaataactcccatgtattttttttttaatttttttatggaactttgatttatattatgagataaaaatttaaataatatgcaaagcgccggtgatgtgatcatctacaatatttttaaatgtaataatgtaaaatacagtaatatcaataattttgaaataatataaatttatatttataataagttaatcaaataaaaatgattatttattaagtaaaaaaatagtagaatatattattagaaaaatataattaaaaatttaaatttaatataattttatgacttaattatcacttataaaatataaccgcatccgaaatgccatatattttctaattattgaatattatatcggtataatattaaacaacttacatgccaataatgaatataaaaatagtatattgtcgttcttttaggttttatgatatatactttaggtagaattggggtaattgatatccctaaattgaattatttgtctcgaaaatttcaactgaggtcccatcgaaaggatcatgaaagtatacattatatattagatttggattttagttataccccaaaaaggaaacggaaaacgagagttccgtaagtacggccgatcggtggtcaaaattattttgagttatgtagtggtttctaatttgtattcaacttataggttggttggttggttggttggttggttgacacgttttcgtcttaaattcttaatgtataaggaatcatctcaacatttcagtacgaaccttctacgaagctcactaccaaacggtacaccagtcgtatatgtttccctattcataggataatttttagtccaaatttattttataatgtggttatttaaaatattttataaatttttaaaattgttaaaattattcgtcaagaagttttaatatttttttttatggttttgatatttttttttttttttacgatttttgtgtttttatagtttttgtgtcatttattatgctttgtttttatttatttaggataattttgtagtatgattaatagataagagaagtgattcattttgtactcatcatttttattccaacgaatttttatctatttcgacatttagaaaaaaattttaatctattttttttttatatattcgtttacgttataattatttaatatgtcctacaaaattttaagaaattcgaaataatttacaatatagaaaacagtgttcaaacaatttatttcacacacgtataaaataaaaaagttacgtgtgcaacacactttttgaaccttattttcagcgtcttaaaatttttcaaatttcttaaaattttacaagttgtcttaaatagctgtaacgtacatgaccataagaaaaacgttgactaaaaaatgattttgcggatactaataaaagtacatcaatatatctattttaaggggatacattgtaaaattttcttaataattattgagaatttttaaaaaaacttgcgagaagtatttatatagtgtttct

SEQ ID NO: 19049 - DNA, 4973 bp, Cannabis sativa
atataattacctgagtcaataagtgactgcacgtagcttaatgataaaatatgaaagtttcggaaatataacttagatattatcgagaaaattacattacatatttttttttaaaattaatgcttttaatttttacccattctttcaaaatctattatgttacctcttttttcaaccattctaccaattttactcctattacttcacaatagttttaattattctctaatcaaaattttgcatctccaaataacataatctattatgtttagattatttgaaattgtgtcttgggtacaatactcataaaatgatatatatttgaattaaagtattaaaaaatgtatttgtcaacttctcccaatattagtactgtaaaaaatttggaaaaccgtaatatttatgcacaaattactcttttataaaataaaaaacagacgaggctctatcccttgtagaaaaacaaatataaatcacacaactttaatattgcaaattttgtagttaattcgttacaaattacacataataatattcccagctttgaatgaaatactcctatataatgagcaactaatttacatcaaacaattactcgtagttaggaattatttttaaaaagatatttaatttttttagaatatttcaatgtcttaatttttttttttccaaactatctttaaaaaaaaaaaggacacagcaaattatgttccgttgagaaatggatcaacggaacaaaaattggaaaaggaaaaatgaaactggatagtgtttctaaatacataaaaaagaaacaattacaataaacagaaaatgatagctttgacgacatatttacatgtgaatttatactaattttaactataatctgcttatcaaatggatggaacaaaatcctattctttctaagaacatgcatcttagatagaaaagaaagaaaaccatgctagaataggtcatagcttagtaccatcaaaatcccagcttcatcaacttttgccttgccacgatttaggggccgtcttcttgtgctgcaaatgggaaaaacaagagttatttttttattgtatagggaaaattatagcacatgaagaagaggcttactgcttaaaataaagccttggatcaagctctgtgctctctctacttggtcgggtgcgcctgatatttgaatgatcttttgggtcaactctggtctatcttctaacaaggttacattggctcctgataactgttcaatgaaagatacaggttagaagatatattactcaatctcaaatccataaatttgtaaagttgaaggtttatggtaaatactgacctcactgatcatggcaagcttgtttttcgattttgttatgagcttgggaactgcaggttccggtatgacaacttcaattgtactcctcgtaacaagaggtaccgagattctgatacaccacgcagattgcaaatgagatgttactaattaattatatgctatacaatgcccttatataatcaaattaaacgggaaatgtattcagtacctattcaaaccactaggagtgtcttcacgccgatcattctcgttctgctttgttgtttcaattccagtctcctgcagaaatgggtttgatttatcaaatacacaaatggtccgatgtggaaaaatgtgcaaccaagttgaaccgagctaaagcagttcataaggaattgtaaagatgttcagcataagaaactagctacaacacaatttcttaaaggagtaccttcactgctggtgctgctatcacagtttgaacattttgataactagtcgtagacggatcacttgcagtaagattatcgcgaactggagttctaccaccaggagaggagctctcgcatcccgcagcattaccaaaagagccagatacagaggcagaaggtggtgtcgaatccttttgaaagaactccctatataggtaacttcgaagtcttgatgtcatttcaacaagggcatttcgagctgcttttatctctcctactatctacatgaggtcattgtatgcagatatcaatgatacataataaaaagcactaaaattccctcaactccctcatttcacagaaatagggggaatcggtagcatgtaagaagattaccatggcacagtaataactgagtgactacagaacttaataatacaacaggaggcattgacaagaaattaatgggtgtaaatacaaacctgtatgagttcatcacttcctgatatacatgtaggaagttcatctctaggtaaaatttgtatattggcaccagttagccttcttatttctgacaaggatccatctcttccctctaaacaaccaatatcaccacagggaacaagcaatctagtagttacaatgttgtccttgtcaggaataagatcaagaatgcgagtttgaatatgcaacagagcttcctgagctggaaagagctcgtcatcagggccctatgtttgcatatgcataaatgaggttagaaatgaggaaagtgaaaactaacctttcttccattatcataatttcacaattacataactcatgaaaaaatttacctcctcagatgaaatgataataatctgttcatctgaaccagccaccgggtcagtaactttaacatccacaccaatttcattttgaagcagatctataatcccatcagactctccaaaaacactgtcaaccttgtcaattggacaaagtattcgaaacacaagatcctcattatagaagggctgttgcatattgtcagccatggggccagacccggattcatttgcaaaaccagatgggcggggaccataattgtttcctctgttattggaggcaggtaagcgagatccaaaaccaggcccctccataggtggccgacgacctgcattgttcatgtgtggaacaaaatcatcatcaggagaaaagaaacgttctggggaatgcatccgcccatggaaatgactacggtcacgatgctgactctccctcaaccgtgatgaaattattgctactgcattctttacagcattgacatcacctaaaatctgcaagaatgtcagaaatataatatgattaggcttttgttcaaaacaaaaagaaaaacatagctcttttcaaaactaacaaaagaacacaaacttaacatggtgattcacacaatgtcagttcatgtttgcagtccatgttattgaaagacaataagctgaccaacaaattagattttagtacatttatttttgacaagttaatagcaaaaactcgatcacaaactattaatataacatcaatgagaccttaagaaaatgcagttaccataaactacaaaacgaaacaaaaacaagccctggcacgcagttttctcttatgtaaatatcagcactttgttatccctttcttcaaatagcatatgcaataaatgtaatctccatatgcagactctgctgaaagaattgtactttaatgactctcaggtgagaaatggggtgagaaatggagctccaatctcctcctcctcctcctcatcatatattcaattatttaagaaagaaataacaccccaaatgatatattatccagtgaagattatatattataataattatctcatattttggtctcagctactaatataaacaatgtggatagataggatagtcatcatggtccatgttttcgagcactagtttagctcaaatcaaatgtaccatagttttaggcattagtacctaaaaaagttcatatgcaactcaaaaggctcaatctaccaaacatgcaacacaagattcattcagatccaattacaggtctaagatggttcaaaaaacctgaacaatctcctccgacattgaaacgcatcgaggcaagttactgtctctaggcaaaatcctaatctgagtcttagtctccatcctcatctgctcaattatcttccctccttttccaagcaaacaacccacatgcattctcgacacaaccagtctagtcgtcacccgattcccaccaccacctctaactccgccataatcctcctcctctccaccaccaaaaccaggaatatcagtctcaagaatcctttcatggatcaaaaacaaagcttcctgagcaggagaaaagttcggcattcgtccttcagggtctcgccgcctagtatcggaaatctcgatgattctctcttcatcaccaggcatcagctcgtgaacgttgatccacgccccggtatgttgtcgaatcgactttataatactaccagacttgccaattacaccaccggccttcatatcgtgacaaaggattcgataactagtggtcaccgtaagagattggtctgactgaggtggcttaggagtccttccaccacctccggcgttaccacggtgacgatgattattattattgttgttcccgtaatggtggttgtaccttggtctggttctaccaacagtctcagagtcatagtcttggtcattatagtagtacctcttagatctagacctctccattctcaacaaaaaaaatcaacggttacaaaatcaaggaaaaacctaaaaccctttcatctgagtgtgttcaatatcaagcaagcattgtttgtggtcatggaacagttcacggatcttggtagattggtcctctgttttttttttttcaaattgattttggttctttctttgattgagtagtcgtcttcatccttgagttgagtgtatctgtttgtttctcgagaagaaagaaagagagagagagagaatagtatttgaaatactgagaaaccctagaaatgagctaagaaaatcaaagagatatgatatgaggaagaaaccgctaagcagttgtcagctaagggttttaacgcttcggtaagccatagctttttttttttttttttaatttaaaagtgactttactctctcaccacaccatcagtgatatcagaaggtaatttgaaattaaaccactaaaacgacgtc

SEQ ID NO: 19050 - DNA, 6216 bp, Cannabis sativa
accggtttttcggtcggggtttttccaggaacctcaatttttcccaaattattgattttagggtatggtcatgtcttttattgatacagttattcctagttgatcttaaagtccctgagaagtgtttagcgtgtctctcaccaaaattacaatgatgtgatttaaggtcctgtgaaacgtcgagttacaattccactcaggctgatcggcacacctaagcacgggaatgaggtaagatagcataaagcatatatatgtgaatgaatgtatgttattatttgtttgcactactaacactagtaatgatgtagtttaagggtgttagtacagtgtaggattttagagtagttacggtgttaccaacacgggtacagaattggtactctagtgcatgtggtacaacactcggtaacttctaggagtaaaaattggccctaccaacacaagtacaactttggtactctagtgcatatggtacagtggtcggccctaccaacacgagtacagagtcggtgctttagtgcatatgatatagtggtcgtacttccattaagaacgttcttaaccatttggtgggctcgattattgagctcaggatggcttgagcataaagccgatgcagcattactgttatatatattatgcatatcttactgagtctgttgactcatcagtttgctaccatgtgtaggtaagggaaaggctaagctggaggagcagtgagtttgagcttggcaaggattgtacatatcgcagcagtgcaacctggagggcttcggttttataacattttgagttgacctatattttgtgtagaaaaaaaaagaaaattattatgtaactatatattgtaaaggtaaaagtctggtcctttgacctgtgtttgtttgtttgttgtggtttgttgtcttttattgtgtgtctctactaccatgtctgatcaagatactatggatttggatggagaacgtcagtatgatgttatacaaggagatgaggacgatgatggtggcattgtgtacgattcaggggagaaagagctatcggattttaatgatcgttggtgtcttgtgggaaggtttcttacagaccgaacgttggatttcatggcaatgcagcataagatggcatcattatggcggccaggacatggtttatatgttaaagaactggattagaatttgtatttgtttcaattctatcgtgatgctgatattgatcgagttattgaaggaagtccttggacctttgatagggtgccgttggttttctctcgactgaagaagaatgaagtaccacgatctgtggtgttaaacaagctggattttcggattcaacttcatggaatgtctacagggttcatgtcagcaaaagtggtgaaggatatcgggaattatattggcaagtttattaaggcagataagaacaattttatgggaatatggcgtgattacctcagagttagagttgcagtccgtgtggatttacctcttaagcacagaatgagattagaacaaaaaaggggtgagacttgttatgctactttcaaatatgaggatttaccaactttctgtttcatttgtggaatacttggccattcagaaaagttctgtcaaaagctttttgatactcctctacatttgattaaaaagccttataatattgaactcaaagcaatgcccaggcgacgtcaacataccatcggagcaaaatggctcagacaaggaatagctagtaaagattgaggtgatacggtgcacaatagtggtggtcaggtggcggactcatcaattccggggagctctttaggcaatcaaattcatggtaaaagccatcaagttgctgattttgtgggatttaatggcctgcatttgagtagtgataggagaattaatttccatattgcaccagttgtggcgtttaactcaaatacaatcaattcccatgatattaggaacgtgactgaggatgaatcaactgtggatggggagttaatgatattagattcaaagagaaaaagattagagaaaacaagtggtaatgggctaacttatggtagtgatgggatcttgttatctgaaacaaaaagtgggccaaaaaactctgtttgtggcgggtgctaattctcaggcccgccaagagttatgaatgtcctgagctggaattgtcgtgggcttgggaaccagcggactattcaattccttaaagagactgtgtctcataagaaacccaattttattttctcgtgtgaaacaaaatgtgataaaaatagaattgcttatgtgggccgttatttgcaatttgagggtgtgtttttggtggaggcccaaggaaggagtggtgggttggctttactttggaaaaataaagaggagtgtaatgtgttgggtttttctcaaaattatattgatgctatggtggaaatagaaggcaatgataaatggaggcttactggattctatggtgagtctaaaagatgccaacgggaggcttcatggaatttacttcgatcactcatcaacacaaacattgagcttttgtgcgtcatcggagaccttaataatgtcttgagtcaaaatgataaacgtggaggtaacacatatcctagatggctaataaaaggctttgagcaagctcttcaagcttgtgacttgttcgatcttgagttggttggtcaccctttcacttgggaaaaaggaagaggaactgcaaattggattaaatgtcgattggatagagctcttgcttcctcagcttggtttcaaaaaatttataatgcaaggttagtaaatctcgagacatctccttctgaccatagccctcttttgcttgaattcataatacctgataactcagccctgttcgtcattttcgtttcgaaaatgcctggcttaaaaagcccttatgccatgagattgtaagtgactgctggaacaccccaggtgttcaagatattgaatcaaaaatcaatttatgtgctgaaaaattggccagttagggcaaaggaattacgggcaacttcaagaaaagaattggtaattacagaaaagagcttaaaatgctcaagaataaacatgattcagcatctgtttttcgttatggtgaagtgaagaaacaactctttctcattcttgatcaaaaagaggccttttggaaacaaagagctaaacaattttggttaaaagaaggggatcataatagcaaatatttccaccgtgcagcaagtaatcggtgtagcttcaatcaaatatcgaagcttaacgatagggacggcatatggcgtgactgggattcgggtttatctaatgtagtggtggattactttgacagcttgtttactacagctggggtagattgtgatgagattatccattgtatccatcacaaagtcactccacgaatgaatgaagcattgctacagcttgtttgcgaagatgaagttaaaaaagctattttcggtatgcatcctgataaatgtcctggccttgacggtatgacgccggctttctttcagaaatgttgggaggtggtgaagaaggacgttattgaggttgtggagaagttctttcattcgagggagtttaatctgaatggtggtgatgcgaatgtagtgatgattcccaagaaaaaagtgcctgaaaatatgggggatttgaggcctattgctttatgtaatgtcctttacaaagtaattactaaagtgatggcaaacagaatgaaaagcttcatggataagattgtctccgaatctcaaagcgcttttatcccgggaaggcttatttcagacaacatcttagtctccttcggaattttacactacctgaagcagaaaagaaagggcaaagatggatttatggctttaaagcttgacttgatcaaggcttatgatcgaatagaatggacttttttaaagcaaatcatgttgaaactcgattttgcggatgagtgggttcagcttataatgtcatgtgtttcttcggccaaatacaagttcatccatggtggtagagaaatgggaccggtgataccttcgcgaggcattagacaaggtgatcctttgtctccttatctctttattatttgtgctgagggattgttttcgttgatcaaaaattatgaggacaaagggtggattcatggttgtaaggtggcttatggtgtgccaagagtgacacacatgttatttgctgatgatagctacttgtactgtaaagctactattcaagaggtagaaagaattcgtgagcttcttctcaaatttgaaagagcgtcaggacaaaaagtcaatttggggaaatcgtcaatattttatagtctaaatacagaggtgcataggcaaacaagtataaatgcactgctgcaaatgaccacagctgatgatagaagcatgtatcttggtcttcctaataccatgggacgcaacaagtcggcggttttgggttgtttaaaggatcgtgtgcgtaagaaactccaaggttgggattcaaaagtgttgtcaagagctgggaaaaaggtgttgattaaggctgtagctcaagcattgcctagctatgcaacgaacgtatttttgttgccccttgagattagccgtgacattgaaagctcaatggctggtttttggtggaaaagctctaataatggtaacaaaggtatctcgtggatgtcgtgggatagaatgtgtcttcctaaggataatggaggtatgagatttcgtaatcttcgggactttaatttagctcttttaggaaaacaaggctggtgattcctgtcaagaactgattctcttgcaacttgagtttttaaagctcgatattttcctaatggaagttatctctcagcttcccttggttctaacccgagttatgtatggagaagtgtttgggaagcacaatccttagctcaaactggtgttagatggtgcattggtgatggttcttcaatcaatattctcaatgagccttggcttcctgatccagatttcccttttatgacttcgacacatcctgctttagaaaactctaaggtttgcaatcttttaaatgtccaaggcagtgactgggatttggagattttgcaagatttgcttgatgttagagataggcaattgatacttcagattcccattggacttgcacaaacaactgatatagtgtactggtcaagggaggctactggtgtatacacagtaaagagtggatgtaagctgcagcaggctttaaaaggcagagatagagaggttgattcaacaactttttggaaagatttatggtctttgagagtgccttcgaaagtcaaaaatttgatatggcgtgcttgttcgaattgcctaccaactttggttcaactggccattaaaaaagtggttgtcaacaaaaattgccctctgtgtaacatggagagggaatcaatttgtcatggcctgattttgtgtaaagagttgaaacaagtttgggacagagttggaattggaacatcacaggcggctggggggagctttctcgactggtgtgtggatgcttttaaaaatagttcagctacaacaaagtgcttaattgcaactgtctactagtccatttggggagcgcgaaatgatttaatttggcaaaaaaaactggtaaatccttcgtccatagtgacttctgctgttagttttcttgatcaatggcgacatgctcaaagtactacaattgagttttcttggtctagtttacagcaccatgatgggaatgagcattgggtcaaacctcagtacaatagtatcaagataaacgtagatgcggctttgtttgaagacaaaaatcggtttggtttgtcccttgtaatccgtgatcataatggcttccttctgcagggccgaatgaagttgtactcaggaattgttgctactggtattgcagaagcaatgggctttcgcgaagctttaagttggatcaagaagcaaccaatctgcccaatttggattgagaccgattgcctttcggttgtccaagatttgaggagtgctgttaagatggtctctttgtttggtgctatcattcaagagtgtaaaaccatgttgtgtgagttaagtcatgttaatttttctttcgttaaacggtcagctaataatgttgctcatgagtttgctagagcatctttattatatactgatcgtatattcagtatggggtctgtcccaactgatttgctaccttgcttgtgttggaaattatttta

SEQ ID NO: 19051 - DNA, 2291 bp, Cannabis sativa
  modified_base (1990)..(1997): a, c, t, g, unknown or other
cactctggacttttcctctctaaagaaggggacaactaatttgaaaaacgataagtaaaatcaacatgggtgaaacttggtattttgttccccacagacgggtcagcacagccccaaaacttgagtacgcgtgaaaaaattaatagcgcctaaaggggttcaaaggtgaaaaagcttacacaaatgaaatatagacataagaaagtgtgaaaagtataaatatacgtactaatattaccattgttataagactttattttcttttcctaaatcctacttttccatggaaaaacaaaaggttttcaatgtcatcaagcactcatccaaagtagtattctcttcatctttattcttttggccttttcgtcaattaaccatccacttggagaaatctaaagaccactaatttctaaagccaaaattcctcaccatctcaatcataactgtgtctctgtcaagttcatgctttgaaattcaatgtctttgcaagttgcaacaaaaaatcatatgaactaatgtgtattagtatgaataataacacgttaacagaacccgggaagcatacaaatttacagtgaactcatataaatgatatcaccaaacttgttaaggtataacttataaggaagaatcacatacacccaaatggtactttttcaaggtaaggttacataaagatgacaagcatagttaatgaaaagaaaaaaaaaatgaattaagtgtatataagagaaacagattaagattatgaatattaacaagggatttgagaagtgaaccactccatgacatgaattggggccttcacaagctccaaagccaactccactattacagtcacacagaaacaacaggggcatatgcacgataacaccaacctgcccagaaatttccattccataaattttcataaactccaatcagatttagaaaaaacccatcaaattcaacagaacaacctattaatctaagacacccagatgcccaaattctttagcaccaaaaacagaaagaacaaaaagaaaacatctttcttcaatttagattaaatcaaaaagaagatagcttttagggtagaaagaattatacccgacgatccagatgatgattccgacgatggacaagatgagagagagaaaagcaaagggaagacccaatagaaagcccaaaggtctgcaatcaccgtcttggctgcacattttttctgggtttctgcttgattcttaaacttggtccttcccttgttactagctttaagtgtgacagagagagatgaagaagaaacagactgtattgtacgagacttctaagcagatgatttgtaggtaatgggctaaaattgaaatgtagtgtggagtacgagatactgaataaggaaagcgacacgttggtttggtttggtttggtttggtttggttttgtatacaagtcaacttacgaattaataatgttccagaatttctctattgtcacaaacttgggaagagagatttctccattatgataaggggttttttttatgtcaaattatgtaaaactggtgacaaatgttaaaaggcactaacttgattattattgctttccctaagaatgggttcttatatattttaatataataattttttagaagtataattagtcaatcgcaaaacgtaagtgatatgtttagaaagtgacagaactactagtacccaaataataatgttctaaccttaatctaattacgagagatttaacacttcaaatatatttgagccattggatatgtcaaaaatatattttttgtatccaaaggctatatatatatataggaacacgattttgtcccgtgatgtactttaacggaatgtattctgtggtatattagatagatctcagggtacattagatgaatctcagggtacgttactattttttaactctatttacacctagatcaactccagccctcagatcaaatgactcccccatctaacggctgtcgtacatnnnnnnnnacattccgtgaaagtacattacgagacaaaatcgtgtctctatatatatacaaattaatattaagtacaattaatatagtgtttttagttgtatttttaatttttaattaaaaatacaatccgaaggctatatatgcagatttttatgttatttatttttaattaaaaatatttaatcaaataatagttataaaaaatattataatattttaaatttattgttaattataattttagtttaatcgtagtacttttaattttataatactgttattcttttagaaatatcatacg

SEQ ID NO: 19052 - DNA, 4062 bp, Cannabis sativa
gtaatcaatgcctattttacttagttttgaatttgtggcatagatgtatattttaggaacctaaaacaaaattttacccgactatataacacggattgacaaactctcttcttttagaactgaaagacaatttggtgatgaagtgaatgcactcaatctacttgacgaatagaagttggtgggcgtaccaacccacccatgaatatagctggtattagaagcaaatagttaattaagataatggaccaagaaaagtctgttaatattcaaattcaagtagaccagacgcagtattcaagtagaaagtgtaaaagttgaaattgtaaatagattgtctattttgtttgtttatttattattattattttcttttatgagataaagagatctaggtgttaaagatacaattacagccccaaataaaagcattatgtatgtacaaatttttatgtgaaatatataaaaatatttgtactgtacaattataattataatagcgatatggttatatatgatgcaacactgatgtagagacaaatacatggtataatatgactagctagaacgaaaagcacacatctgcaaattcctaactcgttgaagatagaaagtggaaatggtaatcatacctagctatatcgattgggtttgggtctctcatatcactacctataacactgaaaagattttgattcctgtaacgcgccaaagctctggcccctcactattattgcaatacaactatcaaataatttatataaaacacacgagatatttaattaattagtagctaagccttctctaaccattgcatcatggtttagtagacataaaaatcatgtatatatataataatacaatagaagcaaaaatcatcagtcaaagatgatgattcatatgatcagacggttggcctttggtgatcacattaaataactaagctaatattattcgatttgatggaatctgttatgactcccctttttgtctcaatctttcatacatatatgggaccctttgttgatcaatctaaatcaagtgaactgtaaagctacacactaaaatttccctcactgatttcatttataggaatattacactgtcaatatcatgggttaattttgtgtgagtcgcagattgccacataacaaactctagtttaaataattaatatcatatatttatattaaaatatcaagtaagccaaattcaaattaggctataaatgatagattgataataaaagaagaaaaaaaatgcacagtatatatattaataatttggcagctttgtcggcatgttggcccttgtataccccacatgtacagaaataaagaattaaaataaagttttatttatatatattaaaaaaaaaatagtaatgtcatgaagtcctttaaaaggcatccataaacctttgtgataaacactagcactatcaattccaccaccaagctccattattatcattatcaaaagcttatagtatttgttgaaaggccttccatttccatttccatttccttgaagaaatcccttatacttgatcaaaaacattatataattatataaatttccatcttctttgtcttgccagcaagttcatatttagattatcttaatttatacacacacacatatatatctatctataattaagtgtcgaattgaagatcattgatcgatatatatgatgtggcgtagggtgactactctagggcaaaaccttcagaacataagaaagagtccaagagtggctgatgagagcatgtttggaggtgggaataaccaagccgagttgccaatcatcatggctcatgatcatcatggaagatcgcctgccatatggaaaggcttcacaatcatatgcagtgtggttggggctcctattttgtccttgttcgcttgcttctctcaatcttcttcttcccaccatgttaatggtggaaataataataataacaatatttcagctaattatggggtttgggctacaggtgagtttgctcagatatctgaaatgaaccacctcatggtaagtgacagcatgcgttatgcaatattgatgtaaaaaaaaaaaaagaaaaaaaacaaagagtggagatatataaggaataattaattatgtaagtagcaaaactattttgtttgccttaattagtggaaaattttaggtaatgaaaaggattctgagtcgagttttctgactttgtccttttcttgtataccgagttaattaataatatattttaatgtgtattaaactattatatgcagtgcatagcaatagctatatatccatgaaaacattcatatatatagataaatcaagtattatgtgtatatttccagttatgtatatatttcttattttatatgtaataaaaaaatagaatttgtagtatcaaactttgggttaaacatattttttttaaaaaaaaaaaattatactagtaggcattataatttaaaataaagttagaaagtgtagtttatgaatgtatgtatggagcgatggatgatacgataccaaaagtcttatatatttagagttctggacacaatagtataatactataaataagtattgatacatatatatgaacttattctctctcttttttccttttccctttcattttattcttttttagctttttttatttaaaccacaacaaatgttatgcggatgtcttatacataggtgtttagattcagaatatgacaaaccggtaacccactttcataaaaggaattattcttcttatgcattattaaactttgcatatatataatatagactctctagtgttttctttttctccagttgattgagactatttgttaatttagtatgtccatccattattgtgaatacgacaaaactatagaattgaaattaatgattaataataatgtggcacgccaagtacggatatttatatggcactgtaaatataaatacagggtacgaaaaataaaggcatcagtaaagtatatatgatacgcatggacaagcctaaaggtatcacatataaaaaagcttaataatttgaaaataatattaatttattaattataagtcaattaaatgatagtaaaatatttaaattttaataattccaattcttttattataagattgtaataatttttgaaaaattatataaaagagtaaaaatatatgtaaaatacataggccaattagaataatgtatttgaatacagcacaaaaatatcggatttataagttatacacaaagcctatttgataaaattttttgttaaacaatacacaaaagtattaaataagattcaattcaattgtatctagcatcctctgttcttattattattattggttcaatcaattcaaaaaaatatgtacaaaagtgttaaagtacccaataacaatactctgttttattatagccctgctcaacaaaatgtattaaacacatttctcaaaatatgaaccagatggggacagtgcaaatggatttacatagctctgactataacaaagcaaatgttttgattagtatttcaatctaaaaaacttgtcattaaagttgatgtctttatttcttttaacctaaaaaaaatgtttatatcttttacaggagcgtgcacacatatataaacaaaacatacccccattgattggtatatggagagattagctaattaataataataataataatttccctttcatgaaacaataataataatgttcatcaagaaacaatagtaacaattaataatgaatttcttaaagattagaagcttcccctgcaaagccaaatgattcaattaaataataaattaaacaacctaatgcacaaaaataattataaagaaacaaattatttaattaggtatataagctctacaaattgctttgtttacaaattaatttactagatagcacccagcctgaaaaaaaaaatttgaaatacaacgatgttgacccatgattccatccacaaatatataaatccaaaaaaaaaaaaaaaaaaaaaacttattttgacgttgttagaaaatttatttaatggt

SEQ ID NO: 19053 - DNA, 7293 bp, Cannabis sativa
atccaactttttgtaattggattggattagatcggttcggttcaattggattggattggataatgcccacccctagttacggataatgtcgcttaattggtaatttttgctctgattattgatgattggggatttaatatttacaaactccaataatgagaattaactcatttatttagttttattttgtaaattaagtaagcgggttttattcaaaaaataaataaaaaaatattaagtaggtggactttcactgtggacagttaaaaataaatatttcacatcgctgaatcgaataagtcaatcaatcattctcttgctcatttcaacatatgtataattgagatgggacatgctatatgagaatttgctactgccaccaatgaagtaccaagttaattataaacattaattatttagttattatacaaatgagagagacttggaggaatgataaccaaagattaagtttgtgttcctaataattatcaattaatattgttattgcaatagaaactttaccaaaaacttttctttttcagcatacggaaaaacctttaaatatataatcttttattattattttatatttgtttattgtacatttttaaaagactatacaataggtacttttactatattttttaatttttaatttctattttacttatgtattggtgtataaagatttaagttgggtcaagtttccctttaagaggaatttatactcaatgtggtgggattttaaaagttatttatttaaatataatattttttttttactttatatgatatttttttttaagtatttttatagtatttcatataccatatatatatatatatattaaattttcaaagctcatattaaatgtttttatttatttttaagcagttttataaggtaattttaagtaatttttcgagtacgtcagttttactgcaatgggtttgcttcatttttttattgtgttttgtcttttttattattattataaattttactttaatataattaaaatcaattttttgatgaagaaaccaatttactgatgaagaaaccaatttcttgatgaaaaaaattagtttcttggtgaaagatctttggtgattgattttgatggcatgagaaactaagcaattgaacagcaggagagagaaaaaaatcttgtgtggctagatattagtttgatttttgtattttttccagcacctctgctttactgtaattgggttacttcatttttttttattgtgttttgtcttttttttttttattataagtttgtcatattatctttttataaggtcaaaattggatttatcttgattaagaaactagtttcttgattaaaaaaccagcttcttgacagagaaatcagtttcttgatgaagaaattaatttattgatgaaaaaaaaatcagtttcttgatgaaggatcttttttttttttttttttttgcatgagaaactaaacaatttgaatcgcaggagagagaaaaaatcttgtgtggccggagagagcgtgatcatattttgaaaaattgattatcttttttaatatttttttatggtattttctatttaaatagcatatatttagttagtttcattataaatgatatatttagtggcattaactttacatgttatatacatcaaaatttctatttattttcctatatttttgtaaatatatctcaaattttaatcttaatttgcatatttatattcgagcattgttattagatgttttaaagtgctcgatattaagtggcacgttataaatagctaatcgtttcttatattatttattaaatttaaaagtgtgagacatagtattaaattatactataatttgatattttgtgcttagacaaccaccttattcattttcctttatgagtatatatttttttaaaaattgtatctatgtgtttttctcgcttaataatattttatctgatgaaatcttcaaacgcgtgttccccttttgaaccatagattctcaatcgatcatagtcttacccaactttgaaatccgcatggcctctctatataagtgtgattacaccttacggatgacttaatactttccatttagttttggagacacacatatgttgttctttcaaattttcaattatatatttccctcaaaaaaaaaaaaataataagtagatcttatatctatattatcaattgtactttttttcaaacagcaatttctattacatatgcttcagttcaaaagcagttcgtataagtgttctccatgaggaaatactgaaaatgagttgcaattacatacaaatttttggctttaaagtacgtacatacgtacttctttgattaagttttcttagttcgtatactatcacagtgctggtaagcttcatcaatttaggtactattttttatcactaaactattattgagttacgtctacaatacatttttggtatatatttgagaagtacagttgcttagatcttctagacattaacatattttttgtataagcacatctggaaaaatccttatatacgttcggccttaaaagacgtattaccgtgggaaaatttcactacatttttttatttttttaatgcactacattaatatacaaaaaagtatactgatcatgtaaactcgtggtttgcatcacttgttcatgtaatgcaaattcatgtatctcaacttttgagagttcttgcgttgagagttgacggaaaaacttgttgattcagattagttgggagctaacgcaaaacttgaatgtttgtgcagctatcgactgacgcatatgtaccagtactggcataggtgtgttgagggatctcgcaaattttaggtcagcactcaactgacaaaaacccactattgtttccttagctctcaactaagccataaattttaattatactttgaaattttcaattttaaaatacaaaaacaactgtattttgtaaatattatttccatttttatttattaattttatttaggtggtccaagaggtcaggatcggggcagttccaagttggggtgggtttactttagatttctaagatttaagttgggtgtcgtaatttaaaatattaattaaaaaaatactatttaaaaaaatattgaaagtgattttttttttatttttaaaatttagattcttaattaaaaaattaaaaaataaaaatagtttaataaaacatgattttgaaaaatatttttacttttctaattttaaaaactaaaattgattaaaaatatgttactaaacgcagcctatataaaaaacaataaaacaactaaatcaagaatagaaactgagcgagcatgtttgagtttaagcttcaccaccaccatcacaatctggaaacatctcaaagaaagaaaaataagagaataatgtaccagagtacctgcatgttatgaggcttactcatccagtcactaacaaatatataccaaagacaagctaatgtctacggcatctatgctggcattaaatgaaataaaaagcgaaatgaattggcattgatcaaaatctaattatgtctttgctacatgcatgtagaattacaagataaaggaaataataattaaactaacaaaataaaattaccatgcatgtcttcgccacacacaatagaagaaagtgatcatgatgtgaacacgatacataagaggttttctttctaatgtaattttgatcaaaattatagtatagcacattcctaagcaacaataactaattatttgtactaaaattaaccacaccctcccaagtttcaaatatttattgtacgtcattatacacacattaacagaatggctcttagaaaattattagaaatgatttaacaaagctcaaattccttcctccaacaacaacttaggtggaatttagaatgaatgtaaaatataagaataaaattgagaataaaaatatataaatgaaatgaaaattaaattaaacttaaaaacaattattaaattttttcttggaatgactattttttctattttaaaatagaataattatatattctactaaaatagatgaaagactatttcgatactttaatatacagctaaaaaaagtaataaaatataaattatttccgtgtcattctatttcattgcttccaaactaaatttgaccttaaaatttgaaaatgcagttgttcaaacataggaatgaaaaaaaaaaaacacgttaaaattttgacatgaaatcagatttatatttgattaaatattataaattgaaatgaaagcagtaagtcctttttgtgtgtctagaacataatatttctaaactatatcgaaacccaataatgtcaataaaatcacttcaattgacatttactgaattcttttgaatgagaaagtaggttcataggagttatatttaagcacttctaaaatcatgcatgtaatccaccttgtttactttcaattatttatgatcttttataagcacaataatttataaattatatcatacatataagatatgccatgatctgaaataaggtctacttagcttgcttcattcaactacaaatcaatatttacatatatatatatagcaattacatatcacagtctataatttttcacaggttatagttatcccctttgacgaccaccaagctagctaggtcataatttcaaatattcatcagatcaacataacattactcaataatccataattatcatatataattgattcgtatggattttgatcctccatttcaagaaacgtacaaggccatcttccaagattccattagctctattactgacaatggtcatcaaaaccctaataatttgatggttgaggaatatgaactaccagtgatcgatcttagccatcttttcatggagaccagtactagtcgtgatgaccaatactgcaataataataataaaaaaaataatgaggaggtggtagtgaaggagattgttgatgctgccaggaattggggtttcttcgaagttgtgaatcatgggattccagaacaagttttaaagtgcatcaaatacgagcaaaagatggtgtttcatcagcctttccatcaaaagtctcacaaaaatgttctcaacttatcaccaaatagttaccgttgggggaatcccaaagctacttccctcaaccagctttcttggtcagaagccattcatatatctctcacagatatttcaaaaatggataatatacaacacaacagcctcaggtacgagcattaatacgtacatatcaacatatttcatttaatatatatcgatcgatatctcagttatatttctataaatatccaccaaccagtaattatactgcatgttatattactatctattatcgtgcgctctatattacatgggtatttattttaatttggtttattaatctatttgttaattatctatgttttagtaaaaaccattaaatattatatattactaattgttgttaagggggttaattattaaaagtctgttatgtatattggttgttagagtgagttataggttaactacattgggttgttattacagatggttctcggttgtgttagttgctaactcctcatgagttagcccctgtatatatatactatgttcacttattgaataatacagtttagactttctacattctaatatggtatcagacatttaagcttttcctcctctctctctctctctctctcgaaaagatttctaccattgttccaccatgatcaggacacgagctactggttctaggaattccggtagcactcctccgtcgcatacttcttcttcttccattccagatgctccttcaattgacacaccaatcattcctccaatttttaatccctctagagaacatcaacattagaatcttcttcccattcctcggcatgcacatgaagataactctagtccatattttcttagctcctgtgatcatcttggtctgatcttggtcactcctcctttgtcaaatcataacttccagccatggcatcgtgatttgaaactttctgttggtgctaggaacaagaccgtcttcctcaaaggcccttttacaatcactgtcttcgctgcaatcaaatggttatgtcctggattcttcactctgtgacatttgagatcaaaagtagcgttatgtttcttgacacagttactgaaatgtggaccgagcttcattcaagatttgattaaggtaatggacctcaaatttttgagcttcgtgaaaccttgatcaccttacgctaaggagaagactttgtaagttcttactttactgaactcaaatgtatgtgggatgagattgaagaacttagaccaagaatcccatgtacttgtgctacttctactggtaacttgacttttttaaacaaacaacaagttctataatttctcacaagattgaatgaatctttcttttctgttcgagctccaattcttctcattgaacctttcccttccctatccaaattattctccatgattaaacatgaagaacgatagaggaaacttaagaaccctcatattcctcttattgcatctgtccaacaaccaaattcctctgttgctcttgcccaaaatcccttggcatcagcatataatacaaacattggatgcaataagaaaatgaggttttattgttcaaactgtcacaaacatgatcatttgttggttttcttcctggatatgggaacaaaagattgttagagaatcaaccagttgctcacagggcttctacatctattgatcaattggtggccaattgaaacaaacatgaaaatattcaaacactcatatttttactcagccaaaaattgcaaccaactacttctacttctaatgcatctctactttttgcatcaaatatatctagtaattctcataactcttccagtttatgaattattgacagtggtgccacacaccatatatttgttataacatctccatttttactagtttacatgatgttgtaattgctaattttgattttctcccaaatggtactaagataacagttcacaaataaggaaacattatattttcaaataatctttgtctacaaaatgtactctatgttccaaatttttatttcaatcttttcaatgttccaagcttcctcaccattcttacaaatagcatattttttcactcacaattgctgcattctgttggattaaaaatcctatgtgggcacatatgtataatgtatatgctattataaagtgtgatacaaaattaagtgaccaattatgttatgggta

SEQ ID NO: 19054 - DNA, 3759 bp, Cannabis sativa
aaaattccaattttacataaacaaaagtgggacaacaaagtaaaatttattttggtaaaacagtaaaacatgtttaccactttctacaaatccaaaatagatattagattatttttcccaaaactaattttgtagtttgtgttgtctctagactaacttaatagattacatgcatttacagtacttagacatatgggttcttatgcagtaaatattttggttaaggtgggaatagggagtgagtagatgtcctcactactttgccatctttgaactcaatgttatgtagcttttgttggcaccatttaaggtgagaggaggaaaccatggacatttgaagaacccttgacacaagactcagatctatcattgtcaacaacatctcttctctttcacactcttccaaaggcttcactaccctctttaccaaacaccttttcttcccttctaaatctttcatccatagtttgttctacacataattaattaaaaataagtcaaaaagaagaacggaattatcaagagtaaatattattttagactttatattttgtaaaagttactgaatgaaccttttatttttcaaaattatacaaaatagatattaagcttaattttttactaaattaaaacttaataataacttgatcaaaaaatatttatattttttatatttgttcgtactacaagtatacttcaagttggttatattaaaaaatttgaattcataatctattttgtaccatttaaaaaaatacagtatttgagttataatcagataaaataatttaaaatgatttaattaataattttttgctaaacacaaaatttaaaatggtatttattaataatcatggatttattaccttttggagtctcttgttgagttgggctaaaagctctaaatctcttgggtcttccacaggtggataagcccaaggagagtttttgattttccaccaaggctttttaatgttatctgttttgacaaacaatgaaaaagcttgtatgcaatcctctatggctttcaacacttggtttaaatttgtaccttctcctctcatttcttccttgtcatactccttcaagcctttcacttaagataatatataaaatttgtaagacaagaaattaattagatcacatatcttttagataatatataatattattgaatttaagatcaattcagtgtacacttgttcttacttactacatattatgtttaaaatctttattgtttttaaggcatccacatgcaaatatttttcttcaagttgatattgatacattaaataattgaaataagtcattagaaccaaaaggaaagttacacaacaacttaagtggtaacaaaaccaatataaatatatggatcacttctcaatgtgtattataaatataaatatataattgaatagagttgagtaaggtaatatggcaaagtagacgtatacccgtaccttaccccatactcgtatcagatatatatttttatacatttaccctaccttgaatctcaattcaatggataactagggtacttacaaataaacgagttttcgataaaattaccatccctaaaaaataccattagtacacgtataatataaaattatcctatacaagggtgcaattcaatatgaagtgacacgtatttaagttaaagtatatctcgtaataatattagacaccacgaacactcaatactgaacaaaaaaatgtgaaaggtatcataaagtgttaggataaccattaacacagtaattaactaattgttatggttgacttgaccctgttgagtgtttgattaagagagtatattttattcactaaaacaagattccttaatcaaatcaatgaatagaaaatcattaccccaacaacaaaaacaaaaagaaaaagtgaatttttgagtacctgaaacggctgggacttggagaagacttttaagagaaaatcttgctctaacaaaattccaaactctttttccctcacactgttcatcttccataaatctctccaaaacaacttgaaacttttggaattcagttgccacattactacaatacatgttgttatgatcatcatcatcatcaccaccacccatattgattactacttctttgacctttttgtattgatgattaagaatctcccatgacaagcatgattgagctacataaaccatttcaaagtcattctctatacttctcaaaagccttgttttactaattttgttcactccacaatcaacaatctccttgttctgcattattgcacctatacataacaaaaaatagccaagtgttatataatatatcatcatatagtaattaaattaaagactatattagcagctaactatacatactcattccacaagttctctcatagtttagtacatcaaaccatctcattctctcagcataaatcttgtagaataatccatctgatgaattatcatcttgtctttcgacttgtagtactcgaaaatcagaggatggtggtgaatctgctctgtcttgtgagtttgagccaccacaaatcaagttctcttgacttggatagaacatgttttcatgatttccctgaatctgacttgaattttcatctgtgttggaccccaaaaacaagtacttctccttataattcctagttgaaacatcacatagataaaatagactctctccattgttattattatcattactattattaacaattacatcatcatctgcataatctatggtgtcttcaaatacatgatcttcttcaaactcaataagtttcaccttgcaacatttcatggaggtagaaaaataatccatttcatggttataaaagtcaaaacttggttgagtttcataataatattcatgatcaaccaagtcttcatcaacttcaacacttttaaataatcttgtcaatgaaaaaagacagacaataatacattttttaaaaactctaaatatacacaaacaaataacataaatggctctaaaagggaatagtaatacacataaaagggtttgtattagaagtttgagccagagaaaaatttggcaaaagaaaaggattaaaggatggataaaaaagcttaaacaaaaccacttcttaattaatccatctgggattatgactgtctcaacaataaaccaacaagatgttaaataagccattctcaagttatttcagtacttcttatcatatattgtgagttttagagaagaaaagaggagaaaatttgaagtgtttttggtgtagacaaaaggggactgactttgctttattttctagtatttatataaatatgtgagattgagaagtttgttgaagaaacatccaattaatttcctccaattaagatagaaaaacaacttaaaagggcaagaattattcaattgaatattagtttcactctcattttttaaatggggagtttaattttgtacctcacaaaactataaataaatgtactctaatattgaaataattattttttttaaacagataaatatgtttttttgtagggttaaattaataaaatgttaaaataacaaaggtaattacaatggacatgaaatatctcggtaaaattagataataaaactttaatattagaaaaaaaaattatttgtaccttataaaattataaatatactttaatattaaaaaatttaacttaaattaatttttaatatttttataatattattttgtattaatttcaacaattattttaattttattttcata

SEQ ID NO: 19055 - DNA, 2497 bp, Cannabis sativa
  modified_base (1520)..(1530): a, c, t, g, unknown or other
aatgtcaatgcagatattttcaccccctttagcttccctttttataaattagattgaaaaaagggaagctaaaggcttagattgtagtagtgagcatcgtatggtatgggcatgacacatacctatacctaaagctcataatactatgcaacttccgtcatttataaaatgtctcttaaacaccatttgaaatattaaaaaaatagtttataaattgtcattaaaaccactattctcaaccaccaataaaagataatcatctaaaataatttttcgagctagctatttttttttcctaattctggatcaagattgtaggtgattgtaggatttggtattaggattcataaaaaattattcctttcataccagtatcatttcataaatgtttagtttccttactactctctcccaaccatttttctctagtaactacacactgcttatattttacaatcaattttcgcagtataaaatgatcacatacagataataaagataagatcctactttcttctaaaattttggcacttaagcttaagcaacaggaaacttataataatctgatgaaaaagaatgaacaaatagataattttttatttttctttttacatctatccattatttcatctccagtgatactaagagattgtaaatttgtaattacagatattgtacctatagtgtatttgttgaaagaacatactgcacatcatattgtctaaatcacaatcaataacttatttggcgaaatacaccctacataatgatgcatgcaaaaaattaaaagaaaatatgataacgaaatctattaaaaagtttagatctaattgccacaagcatgtacaaacattcattaatataattatctaatcgacaaaaaggataagaaatagtatttcttttagaattgcctcaagatcaaatgtatataaatggcaccaataatattattagaggccctcaccttacatagggaagacaattgtcatatatttacataaatggcactaataattaacaaagaacaaacacaattaatcaaaagtagtagttgacaactgttaaatatatattaaactttagataaacaaaattatcttgaaattagtagtcaaagactgattaagaggtgaagcaagataagatggtctcaaccaaaatagtcaagatatgtcttacaaaattggcattacaaaactttaggttaaacttaggactaatattatcgtcatatcataaaccttaggttaatgtctgaacaacattaacgtttcattttagataaagaacaaacagtgaaataattcagtacacaacataataactctttataataaattggttaaaagtattgatcgaagttcgaaaatggagcaagattgatgacaagaatttatacaaaagaaatgataaaactcaatgataataaaacatttaaactgaaattactcaaacacgatgacaatctaacataagctcttacagaagtcataaaaaggagagagagagagagagannnnnnnnnnnagagagagagagagagagtacctctacaacagattagctaacacaatggaggacaaatttcctttagctctcatagccgccccgtcgggtcagggctctgacctccccgcaagtctttttgctaatcctaattccgccaagcaactcaagtttttgtccaacttcagttactattcgtagctcaaatatggcacataattcattgaattgattgtcatccttaactcctccaacttagcatatacatggtccttttgttgatgtagttgatctcttgcataaaatttgtggacttcacctttgacaaaaatccaactacatcctgtttcctttcttacaccttggtctttcatcatatgtcttaaactaattctatcttcgtaactccctgcctccatataagtgttggaaagaagaacataagtagctgaatactccccaactcaatatttccatggaccctacatgcttccaatagggtctgccagatcatttcattaggctcaataggtatcttttttatgaagtcaatagcatcagcaaggcgaccgacacgaccaaagaccaaaccataacattccttctttcgttgaaagtaaagtaaaccttcttctaccatacccatgtggctgaaagcaaacaggatgcacaataaggtaacatcatttgccttcacatccatttgctcgattcttttaaagagtagtagagcatcttccacaagaccatgttgagcataacttgatattataacagtccatgtaatagtatcagggttgggaatcctctcgaaaataattgttgcctcagttatgaagccacatttggatcgaatacatgtcaataagagcactttttgtacacttaccagcatccgggccagccttacataaaagaccatggacttgtctgccataatcaagcaaagaaaggctagcacttaatcaagcacggtagaaaaagtaaa

SEQ ID NO: 19056 - DNA, 4819 bp, Cannabis sativa
ttatcttccattgtaataatatctctaacaaaaataataatgtaagagtacaaaaaaaataaataaagtagttaaaattaagttaaaaaaaagaatttcgtgattaaaaaatatgttgaggagttgatattgttttgcctattgtaattaggtcagtattttattatttttctgttattctgtatttgcctttgtgttattttatagttgttttcattttatttggtaagttgttctaaaattattttttagctgtcttagttgtttttaagtttttttatttattttactgaaactttaacacaatatttttgagaaattagtacagtataaatgtaaaaaaaaaaattgtaaaaatataaaatgaacaaaaaaaaatgtatttttataagatgcccaaaaaaatctgtaaatatatatatagaaaaatcatcaaaatatacataaaaaatgtgattttgaatattttgtgtaaatttccaacaataaatcaattatatagatgggcccttaggccgttttatggtttgattgaaccatttgtatttgggttaatacactggatctgaaatcaaattttgggctaaatatgagttgttgggccaatagaattggttctagcccgaaacttatacaagtcttcttctacaaactaagacttcatcaaaccttacaagaaaagaaatgttcttcaaataaatacattcgatccaatctaatttgtacgatttagtccaatctaatttacaaaatgtaaatatttacacttatgtagattggattggattaaaaaattcaaaattcccacttgtgcgaattaaatattgagtgacatgtaaaaataatctaaaaaaaattaaaaaattatacatacaaataacatttaatgtagagaaaatagtaatttaaaagtataataaatataaaataattatatttcaaaacttagtagatcaaatatatattttattcttatatataatttttttccatgtacaatttaaaacaaaattaaacatttttttatacttacaattattttttctttgaatttattatttgttattttatttattttaatttattgatgaagacataaataacaatattttattttattttgttgttagttatgtgaaaataaataattttttcataaatattaaataatttaatataatcaatccaaaataaccgttccaatccatatttttacggattggatttgagctattgtgcggattgaattaaatccaaaaaataaaattcgagcggatcgaatatactatgagcaaaataatacagattggattggataaatatccctaattcatatcttctattctaccttttttttctttttcctcacaaaacttttaggtagagatgaacgtgaaatttttatatgattttaattaaaaaaaggttgcatataatgtatttttccaactacttaaaagcagacattatgagattacggttactggttaatttaaaggaccttgtttctatgtttcacatgttctaattatagctcccaagaaatatgctaaagtttcagatcctcacctaaaaatgagacctttaatgagtgcttggttggaaaatgagtagaattataagattattattttatgtattgtaattataaaatcaaaattacctttcctgaaaaacttacaaaaagtagtaggtggagcctacaaaaatctctaaaccccaactaaaatatcaaccaaataggagtagttttttatattctgactttgtatatctttggctagacaattgcctgtcataatgtgattcatatcactctttcaaaaaaaaaaaaaaaataggggtaacttttagattcacattcccatgtaataaacactatatacaaaacaacctcttacatttattgttatctcaaagatgtcaccatatataagttggatgtgagattggagttggggcaatatgctaagataatgcatgccaaattgtggcccgtgtgcacggggctggcgatgatagcagttttggggttttgagagaaaaattaaaatttagtattttattttaaaaaaatatattatcaattaatactttataaattcagtttcaaaaaaaaaaatataaattctaaatagtcaaaatttttagaatcgtatgtattagaaccacaagtttttatcaatttttttaagtgggtattttttttttttttgagattaaatgcatatttgttgttataaatatttattgtgtatgtattaattaaaaaaacatttattatattatatatacgaagagatgataaaaaaataatatgtattttaatataacaatcctagtggagcctcctaagtactaacacttggtttcaattttcagttttatagttgtgctactactcattttattcttttttttttctatttaagcgtttatatattttagctgggactcgaacccaaaacctccaacacatacacaccgctttgtggtttgggttataaatgtgttatattgttagagactttctttatgtgagtatgagaagaatattctttgactatgagaatatccttaatgatgtcgacaaaataatcaaccattcaattcaatgtgtttttcactatgaaagagacaaaaaaaaaagggctagaaatgattttttttttttttttttggaaagagctatctaaaagtacttgcgacaaatatttgatgctttaagtttattgcaattccttctataatttgatagaataaacactacatgaaaatcaaagtaatttttttcataaaaaagagaagcaatgtacttcttacaagtaattaagctagtatttatagacaaaacataataacagaagtgagaaggacatatccaataacttaattacttcacttccttcaaaattcatatttatttttgaattaaataaatataattaattttaaatttatttaaaaataaattaactaaaattgtttaattaattaaaacgttttaaaatgtgttttaaataaaagcacaagatcttacaagcatctaggcaaaaatctcgaaaagcacaaaatcttgcaagcatgagggtttgcatctcggcaagcacgagggtttgcatcttagcaactataagggctttgtatggatcttaacaaacacaaaggtttgtatgcatctcggcaaactaaaagatgcttgcaatctcaacaccacctaaggcttacttctcgacaacagaaaagatgcttgcacctcaataagctactaggtgcttccatcacgacatgcccatttccttcaccatctcggcaaaggttttccatgaccatcgcggccattgagactatcttggctaagatctcttaagaccatattggtcacttcctaaaaagcatctaggcctaaaccaacacttagtgattttttcctaagtgctgggaaggaaacaattgggtgaacaatcccaaggacaagacatgcatgcagacgaatacaagatagagaacgaccatgcctactgcatggtctgctgacgagataaggtacgagtagtggagatatatcacctacatgccctgaaaccccgacaaagggtacacaacaaccactacacttacaaatcgggactatcaaatactagattatggtacaaggcgcaataccatctcctgctacttgtaaagttagggcgtcctacttgccaccttggggaccacttgtgtatctcacgttattagagcctataagtaccccatgttcaatttaaaagaaatttgaaaaattattgtactcagaaacacataaaagcaatacaatatttttcttctccattaaagttttaaaacttgttcttatttttttgagttttattttcatttctcattaagtctttaattttttaaccatattttggttgtcgagttctaaccatcaatgcttatcttaaaaaaactagcttattcgggaaggattacctcatcttattaagttatttgagtaagtatcactaacaaatgtgagactttaattctatttgtattctttatttttcgtggacaaattttttgaatctgtcatcgaatctgtttaggtgaacatatcaatatagtgaaaagaaaaatttacggtaaaatcactgcatgtttgaaattttatacacttaactccctatttttttttatttttttttttggcaaaactctcttatcttcacttccatttgcaaaatgaagacatatgttaaatgctaacttgtacaaccagtttgtgcagatgtgtacacacggtaaattttcattgaccaaataatattatatatttaaatattataataaaaaattaaataaaaataatatttttttctttccttttttgcttatcaatttttttccttaaattaaaatcactaagggaattataaatacgcataaaacttgaacgccctcatatctacctttctctctttctcaaccacgatacatccttttcttttaacttttctctcattttgtacaggacagatgccctccggtgattgtcggtcgaaatcgatggcagatctcaaatctttgcccccaaaaactatagtattcttcccgccactctctcactacaagaaaaataaacaatctcgacggacctgcgtgtgtccaccgagattggtctctatctcgatgaactcttactgaattgtcgtaattggtagccaaagtactttacttttaaaaatattataaattttggaccctatctcgacgggcccagttggaaccgccaagattactgggcccctcgagataggcccaaagattgaaa

SEQ ID NO: 19057 - DNA, 6712 bp, Cannabis sativa
tcatgaaattggggcaaaatttatggatttatatactaattagtgttctgattttgacaaattattgattgtgttgttgaggattctattctgtttggtttactgtcatttttcatctcaatctgttttcaatgggtcgtttccatttgcttctatcaaaccttccattggaacaagatcaagtttgaattttgacaataccaactttaattttcaatggcttctttcaatcttttaacattagcaatgtgataactaattgtaacaataagctcattttccttgcaaattcatggaattattttcattggcaaaacaatcacactccatcaaaaaagaaaggaaggaaaaacaatgatagtaaatgaaattaagaagaaatgttatctttattgaaccttaacagtggtagcaaatgcaatcatagtaaagtaacatcttttttaacaaatcaataatgaagataggttagggtctgaatttgatatacaaattacaaaagtgtatagagtgaagaagaagactctcataaaatgtagcaatcaacacaattcatccaagtattttctaccaaaacaatacataattcaatcaaattttcttgtcacttggctttgcttcctgatcagctattgaaaacttcttcactttctgcattacacacaaaaataagagaagaaaaaaccccaaatgagagaaactcattgcatagtgataaaatacaacaaaaaattgaccaaacaatggggattcatgtcaattagatggatttctgtgggaggagtgctaccaccaacctataaatctcttggtcaatttttttggttttaagtgaaacttaataaattggaatattaggaattctactagtaaattattagaaatttttcaaaaatttacaaaaaataatattataactatacggaatagtgttatgaaatgaacatctttgagtcaaaactaagatctcaacatcatcagattaaagttaaatgtaatcaaagataactaataagctgagcttttaatacaaattcaaaggccacaatttcaattgttcaacagagtttttcatcataattctcaattcaaaaacattgtggagaaccccatttaggtatttaatcaaatcttataaaaaaacaattaagggcaaacaattaaaacaaattcacaatctaacccactaatcctaacaaactaaaaatcgattctttggtccattaactcaaaatcccaaaatcaaatcggagaattcaaatatattaaaaaaaaaagacattaccttggtgagaacgcagtcgcgcaaagaattcaaaagacggatgcatttgtcttgatcgtaaggagattgagtaacgcaattgagaagatcaagagcttcctgagcacatacgggctgagcatcagaagctggagaaagttccattggattttcggaattagggtttcgttttctagagccttcttgataaaacctcgcttaaatctttgatggattattttctattttgcggattgtttggttctcgggaaaaaaagaaaaagtgtcaagaccactttcagttacttttacccaaacaaccggcaaagcacatcgttttccttaataaaaataaataaattttataatgaaaatttaaatatataaaaatatttaacttataatattacatgttaattattatttaataaactaattattatctaaaacataacttaaaattcattaaaagaataataatatactaaaaaaatataaacataaattataaattataaatataaaataaaatactaaacgaattcctgtcagggcggaaaatatcatcccgattcccgtttcatttaacatttggaaacaaaaaataatctctgttcctatcacgttttccatttagacagagaattcctggcccactagggaaaggttcccgcgaacctcatcctcataggaaaaatgtgcatccttgagaattaccttatataccatttttttaacttttttttttttttttcatttttacggtttgtatgtgggttattatgtagatttgagttgtgatttagattgttttgttggttgttatgtcgattttcataaaaatacaaaaaaaaaaactattttaaaatgtaaaaataaaataatcctaaattttattaaaatatattcaaaataataatagtaacaataattttttttatttatttaaaattatacaaatatttttggataattaagtttgttatcatatactaagggtgtgtttaaaagtaactgtatgattattagggtggtaattacactttattttaaaataaaaggtgtgcttagatacgatgaggtaattacatataaattcttaatatcttgtttgacaaaatagttagtaattacacaagaaaataatatttttaattttttttagtaattacacagtgtaattatactcaattctcatagggccataataattggagtgtaaatagatttcttcaattacctcaaattatattgttatagtataattacatagtgagacaaacatgtcaaattgtgtaatgacctccaattatatacaaatttaattacgctttctaaatgcgccctaaatcatgttccatgaattttttaagtcgctaaaattttttcctgaactattgagattgttgaatttaagttcttttgtccaatttttataatgaaaacatgacgtgaatgaaagtttaggggacttgatttagcatatgtcaaaatttggaagcatgatttagtatacatcaaaatttgagagcacgaattaataaatgcacaatcgatgtgagtaaaattaaacgaaatttgacaaaaatcattgaatccaacaatatcaatagataaaggaagaatttttaacgaagtaaaacgttcaattaacatgattcgatatatgtcaaagttcagagtataaaaattctaattaaattttattgttcaattttttttttttcaatgtagtcatcctctcctcacgattcttcattttattttatttttacaaaatataaatttgaaaagtatatgtgttgttattgaaattttgtgtaatcaattattcattaacaaaattattcattaacaaaagtttttattaacaaaagtttttctttgaagtttttctttgatttttttttttttttttttggtgaaaaatgaatatcattcaaccgtttgaatggataaaaccaaattagttaagccaaatcaaagatgcacaaatcttacaaggagatggttaaactaagattattaaaaattctttattgctcttctaaactcttttccataactctttgaagagaacttaaatttatattttatctatttttctattctaatattatctttattcaaaaaagaatttgctatatgcctttttttcatagttattcaaagagttcactagtatcaaaggctcatcgacctaaaagatgataaaaatccacttgatgagataacattgagtagtagtcaacatatgaagtcataataacatctttgccaaaatagttatgaaagatctatgacaaatttgctaacaacttgagaatgggttggtgtaaatggtaatgccacaaaaattaaatatcattcaataaatttaatgtaagagtttggcaactacaactattggcctttacaactaaaccaaatctttctaatggtgccttttgagttaataagatacaccaaagaccaaactatgcaattgtaccttccattgagaacccattattgaatagggcctttcatttgtgtggtttgggtccactttgtagccatgctcattaatttacatttacatatattgggtgtatttgatgttccatgttgacttgtatatttaaatttcatggcatgaaatgaaccatgtaactatactatatatgtgttagattggattgaatttgcatgaagcatgagtttatgtaccatgacatgaatgatgaatttgaatgagcacttaactctatagattcaatagtaaatgaaattaaaaagtacatatttattttggttgaatgttagatctagaatctagtacattcaatcaatataagtggaacacatacaactcatccttctcttccaaataaattatcctagacttgttagatgtttaattttttttgtctttaattcaaaattcctttttaggctttagattcaaattttaattttaatttttttattttaagtttttaattttaattttatataaatattatttttataattttatttgaattatacatgtagtaatgatgtgtcattcccacatcaacgctaaaaacttcacatcaaaattcgattagccacataggacgaaaaagtaatagaaagactaaaactcagttacgggaatagtttcccatagtttgaggggtaattttaataaaaaaaaaaacaaaaaatttaaaggaacaatacagtaattataataattcggtcatatttattaaattattcttaaattacaaatgcattggcaataaatttaagtggcaattaaaaggaaaaaaaaattagcataattcacaatcttatcatcatgtaataatatctaattatttattttccttttttctaaatagaattgtgaatcgattaaaatcccaactcagatcaaataccattcttaatatgaataaataacactaaaaaaaatagaaaagaaaaccatattttacaaccaatatgaaacacataattaaaggtattcctaaattatatgcacatttcatgcaaaaaaaaaaaaaaatgacacccaactttcatcatcttaaattgttttttcatttttttttaaactctaaaaacactcctttcctctaaatacaaaccaaaactcacttttcaaaatatgttcaaaccataacatcccaatcataagacttgaatttctttgactttttcattcccttaaaataccaaaaataaaacaaaacaaaacaaaacaaaaatttgtcgtaactaatccgatttttttttctttctatctaagacaaattaaacacattatttttttttctcaaatgtgttgaagggaaattaatagaagaatttgttccctccaacacaaaagttttaaggtggtaaaaaatggtgaaaatggaatgtaaaagattattgttggttttattgatggtggattgtgtaatgggatttactcatattgttggaggacgatatgggtggcgtgtgcctcgaaatttgacattttttgatgaatgggctaagccaagaacatttggagttggtgatagacttggtaagttcttactatcccttttcatttcattccaaaacatatttattctaatttattctactttcgaaaaaaagagattcatcgatgtatctcatacactatattatttcaaaatttcaaaaaacataataatgaatatcattttattgttgattcaataaaaaaaaatcatttcattgttggagcaatgagcatcttgataagtttttcatcatttcaatctcattctcttttatttcttcataatttcatatttcaaattaatagaaaagaaaataattaccatacttaaaataatgttcttaccaaatgaaattcttaaaaagaaaaaagaaaatcttatattttattttgccgaaaaatacccattcaacaaacaaacttaaatgttatataataacagggccaactctaaaatttagttaacgatagaaaaaaaaacatatatatatatatatatttagactcttatttagaactaaatgtagtattttttaaaattaataaattaaaaatacgtaattttaaaagagagattttttagctcctgaactaggtgcccaacccgcctatacccaagaccaaacctgcataacaaaaaaatattaaatactaagtattacaaatgcaataatttagtttcttccaccaaaaaagaaaaatttaagtaccgaagtgctacaaatataataacttaaatattttcgctacaaatattcttaattttcaattctaatagtttttattatatgatgaaaacaagttgctagagttggtaaaaaaatagttgaattttagtagatatgatttaatttaattttttgtcctgatgagaaatattttcagttttcccatccaggccatgtgggaacaatgtggtatgggtaggcaaagatgactatgaacattgcacccaaaacaatatcaccaaagctttctatgaagggcctttagtcctaaacctaacccaaactggtgactattatttctatagtggtgtgggcaagcattgtgaggctggtcacaagctccacatcaatgttggtgacaaacaagggttttcgggtgacgatcatccgttcaagtacttcgacggtgacactttgtctaattacaccgtcaatgcttcttcccccgacgctgcttctaagctccaacactcctcggccaccgccatccactcggttttcacttctagtttgttacttacttgttacttcttcttgtctttgttctttatctaataatatagactaatataatatcggtattaattgatgtaattaagtattaaatcttacgtttgcagaacttacataatttaatactcaattatgttgtttgcttctcttttgaatgtctttatttaaagtttcttttaatataattgtgttgtaatt

SEQ ID NO: 19058 - DNA, 2658 bp, Cannabis sativa
  modified_base (43)..(47): a, c, t, g, unknown or other
taactaagcgggctttacatgacatcactgtaattgtgaatannnnnatgttttggatttaacagaaattatacacattaaaccataaacatgaaaaatgcatgtaaacataaatgactgttagtcttctaatgataacaaatttgattatattgaaatgggttttatttaaggcataaaatcccaacattatttatagtaatttgagaattacattaggtttcccttttccctatattgggaaaattatagtaaacaatacccttaggctatctcatgaactccagcccataaagaagacaatttactgactaggaagatcagatttggattgatttggtcaagaccgtgtgtacacattatgggcagttaatctctgaattaattgcataatatttgttatatgaagtttccccattaatcttgatacaatactctactatgatttggcaactggaagttcctaatatgtgtgtaggaataaatagggaaactggaagggtcttcaaggaatgcactgtcttgcccttccagtgtcatggtactgaacatgcttccaggtacggttcgtcgaaggcaaaggactttgcaattgtgaagctaagatatgtttctagaaggacatatccaagtgggtctggcccactttaccttcgctaagggtcccactaatgggtcttgggtgctgacctggagtccacgtgtcaaataccagaaacacagataatacttacccccaagcttctagaatgctgcatatggtgggagcttgcatcagtactctttcaatttggacatgtgaaaacaaaagaataaaattgtgacatttcgaatgctactcgactgcacaaagtggcttctgtctgtgatgataatatttccacgtgtcaatcgcatgagagtagaagggcacgaacattaaggagtcattttttggaaacaactatattttttatagttgttcattttttggcacaaaaataaaaaaatagcattttcatcattgatctacgcctcaattttagggaacattaattgtgacgatacacaaattttttaaactctccgaccgttggatgaaacttgtatttttggaaatgggattgtgcaccgtctatccccttttcacgtggattgctttatgggtataaataccctttgtaacttccaattaccacttttctctatttttaaaattttcgacccttcgaagcttataacattcagtgaactttcaaaactaagaaccaaactcataacaattttttttttcaatctagaaaatgttgtagactttttccttcgtttattgttgaggattaaggaatgagagttcccacatcatcaaccccctagtgatgaaggcttttacagcaggagaaattgtgagcctggatttcaacatagaaatcaatttgttgatcactttagcatctcatcattgagaaagggacgatcaacttccccagccagacccacagaggattagcttaacatctctgctatcaatataaggtatgttgcttcttcatctacgaactgtgttttttgatttcaccgttatatgatatagttgtatgttctattgtgggatgcgattagggttttttacttgtgtgattgccatcttaagttgatttaagcatcgtgggccatactattattttgaattttctatttaaaaatccttgtagttggtcgatttgcagttgaggtactagcaaattttgcccaaaatcctttttgttttaggttctgcattaatttctatcgcctttttctctgttttattcctgagttcctatcttgaatgaataactcctagaagttctagtttttggatagtcagtctagttgggacctctccaagcagtttatgggtggggacctccagctccttttctgtgctaggtagttagggtggctaactacttgagttttcttcttttgtaaagaaattatgtctaggcaaaatcgttgagaggaagctaatttagaggaggagatcatgtggcaagaaaacgctccaaaattaatcctgaatgatagtccctgggaagtggactagcatgtcaacaaattcaagaattataataacctaaggatagatgagaccccacgatggctcgaaagtgttccaggactattttgaaatagactatccgttcacagggagatacctagtaagtccacaaaaggagcttcaacatttagagttgggcccatatcgagatggatgcacacctgcctctgaggtgctactttgctaacttttgcgtcgttgccagagagcacctttccagttaattccctaggcttatcacttgatgtcggggtggtacatttttttgtgtttaaaatggcaagcttgtgctgacgccgaaggagatcttatatttctacaagatcaagtcttagcccatgtggagccatacactaggagcgctacactaggagtgttccttgccctaccagctttacgaagtacacacacgacttaagagactactatttttacacatttggcttcccacttaagagggttccttcccttagtttggatttcaacactgcaagtaagtgtcatacccttcttgttggaaattattttaccacgatctaatttactaacaaatatgttggattaacaacctaata

SEQ ID NO: 19059 - DNA, 3500 bp, Cannabis sativa
cccaaaatgcttgggccggccctaatgaccagtaaataattataaaattaaaacagattgtatggaattgaattaagagaagaagaagaagaagaaattgaacaattataataatctataaaataaattcaaatggttcacataataatccttaaaagaaatttagctactagaagtcattttaaaataatagaaattcaattaaaaacataaaaaatagagataaaggagatagaacactgtttggagtccttcaatagtaccttctgctcttatccttccttctatgctcagaattttttaaatttttgaatggtctcaaagcttgacatcaaccctctttttataatgcaaaaatcaagttttccaaaatcagcaaggccatagccttccaagcgagtttccactttacaaattcttcgctgatttttggtttcccaatttccttttttttttccaagaactgaaggaatgtcacggccttgatggccagtttcctcttttcttgatttttcactttattttcagaaagtacccactcttgactatagaccaagaattttggagctaaaaatgcaaactttgaccaatttgaggcaacaagaaatccaactaagtattattggagtttactttgtcgttaaaattacctatttttgtctcaaaaaggcttgaagaataccaaaataccaaaaacaaagatctcccaacatttatcttgaaaaacaaataaaaacaaaaactaagcataaatctgaacaataaagtgataaaaatactaaaacacatactaaaataaactctaaaaaatgcataaaaataaacctaacaccacactattcaaggtggtactcagatctttatggaagatcgtgtagatttgtcgctcttcgagtttaaggaagcattttaggttcatcacttgacaataccctactacagaaagggaattaagggttagagtgattaaatagaaggagtcactaattttcgctgcaactaatgtaaggaatcctaaacttcatatgttatttatcattttatgaattttactgttagattattatgtcataatcaaacatacgtgtcaataaattaagatcctcgtaaaataagttctaacactacaaacccaagacctttattgtctccaacactcctcttgcacttgctcaagctttgcaaagtatttaatggaaccaagctatggcaaatgaagttcttgcccttgctagaaatgccacctggaaagttgttcctcttcctcctaggaggaaaactataggatgaaagtgggtttacagggttaaagagaactctgatggcacaatcaacaaatacaaagctagattagttgccaaaggcttccatcaatagtctggctctgattcacaaagactttcagtcatgttgttaagcttgttacaattcgagttgttcttactcttgccttatcaaaaggatagtgtgttaggaaattagatgtaaacaatgcattttttaatggttcactccaagaggaagtatagatgacaaccctttagctttgaaatcaatcatagcagcaatttagtgtgcaagctccacaaggccttttatggtctaaaacaggctcctagagcctagtttgaaaggttacaacaatgtctactcagctttggttttgtctcttctaaaattgatcactaaatgttcactcaacatacacctcaacattcagtcattattcttgtgtatgatgatgacatattaattattggcagcaatcaataagtcatttcaacactttatcaggcttaatcaagaattgtcacttaaaaatttaggaaacttaagttatttgctagagattgaagtgaaagatacacatgaagggatgatcttaactcaggctaagtaagtgaaaggcttgatgtgcaaagcaaaaatacaaggagccaaccctaactcaactccaatgacaaaatggacaaagattatttgcctatgaaagtgatctggtggaggatgtacacttgtatagatcaattatgggagctttgcaataccttagcaacaccatacctaaaattgctttcagtgtgaataaagtgtgtcaattcatgcacaattctcttcaagttcattggctggctatcaaaagaattttgagatacattaaggaacaatgaaacatggattgcaccttaaaagacctgattccattgaattgaaagctttttgtgatgcaaattgggcaaccgatcatgatgacagaagatccacttcagggtttgctgtctttcttggtccaaattataacctggcaatcaaaaaaatagcatacaatctctatatccaacattgaagttgagtatagaagcttagcaagtgttgttgctaaaacaacttggctgaagtccttgtgttttgagttgcatcttcacttacctcgaccaccaatcgtttggtgtgacagcttatgtaccattatgctaactcaaaatcttgtgcttcatgctaagataaagcacattaaattagatctttactttgtttgagaaaaagttcaacaaggactagttgttgtcaaacatgtacttggaccaagtagcgaatggctttacaaaggcaaatttcaacagtaggtttgccaacttcagatctaatctcatgattaaagatgcttcaattataaaattaagggaggatgttaaagtaaaaaaaacagttagaagttggttaagtttttgttggtgttagttagttttacagttagcaattcagttaatatgttagttgaattttgttactttgcaaacagaatcaattattttcagctcaatacctttccgatctttctcctctgttctttatctttctttcttttcacttaactaaaatgtctaagaaattcaaccatttttatgaagaaattcaacactttttatgtttcaatgttatttatttgtagtggtttcttatttatttgggttttttttttttttatgtgagatctagattgaattttatcactgaaaaaaacaaaccaaatattattaggtactctgtcattttaaatattaaaatccaaattatttagcgcttgtgtaaattgctttacctgatcgcaccatatttttgcagtgtaatttatacgttttgagctcttgcggtgtaatggtggtttaagaaataaaaaaacaacatgtacaatttgatttgaaaaaataactgaaaatcacactacctgtacaacaaatacctatattaattatgtaaaaattaaagagataaaagtttttcgcatccaattaagaggacaattaaggctagctagtccctctgccctaagctatgaacatggaatatataatttactcttgtcttcttcttaacctagagaagtatttattaaatacctattggtctcattctcatccaaatcatccctacctagttacagctatattgatttaaaaagaatatcccatatatccacacaatacatgtatatatat

SEQ ID NO: 19060 - DNA, 3629 bp, Cannabis sativa
  modified_base (92)..(95): a, c, t, g, unknown or other
ttgatattttgattttttttttcaagtgtaactctatttagttataacctcttaattagaatattattttcttagtcccaagtgtattcttnnnnagaggttctactgtatatatattcttttgtcaatttatcttacttgttcccttttcctttgaaaatatagatctcaggatggattccaagaaagtactaaacaaccccaatcttttagtgaaaatgggaagtaaacgagttgctccaaatgctaaaggttcttcaaaacaacctaaagctccaagaaaaaaagaagaatgaggataaatcacaatcttcaacccttccaccttcttctgctggtgagaacatccttgcatccaatccccaagctcctactattgagatctttgagcctaaaacccaagataaaggaaaaaggattgcgcaaaaatgcacaaagtcaccttcgatcctgacaacccttaggttttattgttgaacccaattctaccccatccccaagaagttggagtctcgtgtgcaaaatcttgttctggttttattgccgagcactacatgaaatgtcacttttaccagcacaaaagtttgtattgcgctggtaaaataaaaactaatgatgtgttggcaaaaagggttggcaaatgaacatcggtattataatttttgccagcacaaaatgaaaagcgctggcaaaaatgaattttcccagcgcgtaaaaccgctggtaaaaattagattttagccactccaaatgtgcgctggtaaaatattgacctttttgccagcacaatttgcaaaatgggctagtaaaagttactttaacttttacttttaccagcgcagtagcgaactatgctggtaaaagtgacatttcttgtagtggagccagtcgttatttcaaaaattatgtgaaagacgactaggatctcatcaactacagtttttcttctgacctcctctgccaaagtgatgatttaatgttcttagtaagctccctcacatatcttcttattcctttttccttcttttatttacttcatactctaacgatattacatgtctctcttcaggctgctctgatagctggcttgggcttccaagcccaccaactgaatgctacctctctcacgcttgaactaaacacatcacttcaaagttgtgaaactcttactaacgagagggattttgttatcggggaagcgaacaagttaaagaataaaattgaaaagctcaaaaccaaacacgaatgcgatgttcaagaaaagactttgagaattaagagcttaaaaaaaactttacaagaagtcacagagaaagtgaaggacttggaggtaaaagaatatgattccaagaaaatggtgaaagcagtagctcagaggtctctcttcaaagtttcgtaaagtaacaaaggaatcaatctcaactttttgcagcctaacgtagaaaagagtgtttctatctttaagaaaatgaaaccagaagagaaggctgcagagaaggaaaaacgagcagcggaagggattggcgatattaaagaagaaaaggaaaaacgtggatatttaatctctcaatgaaagtatcaaaccgttaactcagaattttgttaacattaaatgaggcttagataattaatactttgaattcaagaattaatacaaataataaatgcaatctataaataataaatgtaaaataaagaatttttaacgtgattttttagttagctctacacactccacgagttcttcttatttataagagtattaaagaaattctagaaccaaaatacaagattagtagtcttcttttgaaggaaaaaaatggtcatccatcttatattgtttttcccctatttataggcttaacatagcatgtacttaatcctacatctacaacgattcatgaaacgtggataatcttcacgtttcacttatctttaatcacatgcaagaaaatacacacttaaacattttttatttgaactacaaggaaattagggttatgtttaatcttattaaagacacgctttattgaatttgaggatattcaatctcgcattaagtttgacattcctctcctcattaatagcatataggtgtcatataacttctgatgacgtattatttgttccaaatttacttgaggccctattcttttctttattctattagttgttgtattgtcgagaaatatgattccttctcttcttgaggtgtttatgttaaatatttagtcaatatacgagccaagttatattgccaaatattaatactcgtgtcaagtgttgacttttcatattgattgcttgaaatatgggagataacatatattattatttctattattaatgtatccattcatttatttctaaaaaaataaattaaaaaaaaaaaagttgagaagaattacaaaaaaaaaaaaatacacttttcataaaaaaaaatacaaaaaaataatcaagctgtgaaaactacaaaaaaaaaaaaaacttgattgtacaaaaacaagctaaaaacgttaattttgatttgcatatttcaatgcagttgatatattgtttttttcttttttctttgtagatgttttgttttgtttttagtcgctgtctagttcttttatagttgctttaagttgtttcttagttttgtttttttttttttttacggagacaccgtatttttattattttaaaaatctgattttgtaaaaatgtaaaaggaaaattaaatcagtaaaatttttaaaatagcatataagtaagtatttatgtaaaaatccaacaaaaaatatataaatcaaaatttagtataaaggcccatataaacccatgtagcttgtgaacttacacctgtaaacctgagcccaattctccaaataaaacactggatttcaaaagggctttccaattttagaagtgaaagtaaatgttcttctttccatttctaaagatgtaattgagaagaatattctcaaaatgcagggtaattttttgatattatttcaatttcacctttgtgatatctctatacttacttactacattggacatttttataagaataaaatccatctctctatagaaggtataagatcccatatctcatcacttgtactatatatgagagttttacaaagtattagttagaaaaggaaaatgaaattatagataggtagctgtccttctgtttttacaaaacaatggatcaagacagacacgtcactactcccacctccaattttaattcatactcttccatatataacacaatgaatttttgttctaccagcaatctcttttgccaaatacagtgcatgcaatgtaagagtccactggcacaaattataaggcaattaatgcattgtgtcttaaaacggattgaccacggaaagaattaggttatgctaattggcggtagtactgtagtaaatactgatttagttttttgacaccacataataagattggtaccgaaacaatgtctcacaaataatatggaatttgatacaactacgcgcgtaaatacaaacatactaatactatcccaaatatatgtttggttaaaaaaaaaatatatatttttatttttacagttcaaaatagttttttttttttttataattttacggaat

SEQ ID NO: 19061 - DNA, 6211 bp, Cannabis sativa
tatttttaatgcactcgatcccaacacaaactatccgggtcccgagtccgggtccggtctgggtccgggtcggggtttgggtcccgaatttgggtccagttctgggtccgggtctggggttcgagtctgggtttggggtccggggtccgagtccggggttcgggtccgagttcggggttcgagtccaggtctagggtctgggtctgggtttcgggtccaggtcggggtcccgggactgggttcgagttctggatttgggactgggtccgggtcccgagtctgggttcgagtcctaggtcgaggtccgaggtttgggttcgggtcccgagtccgagttctagtctgggttcaggtccaagttcgggtcggggtcgggtcccaggtctagggtccgaatccaggtcgggtccgggtccaaggtcccaggtccgggtcagattagtgttaaccccaaatcctttgtaaatattataatacaagctaatacgaatcatttattatgtattaaaaaatttgttcataataattaatacaaattaatacaatacattgttttaatacaatacattgttttatccaattgttttatccaaacatagtgttttatccaaacatagtgttatttattatttaatacaatatgatccttatacagcgtaccatacgaagtgttcattagaatacagaaaaccctgacctaatcatttgaaaaaactacccaaaaaacagaaataatattaaaataaagatgccgaataatccggtctttcttgtccaaacaaaacacaatttcattaaataaagtgtcaactgctcataggctattaaagaccctactgatggggtctttttcagaggctctataaaaaaaatcctccaatattcattattcaatttcaatgcatgtaaatgcaaaacatgacatgagcaataatttaacagtaggtttattttcttaaaagttaaagtggactcgttaaaatcttcaatcacgatatggtgtaagatcaatattgaatggttgcttccccttgctcaccctctgtaagtaaacaaagacaataatatcaagtcaaatatgattcaactgtaaaaataccaaagtccaactatcaaggtcattctgttgttggtttcttcaatattcttgtttgaaggtaatcaaggaaattaaatatattttattatactctaatataccaacaatatctccattttatcaactgttgttttattgaacttaacaaaatccatttaccgttttcgttatgtaaaaataatattgcaatactaaccaaaaattatttagatcattagcataatcatccacgaagacctgctgacaagtttctgaactaacttagaagaccatttctcatgatatgggagtgaaagatttcttaataagttacacttatggttaaaaaatctcaagaatatacctcatcgagaaagttactataaatcttttggtgtttacaacgtttatagttagacttgattccatatgaattaaaagtgcaccacttccagttatagaccaacaacaatttgacacactccaagacgcaaaccaatccaaatattaagtaaagcaatgaacttactgcaattgccacaagctctcgaagaagttcctccaaatggcgcaatggctatttttttttttttttgtcaaaatcagaaaatagaaatcagtttacttagaaaaaaaaacacagatattcccataaaaacatgcctttatatacacacaaaataaacctacccattgagttggaccatcaacgggcgcattcaaaggatcgtcatgcacctaagtcaagttgaactcattagttgatgtacgaaaaacctctggctcatagtttccgatgaacacaattctctgtacgctaactatacataaatgctaagaaaaaactactacacaacgaaagccagggaatcaagaaacactttcattctagcaaaacatataataacaattactactaattttttttaacaaagtcctattgctgtaaaaacgttgtttacaatacttgaataagtcagctcatacacacgtacacaaacacccctattttctatacagatttgcacacacaaggaagcataaaatcttaaaaagataagctttcaacagattctttgtacctccatgaaaattccatcaacaccaacagcaacggctgtccttgcaatacatggtatcaattcacgaagaccaccgcttgcaacacctccaccatccaactaaaatagtatatcgatcaacaacatgaagagaggtttgaaaaccaaaagaaaacaatgacaaaagcagaaaggaaaaagttctaagcaccctacaaccatgttctaagatttaaattatcatgttacacaatcatatcaaataagttaatcatgcaagaacaagaaattttgacataacaaaaaaaggatctacataagcacatgtgagtggaactcattataatacttcttagacaaaatggtggaaatgtaaaaaagcaaaactaaaatttacaggttaatgaaaattatgtacatacatttctatgaagttatccgtactggcattttcctaatggtctcttcttttttaactgataaaaaatcttttgagtgatttaccgtgctacttaagataagacccacttaagacgtcaaatgcaacagagagaatatcatgaggaatgtggaaaaacaataaataacagggctattatggaaagagttctacagagatcagtattatcttgaaaattttaaggaatgcaaaacaaataaactatacaaaaaatacaatggtttcaaacacaggacaaaactattgttcacacaagtataaaacatgggagcaagtagcacctttttcccagcaggctgttgcagtgaatgtgtaacatcagcaacctacaacaaaggtcttaaatcagatgatttgatcatccacctaaaacagtattgacagaattatatgtgaagataatcacaataaatttataagttctaactattgatagagcatcttcttaaatgtggaggccagagcaaaggtaaataaagacagaatataagtaaaagagatgtaagtacagacagtacaatgtaaatgaaagagagtacaaaataaattatgcaaaagcagaattcccaaggcaaccaatctaggttgaagcatttcaagtcataggagtacactttttttcatttaggtggtatcatttttactaagagatctgatcaattcaaagtaaggatatcaattaatagagtatcctttaggggctctcgtaaatgtataaaggagagaaccatagaaatattggaacagtgaaagcgtttgaagcccctaggtaactctctacatctataacatcattagtattacatgtcaattcgtataggaatttctcttcaagtttacattcattaacaggacaaaagttctaattaaatgattattttaaatatacttaaattcattaaatatatattgttataatgagagcttattccgcactgcctccatcccacattaaacttagcatatatttaaacaaaatacaaagcagcaatgataatagtaacaataatcaaactcagaacattgagagtttttgcagaaactgtagtacagattgctaaatgaattaaattagagctggggtagtcctcagagtgaagagacattgaggttctatgtagagaaggcaagacaaaaaagcttatgtggcctatgagtgtttcatttattttttgggggggtttggttggaaagaaacaaaaaatcttttgatggacgatcaaacgatatagatagtctttgggataaaatcggattacgggcaggcatctggttgtataatgtaaagtttttaatgatgttgcattctctagtttattcagagattctctattgtgtaattttattcttgtttaggctttgttttagttcggatcatggttggtttgtgatactgatgggtgttcttaccacccccatgcactgtaatttctcattatcaataatttaaaacaaggatgttttgcttcaaaatttataataataataataataacaatgacatgataaacatgaaataatgcaggaaaaacattacttacaacaggacaattagcttctctcatccactccaggttgcgtggatcaacaatcaaatcatctggcatcaaatgcatatgtattgtcagtgcatggggacatgcacaagaacatttgtttttgatttaaagttgaaaaatgacaatttatagtggacatgcacaagaacattcatgcatgccaaagagaaaagaaaaaatgcatattctaatatctttgtcaataatcctttgtagactactagtatatctttaacataataaaaggtctaagtcaaataaattaaaatacaagagacatggaccacttattgcttactgtatccaaacatagttcccctctcacagaccatcacatttgaattaccagccagcctaatcttttcaacactattttccatgacctaagaaaatcaaaacattcgattaatcattaccgatagaagcaaaaaaaccaatgaaccatcaaaaaaaatacaaaagaatgtgagaaaagatcacttgccgaaggagcacaaaactggcccttcttgacattgataattttcccagtcttggctgctgcaactagaagatctgtctgttcaaacaggagatgtgaaacatgagataaaatggcattgctagtaaataactaaagcacccttcataaaatgaaagtgcaaaaacaaaggatagaaaacatgcatatggaggtacgcaaacaaaaagactactgttttttacctgacgacacagaaatgcaggaatttgaataatatctgcaactttgccaactgcttcacactagataaagaaaataaagtgtcataatcagttcatgaaggtcatgtcatgtccaaactttccttgctgtgttatttggaagctgcatttaattaagaaatatgattaagaaaattctttgataattggaaactgatgaagaaattatcatttttcatgagatgtattagattgtatattaacataaaagttgacaactcaacctaacaaccaaaggtggcaatcattatttagcactgaaaataaaaaagctttaaactctataggtttaaagacccaaccaaaatagacacctaatatttaattctaacacaaatggatgaaatatcttattgtttctttcaaaacataggagccgaaaaaaggccagaacagaaacattccacattatcttttctccttctcccaaaagtacccttgaaactacctattacatctgttcatccacgagacaaaatattctggtaaccaacatgcctaacccctgaaaacattcttgaccatattgccccaatgaatgggcaatgtacaaagatatggtcactgaattcaatattatgtttgcacataacacctgttaggtgagtgttagaccccctattagggtgactcatgccaggttgcctaaggctaatgctaattaagagtcttatctgtttttgtggctgaagtgtcttatttttaagaactgtcatggtagtccctgattctgatactgtaaaaaatacttagtctagttcagttgttaggcatcaaagaataatctgtcagtaattgggtctagaattcggggagacatcaagcatctcaaatagcttgaaaccttttgcacagaacttagtctaatatcaatatagataccattctcagatttattcaagaactgagttggagaatcgcctatcaaagagttgtgtagaaaaggatttttgtaaaagtaggttctcgtgagtatttaagtttttcaaggctgcaccacctaaacatcgatattctccaagctccgtgattaactagcaaaggataaatccaaatagtggagttgttcatcctactattccagagaatgatcaatcatcattccataagatggttactccgaaaaaaaaaaaagaatatcactcctacacttgatttttcagatcttaatattcctattgcccttagaaaaggaaataggacttctaaaggtcatcctatctatctatctatctatatctatatatttatataatccttttgttaggagtgatgacatggcatgttatacttcttagtttcaatatta

SEQ ID NO: 19062 - DNA, 2512 bp, Cannabis sativa
  modified_base (2319)..(2319): a, c, t, g, unknown or other
atcgctagccaatcgcaacgcgacatgtcgcgaaggtgctaggcaccactggtgcctaatagcaatgctctttataagaaatgttaaacacacccatggaattaagattattgggaagtgtaatattattacgagtgtaattaaatatcagattctgcttattttattttaataaaaattataaaaaattattactacttataagatgtcacctcgtagatactaagcatcttagtgcctcatagcaatgttctaagcttttgggtaattttacaatgtgctcctaaagttaagttttattaaactccctatctgtttcgacatctaagacattttattgattttttttttatgattgcatgcgttgtagctatttaggactacttataaattttcaaaaaatttagagtagcttatcatgctgaaaataaaatttatatagtaagtaattatttaaatgttattttcgacacagtaaaatattctaaattttctaaaaaatttacaaattctcttaaatacctacaacgtatgcaattgtgaaaataaaaattagattaaaaatttcttctaaatgtcgaaacagataaaaaatccaccaaaacgaacatatatatgagagaaatttcctaatatttttaatctttatttctttccttcaaaattttatttcatatttagccattcgtgttactagaaacttgagtgtaaagggtacatggttttgaatggtgagtgaagttgttaataattcaattctacaagcactagttcttatgttttttttttctttttttggtagaatttcttcttagttactaaaagaaaaaaaaaaagtgatatttaattgaaacaaatatatatatagtggtataaggctatgaaagaaaatgttttcacatcttatttgtagtttctttgcttcaagtccaattaagtaattgggcccaatgatgtatgttccctttggaatttgtaagcccaccatatttgaaaatgaatactaattttatcactattacaaagtttactaaatgtggaatcattcactgatttaaattgttaaataaaggctaagatgtatatgtgatgttgataattatccatttcattttttaacatgcataactttaattgtcaaactaactaaatagctatgctatttaccatttttagagaaacatccatttatgcacaaattcaatctaatataatcctatgctgttatttcattatctaaatttgttggatgagagttttcaaaactatttttccccaaaaaaaaaaatgtatttctatgatttaattttgtagtatttttcatctttcccccccaaactattagtctttaatgaccatgtaaaaaatatttgacaaaaataatgttcaaatgactatctttaaccatctattttcactaaattggtattagtgaaaatagattattaaaatagtattatcctaagaataaaattaaagagatgttttgagaagaataaaaagaaaaagacaaacttttagcaaaaagatcatgagatttgttttatttaccaatcacaaattagtccataatagctagaactaattaaactacataagggaaaaaaatgtgatacatattttagctgtcaaattatgtacttcttacttttttatgatgggagtgtgaattaatttgagtaatgaaatttagtgtgtggtgagtagtgaatactaatgggcccatttgaaggtcttaattgaaaggggattttttatttatatacgttatattattataagtattaacaaatataacgataataatttaaatcatattataagcgctaatgctatacctatataaaaataaatgcatgcaatttccttgggcctgggccactattcaatagcgcatctttttttttttaatgcatgaccattaacctttgttaatttttgattatttttttcttcttttcacttttttttttaatggaattcattcaattcaaataattataaaggaaatggcttatcaaaccaaagagttcgacgaatacaaaggaacaaaactccaatccgcttagcactcgctttagaataacaactacactattaattattttgattaaaaaatagtactaatatgacctactctttaaatgaattattttaacacgtgggaagcatataattttacaccatcacaaaataagatgtttgaaactaaaagtagctatttagtttatttaataaatttttaaaaaataaccaaactttatactcaaacaaattcatgaatatatataccatactaaaagtatatatatatatatntattttttttttttgagaaacatattaaaagtattttttttttgacaatatattaaaagtatttttgattgtactaatctataaaaataaaattaattttatacttaagagttactaaatgttattaaaaaaaaagaataagacactaagatgtatactaattgatttttatttaataagttctatttcgaaa

SEQ ID NO: 19063 - DNA, 1695 bp, Cannabis sativa
tccaaatgccattttcatccttgagtttggaaatcgaattgtgtcttctacgagcagaggcatatgcatgaaaatacttactgttgtgatctccttctcgaagccataactgctttgatctctgtttccagaacacttcccgttgtgtatagacttcaaaaagctgcttttcagcctctctaaacttctcaaccgaaccagcatctctaccctttctccatcttctgacatcttctttaagtcttttgattctgtccttgaagtttttagtgtagctcttaccccagtcggccaaaattgaactacagtgagagattttatccataatatggcagccattattcaagtcccaactgtcctttattatttgagtgcacattggttccctcaaccaagcattttcaaatctaaagcttctcttagcagcaacagattcaatattgcaaggaactaggaaaataggacaatgatctgaactcgaccactcaagattcaaaagcttagccgtgttaaaaatatcaagccattttttattaactaaggctctatccaaccgggcttcgatccagttgttacttccccttcctttctcccatgtgtagtggtatccattgagatcaagatcatgtaaatagcagtcagccaaagcacgattaaagccttcaacaagccattctggataagcattgccaccttttttatcatcttgacttgttacattatttaagtcaccaatgatgcaccaagggaaatcatatttcttagctaaattcctcatcatattccaagttttggaacgattattgcgattaggttcaccataacatccagttagacaccaaataggattatcccccatgtgaatacttacatcaatatagcttatagaataacccaagacctagacatcatctttgttcttccagaggagggctatacctccacttcttccaacaacatcaactgctatatgaccttcaaagcccaaagagactctaagtctttccacagaatcatttttacaaagtgtctcacataaaaatacaaaattgggccgcttttggataacaagatccttaaggaattgtaaggcccgtgggttcccaagcccacggcaattccaactaaggatactcataatcctaggtaggcctggaccccaggacccaccaacgacccattttttaaaagcccatttggatcaaggctcttatcattttccacatcatttaaatcctccaatacctctgtatctgtcctccttctcttcgtatcagtcacaattaaagtgtgaactggtatatgctcatccattccaactggtattgtttgactagattgaataccatcatgtttggcaccattaactccatgaatctctccaacattaattaagtgtggatgaccattatcgggaccataattctcgcttgtctgattcccataatctcgagcaaattgatttctagcattaaattcttcatcaatcttgccggaggcacttgattcgcctgagaactgtttgtcagcctctgtttcggtacgcaaccactgagcaccaatcttctattttcttcttctcggttcagccttcatccataagccataaggctttccaatttgttcactatcagactcaaacaatctgttacagaatctctcaaaatggccaataatgccacatatgaaacagaa

SEQ ID NO: 19064 - DNA, 3880 bp, Cannabis sativa
gaagatttaaatgtttcatttttgattcatatccatgtctgtttatacaactaattaattatagtatgctatctttatatattatatatagagatcagagtattacatatgcatgatccgaaaactgaaatgtaacatgcacatgtacctatattgaattatatatatatgacgataattaatgatgatttccggaaagttagcaactgatttcacattaattttgccaatatatgaagtcacaaattggaacccttgacaataacatagtacctttttttatgaaaaaataaaaaagaaatattagaagagctgttacgtgctcaatcgaattacaagtaacaagacaagagaagcttttctttttatagaatagtatataatttaatagtttaaaactagaatatttgatatatatatccccttgtcaaggtctacacggttttaattcatttgaaaataaaaagtaacgagtttttattagtggtccaaaattaagaaacgacaattatatatggatagatatatattataattttttcagtaataattaaattaacagtgtcctctcctctccttaatgtgattaattatttaatagaacactataaaaaaatattaattatagtacttcatatatataacatatatatacacatgtgttatgacaaactgcaggggcctgctttgttttgcgtaaagattagtttaatgagttaatataagttacatataattaattaaaatatatgtagacacatatggtagttgattatatataattaagaaaaggctgaaatggagaaaagggaaagtgggcgggcatgatgagattatctgtcaagagtgtataaataaatatatatatatatacggatatataactatatagaagtaaaggagagattggagagttatacatatacatatatatataaatataaatatttattaagaggggttagggggtaattaattataaagaaatgaatagagaagagagtttggcatgcatgatgatgtttccccacaacccaagaaggagaacacaacaacacagcgacgtgggctttcatatgcccttttatgtcttcttaatgacattcgattcgattctaccaaaacccatgtgcttcccaccctccctgcacaaacacacactagtactctcttatatatatatctacatttctaagttcatcaatttcttccttttttttttatcatctatacctgaatatagttttatgttccgatgcagttattatataaatatatatatatttagttaacatgtgattctaaaagtggagtggctgtttttggcagcctctcttcctgaaaagctgagtattttcttttccaacccatcaaaacatatggtctttcgaaaaacaaagggacttttcaaacaaggtcaatcacgactactctaacagagagtaccatttacatacatattatttatacccaatttaattatcatgcatgccatgccaacatatcacatatcatatatatgtatgtgtgtgtcatcaagtttttttaaacccccgacatcagacttttctacgcatttataaacaaataacttcttttagtgatcaattaattaattaatttctttatataataaaattcattaattaatttcatatataactggagataagtaatgtatgttttatataaaatatatatctttaaggagcgtctacgatgggctatagtaaaaatgctctagtggggtatgactttagttgaggttctttgctgagatttttagagaaccaaaatatatgtaaatgcgaaagacagagatgaataataaaaaaaaagaacactagagtttttacattgaggtgttaataaattttaatccacgaatcaatattacgataagattgtaaaaatcttataatttacacgagtatttgaaccgtagaatttacctgaacaattgaggaatgagattccaacacttgcatgaacgagtcttcttatatttatagtgctagggttcttattcgttagacttttctcactaatagagtaaatacaaataatatatattgacttaggcccatttggtggagttcggcccatgaggcgcttactgtatgctgaggtggcttgtcaataaagtgtcttactttcatggatataataaagacacattaaatgcttgatcaccaattattatcttcctatactaggaagatatgatcatcagatgagatcttgagagttaagtcctgatatcatgggatcttgtaactaatgaatatataacgaagctggatgcgtctggattgaatcaattgcttgatctcttgatgcttctgttggatgttagtccctcttacattccaatacaggagtatatccattgaaagcagagggatctccccccctccaatattatccacactctcctgctttgttagagactcaaacatattattcacaacagttccttctattcttccctcagtcaccactttctttcctttaatcactttttgaaatccatcttcatccactatcttctcttccatattctttttctgctatggaacctagatctgtttccccttttcttctactttttcttttttcctacatgtactagtctcatgtccaatgctagagcaatggtaactaacaagaggaatccattcgtacttaacctccaggtcaatatcatggttaaattcatcagtgaaagatatcgaattaggaaattcttgtgataaactaacctggataaggactctgagatattatagtcgatccctgttcttagtaatggtatccacttgcaatggctctcccagctggcctacgattttgagtaaagaggtctcccccaatacttaatatccagacctttaagttgaatccatgttggtacattaataacttcttctttggtaaaaataaaatcgtcaatcgaattccatcgtttcataaccataggtttcctgttaaaaaatatgtttccatgctgcatcactttgtcctgttgctccatattctggaaacaaatgatgaagatccctttagcaagaagacctactttaaccactgaatcattccatatgcatctaacaatccttcaagtatgctgatagggggattggctcctattacatagcagattagagaaggctgccagtaattaacctcctcagcaatatcagcaaaatctatcttcactttgctcttcgagctctgaatatcttcttcattcttcgatttggagcttccaaatctgctttccagattatgcactatgttagatctgagtattggaggagaaggattcttcccaatactaacatcctgatctgtcctattagtaatagggttgtacatcggtcggtttgttcagttttgactacatattttccaacccaatgcaaaaaacgggttgcaaaagtctaagtgcaacccactcaaataagcaaaaaaaaaaaactgtgtaactcgaccgacggtttggttgggtaaaccagtcaaacttcaatttttttttttcaatttcaaatttgttagaaaagctaaaaacataagcaaatactatatcattgctaatgattctgcttagttaccaaaattaatgcaatctcaactctttaaaattcaaaaagacagatcaaattcatacttcctcaacaaattaaacaaaataattaacgaaagaacttatcaatacaaatgctgcattttaatacaatgtatccaaagtttattgttcaatctttgttatcattactcacaaattactttataaataggttagatgtaataccctggaattaagaaatggattagcaaattcctaattagataattatgaataattgaggaattatat

SEQ ID NO: 19065 - DNA, 4230 bp, Cannabis sativa
gctgcaaccactgtaaggttcttgaaactttatatgtgtttatttcatattgttttagaagttcatgcttgggatgtttataacatacttgttagtaaatctagattctggtaaaataatttcaacattctcaccttccaaagtttcttccaaatttctttctctggttgtatcgaagacttttgcatcaaccaataagcactcttgacagagaaacgcccattcatacatgtacttaaaccaaaataattaatatacaaacggtgtagaaaacgttattattttatattaatttagattacaatatttatataaataaattattaataacgtgcatcaatgtaaatttttctaaattaattgttacaattttttttaataggttttatcttttgcttaataattaattttaattattattattacgaaaaatattataattaataggaaaaaaaaaaaaaatagactacaaaactgaaatattaattaataattttaattaatataataattaacataaaatacataaataaataaacttaaattaatgagaacaaataattaagaaagtaaaaactttaggatgacacttcagcaggttaaaggtttgtgattagcattatatagatatatatagattttaggacaattcatttatcctaaaaaaaaaaacaaaagcgtttaaaatggtaagccattaggctttgagaattactcggaaacatagcattttcacacctcttaaaccatcccactcttccttaccattttcccttgcgggtccctttcttctcagaggccccccaatatttttaccttccaatcaccaccaccattttgcagctttcttgcttcttcttcttcttctaaccggccagccaccgtccctccttcttcccccctctttctctcttatcatcaatctctgaaatttgttgactatttatttctcttttgattctatttttctttggaagcacattttataaaatcattctaaattaaagaaagatacccaataaagaactcaacgaaaatgtatcggaacgagtgaaataaaaagaattatagcgagaaaaagacagagatggagatcgagattgggagaggggggagagaaataggtgagttaagtatgtaaaaggaaaatacacacaaaaatatcaccggggcttaccaagaccagtgagccttaaagggatattttagaagaagaagaggaagaagaatagtgtgaagcgtgtgagacatagataataaaaagattaggcaagttttgggatttgggtatcgattatttgtcgtctttttttttttttttttctggtatttctttcttgtaatgaccccttacaacaacggcagtgcacagagcgaaggtgggtcatcaggttcaagcggaggaaagtgtgtgagtgggccagacggggccattttgaagaaaggaccatggacagcggcggaggatcatgttctaatggagtatgtaaagaaacacggcgaagggaactggaattcagttcagaagtattctgggctcaatcgttgtggcaagagttgtcgtctcaggtgggccaaccatcttcgaccaaacttgaagaagggttcctttacccctgaggaggagagactcattcttgaacttcacgccaagtatggcaacaaatgggctcgcatggccgcccaagtatgtacactatttatacattagtaatgttttgtttgatgtcgtttcgttgttcttatattgagaacgacaattgcactttgttctttgttcttccagttgcctggacgaacggacaacgaaatcaagaactattggaacacaagggtgaagaggcgcaaacgacaagggttacctctatatccacacgacattcaacacctctctccaacgagctcactcaccccaataatccaatctccaacgacaccaacgacaccatcgtttcccttccagagccaaggccatgtcccattctcgcccactccgccatcccattctcctatgtcttctccaatccaacctttccctagtttgacctctccttcctcttttgaacacaacaactcttctttcaccttctcaaacccttcatccttcactttccaaagacctgttcccgttctcggtgcccctgttcgtttcaagtcgtttcgcgactcaaatgggttttctctccaaacccaacaacaaagtccttgtccaccttctcttgaccagtacacgccgaaccagttgagcgattctggttgttttcagtttccgttgaattttgacccaactttacctcaaaatattggaacccatttcgattctgagcttatgaattcctctggttcaatccgctcggtgaagtcggagctcccttcaagccaatttacccaaattcattcggaaattacgtgtaataataataacagcaacagcaacagcaacaataacaatactaataataatattaataattgtaactccaaggttgtaagctcagcaacaacccagagaaatggtgggttgctggaggaccttttagagaatctgttggaggaagcccagaggtctgttgagagctcttcaggtgaatcgtagtatgtgtgattatgaatttttctaattaagttaaacttgtgtctacaaatagttcaagcttagcttagttattgttgattgtttcactacgcctgtgaatttcaactgctatataccatatttcttatgatggatttcagggaactacccgcattaactctgttttcaaacatgtagaatacatagcatagcatagcatagcatagcatagcatgtaaggtcaaaattatgacaggaaaatactacttttcgtttcttgttcatagattcggatagaattaaggaaataacaatgtgcattcttttctttttaatgcagaaacaatgccaaagcaagagtctaaaggtcaggtcaactgcttgccagaagacttatcaaagctgttaaatttcgtgcctgctaatcttcaggctccagaatggtattgtgataacagtgaaaactccagtggtcaatgtttaggtgttacagatcataatctttgtctcgacatgcagcatttagcttcactattccctatcgcctctgcagctgactgtgggcaaaaccctgcctcttgggacaacttgcctgacatttgcaaagggtggtttaaaaatacttgaatgatgagaattatgaaacctattattattatttaacgaataaaataaaattattttaaatggtaattaataaagctctacactataatttgtttggtccaaatcttttaaatgttgaagccatatggccaaactatacttaataaaataacagtatgatcatttcttttatcaataaaagatggtctgaacgtgaacgactctatatatacgttgtagtttaacactataattgtgttggcgtgtagttttagcgtcatatgatttctctactctaaccatcaattatcaaaactatacaaaaactagaaaacaaactgttctttggattttattcaaggataattaaattataaaattatataaaatttcaaattttaatgttttacatagatgtatatttttaaattttaatagtataaataactattttactaaacttttaattttttactctgcataaaaattatcataataatcttcatataaaatagagattttttttttttaaaaaaaaatctataaaaaattcattatatcattttaaaattgttatcattaccgcatcgtacttgtagtcatcactacattcaaaattcgttatcattatcgtatctcatttgcagtcggtacagtttgcttaaaactcaccatataattcttaatctaaaaaataatttatagaaaactaaacttatattaccattacctaatccaataaaaaaagagaattataaaaaaataaagattaaaaattgaaatatatatgtatattatatccaaattgagatctaaaattataaaaaataaatatatatatttataatttaaattgagccatgatatcaaatacttatataaaaatttattatagtgaaaggaagagacaaacttgagacttctccaattaattaaaggtattatttcacaaaaacataaaaataacaaaaaaattataaaaatacagtttcacggaattttaaacatttttacgatttttttaatttttacagaaaatacggtctttt

SEQ ID NO: 19066 - DNA, 2138 bp, Cannabis sativa
  modified_base (1326)..(1331): a, c, t, g, unknown or other
  modified_base (1384)..(1394): a, c, t, g, unknown or other
tctctcatctaacggctgccgtacatcacggattacaatctgtgaaagtacaataacaggacaaaacatatccctatatatttatatattgctctaaaataattggaacaaaaatattgtgacaaaaataattggtgatattaatgtccccgaatctttctcttttctttttgctttgatatagtataatagtagtggctatggaagtagttaggttacatattaataatgcagtactactactagctagctagtattcatcataagaatatatatttattattaattcttttatattgtttgtgtgtgccgactagagaaagttaataatagtacccaatagtattattcttatagtagtgtaaaaaatgatagtaagtactgaaaaacatcttgtcaataattgtcacaataagtaatgaaaattatggccactcatgcatatgtatagtactattgatttttttttttttttaaaaaaaaaaaattagaagatttatctatatattttatattcatggataaggattaactctagctataacatgtactaacctagctagaaatatgacctagaagtactactactgatcgattcttatgtagatttgttttgtacggtttattttatctttaaatgtaggggccttagatgtatatatatatagacgttatatgaaaatgttactgatttggggtggtccggttcccaaaaacccggggacaaaatatattttacgtacaaaataatgagtctagctagtactacaactacactattatacgatatagaaaaatctaaattacaatccaaaacaaaacatagatgttttgggtgtatcttttaagtttaaattctttcattgatgtacttttacggaatatatttcatgatgtacgacagtcgtcatataggggagttatttaatctgagggttggggttaatctaggagtaattagggttaagaactagtaacgtaataacttgattgagactcatctaatgtaccctgaaactcatctaatgtaccacggaatacattccgtgaaagtacactacggaataaaatcatctccctatatatgttataattatttaagataatttaacagtacatgcgaccttttaccagaattaagttactaatattgtttcaactaatttggcgaaccttgaagaagatggaagattctaggaaaactactcgaatggcggacaggacactgccctcagcccaaggagactcgagatctatcactacaaaaaattgttatttctagtgccaactttttagtcacaacataattttttgtaactaaatgtnnnnnntagtcacaacaaaatgttacttgtaacaaaaacatagtatttagatacaagtnnnnnnnnnnntagttttagtcacaacaagtattgtgactaaaaatgttagaactatttatttatggactaatataatacaataatcacaatcattaattatgtgcctaatatatctcatacaaccataatgggatggttaataactataaattatttagaggcacacgaaagcacccatatgactataattggcccattgagttatagtccaccatcaattaatccttattaacccaataagttacataactctttagggttagatgggtatttgatatatatatatattaaggatggatagtgagtgtgttaattgaatggttagacactaagtgagttttctgcacaattgtctctttactactcttcactctatagcatattgttagtgtgtttggacttagatattcaacaatgagtcaatatgattggacgagtaatatgggaggtatgttttcttaactattaatgctctaaataaatgcttggatcttggatagttttatgagcattatttggattactattcgattgtagtgaatacaatgctcttgcataaatattttttaagaattggtatctagagccaaagttattaattttagagcttaatatttttgtagttaacccatttatttaaatctgttttttttttttcggattaatatgttgttaatggataatatgagattaaatgttttagaatgggggtttttcttgttttttggacaattattgtatgtgttgaccgag

SEQ ID NO: 19067 - DNA, 4117 bp, Cannabis sativa
  modified_base (3789)..(3789): a, c, t, g, unknown or other
taatggctagagttgttcgatctggctgcacatttcgaaactgcatttctctaaaaagctttaccgtctctttgtggttaccagtttgaaaatagccagacagcatggcattccatgaaacaacactcgggaatgacatactatcaaacatttggcgcccagtttctatatcccctgactttacacatgcagcaagcatgttaatatatgtgacctcatctggttcaaaatctagctgacacattctttggaggcattctattactttctcagtttgatatttttggccgtaaccagatatcataatgttccaagaaacaacattcacttctggcaagctatcaaaaaccttctcagcggaactcatgtctccattctttgcgtacatatcaagcaatgaattattcaaatgaagatcctcatcaaatccaagcttaagtgttaaacaatgtacttgtttcccactcataccacataagccactgccctggttaaagtcatcaaattctttgaatcctcctctagcacatacacccataatgcttgacaaagaaacggaatctaaatcaataccttttctcaacatcagtctaaacaactgcagcgcctccaagactcgatctgtctgcgctaacccactcatcaaagctgtaaaagtgacctcattaggctcaatcatgtaatcgaaaacttgaactgcatccctgataagcccacacttagcatacatggacagcaaagcattgctcacatacacattgttctcaagaccaatcttaataacaaggccatgacatctttgaccatgcttaacatctaacaatcctccatatgcactgaaaacacttgccaatgtgaaacgggtaggcaaaaatccttccaaaatcatggtatcataaacatccaatgctctctgttccaacccattacggaccaaagcactaataacactattccacgaaactacattcctctcaggcattctcacaaacaactcataagcttcttgcatatttccagctttgcactgagcacccagaagggcattccaagaatacaaatctttcttaggaattttatcgaacacttggtgagcataagccatattactgcatttggaatacaattcaatgagtctattagagaggaaagtgttaaaggtcattccattgcgtagtatatagccatgaattagttttccagccttgtgggttttcttgtctatgcaaaactgcaagagattacccaaacggatgctcttactttccattgacggagctatgtaaatacaatttgaaatggcttccacaattcaaatagaattggttctagttcaaaaggcactaactggtctggttctacgtaagtttatgctactcttttttctttttgctaatagtaaagtctactctagtcactcgagcattttatagacctttttgtttttttacctcgtataccatacgtaacacttttgaattgatgacaaattttattaattttaaatttcaaaaggttagtaaaacttttatctaatgggtaaatattatttttggactctgtgttttgcaaaagttatcgattgaactctctgttttgttaaatgacaaaataaatcttgtatttttcaaaatggtaaaaataagatcctgagtttaattttcgataacttttttttaaaatataacaaatttgaagaaaatttctaacacgaacggatacagaaaatgtaaacagttttatcataacacttatagatcggattatttatctagcttaggctgatgaacctaaacatcatgattctataagtaaatactattgatccactcaatccatagtatatcatgttttattgtgatagtccacaagtattcggcctttgttccacttagttccctccctaaaacctaaacctctaaattgctttggtttgcaaaccaaatcccctcaggctagatggaatttgcttgagtttcctcttttcccccaaaggaagttcttgcacagtttatctacctccttaatcaaactctgaggaagcataaaaatgctcatacaatagctcttgatgccaatcaagactgaattgataaacctaagttcttcctgcataagtaagatgtatgcttgcccaagtagcaagtttcttcctgatcttattgattataacttcacagtcaggaaacttccatttggttggtctcgacaaggccaacccggacccggccaacctgcccagaaatgacctgaccaacttgaaaattttaagaaatctattcaatgcgggttggtcaggttcaacccattggacctttcgggcgagtttcgagtttgatttttaggtgactgagtttcaggttgaacccaaacctgcccgtgaacccaaatatactcttacctaaactttaattataatacaagtttacattttacattgaacctcaatataagaatataaattattcctaaaaaaattatataatacaatatacattatatgaccatacacttcttcaatgtgttgaaagtttatatgtatatatataactatatattttttttttcattaaatagtgatttaattatatgttcatataattaggtaatgtttaagtttatttatatgtttatatataagtaggtaatgacatacataattaggtgagtgtaaaaaaaaattgactgggtcaacaacccgcccgacccgaacacgtcaacatgccaacccaccaacctgcaacatgtgaacggacgggttcgggttcactttttttacccaaaacccgtaaacctgaaacccgccaacctaaaatctaataaacccacccaatgttcaaacctaatggttactcccaagtatttcattggaaatgagcattatccagttctaccgtctccatgaatttcctctttttttaatctttgattctagacaaatatacattcaactttgctttattttcattcagacccgagcattcagtaaaattcttgaatgccttgtaacacatccactaattccaccttccccttgcaatacactatgagatcatctacaaaatatgttagttttatggtactaattcaggtacgcagtagaagaattatatatctgattatcattgtaccatagtcccaatgatctttagatgtatatatattaaatttaaaaaataaattacataaaagaaataaatacatctggatgcctatcaaggtatccttgattgttttcgtaagttgtatccttttgggttgattaaaaactcacattgtagtcttatagattgatccaccacacacaaggaatagtgtgggctattaagataaagtgtatatgaagttcttattggttttatggtactaaatcaggtacacagcagaagatttgtataaccgattatcattgtaccatagccaaggatctccagatgtataaacattaaatcaaaacataaattgcatgaaagaaatatatgtatacatgttgatgactattagggtatcctcaaaacttcttgtaagttagaacaaataattctcacaccatagtcttccaaatcgatgcaccacacacaaggagtagtttgggctactaagataaagtgtataatttgttcttgttaaattctcaacacatgaacaataacagtttgagagagaaaaacaatttcccttttctccctgtatttcaaaaattatagtgtgaaaaactttttctgatttcttaaattaggcttatatttatagtagttaattctatattaattaaatcatatttaattntttaaataaatatctataaccaaatttggttattgatatttttgatgagggaatttctcaactaactttgagagaatctctcaaccaacttgaaatatctttaaccactttttaaatacaaatatttatctaattaaattaaataattaattaattaaccaaaaaagataaaaaccaatagggataccctactatagggtaggcgcctaccttgtctcaattaagacaagaatgtttttgtcctgataacttttatcttaccaattattgtcttgaaaaatattgtcttaacaacttttgttttttttctctatttaattaatttaaa

SEQ ID NO: 19068 - DNA, 1772 bp, Cannabis sativa
tataaaattcttaggatccgatgtaaatacttattttacatagatataagattattaaccaatctttttgtttttctttacaatcaaaactcgtagcgatagcctaacaagttcgacaaaatttgaacacgaataagtatttgttaattagaattgaaaaaattaatatcttatcaaacaagacactaataagatgaaacgatttgctacccttttatttttttagttttgaataagtagtacaaatgttattaataattgcatctttatctagttttcacaagatcattactttatttgatgaaggtggatttgaagtcgagcaagtagaaaaaacaattaacttttttaagaggagaatctttgattgggtttgaaccatcaaacaatattaattccatgcatgtagtattgtattatcatgatgtgtttgttttaaggtcggtggaaaaatgatgcttagttttcacgtaaaagagaaatcttccaatgactgaggggagcataaactgtaaaatcatttgtagtagtcctctttgaattgataacgatagaaagaaatatataactttggaaaaatggaaataaagagtagaaaaagatgggaaaggatgaaaaaaaggggacattttatttaataatctaccgaaagtgcaattctaataaacacttaatcattatataatattagtggtaaagaatagtaaagactaaggagagaaggaaaaaggatcatatataatatttatacgaaacccacataaatataacatgatctaatgaatatgatcatcattaacatatatatatttactagaaaaaagttacatgcaaggcacgtatatttgttaggtacgttttaatttaattaaaaataatacaataaataattatataatttaatttattattatagtctaagtgtattttttttttaataaagtcattaataagcctatgtagagaattggaaaatgaggtaaagaaccatgctaaacaaaaggtaaggtaaaacaaagagtaaaataactatgccccgtaaaattctacataatatgtttttttttttgaataagattctacataatattaaaaataaaaagaagaagaagaagtaggtgcatgtatatacaaaataatttgactaacatacaaaaaataaataaaatgttagtcctgtaccaattattctcaggaaatatagacataaataaaatccaaagagcttacaatatataaaggcatacaaatttcagttctcattcatatccctatcaacaatccacttgaaaatcttagtgtagattagcatttaactcgtactcatcaataaatgttcttaatcaaattcaaaattgcagagaaaattgtttataaccaagttcttcactttacaattatagacactaaaagatctaaatttcaatatttactattgaatgtttataatttcaatatttcaacatatctgctttcatcagtccagaagcctctcagcagtggacaaatatgtaaatgtagaaagatgcgtggacattaatcttatacatacaagatatgaaaacataaagcttcgatagaagcaattcccatcaccctgtgttctccgaatggccgcatattgttcactaaacacctgagaaaagtgatatgtagcatttcagtttttttacatcccaataacatcaatcacaacctttgaaaacatacagaactcagcacctctgatataaattagaataggaatgtccaaattgtaataggaaaaggaa

SEQ ID NO: 19069 - DNA, 2022 bp, Cannabis sativa
atagcattccatgtacataaaaaaatgtcatataataattataggtactaactattactactactacaaaaataattatttgactaactagcccaagcttagattcaagatatgacacgagacacaatttgatctacaaccaataataccaataaataattcttcattattgacaagaaagaacaaaactttattttataaacctatataaaataaacacatatacaataattccaaagcaaacagataattttacaaaaaactcccactatcacaacaaacatacaagaacaatgaagtattgcaagagataaagcattaacactatccagaaaattccaacagcattccagataagataacagtcatatataccttatctcttcttttcttcttgtaataggatgtaaagccttcagttataaactaagaaaaatggtctctctcgctcctgaatgaacattagaatcacaatcacaaaatcatcagtaaaaggctcaaatattcatagatgcccaaaatcacaatcactaacttacaatcatttttttagtgacttgtacaaacattcttataaagttaaatgagctaattaaaacctctaggctacataatcagagaatgcagcattcagcaactgaagacatgtgctccatattatccaatcttgcaatttctcaagtttatagcacgcatttatattcagttttaaagcctccttcaagaggagtccaacttacattagtcttatattggtgagtaggaaacactacttcacttttattagaagctgcctctaagtgtgaacattctttttacattagtcttctaccatactagttaccataacttgtcaaagctttatatttctcacactaatgattaaaagcagacaaaggcaaaataaaattaaagccctcatccatacaccataattcaatgccctccgcgcatgcccttataaaaatacacatgatgaccaaaagtaacatcaaaatgcacaaaacaacaataagtaaaacaaaacccaatttccttcaaatcatcctcatgatcatcaacattcttttttattttcttgatctgggcacttcagctttgttcttaaaattcagctttcagagagagacagacacccacccacccaccaccaccacaaataaaattctctttttttttcctttaatttttttggtttagtaattggtatggctatctagttagcatatatattgttatcagccgtgtcaatgtgataatattagatattaaattacatgaccaacaacaataagtttgagtttggagatagtgtttaacatttctcaacttagaaatactagtggctaagagcaatattctttctcagctatttaaatctcattcctagacagaaaaagctatcatatatagcaaagcatctatatgtctatctcttttttctgggtcaggatatatgtctttgtctctacacacttttacctatatacaaaacatgtactcgtgtgtgttcaatatttaatagttatacatgagtggtgataactatatcaacatctcattgatgttagcaaggctccattaaaagtcacagaagaccaaaaaccatgaccccataaatctttgttaaaaaacaaaaataaaaaaagaaaccctgaaaaatttgaaaataaaattcaaataaattcaaacatacctaacaatgttaactaacaatcataataaaaaaaaaataaaaaaaaaaaaaacacacactcatacacatcacaaaagaccctaaaacagcacccaaaaaagaaaaattagatttttagaagcaaaaacagattcaatactctctgaagtgtagaaaaatgaaaatcccaaatcattttttattatacctgaaatagaatcttgagcatgagagagagagctatggaggttaggagatccactgagaaaacaaaatcagatctaaatcaataataataaaaaaattgcagatatgtgtaatacagagagaggtacacatacatacca

SEQ ID NO: 19070 - DNA, 4102 bp, Cannabis sativa
  modified_base (4072)..(4075): a, c, t, g, unknown or other
tattcctcaactcatattttaataaaatacaaaaaattgctccacttaaacatacacatcgaaaaaacttaaaccagaccaaaactcttctaatcaatgtataacatcatataatcattcaatttcagaattaaattactaatttcaaaaatcaaacaattaatttcactataattttatgaaaacaatctaaaactttaaacacaaaattctctcacataaaatatatctctaaaactaaagtaaatcgataaattaataaaaatatataattgtgatgaaacaatatttactaggtttcaattaactagaaaaatactttgcacttctgtttcaactagccttcgtacatattctaagcctattaattatagatcactaactatacaagctaaaagagtaaaaaatcatcaactcatattttaataaaacaattaaaacgttaatgtaaactcaaaataaaaatcttacaatgtgttatataaatgaaaccttcaaactcataaatgatttttattattactaacaattaggtaaaaaaaagaaaaagaaaaaagctttcataaaatattctaaatgaaaaaaagaacaaatcaatggtatatctttaccttgtgtacaatgcatgttgtcttatatatattccaagttgagagatatgggtaagaatgtttataaactagaaaataaaggtcaaattgtcaatacatgtaaaagcatgaacatttatgtaaataaatataattaataagagtcccatcaatcaaattatattataaatattaagtagtacttccaattagatccatccaccactagagttgacttaatattaataaaacaaaaaataaacacaagtggtgaatcaaatgaaatgaaatggtagttgtgaaagggttaagagttgaccactattgggcttaacctaaggttgaaaggacacttatattagatctcatcacacattaatgtcctcttctcttcttcaacttatatcattttccttttttcttttttaaggtaaaacaaaagcaaaaagagaagagaaaagaagagaagagatcaattatgtttaatcaaaacaagattgcattttggattggagtgttgggagcaacaatcaccttaacagcctattcacaatcatatgtatctccaaatgaaggcatcacaatagggcttttagtcctcatgtttggcttgcttgtaagggaaggtttcatttctctttaatcaccttttatgtaatcatcatgtactttacttactatacatgtgatttggattattgggtttttattttcttgagtgtctgaatatttatcattgattttggtataaagaaagaacaaaggaagaaagttgggtttagcttttaccatttaaagctcataataaatacaacccccttttaaattggagactagttagaatatatattataattaccagcaattttttgcagagaagaatctgagcttttccatctgaaaacacaacctacataacaatatcaaatagataaatatatattaagtactataaaatttcatgtaataattagtgtccaatgtaatagtcaccatagatctagcatgagaaaatgaggcagtggtgtagccagagatgacttgccgatcaaatacacttataacttaattagttataataatttataatgcagaatttgatgcattatattattgagttgagtgttgttaattatgccggcaagtcatccttggctgcaacactattatacatatacatatatatatatgtataaatatatatatacctcattcccacatgcaagattttagatgaaacaaaatgttatattgtgagagttttgaccaatcccaaatgaccccaaatttcattctttccccaaaggtgaaaaaggcaccattccctaatagaatattgtaagaaacagaacaaggcattggcccaaaatagagaaaggttggaaatgatatgagttgtgttgtgtgaattgttgaatgattttggttttaactgatagagaagaagatgcctattggactaaatttccctccttggcaggactagaataatataaatatatttatgtatttatagagagaaagagagttaaaacaagtatattaatgatgctctgcttaaactgagttctttcatcggtttgaaaacaaacattgaatagttttttttttttattaaagggtttgtgatgatgatgtgactttgcattgttgaagataccaataccaatatcaatatatcacattaagctgatcctactactcatctatctccatcacctaagtaatactgactgccttacttttaattgcttgaattcaattcagttcttcttccaagcacagcatactagtaataagtgaatataatagtaggtaaaagggtagttgaaaagatttactctatttaagactagacaccaaaaccaggtaagtttcattgtttcaacactataatatgccccaactaagcatatgtataaatattattatacctctattattactagtactatttgatactaaatgctttttcagcattgacaactacttcaaatatatactttttttttttttttgcgtgttagcccccttatgaagaactatgcatggccctaagtaatgattcaattaaggtagactgaggtattaaaacccctaactgatacattatcttaagaaagagatagattctcattttatatggtactactctatagaatagaaggcctgcctagaagggtatgtgattttgttcatggttatctaggtgaacctaatttatgtaaagaaagaaaaaaaaacataccaaccaaagtggtacaacactgcatagattgtttcatcataattgggtgatggagttattaatggtaataagtggaagacacttggcttgtttgtggcttcacgggtgtcaaaaaaatcaccagctggacagagcttaagcattgggacaagtcatcatctctcttcaatcctcatagtcaagtcaaatctaagctaatctattctaatctacacactgtcattcaattcccagtgttaaaaaaagaaaggggtgggggggtcttcaaagctctttcattttcaaacagtttgttctaaacaaagcaaagatttgtagttatggattagctggaatctttttccaaaccaaaaatggcagaaccccacttcacaagaagtcgacagacaatgtttacacatgtcattaattggagtgatttcagctttaaccaagtgagaaggacaccaaccctttgagtaagtaatcatcactaaatcaagcattagttgtgtaatgaaattctttataagagaaacgcttaaaagtatctggagtgctattaattaatttagtatcatattttatatattttaatgtaataattttcatacaatatcgttaactaattgtaaaacgtcattatttttaagtagtactagacactattaaaatcttaaagagaaatactaaaagataccagtagtgcctatgtgtcaatatctctattggtttaactaagtatcaggtccgatataatttaataataatagatcttagagagtatcgctaatcaatcgcaacgcgacatgtcgagaaaatgctaagcaccactagtacctaataacaatgctcaatcttaaaacactcccaataacttcttttaaaatagttaccaaaaccttacttttttaatattttattatttttatttatttaaatatataatattaaaattcaaaataattaataaaatatatttaaaaaaataaataatattttataaatatagagcataaataatatattttaaagaaactaaagttaaaacatttgtgttgtggcatgtttttagcacagttctttaaattttgtagtacttctctattatagaggaaatagagagctagtgtgagtgctcttatggcaatgctcaatggtgcaatggtgattgtatagtaaaagcaatacaatattatcaaaaccaaatcatacagggctcgtttggaacgctgtattaggtcgtattgtattnnnntatattgaattggattatatatcatat

SEQ ID NO: 19071 - DNA, 3609 bp, Cannabis sativa
ttcttcccttagtaaggaaatcaaatgtattgtaaaggctagagttgttggggctcattgtaaaagccaaaagaagaaagatcaatatttttgagtgttgttaatagcttgtgatagctcggtttctggtgtgttttttcgtggtagttggtttattcctcttgccttgttctttgtatttgttttgtccattttgaataaaaagttccttttgttcaaagaaaaaagtcttggtaggggagtcgggctgggggctgctgctgtttattttagcagctggtgcttgttttgctgtggctttttgccttgtatgtacttgcttgttctttgaataaaaattcctttttgttcaaaaaaaaatcttggatggatgcttatcctatcgctaaggtcttgttcttaaatgaaggtacattcgatcattctcttggactattatccttgcatcctaatttttctactaggaaaaaaccttttaggtatttttggatgtggaaatctcacaaggattatgagaggagaatgagaggagtttgggatcttcaatataatggtaacaagatgtaccagctggtatgtagacttaaagagatgaagcaggtattcaaggaaataaataaagaaggctattctgatgtacttgcaacaacaactcgagccaagaaaatattggaacaatgtcaaaattccctaagaagagaccctctaaacacagagttgcagaaggaagaacatgaaccaaggaagaacttcttgcaaaaacaaaatgattatcattatatgctccaacagaagtctaagatcacttagattaagcatggtgatgataactttgtaatatttcatgccagtatcaaagggagaagaaggcagaatagggtgctatctattgaacaggctgatggcaccagaatacatgatcttggtaagattacagatgctttcttggcttattactctgagcttttgggatccaacatgcagaatagaagacaagtgatggctaaagtcatgaatctggggcctactgtgacaccacatcaagctaaaattctgttaaaaaaattcactagtgaggaagttaagtaggcaatgcttgacatacctagtatcaaagctcctgaagcagatgggtactccagttttttcttttaggataattgggacattgtgggtaaagtagtttgtgatgttgtgctatccttcttggaaactggtcaaattttgaaggagataaactctacattccttatatcggtacctaaggtgaaatgccccaatacagtgaaggatttcagatctatagcttgctgtaatgtgatatacaaggtggccactaaactcatttgtactagtattaagcatatccttcctgatttaattgcacaaaatcaaagagtttgttaaaggtaggtacattggccataatataatgatttgtcaagaccttattagacattatgggagaaaagctaataaacctagttgtatgatcaagttggatcttcaaaagactattgacacaatagaatggggttttattgaggaaattttaattgcttttaaattcccttctcagttcattcaccttgtgatgaattgtctcaaaacccctaagttgtccttaatgtttaatgggtcattgcattgttttttttgcctcaaagagaggattgaggcaaggggaccccatgtctcttttactgtttgtactggggatggaatacctaactagaataatgaagagagtagggaagaaagctgacttcaggtttcatgacaagtgtgagaaatttcaacttaaccatctcagctttgctgatgatgtgctgctattttgtaatggtgattagaaaagtgtgatttacttactgcatggtctcaagctattttcacacacagcaggccttttctctaatgaagctaaatttgtaatttattgcagtaacatggctgagacagatttgtttagagtaattactgcatctggtttttcccaacaggagctaccctttacttatttggggattccaattggtgacaaaaagatcttgggcaaggattgttcaatcttagtagagaaaatgacagggaggataagaacttggagtactagacacctctcctttgctgagagagttgtattgatcaactctgtactgttatctatccattcttactggggctaggttatgttgttacctaacaaagtgatcaaggagatagaagcaatttgtagggaattcttatggaagggccagcatactttccatggcgctggtgccattgcttgggacatagtttgctagagaaaagcaactgggggataggccttaaaagagttaagaatggaacatggatgcaatggttaaatacatttgggtagttgtaaaaagagaataaaatctatgggttaaatgggtacacactatttatatcaaggaggaaaactagtggtgctactctatccccatacatgggagctagtattggagaagattggtagcactcaaaaaccgggttagctctcttgttgatactcaccagtttgagatagagaaataccacattgcagcagggtacactctgttcagtctagtccaagagaaacaaagatggtggtaacaagcttgggggaggttcaacatgcctaagcatagtgttatcctttggatagctatgcatgggaagctaagagcaaaagatagattgtacatgttttgcattgtggataattcttgttgtatgctatgaaacagtcaagaggaaacaagggaacatattttctttgactacagctggactgtgcaattttttttttttgggattgcaagttggctggaatggagacactcggacaagaacttatctaggttaaccaggtggatacaaagaactaaagtgagcaggtttaagaggaagttgatggctgttgctctagctagtcttgtctacaacttgtggaagaccaaaaatgaggtaatctagcataagaaaggccccaatgttgttcaggtgatcaaatagaataaagagaatgtcaaacaaagagttgtacttgtatgtccaaaaaaagtaagcaaaaaagatgaggaatggtttcatactttgtaaatgatgtatagatattaaaggccttgcctaacatggcttggtgcttatagtttataaaaatattgttcttgtgcaatgaaattttgatttatcaaaaaataaaaaaattcacaaattactattttgcctttatggatttactttccatagaaattaattctcactcaaaattcaataaaatctttcctggtatagtattgtatagaggtgactcggggaccatggacctatattttaaagttccaataaactcaagattattgtcatcaatagaataatctagtttactaattctagtattactctactataaatctgtaattgcactgtctaataatataaaattatatttacaaaattcttacttgtagtccatttatataattaatataagtagcccgccctccaattattatttcataattagagttggtcaaaatacggttttacctttctaattatatcttgattccttatgtaccattaattcaatgt

SEQ ID NO: 19072 - DNA, 10975 bp, Cannabis sativa
  modified_base (4166)..(4169): a, c, t, g, unknown or other
attggattagatttaaaatataaaatctacattagtacatatcatgatgtactatgaataaaatagtgtgaattagattagataaatacccttaatcaatagtcctaacgtaacttgacataggggacccgatttgagatttaggttcatacttgataaatattcagctcattaattctctacttataaaatcgtatctcaaattgccataattatatattgaagtaacaaatattgatacatataagacttctatattgttgtaagtaaagaatattaatacataatgaatgtgtgtaataattatatattatacgctgttgaaatgacttgggcaattggctcaagctacattccaagcataatttggtgtcttattcaatctatggttgttctgaccgaattattctcgtaatttggctcttcaacaccggtagtttgcatttgcgggcagctgggtgcagtctccactggatgctgcgacatcatgggaggtaagcctgttgcaattccatgctacaaaacaccaccaaacatcatgatgttatacactctatcacaatttgttttcttctttgtttagattgatcaagtactagacgtgagtaccttgttaataggagaaggaatcaatgaggaaggtgacattaaggctgagaggagttcagtagttgtatagttatgatgccaagatgttaacccttcacttgtctcatttcccattgggcatcctcccacgttgcatgtatcaacgtttagattggtcccgtgaggaacaggaatttcgtatattgaagaagattcaggtctgaaattatatttttgttgaataaaaactttattgattagtacgtatgtagtattttctaaaaaggtattacattcttgataaaaatgcataccgtggagttgggtggacataagatgattcggagccaacacaaatttggtttggattttgtagactatcgtttggtaaccagttaccaacttcattctcaaaagaggtgggaaccccctcttgtgcttcaaagtatacctaaataaaagtcaaataaaaagaaatcagacacacatatattgtctaagaataccgtatagaaaactgagataaaacaagaagctttatggtggactacctgtacacttgatggatcaaaagttgaaaaatggttacttaataaatctttctgcaaaaaaaaaggtatttatataataatattaaggaatatatcatacataccaaataataataactgaaaacaaaatgtgttacctttctttctgttacacgtgataatgtatccaagaggttgttctcacacgattcaagctcctcaatagatgtaatggacaaggcgtctggctcaaaaatcctttaataaattaaagtagtttaaaactcaagaaaatacaatcactcaactttttatttttatttcatttcatttagtaggggtataacttttaggtactttttttggtttatatttcaaaaaattccagttctatttttctttgcattttatattaattgagaatcaaaagtcagttcgtttatcaacttaaaaacaaagtgtaaatttgatgtgagcatacaatttgtagccaaagacgtacctcagttgttgctcaaccatttgaacttgatgttgtaaatttctagtttctagttgtagttcctatatagggcacacgtataatactattaatccttcataatttatataaatatatatatatttacataaacaccattaatatatataaaaataaatatatgtatgtatctattcatcaagataaaaatattcttcaatcggcatacacattaattaagaaaatagtatatatgttacctcaaggtttgaattaactgctgtaggactgcatatacataataaaataaataaataaattaaagtgagtagagttaaaatatggaaaaaaaaaaaggactattaatattgactaatttgaattttatattaaatatgtttctaggtcattagattattagatttaaggatttatgtgtaattttattaaaaaagtctaaaaattttgagagtacaatttgttacatattaaagttcaagatgtatgatttgataaatatcaaaatttaaggacacaatttagtatatggacaatcgccgcattagtgaaattgaataaaattagataaaaatttttaaatttaataatttcaatagttcaagaaaattttaacaacttaaaagatttatgacataatttaatacatataaaagtttaaagataaaaatggtaattagcctaacacatgatacaaaaatatttagagcattcaaaaaagagaataaaaaaaagagagagtactttgcaatttgaagagcaatatcgctttccatcttgagtgtcttcaaggtgccgagtaaaaactgttttgttttttattaaaaaacaattgaatttaatcaaattattaatttattttgagaatgatcttcatcgccatgcaaatactaagtcatgtatatatctactacctctttatttcgaacaaccctgaaagaaagaataaaaaattagtaatttgaatctttaatcaaatccaaatttataaaaaagaaagttttggttaattatattacatatctatgtacgtacataccctcctctatcatgatctggcatatttatgtaacgagaaaggacatcttcaattctgataataacaataaaaaatcgaaatcaaattataacattaatcaaaggaacaatgataatacattttagattaaaataaccacaaaatacataacaatgagtaatattattattaccttcttttgccggaaaagtgactaagacggccggaaggggaaaacataatgagagcaatgtcaatgtcacaaagaattgagagttcataagcttttttaatgagtccatttctgcgtttagagaatgtcacctgtcgatttgtgttgttttctattctctttatttgtagtttaacccgacccattacccatacaaaacaaaactaaatttatattaagattaaaatttcctttaaaaactaggaggagcatagaaggaattattttgaaagcaaagacaaaaaaaaaaaaaaactacgaaatagtagggaactcaagtgatgtttatattaatatttgtcctaataaattattatggtttctgagtattgtgtggtagagagttaaatattgtcaccttaaataatggaataatttgtttttggaatgaatgaattcccgaaatttactccctccctcttcactcgtcttattgttatgtgttttgaccattttttttttaatttttttattcacttatatgtaatttatcaagttttcttgtttttcatttctttaaatcttgcaatctcttatatagtatacataattaatttagagatgtcaatataaccttagcctacaattaataatgtgtacaactattattattattaggggtactattgtcaatccctataatattttagtcaatccgcgtgcgtgaaaatgcatagcgaaaaatatttgtttcatttttttatgatagtatttcttatagttacaatattactcatgtaaattttttaaaattttcgaatagtttacaatgctgaaaataaatttaaagttttttgaacacgtgtgatagagtggaatatcaaaatttttatttttggtaccataaactattctatgaaaaaagtattctagcatgtaatttcggacgtgaaaattaactatacatgagattgtaataaaaaactgtaattaacacttgatataccgatacaccaataatattgcatttaccatgcatatacataattgttactttattaagaaaacaaattagttttgtttaatcgattatttgttggattttatattattaataattagtaattttgtattttaaattttcgacaatactaattttgtctcttaaaatatacgacttgtttagaatttctctgaactttacatttataaaaatttagtccgttaggttatgtactattatttcgtttaaatgctgacatgtatttgtaaattagcaattttatcatttaaactttgacaacttaaatcgtacccttcaaaataaaatgagaaagatttaatatttttttagtaaannnnaaaaaattaatttagatcttaagaaaaaatcattttaaatgattaaaaaaattgaaaaataaattaaatcttgaaactaattaagcaattataaaattatttattttttattaaaaaattcatttagatattgaaatatatagttttttaatttttgtaaaaaactaaattttatgggaacatacttgagtatattttatttttctcaaaacttgtagattctttcaagtatacataatatttttttagtttaatttataacttttttttcaaaataattgtacatttttattgaatttttaattattttcttttatttgttaagatatgagtttataaacataaataagtttgattttttcttcaaaaaaatcttaatttatttaaattatttattagattttcaataattttggtttccttttttaaaaaacgtgtttataaataaaataaagttgaaaaatattattttaggaataatttaagttttttaaagtaaaattaatatttttgttagagtttttaatattttttattattttttttagaattaatagaatactataattgccttaaaaaaaatagaatattataatttttaaaagtaattttataaaatggggtaaaattttgtattaatcaaagtttaggggataaaaatactaatttttaacggtaaaataaatggaacctaaaaaaaagacataattatgtaactgtgatattttaggaaaaattttaataagccatatattttaagagataaaattaagtagtgtcgaaagctcaagggcaaaaatattaattattttattgaaaaactatttttaaatttgtgttttattaaaatagaaataaatagatatattatttgaattatttgctatgatttactatcaatttggactctttatttctaaaatttataaattttaaacttagtcaaaattatatataaataaatataatatatttatttgtatgaatttagactattttaaacgctatattttagccgattatcaataatacacttttgactcattattttttagaattaaatttggataccatattttataaataggttaaagaaagagtagatatatttttttaaccttgtattttggccgattactaatttctttttaattttaaaagttaatttttgaatccatattttttcaaaaagttaacaaaaataataaaaagtaattatatattatatatttatataggaacattttaggccagagaatcactttcttctcacaaatgagaacatttttgtagccttttattttaatctaatggtagtaattaatttagttatatgctagacgttttttttatttggccttacatttatttttattggttttaataaaatatgagttgattggatagttctttactatattatctcatattattagtagtaatcaatggttaatggacttagcatgtgcataatctagttgaagcagaagtgtagacttttttagttaattaaagcctttgatgagcagacccagtctaactagagttatgtaggtaagtccactctctaactctataaatagtaaatacatattgtctcatcacaaatgtatagtttggtatatgctttaggacctataatttgcgtaacaattaatatatgcataagttaattatgtctaattacatattaatttcgtaattattatatgttaaatctttcgttattgaatcttaaagctttaggagttttaatcattttgaaattctccctctctttttttttttctttttttattgtgattatatgtataaaatcattgagtaaattaagagaattttaatattaaaactttagggtttatacatgacataaggaaattaatcttgtggagttcaaatttctctctgatctcattcatctcatctaaggactcaaccattaattgatgattgacattttgatcataggtgagtctcctatgcgagggttgagtaagttccgttggaaacatagcctcatatccaagggataaggcaaatggggtgtgactcgtgactgtttactcagtgttgcaatatgaccacatcacttataaaaattcttcaggccaattttcctttgcctactctagacgatttttagggtatctttgagagtttggtttgacagcctcgacctggacattggcttgagggtgcctaactgctgaaaaactccttatgatcccgtgtctagaacagaaatcagtgaacaggtcgttgtcgaactgtgttccattgtctgacactattttttgaggtagtccgaagtagaaaatgatgttcttgacaacaaagtctagaaccttcttcgaagtgatggtagttaatagttctgcttctgcccacttagtgaaataatccactgctaccaccgcatattggacacctccttttcccttacgcatagagactatgagatcaatgccccataccgcaaatggacatgggatttgcatgtttttgaccttgtttgaggcaactctagggatttttaaaaatctatgacacttttcacacttcctcacatagtccattgaatcttagatcacaaccgcccagtaatatccctgtctcaaaatttttttagagagactttgcctctagcgtggttgccacaaaaaccctcatgtacttcaatcatgagaagcttagcttcctcaggtatgacacacctcaaaagaggcatttctcatgtacattactctatctatgatgatgaagtaggttacttttctcatcaattttttggctacaatcctatctgttggaagagtaccttgctctagatattctactattagagttatccatgatggtgtatcgtctaccatgaggatggtctctgggttttcatatatgttaggagtaaggtattctacaagaacgacactgagggtgttagaatccattgtgctagctaatttagctagagaatttgtattggcattttgttctcacgaacttttcgaatggagtactactttagctgggctaagagatccttagctttgcttaagtatgtaactaatttaagccctcgagcttggtactcacttaggacttgattgacaacaagctgaaaatcactgaaaatctcaagtgtttcagctttgatggctatactaatcgaagtcatgctaggagtgcctcgtactccaattcattatttgttgcagtgaattcaaaccgtaaagaatactgggtgaggtatccttctagagttaagaggataaatcttgtgcgagagctatgctcatttgatgagccaatcacataaagcttccagaaataaccaaagtctatttaagctgcagtctcacgcgtgaaactctagtcttctcagactaaaggtcgtcttttgcgagtgcaaatagaattttccaaaaatatataatccaaagcaatttataaatgttctcaattaataatgctaattttttattgggtgttctgcttcttaaaatcattttcaaactgaaaggaataatgtaaaacaaattttggacttcagtgacacaaaataaaatttgatcatataagtgataattttgagaaagattggacctctattgctataaaccaaaaataaaaataaaaaactatttgataaatttatatatttttaaatatttttttgcagcattgtaatgtaaagttttggagacgaagtcacgaagacatacgctgggaaggaccaatctccattgttgttcggatctgaggatttcgcaagaatttaacagtacgttcttttccaatttcttaactaattgcgtgttttcattttctgcttcatcttatattttgtatggagaaataattgtgttatgaactatgaagagtctgatggttcatccagatatttgtgatcatttctatttctttacattcttaagttgaaaattggctggatgatgaatgtagataactcgttttctttagtttctcttttctattagaacccttttgccctgatttttcactgtttgttttcattttctttagggttaggttttcgtgtatatatctttcttttttttttttttggctctgggattacctgcctggactgggctgggcaagatacgctatttcgatttatttaatgaggaaacaatttcaagatgaacaatgaaagctgagactttccaattctttcatttttttttccttctcttgaaattcgttttttccagtctatagtgagcctcttggaagtgcctactgcccagcgtcgccctgctatagattctgcaaatggttcgtgtggtttaggtgctatagtttgagatcaaaattggtccatttcaatggcgggttctaagttcctgactttctcctatccagcatctactgctgaaactctagcaatctattttgggcttctcttgcccatcagttcaactttgattctttctccttagagtcaaattgcttgaattttgttaacaagcttaccagtggggtttcttctatatatgattcgggtagtatcttagaagacattcttttttcaattgctcctttgcataagaaaatggctttagcttcaaagtcattagctctttttggatagaggattttcctctctgtatctggcttgtgctaatacacttcctgtgtaaatcttgtttgtttatgaatttctaaaaagaaagtaaatataagaccatccaacaatgatcaccaacttgaacaatgttcatttaaattagctgaagtcttattagtttggtatctgtttacttgtgtggtggttaacattttaggaaattgcaatgaatcctcctccttgcttttttcgggaagcatatttcttttatgtttgcaagttaaagcttaaagacattgatggccttttcaattgttggacctcctctgttgtgggcaatctcatattccattggggctggacatgagtattacatctcacttatatattttgatcttattttatgaaactatcatcatggtgaaaagtttttatgcagcaatgaactttgatgtcaaatgttgattagttgtctgtgaaagctaatacagtctgttttttacttggtttgaagggttattaattgtatgtttgatattgataatgtgtatttggtaaagtgtattgtgaactaaatattattgcagagatgttgatcatgggattgggaatatatgtttaagagtttctagaaataataaacatatgttttttttaagaaataagtaaaagttgaattcatttaaaacattgtttcttaagtattaaccatgctcttaatactcacaggaggactgccagaatggggggaggtatggaggcaaacaagaacaagttcatagaagagtggggggctgcaagagagactctcgagcacaacttccgttggacacgtcgcaactttgccattattggattgtttggcattgccatcccaatcttcgtctacaagggtatcgtcaaagaatttcatatgcaagatgaagataatggtagaccatacaggaaatttatgtaagcaccgagggaaatgcttagaacaatgtttttcaagtgctcacatagttccatttcctggtatgaataaactgtttgcactattaaaacttgcatcgaactgatgttaacagaccagtttactttgttttaaaattgtattttttcacttgacatctgagttcgccttttgtaatcattttctccagcctgattcgttttataattgacaccaacactattgtcatcacaagagtttcaagtaatcttttctctttgattatgatttaataaaaggataaattggtttcttcttcgcactaaaatcagtatggaaatgcagttaaaacgcaggcttatacttgtttaggctatattttatctagtgaatttccgtacagtcacaaggtcttatctagcaatagtatgttatgatttatgccaaactttcattggtctaatgtagcttgtcaataagagacctggtttgtgatttaggtacatgcttgatatagattcagctcagtttctacttataaaatcgtatctcaaattgccattatatattgaagtaacaatactgatacatataagactttgattattgaagtaaagaatcttaatacataatgaatgtgtatattaattatgtattatatgctgttcaaatcgcttgggcaattggctcaagctacatgccaagcataattttgtgtcctcaatctatggttgttcaaacctgattattctcgcaatttggcccttcattcaacaacggtctgcatttgcgggcagctgggtgcagtctctactggatgctgcgacatcatgggaggtaagcctgttgcagttccatgctacaaaacaccaccaaacatcatgttgtacactctatcacaatttgttttcttctttgtttgaattgatgagcactagatgcgagtaccttattaatatgtaataggagaaaggaatcaataaggaaggtgacattaaggcagagaggagttctgtagtggtatagttatgatgccaagaagttaagccttcacttgtctcatttctcattgggcatcctcccacgttgcatgtattaatgcttagattacgtttagattgaccccatgagaagcaggaatttcgtaaattgaagaaaattcaggtctgacattatagttttacagaataaaaactttattaattactactgctagtatacgtatatggtattattcagaaggaaaatatgtacgtatattgtattttctaacaa

SEQ ID NO: 19073 - DNA, 10764 bp, Cannabis sativa
  modified_base (7599)..(7599): a, c, t, g, unknown or other
  modified_base (7663)..(7664): a, c, t, g, unknown or other
taggatgttaatcaaacatacttggtagtaaatctagattctggtaaaataatttctaacactccaaaccctataagaaatagtcattgcaataaaaaataaattaactacacaacgttataaatactattacacacaaggggcaagaaggtatataaaaatacttttaaagggacaaggactagctatccttggtcatgacaagagtaaaataatagtgataaaaaagaataagtatgctttgagcaactccttacccgaagacataaaaaagtcttgccagctaaggtacctagcagcaagagggtcttgaaagatgctcaagagaaacagtaccataaaatgagatggacacttctcaataaacattcaaaattgtgcgaaagaatataaccatacataagaggttgagacaggttcatgttatcccaatttttgtcctcatgacgtggcatgattaagtggacaaaactagtaccacatgtcattacagctcactaaaaggaaggccaattcagcacccgagcaaaagaaggccccaacactcaaacatggatcaagtgacagacgagctcccttttaggagctggccagccacctctggctggccctatggctgggcaacctagggatagtaccatgaccgaccaacatggccaccgcaggggcgtaggcggccaaggagtactctataggccttgatggacacttccacacgtggccattagtaatgagctgcaaattggaccctaaacgtccaatagaattgctaaataatatctgaaatcaagggaactttggcctttcataaatatctaacaaactatacgaatgctaagcgatttgaatggtaaatatagggtttaaggcctcctatataaatgccttaacttctgactgaaaacctaagttgcctctaagctagaaacccgatctcaaattctaagtgtttgataaaccttctctttcttcttcattctctctaacacgcctaccttaggttgtccaacacttgagtttttccaagcattgattcatacattgtaatcctaagggtactatatcagatcccacctatagcaatctggatagtaattgaatcggtataatacagctaaaggggagtaggtttttacctgctatcaaaagggggccaaatttttataacaaatcctgctatctattgcttttcattattatttatgcacacacgtggaaagcatgagatctacacggcctcgctatcgatagatcactttttgaggtcaacaatttggtgctttcattaagagtgtcgatatcgtgatctgattaaatgccacagtgaacacaagaagaactcctgtcgcaccatctacatcttttggtctccctcaagacccacagattgcagatctacgcactcaggttctagtcacaactggaatccccatgaatagtgtagatgtgctgaatcctatcaccacaacaggcgtaacaagtctggccaccatagctggctaacctgacacgagcaccccaatggatccaagtggtaggccacgcctcctggagtagacccaccgttggcgcctcccactaaatgaaggacccaggggtgacagttccctaggacaataactagacctcaactctagttctacgctggagagacaggcttttgggtgggaaaatcaataattggcaagcctcacctggacctaggagaggaccttgagttggctagaatcaaggaagctataggccgtgcaggcctacctgaagaaccacacagtgctgattgtgatgtttttgcttagtagagatgcaaattcctaagatggatggatcaccaggagtacatcctttgatctcacaaagcagaattagatcgaggtaaccaggaggccagcgatctaataagacagttcaattatagagccgacagaagaggcaataatctccttagggatccactttaaggaagacttcctccaagttcctcaagaactaggacagattttctcctgccagagggaagacaaacctttcctcaaaggtcaaacagcgagaacagccagatcccaacaaccagtggcttagggggcttgccaagaatctctggcttagcagcactgcccattgtgtagccactagccagccagccatcaacaggagtactaatggccggccagggtacataacttccttttagtttcaaaagatgttgaaggatttttttaacaaaatcaaattcaagaaatttactagtctaagattcaacaattcgtgtagcacgagtaggacagtaaaggcaatagccttttgagtgcattggataaccaatgaaatgatagtgaactgttctcgaatcaaatttttttaaattaggatcataaagcattacttcagctggacaaccctaggatttctcccagtccacaactcaaaaggggtttagggaacatatttacttgaagcacaattcaaaatataagtagcagtcgagagtgtttcatcccataagaactttggtagatttgatctactcatcatgcttgtaaccatgtccattattgtgtgatttctccttacagctacgctgttttgcttaggtgaacaaggcatagtgtattgagcagctataccattttctcgtaagtactcagcgaaaggccttacgtgttgttcagattctatataatgaccataatattctcctccacaatccaaaagaacaatcttcatcactcttcctaattgtttctcaacctcattttgaaatattttaagttcatcaaaagcatcagatttttttcgatcaactacgtgaatccatatcaaaaaaattatatatgaatttgataaaatacttatttctgtacaacgtaggggaattaggtccactaatatctgtgttgataatttcgcataatgattgactacagtagcagtcttctttcttgttttagtcaattttccacaagtccaatcatcataagtatctcaactcgaagtatcaagaggagaaagaatttcaactctaattatttgatcaaccgttgctttagaaatatgacccaatcttttgtgccataataataaggatgttactttaatataaaatctcttacccacattattcgcaacattaaaagaggaagctaaggaagtcaatgataatttgaaaagaccgttagagtaaaaacaatttgcaataatctagagtcaaacataatgtcaacatgattattggaaaaaggaaaagattatctctatttaaccaaaagtagaaacaaaactaaattacttttagaagtagcaggaacataaaaagtattgttcaagataatcatcactctaaactgtaattcaagaataaatgtgccaacttagatattgtcaacttcaacataagggcccactttaagctttgactccctctcaattggttttctaagatctcttagtcctcaattgtgattgcttcttttataattttccctttcctttattgggcttgagttaagaaagatagtgacaagatatattcttctctttttatagcttgatttcctcaactacatattaataaggtcactgacactccatgttatattactagtgttgtcggctgtcttgataagattaaaaaaatgcaagaagtgtatgaagagcacgatgaataatgtgagagtcaataagaggaatattatgatctttcaacttagactgaagattcataattttcaaaataaaatatctcactcctttgatttatcatactgaatggttgtcattgcatccataagatgtccagctcagcgttctcactagtagcatatagtttttctacaacattgaaaaattctttgacacttatagtattaggaaaacaactcaatagatgttcaagaattaaaattttcatagaaatgagattaagatgatttgacttttttcattgtgcatgaagagttttctaggcaacaatattgatatcagtatgattagtagatttttcttctcgcaagcataacttcaaatctgttatgcctaatgtaattttcacatctcgtttacatgccttaaagttggagcgttcggaatttggattgaaacattaattgttgttcacagaaaggagaccgaaaaatcaaaaaattaaaacttgatcaagatatatgagcaatataattagaaaatattgtagagtcaaatggtcattataaacttctctttagggtgagaatataacacacacatgatctcccttcatgaaattaacactacagaaaaaaatacatatcaattaagaatttattacctttggaaaaataaatttattaaaaaatatatattaattcaagccaaaaaataataataaatatatatttaaactattatttttgagcaaataattaaaacatacacatttaatattaactcacttcatgaaatatgcactaatatatgtaaatactacctttgagcaagtacttacacatacaaccaaccaaaaaaataatattttctaatacatataaaatttagtgataaaataataattaaaaattaataattttcagccaaattttcaaaaggagatatattaattgtttacaatatatatataataaaaaataaagtgtccaccataacacatgattttttgcataaaacattcaagttttacaaattttagaacaacaaaaataaaaacaagtgaaagaaagagtgttggtggataatacatagtcaagataaatcacaataaaagagtgactatgtctaacagattaagaataaacttaaaaagaatttatgatttatagattttgaaaaatcatcaaaaaaatatttttaataattttttaactgcataattattattaaattaataataattattaaatagagtcaaaaaattaattaataaaaattatagaaaaataaaaaattaaattctaataaaatttgaaaaaagaatcatcaaaaaccgagtctggaaactaccacactctccctcactctctgaaagtcgcgagtgggctttgttccaagaccggttgtcttcaacttttagctgggtataagagcgggccgcatgacccagttgtagtctaatcagatccgattgaaatttcggccaaaatcacgaaaaaacgggcgacaaattgagggggtttgctcaggatgagatttctagcagatttgtgagatcaattttgtgtaaaatgctaaacttagggtagatctcatgtgtgtaatccaaaatttaaagaacaaaaaaaaactttgattttttgtatatctcattcatttaaaaaaaattgtgtaaaaatattgtaaaatagatgataataagatatttacaatcaatttcattcaataataaatataattaaaaaaatctaaatttgattttctcattagaagacacaaactctaaaagtttaatcacaaaattatctcaatttactcaacaattttagacatataagatataaatagaaagagaatttcatgacgaataaaatccctaaacttttaagattgaaatacgaaaaatttaacataaaataataacaaaattaacatgcaattggtgaaaattaatatatacgtattaattgttacacaaattataggtcctaaatcatatataattgacaatctaatagaaaatttagaaaaattgataataaatccaagatcaacttgtatataatatagaacacaataataatatataacaattaagtatgcatacttgattgatctatataagttatctcaatttgatagtgcattactatcaactaagtcttcctcctatcaactaagtcttcctcttaggtctctaaatcagaagtagtttttattattatttgattattaaaagtatacaattgtgatgagacaagatgtattaacagagttagggaggaaacttagctatataaccctagttggatagtgtctgctcatcaaagactctagttaaatagaaaagcccacacttttgcttcaactagactttacacatatagatgctaaatccaataactattgatcactaacaatatgggctaatacaataaataagtatccaatcaacccaaattttaataaaaactaataaaagttaatgtaagtccaaataaaaatctaacaccgatccttttgaattcctttgactgcattgcaaaaatcattctccctagtgtcaatatgaacccaaatttgtttgcaccaaataagagcctcaagttcagctttatagggtgagagataaccagttaccagtttagtgagcacccgaatcactctttcagaagcatcacaaataaccgcaccaagcccagtgaaactgctagatgcatctacaaaaatatattaattaatatgaaaatactaaaatattaattaatatattggaaactagcacacattggctgaaaggttctaaaaaaaggttaaaggagagatatcggtattgggttctgtgccctaactaaaactctatttcaatgtaatcttgaatattcatttatcaataaagaaagagatttatttcattattaattgtttaatgtattatttggtgcacatatttatttcatgattatttgtttaatttataaattcatctaaatccatccttatttcattgatattcttgataactgtgttgtcaacacagtagaaagtaaacaagattatgtgattaaataaagccctatgattttatcaatacacaggatttacactgatatgataatcatcagtaatgtagtttacttgcaccttggataagtgctatgccctttctagggtattggtaaagcaagcttggattggatgtattgttatacatcggattggacagatattgaacttggataagatatcataaacttaccataatatctatctaagtcaatatcacttagttgatcttagatcaatgttttcaatcttaagattgttaggttctagttaaattatattatttatgttctttaattagttcgttaaagttgaccaattggatcttcctgatacttacggattaagaacatggtagtttaattgagtgggagtgttaatcatagatacagaatctatagcttctttaaatgcatagaagtgaaatgatgatttccttcgagcttgacttaatggagataaatagtagagtactcattttagtaattatattactttacagaaatatcatttataggtagctaagtatattaagaataaaatacattaaaaggtagaatggtaaatttattcctactcgatgtagatcacctacagagaatcattaattatttggattataacaatggataattaataacgtgtctatatcatagaatatataaagtgttctatataattaagagtgcaattccaaatctatagtggagcaatgacgaattaataagttagaaaattaacttggtaaattctaaaacggcttattggaaccttgattatataggcacatggtgcccacaccagttgagataatacttcttgtagactcgattaattggttttaattaatcaattataatttcaaaattaaactatgtcttatttatnaattttcactaagtaatggcttaattgtgaaaaaaagagattttggagtttatttgttaattannagactttgtaaggtctaattaacaaataagttaaatgataattttatttaataattattaaataaatatttttgatatttataggattaaaattagaaaatatagcataattgaaagaaaagataaattattgaataaaatagtaaaattataactagtggggtccacatcctatggccgaccacttagtgtttattttcctattattttatcttttttattccatataatttaaatcctaaccctagatgaaatactataaaaggaataagttggctctcattctcatccatctttcataatctagttttcattccttgtcaaacaattagaaatttgagagcctccttccttgctatttcaaaatcctcgctcttcttctttatcaatttttgagcctttagtgatagagtacatgtccactcatatcaagtcaagtactcaatcatagtgtgaaagattgtgaagaatccaacacctgaaggagatacaggctcagatcttgttaatacgctgagacaaaatggaacaatggtttgagatctgagtggaatgagtcataacattctgctactaccaattaatgtaaggttttccaaattttatatgtgtttattttcattgttttaggaattcatatttagggtattatattatagaatataattaacatacttgttagcaaatctagatcttggtaaaatatattccaacaattgataccatgttagaattcaataaaatacatatagttctatctcaaaattatttgataatgagagttaatattttattatcaaggtgaaactacctctaacatctaattctaaaaattctatttgattactatttcatttttataatattatataattttcaaggagagacaagaaagaatgattgattagcccattgatcgacactgctaagcttaaaaatccactagtatgtagttcaagttcatacattaatgttagaactggccaggctgtactatataactaactataagcccttattaatattatcttaatatcgtttaaagctctcttattagaatgagacatgctggcttttgcatattatttgctgtttgtgaggttggaaagtccttttcttcttcctaacttatatattctctttctgttatgattatccattttattatttgtaaattgtatatgtttaaggctttttttaatgggacttgctttagaatgaaccaaaagggcattgcctaacgaactcttttcttatcaatttccatataccaaatctattatcacttctcttttggactttatttaatatatatagttgttttttgtgcttcaaattatgttaaccttattatcctctattttgactctcacaagaaacatgttaaccactctctttacgagggtttgtttggtcatttgactgtaattaagatattatttatttatataaatggtatgcattctatattagtttcgcaatcataactcgttgttgcatcttttattagaaataatattttataaaaaggatacatagaatatatggtctaacaaacccgaaaagcctttaccaactagctagaagaaataaaagaaaaaatggcttgtcttttaaatcatctagtacataagaataagaaaagaaaagcatcatcaatcctctcgttctctctctttttctctcattttcctttcttatattgggtgtttggcatcagagaaaagttgaagaaaatcagcgatggattgttgtatttgtatttcgatgccttccacgttaagacctccgaggaagatgttatgcgaaacttgctatgagggggcgactaaacttaaagagaccttgaatggaactaagagtaataataattctcagccaaattcttataaggcaagttctataattctattcttcttacctatactttttcctatatgtattaatttttatgaatgctgatattatattgctctctttgtaattcgatccaaatatatatttggttcgttgacaatgtagaagagaatgagaagctagtctagaattgttagtagttcctagtacaaagctatagatatgatttcgggacataaaaaaaagtcttaaaactagataattaaataattaagtaaactaaaatcgacatttaattttcaaaggtggtgttttttctttttcctcatttagtccaaagtttagaataaatgtctcgtgtgataacagcccatttaaggttaagtgccatggggcagcttacttttcttaggacctacagaagcccatgtctcaactcaacactagttaagctattcgatgtttcaagtaaatcaaaatagttttaacttgaatttgttattcattctcacatttcattcagtatttcctatgtattttaaattaaaatactgcattggtggtcttttaaataataataaaaagagagattaacatttggtgaatatcatccagtcactgatggatattggtagatttgtaaatgacacaaaagttgaacgggatgatcttgaggaaaggctcaacttcttgagtggctttgttgctgcttttagatatcaaatgcaccctgacattcttctcaagcccagcaatgatgggcctccaataccagctcacaaagccctattggtacaccacaatacaaacacttactactttgtattttctcattattattattatattttgcagaaaaaacacatactacttttactcgcaaactttcttattttttcgataagctcatcatttcttatttcagtacttgaataattatagtaagccttttgctaatttttgagaaatttgaaataatttgcactaaaattatttattttttaacagtattttcaatactttaaagtattgagaatttgttaaaaacttgttatgaatataattcagaaaattttgtttgttgtacttaaaatcagactttttttttttctatatcattttatgaattccgtttatttaacgtttttttcacttgttttttgggaaaaaaaaatgggaaattatagtaaatgaccccaaatcataggagtatgtttgtttatgtcctcttttcaaaaaaata

SEQ ID NO: 19074 - DNA, 3678 bp, Cannabis sativa
  modified_base (44)..(47): a, c, t, g, unknown or other
gggacccgatacttaattgcaccaatagcgatattgacacgtannnnggtgctaggcaccagtggtgccctttagcatttctcgatactttatgatagttacacggtgcagttgtcgggttgtgagatgataattcgccccaccacgtcccaatattatctaccaccttctctcaactaattatggcccaacttaattgttcacataaaaagttatatggttattatcccacaaaacaaaaggagaagatcacttggattttgatacatatattacatttgtgtgaagtaaatacatattattcacacaattagaccattgcaaatggaaagttgtggatcatttttgaatttgacgagttaggagtattgctaacttgtgataccagcggtattcaacactatgaatttgaggaattagaagtactattaacggactactattcaacactatgagttgtcatatgttttttattttcacttgttttaatttaacaaacaaattgctaatactattcaacacttgttatataatattgtgtatttttttaagtttaaggtgttaattaaataagattagaaatgttaaaagatactagtggtatttagttaattagatggtatcacctttaaatggtgttaaacactactgatgtgtaatagcaatgctcactaaataattaaaaacgctaacgggtaccgcaagatgtgacgtgacgttattggtgtaatttaatattaagttttacacatttcgatttattaaataatataaaaaatttctaaccactctcaacataccaaatcagtgtagtgttaagcactttaagatgctcaataataatactcttaaataataatactatttgagttgtgaagttatcgcctcaatgttacacttgtgacttttttagtttatatgataaagttggttacttacgagttattaaattttcattttctgcaatttatatattagatatcatgtcatttgattttattatgcaaattagatgatattgaaaaaacatttaaatttgtagtttgcatcaaatttagcgttgacaaatgatcaattcaaatctctattgtatatgttttttagaatcaaaatcctatagaatgctccaatattcatgtttgaccctaatgatgattacaaatgtttgttttgaagatttaatccaagaaaaaagttattagattacatctttcaaaactataagatcatgtcttttttatttagcattaattattttaaagaaatactagaataagtgatttgattattttatttcttcacacaaatttaaatagatgttaatttaaatttttacctcgtaaactttgacatatactaaattatatcttttaaatatttcaggtcgttaaaaatttctctcaaactattgagattattggatttaatgaatttgttgaattttactaaaaaaaagtctaacgtggatgaaaatttttggagtacaatttgatatgttaaaagtttaagaggcatgatttggtaaatatcaaagtttagctagggacacaatttagtatatggacaatcgccacatgcattaataaaattgaataaaattagacaaaagtccttaaatcgaacaatttcaatagttaaaaaaaattatgacctgaaaagtttaaggaacatgatttggtacatgttaaaagctagttaaagaatatttctcaatattttaatgagtaatttgcagtatctatacttaagtttaacttccagttacaaataaatacctaagcttaatttttagcgttgataatagtaaattatatttttagaactccgtaggtacctggtcgttaaatgtcaaagtcattattcacgtgttattttcttattggtatatttaaactaatattttttagaaaaaaataaaatttaatgacttggaccaatcaaggattgccacgtgaaattttacttcacttaatatccaagtacttacagaagtttcaaaactataacttagttattaatactgtcaaaaattaaacttaaatagttattaagtaaaattgggtgaatgtaaagtaaaatgcaaaactaattgataaagaaaagaataatactcgtaaattttatattattttgattgatgctgttagaccatctttaataagtgatgtaaaagttgagctatattttatacaaaaagtagttttatgatatttttaaatgaatttttattattgtgctctaatgcataattgtaaatcttgatgtaaaatttaataatttattaaaaaaaatataaaataataatataataatgcaaagttaaatgtaaaatttaataataaaataataataatgcaagtcatttaacgcaaaggagtatgttagctaaaatttaataataaaatattaaaaataacataattgtaaatataaaagtatagcatttataatgatgcgaattttatatcatgttatattgtaatataaatttagatcaattttaattatgtgagatttttgcattataatttaacttttaacaaaatgaattatattttgcatttatatgttaaaatatacaaacctgttttttccactcaaattgaatgcgctatacacaggaaagaaagagatgtcttaaaatcatgagaaacaaattggatttaaaaactaaaaagttcaaaactttcggcataaataatataaaagcagttcgattgaaagaaagaaaatataaaatatatttttatatatatattatgatcaggtagataaaatggaaaaccgtccacaacccaactctcaaatttatctaaagctgaaagttacagccaaaaactaatgatagttagtgggtgtagcttttagttatttagctgaccgacacgcgccataatatacaaccatagatagagcaccaccacctctgcaactccaaaaacctatctttctatataggctttggcagttggcttatgatatgtttatgttggtaccagaacactttttgacttggtgcgtatatattagaatcacacatcatagatcagatctaacccacttgaataaatattatgatgtgtttgtattacatcaatcttacatcatatatctttgaactaaaatctagctattctatatttttgttttacaatatttatatatttcataatgttcctcgtgaaatgagttgcttatattattttgatgataccataatggttgttctaattgaataatgtatgtatacgtaaaagaaatgctattttattttggtttttttggcatggtttttatgctgtgtcatattaaactttgttgtttatattacggttaattacatcaaataatctttagtatatgttttcgaaaaatttcaaattatatttagaaaataagattcaaacttcaagtatatatgggtacaatattatatttaattatttgatcttactttcggccttttataaactatttaattttaaaaaaaatgtacaagagacatgctctaactataattaatatatctttatgtaaaagaaaaaaaaaagttgagaatcatacaacatactaaagcatacaataaggcactatataagcatatgacactataaaaatttttacttttagtcacaacaaaatttgtggctaaaaataaaaaagttgtaactaattata

SEQ ID NO: 19075 - DNA, 9586 bp, Cannabis sativa
tgatttattttatttttgtgggcatatgggcagggactagattccggcctctttcgttcaatactccgaaaccacttttcccattggctgggcagcccatggttcaccacccaatttctgcttgtaaaagggtttgttttgcaatcacttgtggatgacaaagttatcatttttatggatttcaacaagtttactgatacttactttggttttctcacttgtgtagatacctaatttagcacaaatcattctgattgggttctatgaagaaagggaatttgcactttatgtctcttcaatctcaaatgaactcaaagttccagtcaggtaaacttttaatcactactttataattatacatctcttaagtttactaacgattaaggaatcaaatatctgaatttttcattcccaaatttagtaagtaatccatccaagactattaaatcttggtcagccccatgattttatacattgtttattttatggatgtaggtacttgaaagaggacaagccacacggttctgctggtggcatttattatttcagagatatgataatggaagacaatccggtttgagtctgcatcttagttttgaaatgaaaagttatgcttttatagttttatcaaattctaaatgtggtttatatttattggcagtcacatatcttcttgctaaattgtgatgtttgctgcaattttccattgcctgatatgcttggtgagttttactctggaagaatatgctgttgtatagcacattattatgtaagacatttaagaattgtaattgttttgtgcgatttttcgatttattccttcagaggctcataaaaaatatggtggaatgggaacaatgctagttattaaggtaagtgcatgcattaactactttgaaaaattagcaggcaaaatatgtttgtggggtgactattgtttctcttgaagttaatcagtcaatttgattgagtgtaggtttctgctgaatctgctcatcagtttggtgagttggttgctgatccaatcaccaacgagctgttgcattatacggaaaaacccgagacttttgtatgtttactatggtttttgcatttgaataccttaactagtctgttaaattttttaatatactattggtttgtctcaaatgtctttcttagtgatacgggttttatgttttggaaaaatacaggtgagtaacttgataaactgtggtgtctatgtctttactcctgagatctttactgcaattcaagatgtttccactcacagggaagacagaggtgagtcttcttttagttgtttgtattatttactggtacttgatatcagaagagttcacagtgtattggctctcaaaattcaagatccggaaccatctaaattatcgtttgtttattaaaggttacacttcttttagcttaatttggcacagtcatttagttcatgcatcaaaattcgttaggaattaatggaaaagggcatgcataatgtttccttactcggaaggatgcatttcaaaattacaaaagatagtacattgcaataagctacatatgtgctgttttgatttatcattttgctacagtagtcagtatttgatcttttaatgggggaaaatgaattcttgtttgcaagtctttgatttacattttctccaaatgcagctaatttacggcgtgtttcaagccttgaagccctccaatctgcaacaaggttagctcttaacttaaaagaaaaaaatggtatcaacagctgttactgtcaaatgcacttcaatattatacatcaacaaacagttccactactttcatactgatacacatttctttcagccggacctttcccactgattttgtgagattggatcaagatattttgtctccccttgctgggaagaagcaattatacacatatgagaccatggatttctgggaacagatcaaaactccagggtagagtgattatgcatcaattcttcatttgaatcattttttgttttgtcttgacctaatctgatgttgaaattacaggatgtctttgaagtgttcggctttgtatcttgctcaattccgacttacaactccccatattttggccggtggagatggtattaagagtgctatgattatcggtgatgtttatattcatccatcagcaaaagtacatccaactgcaaaggtaatttcatcacatatagtattcaacctctaccttttgacctcaacagattcatagtctgcttgtatagtcacatgttttttcttttaatatatggttctctttctttctacagatcggtcccaacgtctccatttcagcaaatgttcgggttggtgcaggagtaagacttatcagttgcatcatcttagatgatgttgaaattaaggtacgaaagtctatgcacataaagcttttatgacctcaacttgatttatatagttataaaaaaataaattttatgtttcatccaacaggaaaatgctgtagttattcattctattgttggctggaagtcgtctcttggaaaatggtcgcgtgtccaggcaagtacatcgatatcatattgtagccattacttttctaagactttaaaaattggattctacatagaaaacttagattgaagggaatgtgcgaattccaatatagacataagcccagtgattttgtgtggctgataaaaatttgattttgggtaaatagcagcataagtatttaaagttttgagtttgcaagcggcataaacttatttttagcggcataagcacataatgtttgtaaaactgtaattttcctccggtatcataatacagactctgatattgtcttaaacatgatacatacaaggtccaaattttaaatttttggatttggacagaaacatgtagtatcagttactttcaaatcttcttttgattaattcaaaacggagtctgtactgacgaaactagtgaaaattgtagttttacatacattgagtacttatgccgcttacaaagttaaaacttctattccgctatttaccctttgatttttgggggttttgaagcatcttggaccagtttcaaacactttaaaactagccttaacttttccaaagaatttataccttgttgagacttgtgtggttaatgaaaatttgatatatattctttcaggcagagggagattacaatgcaaagcttggaatcaccattcttggtatgcaaccatgcttcttgctcttcactaactatgatgctcaaatgattttcttttattgaatatgttattttatgcaggcgaagctgtgaccgttgaagacgaagttgtggtgattaacagcattgttcttccaaataaaactctcaacgttagcgtccaggaggagatcatattgtagcatttgagatcagaagagccagccaactctgttatcttagttctgttttatgcttgaattttttatgttgctagaacagcaaataaagatgtcatttgtttattacttatttgtagacaatttttcagatgaataaaggttatgatatttttggtcaagaaaattagtgatgggcaaatgcttgttcttaatatatgatccaaatgcaagaatgctaaatataaaataggtttttattatatgtgtttgtgtaaaggtctcatatactagttacagctacccaacaccacatgaagtcttgtagcactttcaaaaaaaaatgcctcatcaatcaaatatcatatctgggcaaaattcaagcaatataacattatactactagagctgtaaccatactagtgtaacaagagtgtactctcaaaaaaaaaaaacaggaaaagaagtagcaaaaagattaggattgttatacttgtaccaacacaacctaaaatcctcaaatgcatctaactcatacaaggaaagcaaaattgtgcgtgagattactagtacacttttctctctgtttttgtagtttcaaacctcaaagggtagttccctgaatcttatcacgagccacattaatcacctctatcacatcatgttaacagtaactgtacactgaaaatatttatgagtctattttcttctgatcatattttttggcaagaacaagtctgggtggcgaaatcatagctctgctcatttagatgcatggtcccccaaatcttattggtggtgaatgggcttcacttcagcaaaatgccggaagaccaatcgaaaagattattggtgaggccgtagatccagcttgtatgcttgtatttccataggagaaatataaacatttccctcttgtgaaacatcaccaaattgctcagtatacccaagcatctcagtatcttcttgtaagaggtttaaggaggttgctttagcattcaacactgaaagatccttgaacatgtaaaacagattcacaggctcttctgcgacactggtgcaatgtgatctgccctttcgacagaaggatgaatcccacttttgcctctgcaagactagtacgaacttaggatctccgtctgtttgctgagaatatttcaaaggtcggggaaccttaaaactgacaatgtgcaagtcacatggtaaggacatagctaaaggggagaaagatcttgggggtggctgcactgatatatcttgtggtttcttggcaataaatgcatgtaaaggatagttcaagtgagaaccaatacggtgagaaagaagagagggacttaatggcagatggtttgaaattgggtttgaagtggaagaaatgttggattccacgagaatgtgaaagattacgttcattgcccggttgtccatcactccttgcccaagaccacgtccatcatctcttaccagacgacgatcaagcattatctctaaccaaccatctttaaggcttgccacacccaatgactgcctggaatggactgagaaccgcctgccattagatccttgcaagaaagcatgagcaggcattgggtagtaattcccctgcaatggaattttgtcataggtttctctccggctcatctggaagccatttaaatcagtataaaatattttcttgctatcgatatctgttttgtatcttgctattatctctttgtcattgaattcatcaccaagaagctctacatgatattccttctctatgagaaactcctgaatagtattttctccattatacaaacgggtgctatgggaaatggggcctctctcccattctgtgtgtggatgagagtacacttcttgcatcagatggccctcagagatcacgatcagtccaccagatttaactattggttgagcatcaccagtaggtttgaataggtaggctccacttccccaacttgagtacatcgatatttcctcaccaataacattttgagagccatttgtgtatgttactttctgcagcaaaccagtcttggcatcaaaagtgagggtttgatgtcgattatggatttggacagtgtcatctttggcttttgaacaagcataagaagctggacaagaaaatgagccagaattagaaatgaattttagttttgctggcttggctttttcacacctaactaaacctttagcaatgtaatatgtttgcaggcctagggcgggaatagaagctttccaatagacacgatgtttcccagtgaaaatcttgcttttgtcatgctgcaattcaggagatatttgactttcgatgcaagtccagtttgaatccaaaacagcaacatcaggcttattaacaacaatcatcacaacttcttctcttgtttgctctgaaggattgaaaaagactactgattggtaagttccttcatgagcaattattgtcttatgaacaggctgaacatcatattttgatctcacctgtgcaggctcaaaaatagaagggttatggtcagatttttcatgtcgtatcttaaggagcacttcaattgccttagacatgaaaatctgcaggtcttgcaaagacatatgcatccgagtaccatagtccgtaaccacgtgatcctttgcagtaccagttaccccatcatgatgctgaaaaagagccaagtttcttcttgcagctgtcagtttgtaggagaatcccactggcaacttttcacattgtgccctctgacagtacccaagcaataaggccatcatcatatctgtggcacgaagtgtttcctccaatacccgatcgacagccttgaagaaaggtctcgacacataataaccactccaatagtccttctgcctatcagcataagtaaagaagtcacctgatagagaaggaaaacctccaacctgaatggatccaacctcaccaggacgggagtaatttattctatcagcctcctcacgtacagttcgaaagtagtcctccaaagttccaaactgtgcctccgcatttaaggatggattagaattgatatgatcaaataacaattggtaattcctaaactggttttcggcttcatcaagactgatgtagcggaaatcatctccaagagggacaagaagcgtatttgtccggtataggaccgatttcttcctatattgatctagtagtttaaatgctctttccttaacattctcctggtcggtttctactggatgttcaccccatggacagagttcgtacatagaaccacgcattcgagcaaaatcaaactgacaacaaatagcaggctctgggccacaggtatgtggaatatcataagaatagaagggcatcatgtggacaaaaatatcagtagtctcctctgcatcccaactctgacgccatatgtattccaaatttttatggcgtgcaagctccttcttcagctcgtagtgagtcctctgaataagcatattttcaaatcccattcgacgaagaagatatgccatggtaggcgagtaaccaaatggatctattgcccaagaatttttgggaacaactccaatggtgtcatttaaccacatattaccctctgtgatctgatacatcaattacacaagataaaacaaatattgaatcagtatttctaagtaatcacccattaaatacaaatacatgccaaaagaatcatgttctaaccctatgcaatcaatctaactgtgtttaaaatagagaagaacctactggaaaataagaaaacgcaccgagactgacaaaacttgcaattaaattaccagaggccacaaagaaaaaaaaaacatatgccacatcaatgcatgaatggtacaatgaaacgatggaactttgacgcttacctactggaaacctaaaaaaaaaatactcaaagagtacctcaagataaccatcaagccataaatactttaaattctatgatttaatgaaatcaactcatcaactaaacaatcgcctatatactctgcagattatgatatgagtaaatatcattaacaataaataaatgcctttccttgtcacaatgcccatatttcttggagaagttcaagaaaaaagacaaatgcccgtggaaaatacagaattatgtcgatgtgaaatgtagtgaaatagaacaaaggaagctttaagtttacctgctcaattatggcatagtaatgtgaattggcctgcatcacaaaaaaattacaattataagcaaagattccataatagtatatcagtaatgcctagattctaaaatgattttatacacaaagagtaagatctcaataagtaagaacccaaattttgccaaactaaataatccaaacgaacataaccaactcttcactggctaaaccaaacactaacaaattgtatgcacagtatattacatggattcagatgtagaagaattttcactttccagcagccaagctacttatttagccaattttaaggacataagaaactaagaaagtagaaatataatactgtgatctaaaagatatgatgcaacagaaatattgagaactgttccattgagaagcaaggagtgtgttcttggtatatggaaaaacagcaacataactatttacaatgatatataaaaggaaactttgtgattaagctatggaaaaaaaaaaaaccatttgaagactacaatatagtttagaatgaaatgacttacctcatcattcatcacccatccaccaccaacaatttctagctgaccagtctttactagattaatgaaagattcctttttgctttctgacgaatctctccaccatctctccaaataagacatctcttcccatatgaactttcgtctagggtcctacacatacaagtccagacaatgcaactaaattcttaagaaacaagactagtaaatatagaaatatgaacccaaaatacttaattgtttttctacaatagaacatacatacagaatttgataaaaactcacatagaatataacctgtaacattaaccagttcatcaaaacaataaaacaaaaagcacccacttcaacatactctactttgattacaaaaaacatcttaggaaaagaattaagctaatcatagtagtttagttactaagtactcagaacaaatatatcaaaatcaaggaaagaaccttggaaagagtgtcgacgatagtatcaagtatgtgcttagattgtctagtatagtactcctccacagtgagtttccaacccggatcattgtgcgaatgaggcacaacaaaaatcttcaatttctccgaatcccactcatcccctttatatgcaacattccacccttgcttccaagccccaccatcttcatccaaaaattcaatcctatcatacaaatccttggtggtgatatcaacagtggctccatcacttcctgagtcaaccataacaggcttcctgaaactaggctttctaggtttcacaatccgggtcggcgtccgcgatttaaaacgcgaggtaatgggtctggggacgccataacgaagaacaacgatgaagaagaagaagagagagacagcaaggccgatggtgaagaaattagcgaaaagaaagtcccggagcacaaccctacggcgagattttctggagaacttagatttggaattggaggaaggagaagaggaagaagaggcagtggatgggaggagagagttgccccagcctccacggcgggtggagaaggccattgatggaaaaggattgtgatgattcagagagatgatcggaggagaagggtggcgccggaggttttcatagctgtggattttgagttaagttaagatcggagatgagatcaagtgattgggatctatgaaatgaatgatgtaataaggttgcagaggaaaaatcaacgaaaggaacagaccgacatttgttactgatagtgattgtggggcctacttactaagtatttatatttacacaatttacagcacagtattttttttttactatttgatggtctccaatgtaattatgtaaaatgtaaaatttgtgctaaattttgcacaaaaattgagtttgtgttatatttaggttattttttataattgtgccccaatataaagatgtaaaaaaatataattatactgatcatcattaatattatattaaaaatatacaaacatcattattctctttatgttgagatttaaccctaaatctcaataaacctatcaatagtttcttacattttaa

SEQ ID NO: 19076 - DNA, 8832 bp, Cannabis sativa
aatgaaacaaatgaatttgtttggttagagtaaccaaactgaaaaaataaaataaaaaatcgtgtaccttgatgaagcagagaatggagccaattaaagagcctaacaccccaagtagcgccatgaagcgacatcgataaataacctgcatgaagattgaagaagacgaaccaagtaaggaatatcaaaatagtttctttttatttgttttttttttcatttttacaatgctaaccttctctatgttttcctcaaagacctgggctttagaatccggttgggtataaagagctggagaggtagtgcgggcggatgcaggaggaagtaggacccggggccggcacaaaggtctggagcagaaattggaatttctgagagaatgggagtgagaaaccctagccatggatgatggcaataatgaaggccgtggatttgggagtcgactcaggctgaggctcatcatcattattggtgtccggcggttctgaaaacatatgaattttacagtaatttttcctttttaaactcagatgtctcactctcatatacaaagaacccaactgggaaatgggagctgcactttctaacttcagctcagccacccacatgtacgtatctttatgcgactagtgtgatgatatgatatgaatatcatcaaaatatcaattcaattttttaattttctttctcatttattatttttaacatatatatggagagagatatttttaaccacccaatcattttacccttactcactagaatagacgtctctgatttagtttagttttttcgccttaatatttacaataatattttatacatatgtgtatcttctttgacatcttgtttcgatattctttcgtgaatttaactctatattttatgtttcctatgaaatagctttgttttatgtttgccttgtacaaacaaaaatagagttagcacaatcacataagagtagtggtgatctaccgattgaagaaaatgaaatccaataattaattgagacttggtttacgcacttctcaagtttttgacacagaaacaggggtaaaggagagagaaaaagcaatttagtgtgcgtttagtgatcaagattggtatatttagctttttcctacatataagtgtataaaatgggtaatggacaaaagtaatggcgaaagagattccttaatgaggagggttacagtgtatgttaagattttgtacaaggaaagacatgtacaattatttattaacataagtagtcaggaaaataagcatcgagagagagagagtgaagacattagacatatgctttatgattaggaaacgaagataccaaacttccaccaccaatgagagccaaagaagccaacttaataattcgatgcttaaagcccaaatataccaactgcatcgcccccaccgcacctctttctcctccccctctctagtttttttttcctcagtctatctctcaaagccttttttaattttttttttttccttttcttttaacattaaaattgtagaaagaaaagagtgatcctgcggcggatgttgtctattacaacaaatagcctccaatgccaagaaaactcatacagggtccggagagacgcacccatcctcttgtctggtgcattgccatactctgcaccgtagtagccatagcagtcatcatcgttgggctcgttgtgttcgtgggctacctggtaatccaccccagcgtgcccgtcatcagcgtcgtcacagctcacctcgacaagcttcaaaacgacctggctgggctgttcgagacgcagcttaccatctacgtgaaggccgagaacgacaatgccaaggcacacgccagcttctccgacaccagcttcgtccttagcttcgagggcatcgccatagcccggctggtggccgacccctttgacgtggcgaaaaatgggtcggtggagtttccttacagggtggagtcatcttccattccgctgaacccggaggagatgctgcaagttgacttggccctcaaacaggacaagattacattcgatttgaaaggcagttccagggccagatggaaggttggtcttttgggctccgtcaaattctggtgtcacttgaattgtcggctcaagtttcatcctcttactggggtttatgtaaactcaccatgcacttccagggtgaaatgacccacacaagtccctcccattctcccattctcttttattttattatatattataactagttatgtttctatgtacgtatgtgcacaaaatgagctcctaataaccttttgccctttgtgtacattcttaattaaatttcttcttcttctttccttagtcttcttaattcactcttcatcaatcattaattagtttaaattagtcatacattacagaagaataatgtcaattataatcatcttgcagaaattatacagaccttcattggaatttatgtgctttagttttttttctataaattcttaattgaaaagtatagtgttgtacattttggtgctgtggaatcatcaaaggacagaggccaacattttttcttcttcttctccttttttgtccttttttgtttacataattgttataaaaataaacaaaaggtgcaatcaaacccgtatgcatgttgagggagcaagatcacctaagcacattacttattataatagtaataatgaaagccgcctttccttgtgacaacattcatttagtaagtaagaaaaataaaacaacttgctttttcattacccttttaacctttatgcaagtagtttgtattgtatttttatgcgtgtaaatctaatcctctttattctttatacttctggagagcactcgcagtttcctgtttgaaatttaaagtataattgagcatggaaattgtgagacattaattaaatattgtcgttaaattatatatggatttggacctttaaaataagaaggttgactgagaaaagataaacatctgataaatgaaagtgagtcagcaaagtaataaggtgcatctgccagagaaagacatttggctgcgacggtgtgccacattttctgctaagatgagaatttgaagttttaaacgtgtcagcctctgaataatatggggttctgccactcatgcaaccaaactatcaactttaatttttaattatcatttcattccaaatttcaaatccatcaacactttttccttctttgcaccatctcatctcatctatctctctttctatgatgatgttaaagagtaattatataaaaaatcttgttagcagacctttcacccttttgaagtttgcttttattttgtttttcacttggactgagctggtcaaggcagccatcttcttccattgtaacttattctggaaactgataactctgcctttaagactacttatagctatatggagagagagacaagtatgtttcatcttcttcttcttcttttatttattcaattatatttactttttattttatttttggcttaatttgtttcaatatactgtgggcagctggaaatgcgtctccatgatttgcagtgtgagttggaaaatcttgtttgggataagaaacagctcgagttacatctccagacggccattagagaacacaaaatgatggaaatcttattggatgaccttgaacatgaacatgacaaagctatttccacagttcaacttttacaggatgaggtaaacattttacccttttttttactgtattttatagcctaaaaatccaaccaccaaacaacccatatggttcttttcattgcctttgtagttgatttttatgatcaatttatgctaagccaaagaaacccttgaaggtgagagtttgggagatataatggagccatctgatacaagtatgcatgcctttgggcttctctggtaggcactgagttaagagtagagggttatgcttaagctaggacttattattagcataaacttacatataatgtcactaaagccgatccaaaagaaacaaaatttagatcaaatcaaaatgtttgatatgggtgctgtagataagagagggtctgagtggaatagatttttctataatgttgatggttagattgtccttgaaatatagtaatagaacttttaattgatatatagaagaatggcaagctgctagtttgattcagatagattgcagacaacaatttaatcaactagctatattgatcttgttgtgacgtgtgtgtgtggtgacagttacaggagttgaaaaatgaaaaccttaggctgttggaagttcagggaaaaggatattggaactttactggtaaagataatgataacaagtatggcactccgagttctgatgaaactggcatcatcctccaacactcgtcgatgatgatacacccggttccaaacactcagtacgagttgctcaaactcttaaaacccgaatcaaatgatgtttttgatcataggaggggagctgcaatcacacagagtctgttcagtgcagtgttgtcacttttggttggaatgatcatttggaaagctgaagacccttgtatgccccttgttgtagcgctcttcacagtggttggaatgtcattgaagacagtggttcaatttttttccaccattaagaataaacctgcttcggactccgtggctctcttgagcttaaactggttcatacttggcacacttacttacccaacattgccaatcgtggcccgaatgctgtctccagtggcactaagaattgtgaatggagccgcgagtcttactggtttgtctttctcctaattctaccaggtaaactctgatttaagctttggttttgtaccatgtacagttagaagaagattgtaaaccttttgtttggctctttatagagatgttagtataaatgtagatcttgaaacttaacaagtataattagggtgatggaaggtgttgtaagcttgaatggcaatgttgatatacttaactggttcagttagatagagcagcgtagaagtaagtgtgaactgtggtagtaccactagttatgttttgggattccttttgacaagaaagtagtaatggttgtacggagaacagtttattctgagaggaagagacctgagaaggtgcgagtttaacagttgggtcataatgaagccatctaaatataagtatttttgcaattgggggttagtatgaacttacatatgaatacactgaagctgtcccaaaagaaacaaatgaatcaaatgttgaaaaattactacacattgagcaagctgtgatattaacgaggatcaaacatttaattttaaagattaacataataatagacatatctcctgaaatatttcgttttttataagtatattaatctattatttaattaatttttaattaaatgcaaaataataaaatttatactagaatagttatttggtagctacagaatataattttgtaattgtagaataaatcagaaaataaatagtgcaaaaacgtaaagtgcacaaagtttttgtacatgaaattaacaatccttgcagattgttactagtctacggggtgacgcctaagataaaatttatttgataaatcttaaaaaatacaaaataattgatttatgcataaatagattatctcttattgtatgcataaacttgatgtatttcactttttaatcaaatcttgttgaaattttaagtgctcgaagtcccttcaacctccttcaagagtgcaagaattgaaaagttatttcttgaaagcttatagaacattctcctgaaggtaccattgctcttttttttttttttagacttgattaactcaagacaatacaaaatacatacacacaaagaaagggacaaatacactttctctacaaaacaaacactctcttttctaaaagtatgaagacaattcaaagtgaataaaagagatactaaacctaactaatataatatgtatttataatcaatatacaccttataaacagcttacacggtaaacaaggcaacttacaaaaaaacttccctaaaaaaagatgttcagctagtccaggaatttttgcttttgtatttacagatcatgaacaataactgtgactttttttatggaaaaggaaaatcttacttaggttttctttacaaaaaaatgtgaccaaacaaattaaaaaactcacataggatcatattaacatcgctaaaaagatagaaattgatttattcataaaatttactctttaggacaaacttttcaaatataaaaagaaaaattaatcacttttcatatcttatataaataaattaattaactataaatatatagaattaaaaaatacaactcaattaaaacttaaaaataatttataaaatatttttgtcaacctaaatactttcaaaatagaattaaaaatctcctctttcccaatttgattgacaaaatattttataagaagaaaacctacatgaagtgtcaaaaacaaaacaatatagtatagaaaatactttcttgcatgaaagcatacttacacataaaagataacttttttaacaaaaaagttcacaaaccacaaacacaattccccttaaaataagggtcaatagttgtaaccgaaaaacacaaaaaataaagtattgctccccttatttgtctatgaaggagctaaagattaaaaaacaaaataaacaagccgtaaaaagttcaacaaaacatagataataagcaaaatattaaaaagtcaattccttaagtatcctcattaggttgaaagaaattcatgatgttgtctatcctcttaagaagtaaagcctgatttgtttccattttacccaagacgcaagttgaattctgttatttttgtaagtgaagaagtagattttgatgcagcaactgtctcttttggagcaccaggggatgcacacctagtctttttttagtagacttttcttgaggagttttttctgatactttgaaggtagtactaacagcaaaagcttcaatagactcattcttaagaatcaattcctttttgtcagataaaatattataaatcaaaagggaaaatgagattaaacttaagtttcttgccttttctaatagagacaatttgcttccgaagcatatcagttgaatcaatttcaatttttatatcagttgaaattttatagaaaaataaaacaagttcattgaaatatttaccagattagagtaagaaaatcaattggacaagacaaatctcataaatacaacatggtgataggcaatttgagacgtgtgcattttgtccgagagctccagatcattgtcaccaatgagatacctaaataccttttcgcggtcaaattcaactttagttggttcaacttcaattggcaatcgatgagcattaatcacatcctcacattaaaagattaccaatgtcccttgacaaacacttcctcaaatatgaaagagtcctcatctaaactctcatcagttatgttagtataaaattccttcacaatttgacccacgtaaccatcaaaaacgatcaaagtatccaaccattgtctttctattaaacaacccaaatgccttatgagcaagcacattaaaatttttctccgtagtaaactaccttccctcataaaatttcatatctctatcattatcatagtaacaaaaataataagtatgagtcttaaagttttcaagagtaataccaaaaggatctttttctttctttgaggaagaacaagttttggagaaaccacgagtcgtttgcctttagctttctgttgagcagcaacaggaacaagaactagttctacagtaataagatcatcttttggaacttcactctcagagctagaatcaacaattgatggctcttttggtaaaatctcttcacatgaatcagacttagcctctgattcttgatagccattctcagatttttcttctgtttcaaaatcagatgaagagatggaagggggtattccttgagattctttgcccgagatgaggaagactcgggttttttttggagtagaagactttgatattgttcgagaacataccatgggtaaagaaacaatagctctctcaaaattagcaacacctttaggagatggagacttcgacgaggtgtggtggactttcgagctggggtctttgatttctggacagtttttgcaggaatagtggatggtgttggagcagtcgacgcaagtggggacgacagtgaggcaaaagaggattcatgagaaatcctctttgaaagttgggcattcttagtcttggtcattgatgctcaaaaatcctagaaaacgttctgacaactgaaaaagattgaacttttagaagaaaaaaaagtaataaagaagaagaaaattaataaaaaagaagagaaaagaatgaaggtgatcatgagttataagagagtgggtagttagagatatagagagaaaataaaaattaatacccataaaatcaaaataaaaagaaaaaaaaaaaattgaactaatttctccttactcttgagcttcacggaaaacgattaaaattttcttaaatttagtcaaatctatatatatatatatataaaggagaagtatgagacagtgacgtggcggtctaaaattactccaaacaatctaaactattctcttattaattctcactttttaattttttattcaatttataaatattaatgaattaattaattaataaaaatatctaatattaaatttatactaatttttaaaataatatataaccttaaacttatatataattttatcacattcactctatctcacgttcctttctatcttcttcttttctttttctattttttt

SEQ ID NO: 19077 - DNA, 4323 bp, Cannabis sativa
  modified_base (4289)..(4289): a, c, t, g, unknown or other
taattaattttaataaataatttaatatatacttagaggaggtggtgggtgtcgtggccacgaggaggacgaggaccgtggttaggaatggccagtggttgagtgaacagaccaagagaagagagaaagaaagcatcactgactgtggagctcgattatgtaattacactgtaactctgtaattgaagataactgactgtggggtacaattacagtatttgatatgtttttctcattatgtaattacactgtagctgtgtaattgaaaataattgaatgtcaattatattctttaattttcatggcaagaattaagtgtaattatactgtgtaattactaattttttttactttaactattaactactaaaatattttatttttctttataattactaattgttttgtcatattagaaattcatatgtaattaacttcttatctgaacacactttgtattttaaaatatagtgcaatttttaaactttgtaattattagcctaaagattatactacctaataattaataattacattatctaataattacacaattaatttcaaacacaccttaaaaaaaaattctataattacacaaattattcatcaatccaaaaagatgtgtatatattcgcctcccttataatattttagttctacaataatttattgctttgtatatgtttcacaattatttgtctttcatataacttaaagcttcattaattaaagaatattcttaggataccaatagcattatatttacttattattattattattattattttcttattaaaaaacaaaagaaaaaatattatgtcttgtaaaaattggggtcggtttacacatggaccccgttcaatcgccataaactcattattaaaccttgatacttatattctttaaaaaataatcaatttttgtcaagttgagccatcggagtataaagatgatttttgataataagattcatattataaaaatattatctagatacaaaagaaaaaaaaaggtgttaaagttgtggatacattatctctttaaggatttcattcttataaatttctagctaggacacaaatgtgttttgtccatctaggatatttacaattattaattcctttcaataaattattattccttttggtacgatgtaaaaatctctcaatagttttctttcaccaaatgtatataataaatgcaactagaattagattaaaatttgttgtttgactaaaatacaaggaagttacttcgaagccgcgttcttggtatatgtttaaaagaattattacagactaggagtaggagaacgtgttcaaaacattaattaaagcatgagtcacggcgtcacataacaacatgactatttcattttgggatgtaagccattaagattagcttagtgtgaagaaatgatgaaaataatagaaaggtcatggatttaaattcaaaattttcaaactattaattaattgtaaaatactattacgttacactcaaaaaaaaaaaaataataggatgtaaaattgtaaatgtatgagtcggatctgatccacggccaatccgatctaaattggtgggtcagacgcaatttgatttatcgtaatcgggtttaacctaacccgaccagcccaacattttgtatttttatttatttgttcatttatttaattttattacaattacatgaattaggtttcaaaaaaaaaaaaaattaaaatttattcttctctctaccatctcatcttactcttagtcgtatttcacttatagtcactttacattaaaagtcgttgctatcactatattttacttgtaattactactaaattcaaaattattgttatcaccgtattgaagaatgcacaaacattatcaaaatcaatagaaaaaaaattaataaaatcgttttccaataaattattttacaataaataaaaatattaaaataattaaaatttttaacctgaatgagtattatactttccccatctaccaaataaaaagaaaaattagttaagaataaaaaaaaaattactttaattttatattagaaaaaattattttacaataaatataaatattagaataattaaaaagttactttattattttttatgtattttaacttactttaatttttttttttttgttaattttaatacttttataaaataattattgttaacccagaaatttttcatagtgatgtggatatcaatatttgacacatggcatgaaggataacgtcacgaagttgagtagacccgagtcatagcagtcaacgtgggaggggaccctagccttacgcccaggttgactccgtgatctctgggatggaagttcggacttcaataacttgaatctaactcattatctttcactattttgtaccatgaagacatggagcaacctactaccagatataggagctaaaattacacaaacctgcaacccgaaagctaacctgggcacctagggtttccaccaagtgcccaagttgacatcctcaacaagggtttcaattttcgagaccgccttagtgaaaagttgccaaaacttgcattggacatcgacttgacatgcataccatggatatatttgaggcaccgaaatcagatttggagcaacttgatttttaagcacctagggcctcgagcacccaacgcccaagttaacaatttgtcaatatgggtgccttccaagcatcagatcaaagatttgactttttcattgaatcagtcttcatcaaaaatgaggaaataggtccttctgaaggaaaaataataattcctaggtagaaaaatagggtctagctctaaggctgacacctggagctggccctgcgccaaggttgacaatttgtcaacctgggccacaaaaagtggagttttcctagaattgtttagagtatcatctccatctttaaaaaatattaagaattaactatttttgaggaccaaacggaacttccaaaggggcagaagaaggacccagcgcccaggttgacacctagagctggccctgcaccaaggctgacaatttgtcaacctgggccacaaaaagtggagtttttctatagaattatctgcattttcggcattggacacgtggactccaggtcagcattcaagacccattagtgggaccctcatcaaagataaaatgggctaagcccacctagatgtgcccttgcgagagttatcttggttccgtactcgcagagtcttccaccctccgtagatagaggtcggaagacaccttcggtatcatgaggccagaggggtaagatagtaccttcctagaagaccccttccgtttccctatttattcctacctataaataaggaagttctagctaaggggaaacttcccaatgctatgtagttatttcagaataatcatccaccattagcagacacagttttgactcgatcaaccaaattccaatcttcctagtcaacagatcgtattcttcatgggttgaacttcatgataaagcccaaagacattgtataattgtaaactcttcagtatatggaaaagggaaaaccctaatgtaattctccaactactataaatacccactaatctcatgaattaggggttgaactctcttatgtactttgctccagtaagcttacgaagatacaccctatgtatctattaaagtgcttacaagaaaacaacttactaaataaaactgactcgtgaactaaggctagttaacgccctaaccacgtaaaaaaccagttgtgtctttttatactttctctttcagttattatttcttcagttcttattatttttattctgtttatgaaaatctcaggaaacattacccaatttaaaaccttagttgagaatcagttttacacaaaaatcaaaggtctaagaactgactagggaggacaatattaagccttctatacacttgtcaaagagggtggaataggctttgatcacccttgtccacacacctctacacaaaatgctggagtagaaagaaagcacagacacattgtagaaatagggttaatacttctagcacaagaatatttgcctctcaaatactcagttgatgcctttcaaacatttgttcatctcataaacagattgcccacagctgtgctagagggaaaaactccatgtgaatttttgtacttaaaaaaacttgattatacctttctcaaaacttttggtgcagcctgttatcctttcctaaggttgtaaagatcgcctagtcttaatttagaaattagtagataattagggtttaattntgaaaattatttattagtattgaattaattattt

SEQ ID NO: 19078 - DNA, 5704 bp, Cannabis sativa
  modified_base (33)..(42): a, c, t, g, unknown or other
  modified_base (214)..(226): a, c, t, g, unknown or other
  modified_base (891)..(900): a, c, t, g, unknown or other
atttaggttataaattcttgatcttcttattgnnnnnnnnnntatatagacccatggtcccctcattagttgagataatattgctagcaaactcagttaattgtttaattaatcaattataattctaaaattagactatgtcatatttatgaatttttactaagtaagggcttaattgtgaagaaaaaatgttttagggttaatttattaattnnnnnnnnnnnnntggtctaattaataaataatataactagccattttatttgataattaattataattattaaatatatagttttgacatttataagatttaaattgcaaaatatggtattattgaaagaagaataagttgttgaaataaagtagtaaaattgtaactagtaaaaggccctttagtggttggccactatgtgtaattttgcccattattttattctttttaatccatataattcaaacctaagttaaaatactataaaaagaatatgatgctctcatctcttccaattttaattattcacttcaaccaaacttaaacctaatttttattccctgacaactagtagatgagagacacattctatagaatttcgagcctccttcattgttcttcataattgacgcattgtgatagagttccatgcccacacatagcaagtcaagtactcaatcatagtgcgaaagacggtggaaaccaaacctgaaggagagaaagagatccaggctcagatcttgataatactctaagacagaaaggaacaaaggttagagatctgaggggaatgagtcattattatttcgctgcaatcaatgtaaggttttctaaactcttatgcgtttaatttcactgtattagagattcacatttaggatgttaatcaacatacnnnnnnnnnnatctagatcttggtaaaatattcccaacaaaatgttccactgggaccatatagagagtgtcagcttcttttgtggtgtcaagtcaagtcatgcaagagcatcagcattggaatttttttcccttggtatttgctcaattgagtaatattcaaattgttggaataggctttgtgcctttgctaagtaagagaccatgttggatcctcttgattggtattctcaaagaacttagtttactactaattgtgagtcgctaaaacatcttatggatttggcttgtaatccccatgcgagtcttatgctgacaagcaagacttcatatttagctttgttattagaagttttgaacccaaatcataaggctgtatggattcgatagccatcaggcgtgactagtattattcctacctctgagctattttcattagatgacccatcgacaaataactgccatgtagactgaggtggctttttaatttcttctccttctggaaacctagtacattcggctataaagtcaacgagagcttaagcttttatggtagttcttggatggtaagttcgacaactcacttgagtagtcgacccgaagcttctgctttcattagcacttgccaaaggggttaattagtgagtacatgtatcgggtgtgcttggaaatatgggtggagctttcttgatgcatggaccaaataaaaatcaagcttttccatgactggatatcttgaatcagtccccaagaggtgcttcctcacataatatagtggtttttgggccttcttctcttctcgcaccaaggttgcgctaatggttgtctcagttatggccatgtataaatacaagatctgtcctgtaattggtttggacaaaatagggggctctgccaagtgttttttcagtgcttggaaagcttgttcacatttttttgtccattccactttgttgctaccccaaagtaagttgaaaatggggaggcatttgtcggttgactttatacaaacctatttagtgtcgtaatgcgaccaataaggatttgtacatctttctttctttgaggtgaaggcatgtccatgagagcttttatcttttctgggtttgcttcaatgcccttgaaattgacaataaaacccaaaaaatttctagatgaaacaccaaatgtcctttaagtcttccatgtaattctttgttattttagtcttcactagcatgccgtccacatacgtagacctccatacttctcccgatttgatcgataaacattctgttaacaagtgctggtaagtggcgccaatattttttagtctgaatggaattatattttagcaatataatcccatgttggcggtaaaacttgtatgttcttggtcggtgacattcatgggaatctggttgtagccagagtaagcattcatgaatcacatgagtttgtgtttggcgatggcatcgactaattgatcaatacgtggaagtagaaagcaatccttggagcatgctttgttcaaatctgtaaattcatgcatgtgcgccacttcccatttggttttagacctaaaaataggttggccacccaaatgggatagaacatctctcgagtaaaattcttggcaaggagttttatctacttcttccattaaggcagcatatcttgtctcatcaagaggcctccttttctgtcgttttgttggatgttccaatccaaattgaggacatgagttattgcattgggatcaatccccaccatgtctgagtggagccatgtaaagacatcttgattgtcacgtaggaattagataaggaactttttgatttccttattgaggtgcttaccaacttcacagttttggttggttcttctggatttagtatgatttcttcaagctcttcaataggaccaagctcggtcatgtcatcttcaatgcgaggatcaatttcctcaagctttggcacctctggttcttcaatttcctccacgatggtcatgattggttcccccaatgttgggtgttgtgcccctagtggcgattaaggctactcgtcaaacaatcttgcaaggcaaaatttgccacatggatattgacttatctctatgtcaattttgtttggagagtctgccattattgttgaaataatgagttttccaaaaggaaaatactcaaactttcaccacagcgctctcaatgaaagcaccaaactgttgacgcagtttttcattaactaatctaaaaaatcaaaaaaaaaataagaggattgcgatgaattaatttgactaaataaatctgcaataaataaatggacactagagatctatagtagttcactcccatgctgcgatggtaatggggttatatctacttttgtttttattaattaaatctgacacactagagttatgttctcaagagtatgtagacaataatacaataatggatttcttagagaaatctatatcgagacttatgaatacaaggctcatatgagactcaatattcacaaatctgataaagatggtggttgtaaggtccctgtgaacaataaaccaataagtgtaagaaaagagaatggtctctgttcttggaaactatgtatgccaatggtgttttactaagagaggcttagtgccgacaaagtgtgtagggtttaggaagaaggtgaaggaagggatgtgttgttcttagtagccatccaataagcaagccaccgatccccataaccaacctatcactatctttatataggcttaggatttgttagtgatcccccacatgtcgggtgtcacactaacaaatgccatatcttattcctaataatgaaaaaaaaagtacaaataaacatatgtttacaaaaatctcacttatttgtaagccgaaatcctacaaatattagaagaatagttatttttggctagaaatacatgaaattaaagaagagtgacaagggatgtaacctctcggcttacaattcatgaaattggagagaagtgttgaaaataggtattttggggtgtcacttctcgcatatgatgccacatgagatgtggtctagctctctaacatcccacacttaattacactactcaattcccaagtaaagtataccaattttgagcctgataactttagaattgagctatgactatgagacacacttagatccgtcttgaaaatatatttccaatgcaagttgaaccaagttatttgaatgaaaattgggagatttatgcctattttactgaaagatagtttgtgttattttgctccatatacgagtaatgacatgaccaaatggcggctcttggccgtgcatgttccctaacccctcgagtcgtgttttgacttattttttgatggtgaatcatattttgggggtcttgggaccccaaaatctcattttgacattcgaaaccctaacgagagaccactggaatcagttggagccaaaatatggcaatggtcggccatggcttatgggatgccttggatggttttcttgcttattttagtcatatggatgctataagaccattttttcacattggttcttagccaattggttaagagagcactaacacctttttggctaaaaagaaggtagtggtcgcctgtgtgggtttggacccttgggtgacttttctaacttgtatttgacaaattgatgttggaaatacactttggcataagaaaatcctcattctttgttatgaccagccactaccactatttgtggcaaaaagatggtagtggtaggccaagtagtttctataccacttggtgcattttctcactttgttttagcatgttattgatgaaaaagtgattttggcaaaaaaatgtcattcccatttgatatggccgatcactgccactctttgtaccacaaagatggaagtgattggctaggcttgtgctttggtgagaaatgatttctttcacttgtgtcgcactcctatgtgttgagggaacacattttgaaaagtcccctttggcattttgtgagttgggaaagatgtcatcttcttgtggcaatgctctgaaaaaagaaggagagcattgccatcttcatgtggcagtggttgcataagtcatattgcatgagattcttgtgcaattttgactttatgttcaagtctaagcctttttatacctaaatgagttaagttcttattagtttccttgtcggattaaggtctctagggtgaaaacgctcatgcgagccataaaccctagtttgggcacactcgagtgtgtgattcccgacaccaaatggaaggtcattgtttttgagtctcctagagatgccatgggaccctcaagatggatgtattaacttatttgacatttataagtcttggtcaaagtcacaagattgactttttatttttttattttttaaaaatcaggtataacaaaagtatccagtactttcaaggttgtccattcttgcagcatcacaaaagattggacctacttcataaacaagcttccaaacacttagtttggaggaatgcaataagtactaaatcaaagccctaaaagataaccactcacggatagttgttacccttcccgatggtcaccatgctattggaagcaaatgggtatacaaaatcaaatacaaccaagattgctccattgaatgatttaaggcaagtttagttgctaaattcaataccttgaaacttctcttctctcttactgccattaaaaattggcatttacatcacatggatattagtaacgagtttctccaaggtgatttacatgaggaaattaataattaagccttctctacacttaattaattattt

SEQ ID NO: 19079 - DNA, 5447 bp, Cannabis sativa
agaacgttcctgactcagttaggattatggttgggtatatgggcgcctgattataatccgaattattgctatgttattatttatgcttttcttactaagtcaacacagatattgtttgcatgtggggtaagggcaaggccaaggttgagcagccgtgagaacgtgtagatggagattgtacagcagtctcatttttgtatagttgctaggcgaaaaacttttgtaatgggcactgtaaaacttttataaatatttttgtaaacgggaccccagtttaattcaagtatgttattttggtaattataattatctaaataaagtttcaattaattacgattttcgataaactcgttgattaacaaagagctgcacagttaagttaaaaatcacgttaacacgcctaagttagtagggtgttacatgctaccttctttttcctttgaggttggttgacagtgtttgcattattacacagagcggttgaagctctttccttggaggatcccccgtgactcattttcctttttccctattgggataaaagattctaagatcgttacgatctgttcttctcgtagtattattgtcctgagaaataggaccgtcatgcatttctccatcacgatcaacattctctagttgaatcttggcctccattttagtcaaggtagcttgtctttgacgggagaactcttcttgtgccactagtttctactacatcttagcgagttgtttggctagtttagcgactatagggtctagctcataataatagtcatcttcatctttcctttcccatcgacttctagatcatcttaacgtgtttcctctttacaatcctcattgattagattttcatcaacgtgtttttcaatatgtggagtattctttacaaggtgattggttgcctctgttgtggatttatgaagatgggaatggaaggttgatgaaaccacatgctccttatgttttgacacgtggaaaaagacaactattttgtcaatttgttaaaggaatcaagtttcttaatggcttttgttcaaatttaaagagcaaattttctccagatgagtaaaatattcttgggttaaaatcccataattgtcatgtcattatccagcgagttctttctatagatatttgcaaatttctaccaagtgataccacaaccactattactcaactatgtaatttcttcaaacaattatgttcgaaaactttaaatgtaagagatatggaggatgctcaaaagaatctaattctaatattatgcaagatgaaattgatttttcctctagcttgttttgacataatgatacatttggtaatacattttcctgaagaatctatattgggtggcctagtatttatgaggtggatgtatccttttgagaggtacatgaaaaaattgaagaattatgtgggaaacaaggcacatcctaaagggtccattgctgaaggttatgtcgcaaatgaggaagtaaccttttgttcaatgtactttaaaggtgcaaaataagagttattaatcgtcttgataaaattgaagatccacctactgtctctcgcactcttacaatttttaaacctcttgatcgtaacattcatgaaaaagctaagttgtacatatttcaaaattctccaaaaatacaagcttatttaaagtaactttgttacctctcaaacataaattttcttaaattttaagtttttcttctctctttctctctatcgtaccttgacattatcacatttaacagtgaaaatttggagaagattagacaagaatatccaaatggtaaccacaatgtttgcatagaaaaactcttcgtctgtggtttcataagaaggtacaatgagagtattttaaagttataatttgataatatatattcctatcatattaatacattttatgtatttagatgtatgagttgcacaagcttggatctttacaaaatagtgatgaattgattgctttaagatccagctcagattatttagtaaccttctataaaggttgtatagtgaacggtgtttgatttattgcgaccgaaagagatgaaaagcgaaagacacaaaatagtagagttagtgttgctagaactggggtttaattattacgatacacttgaagatgtaataatcatatcttatattggggcatatacagtgacattatttgaatacaagtagtataacactaatcctataagaaataaaacaatcactgaaaataatataatgagtataaatttatcgggattttggtatcaagatgagccgtacatacttgctaaccaagctaagcaagctttctatcttcaagatactatcgacaaatttggaacattgatgataacgaaggctagacagatgttgatgttgtaaatgatttgaactcatcaaattttgtgttgatggttgatcttggagagttgattttgcaatcggatgaactagctgtaactgttgaaccgaacaaccactcagtagatcctaagagggaaaataataaacttgatgaagattacgttgcccaaaaaaattattatttactagttgaacttgttaagaatgaaaacgagaattttgtgaatgatggaaatgatagtgatttctcattctagctttaattttacttttgtttgtaaaaaactctaatgattgaataccaatatgtttttggttcgtatttttgtttgtgtcaactttgatttatatgttttacattttgtggatttttacatttttatattgttcacctctaacgtaaagtacaatgtcagctgatatagcaacgtaccacagtggggatggtggtggtatggaccccctgatccttctagagtaccgtcgtcctgccaatcaagttttatatttttcattactaaccttattcttaacataaatacatgattattttctgatgtactaatagaataattttttccttgaacaaataaagtcaaaccaagggtcagaaagagtcgtggccttgcttcaaaactgaacttgaaaaatgaaggagggaagttagtaaaccattagaggctgaggtggacctcagaacaggcaaagtaggttggattgaagccaacacatacatttgatttatggcacagcaagtatccattttgtgtccaagtcatcattataattttttcgatgtacctcaacaatataaggataaagtacttaatcaaataagagtgagtgatttttaattatttatggtttaaattattctataacgtcatttaaaaattaatataaatttttaattgctttattctacagctttactttaatatggacgggaacccccatcaagacctactaatggggactctatatacggagatggcaaagaggtatagtgagcgaaagaccaacagacataagtggtttaagcaacattacactaaaccgaaagattgggagaaagtttttgaatttcctcctgaccacttaaataaggaaagttggaagcctatttgctaactattcctcagcaattttttttttttgaaaagctcaagaaaaaacaaagcaaataagtagctgatgaaatatccaatgacgtaaggcacaagatcgttggtttctatacgttacaactttgtaagtaataatatttatcctttattttaaatataattaatcttaaaatacattataaattattttatttgtttattcttatatacggagtcctcccaaagagcatgaggttaatgcataaagggtggctcatacgaaacaaccgcctggtggttttgttaatgaagttgttgtagaagattatgtaagtgaataaaatattatattattaaaatttaaattttatattaattataagctctaataatttttaattaaataggatgcattgtgtaaggagcttgataggaaacgactcgaaagacaatcacagagtaatacatctggtactgaatctgatactagttatcaatttgacgtacatggaaaagttcatggcaaaagatctgactatcaaagaggtgtgggttataggtttaaaggcaaaggaaaaaatcacacagtcaaagtcggtcaactgcgcctctctgccccctaatgaaatgtttaacactgtggaagatatgtttacaactatacgtgatacattagggagtagtctgacccctgcacaacgtgccaatttatataactcacggtttgaaagctttattcaaatgtacggtcaattgcagtcgcttggaggttcgtcttctcagagttatgtcactcctccacaacattaacaccaactttctttgtagcaacaattccagccttctccgcagcagcaattgtagcatttttcgcaacaacaacaccagctttatcttaaaaagcaacactagtctggtctacaatggggaaatcaattcttatatagaactccattagagtctccttcgctcgactcaaattttgttgattttggaatatttgggagttcatcgcatgagcaacaattttttttttactcctatattcaattaagctcggctagggaacctaacatttagtttatcgtcagatcaatcacatgctccttctcggggacagccgtcgggacctccgaatgataataatgtgtgtgtattaagactttgtaatccgagaccttaacgaggattttatggaataattagtttatattttttaataatttaattttgaaatattttaatagcattaatgaattgaacattgttatttagtttaatttgagacattttaatagcattaatgaatattgttagtgttaaattatattttatttttatttaaattattatttatacatctatattatttattaatttatatcatttttttattttttaattataataggggcggagcattagtggtgggttctcgctgctaatatctgccgctactaatggtaattagtgcagaattaatttcgccgctaataaccattaatagcggtcatttattagcggcgggaatgcgggctattagcgacgaattggcaccactaatagccaatagcagcagtttaagccttgattggcggcaaacccctccgctactaatactttgttttgttgtagtgaacggtataagctatggcctattggacaataataatattctttagcaattttaaattatcatttatatagccctgtttgaagcgactatcaagtaactagtacgcattcatttttagggaaagtgacatataactagattttataattgttattgaaataaaatattaaccatacaaattattctaagtgaaaaatgaaaattactcaccctaatcacacaagacctaaaactatttagaaatttttacacaaaaaatacaaaatacacactttattacatatatatatatcttcacacggttaaaacaacatttatacacattaacttta

SEQ ID NO: 19080 - DNA, 5542 bp, Cannabis sativa
  modified_base (4092)..(4094): a, c, t, g, unknown or other
gtaaaattaattccaacaattatggcccagaaagcacgctaatcaaagacccctcaagaccctacaatcatttttgaggttgaactaatcgagtctaaagtcagatccatatgatcttatgttggggaagtaaggtcatgtggcatcaaaaatgaacaaagatgccggataaggtctgttgccgagggggagttcggctgttatccccctgaacgtgtagctcgataagagggctgcaacaccagcaagccatttaggataggtgcttggagcctagaacatataagagctggagcaatactctctctaagggactattttaaggagttttgcaactatctcgacattgctccatttcagctgacaccaaattcatacaggatattagccagattaaagtctttgtatcatatcctgaaatgggagtgtctgaccccactagagattctatacgtttactctgtaaaggcctgccctgcacggaagcgaggtgcatgtggtttctactaccttgggacacacaccaacgattacaggattgttgtgaggcttcccaacaaaaaaagagttcaaggatgacttcttttggacctcgggtctttttcccatcaataccaccacattttatatcatacatatgtatttcttttcttaaaaattatattttgagttttaagccaatgcaagttggccatactttactgattttgtttattttgttgtgttcacaacgatcactaagagtcctattccaacttctaaaattgagacaaggcacaggattcttcttggccttccttttcgattgtgagcgacaaacttcttgtttcacgagaagaacttgaaggcttgcacccttttcggcaaggatcaatcttgagagttcaaggttccaaaattttcagactgacaacgagttccagttcttgccgacgaggaggacagagactttgtggctcacaaccattatctgaataacacaacccctcggtaagctgaagatgtggcctcccgaggtaataattttggtgtttgtggatggtctccaactgttcttaaagctgagcgaacaaccttagttaaatttaaggatagtcgatacaacttttatatttggaactatgtagatctcatttcccatagttttgacagttggtaccccatgtctagttgagttgtaatagtttttactttggaattgccaagtaatatggcactaactttgatagggctggtcatccggattgggatatgtctccacttaacccctttgacctattcatgataactagttttaggaaatttagtaactattatagttcttctttctcatcagatgactatggtaattttcttaagtggaagatgatctcaccacacttttcatgcttatattgaaaaagtattaatgtttatccttttgtctcgcagatatggactttgaaaatctcttgtccactttgcgtttcaaaaaaggcaagaagcgagctgttgtatcagagacttcttttgggacgaacccagaacctttgaagagattgaaaaaatcgacgaccaacaagaaacgcgcctcgactcgattgttattgagctagaggttcccccggtgacctcttcggtacctgttgctgccctgatgaacaagctttagggtctgttcatcaggttagattctcaggatgacaacccgagatagtactctcggagccttcttgccccctgcgaaattctgcaggcattaagggttcgcaagttttctagcaatatgtcaccacctgctggcgtcattacaaatcttttcaacaagatgattgagacttgactaatgatggcaattttcaaattttatctgcaaggagcgccgatcttactctctcagttagtatgcatcttattcttttattttgactttatatctctttttttagttattctttcttaactttgttcttttccaggcatcttttttgtctcaccatgctcaacaaagaggccttcagagaatcaaacagttggagactgagctttgcaagtctaatgaacaatgtgaagtcgttgcgaggcaatggacagattctcaaactgagatttctcagttaaagaaggatgctgaagatcaaaagaaaacccacaaggctgagctcgatggtgcccaaaaagaagccaaagatcaccttgaggcccattagaaaacctaggaagagcttaatgatggcaaaaagaagcttgaagaagccgaggccaatgctaaggctagatgtaactcagttgccaagtgttctatctgtagagcttggttggcaaatccaaatatggacctaagtttcttggaagatggtgctaaggagatgttggctttttgcgagcagaccaaaaaagattaagatgttgcaaaagaggaagttgaagaagaagaacaggaacccactaaatctccaaccatgtagatttagtttttatcattttaatttctgaacaatggcctttaggccgagacaatggtttgccccttgtggcacttttgtagtattattcaaacttttactttgtttaatgaccaacattgctaatttatatatatatatatatatatatatttacttttatgccttttatcttgctttttttgagttattcatgtttgtttattgcattttttttacaacaaaacattttcctcgatttagcttaggatatttttgagttacacacatacaattgtcattatcttgttattaaataggcgagcatttaatatttaggcattttttttttcgagaaattagtaatctgctatgtcttttgtgagcagttaatattctgttatatttagagcaaacttcaaatattttgaagagttcttttaagaaccattttgatttttttttattgctcgtatgaatagccaatcctctattcatactttagcttgcgtattatttttcaagacacatttgtatcttgtttataatacatgctataatcatgcgagccgttatttactcagatcgcatatagctttttgttgttttatgagaaaaaacctcacttacaactgctatttcaattttcacctaaagaaaagtttttcaactcttgactttatactatcctaagacagtttttaatcaatcatcccatcatttctcttgtgaaaatttttaatttccaggttttagcatttttgtatatatttctaggtggaatctaattattatacacatatatgctcccaagtaattttaaagaaaataaaactttatgattacttgaaacattcaactttttttttcaagataataaaccactattacaaagattaatacatcattacataataaattactggtaataaaggtcgtagatgctcgttgttccagtgattttttattagcgagccattaagccaagctaatttataaactccggttccaactacagctaggaccttcctagtttgggttgaacactccagctgttggatctcgcgtgtttgcaaatacacatcttaacaccaaatctcctactttaaagagtctttttcaaactcttttattaaagtatctagtgatacggttttggtaagaagcattggttacttgcaactcggtgcgtttttcttcaagaaaatctaaggacatattcagtagttcttggttttgttcttgattttagaattcacacatgtgggtcgcaatgtttacttctacaggcaacattgcttccaagccaaatgtcaagcgtcattacaagcgtctcgatgtcacattgaaatattaaccatgtaagaccaacaatgcgaatatccttaaattaaagctcaatattttaaaaaattattttttcttttgatatttattttaatctatttattttaatatttatatatttatttaaggcttaattaaaaaaaaatttctcgaactttgacatgtaccaaatcatgccctctgaacttttttgtctgttaaaattccccctgaactattcagattgttagatttgttaaattatctctctaaactattcagaaaaaatttgactaaaaaattccaaatatatagatttgttacgtgccaagtcacgtatgtnnnttttattttagtttttagtttttaatatcataattttaaagtcaataatattcaatgtagtgataatcattaaaatttaaaagcataatagtgatttaaataaaaattactattatactttgtaatagtaattaaaaaaaaatattattcgtcctaaatttatcttcggaattaatgaaaatgctcatttggttaaactatcataatattcaaatttaatttaaaataatatttaaaattaaactaattctaaataacaaaatttgaaaataatttttaataataaaaaaatacacaatatgaacaaatttattattaattgcaacactttaggtggattaatcatatttaggtttaactaactatatgaatgctgatcctttacgtggcaacatctaataatttgttattttttttttacttaagaaaaaaatcaacaaataattttttataaattaaaaattttgttatatagcatgttatatatagaatagatatatataaacggtatattgtagtatgcacgacaatttgacggtgagtttgtcgttacattggagagttattcacacaccatggctcgttggtgatgctcttactctttatatatgtagttcttcgactgcgcaaatatggggaaattaaataaataagtatagctgataaaggagaattaagagcccctattatgtgactttcaaacttaagaagccttgtctttatcccgttggtaagtcggtgatggttgtcgtagtattattcaagtattacaccaattaatcccacttcttttctttgaaacgatttacgtacacttaggataggactagaggacgcatacatactgaagcagtaatttgaaagaggaaatacttatattattgttattgttgttataaattatgccttattctgatctttaagagggaataaaaagaaacaaaacaaatactcatggctttatttatattcaattttggtgactccccaccaaacagtattgaggccaactttaaacacaaggctcgttctcattgaccatatactgttaaagattcaacgccgactggcacatgttttaaattaaaaaaagatttgatctttggaaatttaaggtacaggttgttatgattttcattagctagtaaatgtcacacagctactgattgagaaatcatatttaatgaactaagcgatcgaatattttatacataaaaaaatagaaataaaaaatgtgtaataggcgagactaggtgaaaatgaaaagtaaatcagatcgagtagttgtgcttccattctcattcaatgtaattagaaaattgggggaccattgtctttccatttactctcttttgcttaattttataatttatttttgagaaatgctaacgggcaccagtggtgcctaacaccctcatatgtgtcaatatcgttattggttcaattaa

SEQ ID NO: 19081 - DNA, 7393 bp, Cannabis sativa
  modified_base (34)..(34): a, c, t, g, unknown or other
  modified_base (7351)..(7353): a, c, t, g, unknown or other
ataattaatcataaacaactgctaatttccaaantaactaagcgggctttacacaatctctactataatcacccataaacaaaatccactaaccaatttcttgaattttcacccacattccttcaattaaaccaaaaaaaaattcaaaaaatccttaaacctaaaccattatgttcatcatttaatttttgggaattcttaatggaagaggactacttcaagtatatcaaagcttctattctacaagtaagtgttctttctcactaaattttggtgattgaagagtaattgattgtggattgtgtgatattaggataaattttatttggggaagattggatagtgatgtttgctattgttagagaataattaaggtgaattagtgcttaaatcatgtttggaggaagtgaaaaatataggggaggtgctgcttaattgtttttgacaccaaagatttttgttttggctagtaagttggcatgacatctaggactaaggtaatttggactcgagcccaacgtaatgtgcaaggatcgtcatcaagagatcctgatccccaagaaaaccaacccaacctattaatagatttgtgaatgaggaagctgcaaaaagttatgaaaaactcaaaaagaagggtgtacttcgataaagggtctttcaattttaggacaaaccttttccaagggacctgagctatgagactaatagaggaatggaaaaagttatgtgctgtagagaatgtgggcgaagcaaactataatattatctaggaattctttgccaactatctctacaaaggcgataatgacgaagtatatgttggaggagtacaggtgcccattaggttagacaatattaacaacttttttattcttggcacactagagaaatgacgagatgagagaatactagcattgaggagagaaacacttacagatgaggccattccaacaattttgtggcaatcgggtacctgattttatgttgagggaaatgtgaattagaagtctctatactagtggaactcaatccaatggtaaaagcccgggtctattttgtaaattccaaaattatgcctacatcacatgcttcaactctggactatgatcgttgtctagttgtctatgctagcatgacgaagatgacgttcgatataggataagtaattctcaaaaatattaactatgtttctgaaatgaggaccacagcgggcacgacccacggtgccttgattacaactttatgcttgagacagggtgttccaattatagaaggagacattgttaaagcactaatgcagcccatctctagaaggcattactatgaatttcttcaagcatctttgacacccccggaagaggtaagaaaatgccagaagggtgatgctccacatggtagagatgatgatgaggaagaggagcatgaagaaccgggcacaagtgagacgggttcgcctcttctctagattgaaccaccactgaactctaggactatcgacacatatgatagattagactatatcatctcgagaatcaatacatcatccaatctaaccaagcccaagttgcctactataactcttaatcttcagcagcatcatgaatttgctcataggcaagtttaggagttaaattctgctttctctatgtggacgatgaacccccgatgctccagatcacttctctcctccgttgttgtggtatccataccagccaccaccacgactatactgatgtggcgctcaagtaagttccctttcctttctctttcatgtcacattggggacaatgtgtcactttagttaggggggtgaatttaattttttattttttattcttttgtttttaaaattttaagtctttaagtttttagtttttagttgtttctttgttttgagtcaattttcttaatgtgagtcaatttgaaagtaagtagatagcatgatttagaaatttcatttatttttcgaaaaaaaattcatgtgcttggtcatatcacattcttgagtaatttcaattttgtgatttaaaagagcatggaatcatattaggcaattgtctagcaattgaattggtttatgtatgctaattgtgaaatgtggaaatttgtttgaaaaattctagaactttgttgcttgctttgaggcgaaataataaattatgcatgactaggaaagtgaattaggcattctttagatcgattgttcctttaaagccatatctataattttatcctagtcacccttttttagcctcaacctattccttatttctacacattatgagcctaaacaagataaacccattattatctaaaatttcaccctaattatccataagtagatctttagtttagggaaatttagatggaaagtttgttatatgtgtgtgcgaataagtgtgaaaatttagagaatgtgaaaaaattgattggcaaaaacttgaaaaagaaaaaaaatctgacaataagtatcaaatttgaagaaaaaaattcaaagaaaaaaatggaaaaaaataaataaaaataaagttgttgtaatattgttgaaaaaagattttctcatgtaattagaaaaaagagtattgggattgtgtgtaaaaaatttattgggtgacatgattggagaagcttatggtttacacaagcctaaatgaccatttcaaccacccgtacataagcctaacattacaagcctagaaagaccatttgattcttggttgtgcattgatttgtattagtggataatagtaagtatagcaagcatatgtaatactttgagttagtaaattgatagttgtaattggcatgcataaattgtttcaactgttagtaaattgtgttcaatggtttcatgtgctgaaggaaaataaattgaagtgtgtcaagggcataatggaactgaaattctagattgttatgcatagatgaaaattttcataatcatgttactaactctatttgaaaattactcatattctggagattgactttttttttctttttcgttttattgttttactcgaggacgagtaaatgcttagttcggggggaatttattagggtgttattagtgctatttttaggttaattttagtatatttttaatttagttttactcttttttaatagaatttagttttactcttgtttggagcaattttacgctttttatcttttatatatttggagatttaaaatagaagaagaatagaaaatatcaaaggaataagatgaaaaaaaaaagataaaaagatcaaataaaagataattatgcacaaaaaaggggtagtgcctagacatggaaatcccatgcccaggcccatgtcaaggcaagcacggagccgcgtggaattacaacacgtgtcgtgacataggaagtgcatgccacgggctgccccctctaattcgaagcagaataggttttctacatgggttatctttttctatattttttatcccttattggctataaaagaagtggacttcaattattttcaacaggcaattcataaggaaatttagaagcaatcaaggagtacaaattttggagatcaatttcaatactggaggctttttcaagaggattttcaacattcttttcttctctattttcttcttttatttattcttaaattagtatgtgtgaaattgctacgatgaacatgagtagctaaatagttcattagggtttaaatggagattgtttgacgttgatttttggttttaatatgatttaatttcccctcaatttctacgtattctatttcattcgtacttaatttcttttaattacctggccatcaattaattgttcttagaagtgagtgttaattatgctatagtgaaatagaaccaaatttgatataggacgagagtacctatatggtttggatagcttaaataggatttctgtatttaatatcttttacatgtttaatttataacgagagtaaaaattttgcatgaatttgaggtttatatatctgaaaagactataaattacattagtaaacctgctattgcatagaatttgataataggaatagaatcatgttaaactataatcaatagatgcaattaaaatcgaaagccctaacttttaatcatcgtaaatttccttattgatttatttgcttcatattttcattgtttctttattgttttagaaatttaattttctcttaattttgacatagccaaatagaattaaaggtttaattttaaagtacttaactacaatttttctgtgatcgaccttactctttgtgagtctattacttgttaatgatacgtatacttgcgtattggaaattaaatacttgaagcatagctttgtatttggcatgcaattcaagatagattgaagaccgaagaaagattgtttcgattcaatattatctctaacacttgctgtcagttttgcaatatgggatatgaagcaattgatcatttattttttgagtgctccttctccaatgattgtctatagcaggttaaatagtggctactatgggaaacatcctctagtcaccttactgatatggttcggcagattggaaggaaaaaaataatagactataggaagaaagtgttttcagcagtattggttgtaggtgtatcagctatggagactagtaatgaaagtatttggctccattcccatgataattcaaagaatgttgtacataatgttaagattgcatgtaagaatagaattcatagtgtgcggctaaaaaaagtttcagtaggaaatttagaatgatatactgaattataaactcagccaaaatgtattcaattcaaaagttcttcagacctttattaaaaaaggtgctattagtttataaaaggttattgaagtaataaatacactgctaatttcctaaaaaaaaaatatgtatgttttccaataaagttgatgttattatatttatatatatatatatatatattttatgttattataaaggaataaaaaattctaaatttaaagtttgagaccgaaatgcaaaataatatatatgttaagaatttatgttacaaaatcttagtttttaaacagaacaagtagatggaaagattaaaaggacaaacaatatgctaataatattataagagattgatgatttaaatgtaaacaatttaaaattggggaccttatacaaaggtgggttaagtttagagaattttagtgcaaataattaagtcttcatgaatcatatgtagtaatgaatggacccccttttgtcttgagccgtcgttcttttgtatcctaacccacctcttgctttagttaatggtagatgtatactttttttaatattatcttagcacacattttaaatgttaattacttattatcttaatttggaatcattaatacttaatcaaataaaaattattccacatgtactctctaattgaatgctacatattcgattacttattttgtcttgtattatccctttctttcttgattatattcatgggtgatctcatcatctcatctcatacattatgcttcattattatatcagttaagagaatcgatatatgaacaactttcaacactttttattttttatttattttattttttttggtatgtaatatatgtgaaaattcttagttaattagaatcttattgttatcccaaatgttattcacttgacatgtcgtgttcatataagtcaaaattgaggcgcgtggaatacaaccttgtcaataacaggacataatctccttacaaggcatgacaaaacaggcaagcaacaagcgaaatgagttaagtaagccgtcaagaaactgcacagccatgtctcgccaaaggaagcttgtatggccgatcagggtttcggcacaagctagctgtccaaaaagtgactgttagaccaagaagggcctattccaccaacgaagcctaacatttgcaaggacaactgtaaaaaaggctggccaacacatactaaggctggcaagcacgtaccaaggttggccagcatgtaccaaagctggcaggcacatggaaaagctggcaggcacataggaagttggcgggcacatcccggtgttgcaggaggaatactgggccgtccataggagtgcataggccggccaagtcctgcaaaataagggtaggctgaccaacttctcttctggcagaaactttcggtgtctctacactttcaacttggacaacactccatatatttacctattctttaaaaataattaataggttattttctatatattaaatatggaaataagaggtgatatctcctcattttaagggatatcaacctaatttgaactagatctgttgtaagccctgcactatataaagggcattgggtctcactcaaaacctaactcatcctaagtgctacaaaaattttcttaagcctcgtgctcctctctctccctctccctttctcaagtctcatatctcatcaatacctcatagacactaagtattctcttctttagtcgttcgcaagaactcatcagttcttggtctttctagcattggtctcactattatactattcaaaaatgccactctagaactcacaacaattgtgatatgagttgtattatctctagaatcaatacaactaaaaggagactaggttattgcctgctaaacaaagggaaaaacctctataaatctttgtgtctcttttatcatttattgttcttaattatattgtagtgattgtttatcataaatacgacttaattgatggttgacaaaattctgagtcaacagtttggtgctttcattgagagcctttttctgattaatcaccatgcttctaaatagaagagctcctctctcgaatcctcctcaggatctcatgatgacaaatcccgatgctagtgttcctcccaccatagagggaactaccaatctagataacaccgccaatccaaccaatcatgtgaatcctattaatcccaccattcctccaagactagagtaacctataggatctcacacagaagggctgatcaacatggagcaacctccacagagcaaaattgtggttgttccacaatgctacgcaggagaaacagtgtcagggatcgacaaaccaattattggtgagtctcacttggcactaggagattatattgagcttgccaagcttagagaagctgtaggccaggtcactcaagaaaaacttcacgctgctagtagcgatactttcacccatcatagacacaaattctaagaaggataagatgaatcatgcgctgctggttgtgatgctttcacccagtatagatgtaaattttgaaagtggatggaagactatatttgaaattattttaccaggaacttagnnntactcacaagtatgttgaattaacaacctaaatatgaact

SEQ ID NO: 19082 - DNA, 3141 bp, Cannabis sativa
acatactttgagttgttgctggtgctattgttgctgttagttttttggtaacgacttcactaatttttgtgaaaaacatgagatgttgtctgagattgttgacatttatcataactcataaggcagttcaccaattatagcaaaagtctacatttacctatttataaaatgtgtgtggtcgtgtgtaaatgtgtgtgtcattaaggaaatcttggtgaaaaacttgtcatggtaatgctaattgtgtcctttgcagggatgtgaggttaccaagaaacatcgccccttatggacatcctgctcccatgatgcttcacgatcaagtggatatcggcctaatgttatatgttctagtaatccacaaagctgtttgttaccatttgccatcaattatagcacaagttatagctctaatggctcaagaaacttctttgagcgaactcctttgcggtcctcgttgttatgtgatctaggaggattatgtgtagcaaacaagagatcagctcgtagagtgagatcacgtatttatgcaactattgatgttgccgctgctgttgatgtcattaatgatctaggattggatactttgacatttttagctgtgactgtcattgttgttcctgcattcaagatcattaaagctagccctgtaagaataacaatgttttcacaatccttagtattaatttttatccttgatacctctattcacacatttagttatcttttgtagaatttgaattcatgccaacaagcttatttgatattttgatcagattcttggttttttcttcgccggtgtaatactcaatcaatttggcttgattagaaatctaacagatgtcaaagtactgtctgaatggggaattcttttcttggtaagccttctcacatattgctaagaaatagcattttcttttccacttcctcttgttaggcaattgtcttgtcgatgttcttaatattctcataaatcctttactcattcataaggtgtgtacaatgaatgtactccaacttcagagttggtctcatttcgagttttaaacttaattttggaacaatgctggaatttccattcataaatttgaaggtagattatttaaatgaattgtagggttagtaaattatgctaagaatattgttcctcgaaacaactttttcatcttttattttcttttcttcattatatttttgatgcaggccatactgtgaatgacaattttacttggtactttcttagttcaattatatcaaaattcgcaaaggtcatatggagactagtgaagagaaatgaaatgtagtatagaattttgaggatcaatgcttttaattaacaaagaattatatctaggatcatttgtttagtgtagtttgagtagagaccatattaaccatttaatcatttattgcaatatattatgtaaatcacaccttgtttactttggactctaaattttactttatttatttttccgtttcagctgtttgaaatgggtttggagctttcatttgcacgtcttaaagctcttgcgaaatttgccttcggtttgggattgactcaggtataatgctgaaacctgaaaacaacagtataacaccttgtgattcttgttattcaaatggttcttttgaggaattaaaaactgggcggttcatattccaaagggggaaaaatgatttctttgtttataagtgtcaagtgcagtaccaatatttcaaaatcctgttatgtctatgaaatttatggtattgaacttggtttggtcatatatttagtcttaatggaccattttctctggttcagacatgatatggactagtcctctatgaatgctgaatggacatttgaccatatggtccccattcttgtttccttcttgaaggtcatcttgtctacgcttgctttcacggcgtttgaacttcctcctaacaatgctattggaacaagaatcctggagttccttttccactcgaggtctgatttggtgagaattttcttctgtatgcaactttaatcattgtggcaagtcatcaactttgctttcacgtatgacttgcttttgtatagtcctatttcttctctagtttatagcatgaatttataatgtctgatttgttcagtaaatcgagtcaaatgcataatgttttcattaatcttgtttaatttgtttcgtcttcatcattagacaagggatagtatttttttcacttgattgaaaatttcattctccaaaaggtaatatgtaaacaacgatattttttcttccaaattttctatggaactctgattagaatgttaccatggcaggtcaatataagaagtgttgacgaggctattgtgattggtgctgctctttctttgtcttcatcagcttttgttctgcaggtaattgtggcatgtcctgtatatgctaatgggattcccttatattagttgaattttctttttcttcctctatttttttacatatatagaacagaaatattaatgattatacaaataaaaaattcttatacatgtacatatatcagcaaaacaagaaaaaaaaaacatttaaacaacattacaaagattacaaataattattactatttactgtcttcagaaacccaaaaggttagtcttctcattgcatagagcttatgtgcattttctatagttacttgcagagaaaggtgagcttccaacaagattcggctcagcaactcttggaatactactattacaggttctatataacctctacttatacagctacatttgtttattatcttcacttgaaatttaaatacgcttatacattcatagagagccgacttaatgacttagtattttggtaggggggcataattctattagatgtcaataacgtttcttactctgtgttgcttgaaatttgcaggatatagcagttgttcctctcttggtcatacttccggtgctagagagccaggtaaaatttgttccaataatatgctaagtgaaaatgcaatgtttttttcggctgccttgagttgctagaggcacatggcctagtacagccccttcaagctcgtgaggtgcctggctctgatatggagccttggcccattcaagagcctgttttgtgtcacaaaagtttcttcttatggtctttt

SEQ ID NO: 19083 - DNA, 8580 bp, Cannabis sativa
atgcaacataaaatgatttctgatattttattaattagtaaatctgattatatttaaataggttttatttaggacaaaaatcccaataatgacgctatgcattaaagggctcgtcataaatgccacgtgcgagaaaaattttcagagggagatactgcaagctcccgaacaatggcatgtcccaaaagcttagtgggtaaatgttatctgtattttcacctgcctaacccgcggggaacgattaaggaaaaacgaggagtcattaagttgcccgagggcctcactctgtgatcccggaaggttaaggctccaaccctgtagaccagtcttcatagaactccgtgagcgaggtctgcacgaatggagaccacaaggaggtgtccgcgagtcagcaaccctctcctctggaaggcgagacttttcgctctcgagaagatcatgattcttccatcaagatgaattggtctggggcactcctttgactccacgaaggttcggtctacatgtgccaacctaagggcccaccgctcgctcttttcctatgtacaatgtcaaaggttgtccctcacgccacataaagtatgcatgtccttgtgtaccatgcaaaaggatccaacgactaggagtaagggtaattcgaatgaggaaggtcgtggagtgacacacgtccaaagcaccgtcagtacagccagtacaatctgacatcagtaaagatcacatggaaaatattccacctaccaatccaacagtgggggttcaccctcatcaagatctatcaatgtacgacgatccttgcgagggaatcgacctataaatatcccccaaagacataggaggtgggggatcggatccaagcttcgacttcttctcctttaatcccttcgactctccaccttaagatcgaaggtgaattctttgtgaacagattacagtaattctttagtcctgaatattcctactaagttccctatttttcaagagagatactaggaattagagtaaagtccattcctatttgtatctacattctacggctatagagcctaataaaatggacttgtggactaaggataattaacgtctgaaccacgtaaaaatcaattgtctagagattttttatttacgcttttattatttttttaagctctataattattcaatttttgaaaaactcagtaaacatttactatatataaggtgactcaatgacactttaacaatgattagtgatattttacataaattattatattatattatatagaatttaatacttaattatattaatataatgatatgatactttatctttcaaaaaaaattacatttctcttttagtaggtggcatttttgcatttctcccatttaccattaattgagttatgaaggttgcaaatacttaagttgtctctgacataacaagaatttaatttgctttggagttacaaaccctcattatataatatttaatattaattattgtataagttagattttatgaggagtgttaattacaacttcttattataagtttttagttaatttttacgtctgaaatcacatgtcgatttttttttcatagcaatattcgttatagttacagtatcatccctataaatttttaaatttttttgaatagtttacataccgaaaataaagtttctgatatttcagtttattatgcgggcatgtttaaaaaacttcaaacgtatttttcggtactgtaaactattcaaaaattttcaaaaatttataggaatgatgttgtaagcataacaaacactgccgtaagaaaatttgaaaaaaaaatatattctgatatatgttttcaggcgtgaagattaattaagagaaattataacaggagattgacggtatcactcctgtaaaattatttgttcattatttcatgtcaaaggtgtatatcaccatatatatatatattttaaaatatataacaccacatacataaaaatgaagtaatacaattttcaaaatgtatatgtacattttaaatgtttttcttataaagatacaattttaaacgttctgtttgattaattagcatgtatatatagtatacgtagtttccatacatgttctcgggaaactaagcaagcacatggggacattttctaagctattattattacataatccatgacaacatccatctatcaagattgtctgtaaaaatgcatgataatcaccaatatgtaacatttgtttggatccagatatatttatataactatatatatatatataccataatgtgcacgtacacgtgtcgatcgatctcgataaatatatatttagctaaccattttgttaaattatcattaattattcaattttgaaattatgaacacataacaattgcattagagatactctattatataataatgataatagatataataatatataataggtcaaccctttttatggagtcatcaaatatatattgcatctatattaaatattatattatttattccgtatacatttttttatatgtttttaagttcaatttctacttaatttattaataataatattatatatgtaatgtgcatgcttttatattttaaaaaagacttctaatattttagtctaattgcacagatgtacgcacatacattaataaaaatatgaatgtatgtagtatactgtataattataaatatgataaaaaatataaaggatactagtagtgtctagtatatttttatgtgttaatattattattagtctaattaagtatctagtctcatatattttaatgtaataacttttagagaatatcgtcagccaatcgcaaagcgacacgtctagaaggtgctagctagacactactagtatctaataacaatgctatctctctatatatattatatagaataattaataattttaccttctaaactttttactaatttcgccttctaaaatatacgacatgttaaaaattcttcctgaatttttacatttaccactacaagaataagccattttgccagcgcatttcattccaccaggttaaccttataccaacaaattatctcaccggtaaaagtatattttttactggagaattatcattgttagtggtcaaccaaccaccaaaaggtgggagcttttggcggttcaatttcacttttgctgacgaaggtaagtgcaccggtaaaagtgaattaatttttgacgatttaatttcacttttgccgatgaataaatgcgccggcaaaagtggtgaaaattttggcagttcatttctctcgcattgaaaatgtgcgcagaaaagtaagtggaaacttttctcggcgcacttaattgcaccggcaaaagtttgcacgataaatgaaacgttgtgtttaatgttagagtttattgtgatatttttgtcagcgcaactaagtgcgccggtaaaagttttttccagaattaacttttgttggtgcttctaaatgcctctgaaaaacttgaggctgaataaaatggaaatcccgaaccccaccccctccccatttctttctctttttgtttctctttcttcttctcttcttcttttcttctctttgcgacttcaccaccgcccaccaccattttcaccacattcaccaccataaatcatcatctctctctcatccatttcatgtttttctataaaataaaaaaaaaaatgaaccaccacacctccagcaaccctcgagtttctgattttagtgtcacatttcttacttttactcaagctaatctttactatttatttatttattttttggtaaatcagtataattcattacttcaaaaacttaattacatcctattagcatcttcaaagtgaagatctataactatatatgaacatagttcctgtcacattttacatgttttcctcctctgttttccttctttttttttcttatagctgtacaatctttaaaaaccattgattgccatatgtagatacatttttaggccaaacataaatgaatctactctttacttcttcctttattctcctgaccacctcagagactctcggctcctctgattcccaaagcactagatttctcgttttccaaatctggtataccatcgaagccatgacagcaaaccagagacttttcctaaaccttccagcctttgatctctcaatccatctcaatatcgcatccaaatctattgactcaactttccaattcagccaccctttaacctgcattaagcattgtaaagagaaggagtaagagaagaagagatggcattttgtactgcaattactttaaactgcttcagtctcgcccttgttcgaagtcgatcttgcactacagtccacataacatagctttatcttggaatattttgcctattctaaactccatgactccaatttactttcccttgaggaggtcaaaataaattgtagccattagagattgtgtaacttgtgccaacaaactgctacaaactcattttctccctgatttggtctttgacaaataccagttttttccaataccagctcgcttgttgtggagcttggtagctccaccaatcctccccttttatataccatttgatccacaaattatcttccttgtttgcaatcgtccaaacatatttcgtcaatgcagccaagttccactctgctattttttttagacctatggatgctgcagccttcggttgacaaacgttctcccatgcaattgggccaggacctgtagatgtgtgatgtcccttccagagataggcacgacatatcgtttcaatgtctttgatgatcttcttcggtagaatcatgatttaactctaataagaatcaatagacatcaaaacagaattcacaagcactgctctacctgctaaggacaagttcattgtactccattatcttattcttgctgtcatttttttagctaacaccatacactctttcccggaaatacgtttagcacatataggaatgcctaaatacttaaaaggtacctcttatttttggaaaaactagatctgtcaatgaccctttgcacttcactttattccattccacagcagtagatggcaggcttagcagaattcggttgtaacccggatgtgcaagagaaaagtttcaatccttgaagcatataatgaatgcttttgaagtctccatggaagaataagataacatcatcagcaaacattaagtgattcagtttaagttccttgcatcaatcatgatattgaaattttggtttggccccaatccaaatcattattcttgacaagtactccattccaagtactcattattctccctggcaaagtcctcgtttcccctcaaagaatccatggagagttccattaaacatcaacgagaatcggggagtacggacacaaatcataaccagcttgataaattccccaagaaattgaaatgcttgtaaaatctcttccaataagtcccattcaagtgtgtcataagctttctgtaaatcaagcttaatcatacaccctggtctagcagctttccttccatagtgtctaatcaaatcttggcatatcataatactgtgagctataaatctaccagaaacaaagccaccctgattctgtgcaaccaaatcaggaaagtatagtcttgagtcgagaacatatcagctttgttgctaccttgtaaatgacattgcaacatgcaattggcctgaaatcactcactgtgtttggacacctgcttttaggaacaagagttagaacagttgcattaatttctctcagcatcttcccagtatgaagaaatgacaacaccgcttcactgacatcataaccaactatatcccagttatcctggaaaaagaagcttgagtaaccgtcaggtcctggagctttaattcctgggatctcaaagaacaccttcttgacttcttccttcgtaaactctttcattaagaagactgcttgctgctttgtaacctggggcccttgttttatgacattgtttattacttccttcctattctccattttactaccaatcaattgataataaaatgagagaaaggcttctctaatttggtgctgatcctctacccttatctcttgtttatcttcaatcgatagtacactatttttctttcttctttctcgaatacttgcatgaaagatagcagaattctcgtaaccatccttgatccaattgatcttagatttctgctgtaagaaggacgacaaccctttaagcaggtatccatatcttttccttataaccatttcttgttcaatgagatcatgttgaaggggagctacctgaaatttcttttgaatctcaactaattcctctttcgcttgagttgttgcctcttgaatgttggaaaaccctcttctattcaggtctttaagatcagcctttaacattctaagtttggacgtgacttgaaacattttagtgccatgaacttggtgcttccaaactcttgtaacaatctctgaaaaccgtggatgagaggaccacattcgaaagtacttaaaaggcatttttcccctaagtatttcgggataaaaagaaacaatcgctggagtatgatcgaacaaaccttccaccgaaaaaactgcttcagcattaggaaattgatccatccacttcttatttgtaagaactctatctatcttagaccatattctttcatttccttgccttttgttgttccatgtaaaataacttcctctgtacttgatatcctctaactggcagccattaacacaattaatgaagtcagcagcttcattgtatttcacctttcttccaattcgctcatccttactcaatatttcattaaaatttcctaaaatcacccatgcttcatttgttgcaatcctttaaatcagtccacagctcctttctcccttccacttcattgaaagcatagaaaacgacacttagcatctagagttgtaacaagtagatgtataagttggctagtacatatgaggatacttacaatgaaacaagaagggttccaggccaccattattcttcctccatcatgccatgcattattcgatgtaaaacaccatcctcggaacatatttacatataaggccccaagcttgtgggccttaaccctcgtctcgagaagaccaactagtccagctttgtgaacatgaatcatgcttttaacttgattttgcttatcttgactattgatccctcggacgttccaactcactattttatccatttcccgaaggaggcactccccctccacttatcttttctatgttgccttcatcatgtactcctcatgtgtgagtttgcttacttgaacatgagatgattctgctatatccaaaccaacaaggttgtctgaaagagcatcaaaggaattatccacttttgtcccctctgctactgctatacctttgcctttactccctttactaatcttctgaaaaccatcttcatcctggaatttctcctttcctgctgcatcttgtttactctctttgactacccattgttgctttttctcatctttcttgcggcaatcaatagtctcatgtccgagccctttataatggttgcattgtatcggtttccactcataagaaacagaggatgtcacattgaaaccatgctcatcttcaaattgaacttgagcaggaaactcttgtttgatcgacacttctataagcactctagggtagtttaacttgtttctctccttggtcactagatcgacttgtagaggagttcccaattgtctcacgatcttatttaatgacctctcaccccagtactataaatcaagatcagggagttgaatgcatatcggcactgttcttatgtcttctttcttgaaatttatatctagatcccaagccttcatcaccactggtctattattaaaaaacacatagcctacattgagaacctcatccatgttttcaactatgtcaaattgaactaagaacacaccatatgacaatgatccaaccttatccactttgccattccaaactctcctaataaatccttcaagaacggataaaggaggattggccccaagaacattacactcaatagaggaactccataaatgaatctcatcttttatatcctctaaagttattttaacctttgaagttgtccaagtattcttgaacgaattttctaaattacgaactacatttccagatctaagaataggtggagtagcagtgttaccttgttgaatgctagcagcacattctcgattggcactaaggaagaattcaaaatctttgctgatctcttcttgtcgctgaatttcctgcaatgaggatcgaggcgataacggaggtttgaataaatctgccattgaggcatcctgtgttgatcgtgcgatcttttcaccatctccttcatcctccgagaaatcaatcggttttattcccagtactgcgtccatggacttcattttctgagcatatgccgtagaggtttgacctcttttcttaggtttttttcccttccagttgtttcttcccctgtcttgccctagttttcgccatagcatcagtccaagagctgcacgagagagagagaga

SEQ ID NO: 19084 - DNA, 10172 bp, Cannabis sativa
gaagaaaatcactaaacttatatttgaaccgctctcatctcttttgcttccatcaacctgtatgatgacctccattcaaaatctccatcgatgtcggcgagaacagaggccacgagtggccaagaacccttgtctcacgcaattctctgtcaagatgaccagagtaccttgtctctttccttgatctgccgtcctccgcctttgctatcttgcaccctcgagctgggcagtcacctgtgcaagaagagggagagaagaagaaaagagaaaggagtatagattgatagaaagaatctggattttaaattcaggtttttttcagtttattttttaattttttatttattttataatatgcttaaaaaatttatcacttttaattttttttatattattgtaaataattttgaaagttattaaaataattaaaattatttggatcaatttaactgatacatttgatttgcaaacaaaaactaagttaaggattttgccaaaaaaaaaaaatacaggaggttaaatgtatattaattgaaacttaaggattatggccccaaatttctccaaaaactaatgagaaagctaaatagagactaaaattttgatacaacataagtttttattagtaagaaacgtagataaaaattggaagataataaatattttaaactaaacccctaagggtagtggtgattaaaagaagcccacatcaaaaaattatcataatgtgctttctacaactactgtaaatgttggttagaatcaactaatgaaaactttgaaaccagacgaactggatctcgatgccttccttgtatagggggcaaaaacaattgtctggtaattagtatgtcttcttcctcaaaattggttttcgcaattctttctttgcggccgcgctaaatcccggtgtttgtgttcccacagtttgatataaatcctttaaccttcatggcataagagaataataataatcattatcttgtcattaaacatcaggagtccgaaatcaaaatcaaactgcatagtaccttggcatactgataaatagtgcaaccacagaaaggccaacaacaagaggatacaccggtgcagcagttaactcctgttaaaaaagaaaaaaaaaatgattcaatcatgtctgacaatgagcattaaggttacaagtatcaactaatctattagagagaaaaatgatacctgtttttgataatcttcttcaataaagtatttcaatgggccaacgtgaatttgagagctcttttccaaatcaatttcaataatctctgactcaaatttgtgtgtactcgatggaagttttgacttgagctggacaaggtgcttaccctttggtaagtccttcacctggaaaaagttggaaagtggaagagggaagacggactcgactttagatgtgtcactagctgacttgatttcaaccagaagatgtggttgtagttcctgtgttttcttcccttcaacgtggccacttaaaatagtagtgtcaggctgttcaaacacgagaaaattcaatcctcgggtgtcctctgatttaacctacaaacatattcagcatggtcaaattagtgaaacaaaacattagaaagtattatttggatatcaaatttatggaggaaagattgaacaaccttgatacttatagattcaggagatgctctctctaatttattgtttcctagacagtccctctttaccactttaatgacataagtggtgtcgggaagaagtcctctcagacgataactcccagatgaatcagtcactgtttcctcatagtagccttttgactccgaacgggcttcaactgacacaccttcttttggttggccagacaatagagtaatcacacccatggcactgaaagtagaataaaacaatcttaataagtccttacaagatcacaggatcaaaaatcaaatgacaaatgtatatcgtttacactatatatatatacatatatttaacttcacattacaaataaatgcatgttttcttctttcgaaaatagcttttaagatgactagagttcaatgtgaggaactagatgaaaataacaaaagagactgaaacatgatacctgtatgccacacgagtggcctggaagacaacttctttagactcaccggaaccaagttctatcgcctgagcaggaggagagaaagcatattcctgcaagaacaatataaggtcgccaagtgaagctattaaagaaaaaattaaaacatagggtcatcgtgcattacaaaatttctaactgtgacttgtgaaaaactagaaatttatgaaaatataaaatgttcagagcccaacaaaacctatcattcctggctaaagcttgagattaaacgtgctgaccaaaaaccttttttgagaaattgtacaacctaaagactaatagatacagagaattcatacagataaaaaaattcctcagtagccatgcaggatttacataaccccccaaattagaagtacctagcagaaaagaaaaaagggaaaagaagcagaaaagaaatccaattaatccagaagggtaccttcagcagaggacgcaaatagaaagttccaggaaataagttactaaataggaacattccaccagcttcagatactgagttgttcctatagccgtcattaccgctcaacgataacaacaaagaaggaattggttcctcagcatcatctttcgaatatatgcgtacagaaatttgaccaagcttctgacaagaaaatgtatatgctccaagtcgttttaaatgatagccgggctgcaatagataacagatgaaggaaacaacaatcagttgccggtaattaaatgattataagataaaaatatgtcaacacttaaacagatctataactcatccaaactatcttatgacataacatggtaggtaacagatccaatatcaagttgtcagaccttcgatgcctcaacatggtagtcaatatcatcatacagaggtcctccaataaaagagccatctgtaccagtggcagtttcaagtactaattcgccattcttaagttgagctacttggctgtctccagctgcaagaactcttatatgaacaccagagagctgaggagaaactgatcctttaatgtataagcccaaccgaccagaaaactgagggatgggagcttgacatccatcatttttaatcaagacctgcaacacaaatatggatatcaatatgattgatgacacaatcaaaagctatcgacaaaaagaaccattttctgcccttacatgagtttgtctgggataaaacaatatcttcccctccgtgttctctctacaatacataatggcaaacattagactcataatcagaaactaaatgcagctcagtaaaaatagccatatctgttttcttacacaaataagggttataatacaatgaggaagagagtagtaaaatgatcaataggaatattaaaaaataaaaagatatacttaagttaaacatttaggagtgacttcctgcttaaatatgagcgtatcaatgataatcagcacttattcaaatggacttacgaagaccattgagtgactagaatgacaaaatatttgatgaatactgagaaagatcaaaaaatcagaaaataacacagttccaagacatccaactatcaaagtgtaccttgggtcccgaggaacaaatataagtttttctccaagactagcccaagtagaatattcatacaaagcaccacttgtttcatctccactggaagaaagtttagatatggcactatctattaaactgccctcactatttaaaatgtccacaatgaaattctcaggtgactcagacacatgatcaggtgagcttggcactactttgatttgtcccttaaggaggtatttctctgctttcagatggacaggctaccaaaataacaaatcatgatataagcacagagataagtttttaccacaagcaagctacaaaagaactaaacaaagggaaaatatagttgtaagccattgtaccaatgggttaatggtatcaatcttgatggatgagcttccaaaggaaatgcatgaattagcaaaatatagctcatgcactcccggatactctacacagatatgctgagagcctttctgcacgtaacaaaagtaaatccatgagcatcaatgttttgtgagaggtattcatgaaaacataataagcagatgataccttaatcttcaaatttataggagatgtatcaggttgagtcataagagcatcaacatcgtgtgtggaaataatatggaccaagtaacctttttgaacaaattcaattccttgtacatcctcagcaccaacatcaatatcaataaaactttgctcccagcaccaattatcttccccacccatggattcttgggatttgtgtttgacctaagataaaagaaagattcagcatcagtgacaagcatgaaaaactcatgtgcaattgtagcagaaagaagtttttattaacaatcagatgtgagtagaaaaacgcaaaatacatgtatcctatataaaataaaggtagcaggaatatattttaaaaaccaacctcgagcctgtattttccagggatgactttggaaattaagaattcgttgctgtcatcagtcagactaaccgcctttgtttctttgttacgcttatcagacaatctcaaaagagtaacagaaacagatggaccgcatttctccttgcatactaccgtaccaagtatattgactaaagccttaattgttgaaagagaaatattgtattaaaatccaaagaatatgttatgaaaaaattgaaaagcacgcatccaacagagagaacaggattattgttcatgtgggggaaacaacaaaaggaatgctcaaatctttcaacaaatactgatgagagatcgactgggaaaaattaaaaaaaaaaactatttaatttagtgaaacacatatcttttccattttataaataataaatatattccattgggttaacaaattgatagtttcacacctccatctattttggtgaaattaattttattttttaagtgactcttacagcactactaaacacatattgttcattaaaaaaaatcataatattaaacaaatagtgtaaaactatctttttctttaaatcttctatccatattcttctttactcctttaatccagaactatttaattttttcagttatatatcttggattaagtgtcagttttgagtaaattaaatattgcaattccaaggagatacatttgttatttgtgaagataaagagcatcaattgagcatttgatatccaaggatttttgttatcaactcctctagtattggtagtaaacaatcaagaaaacatcaactcacctgagaaaattcaacatttagcaatgggcttttaaccactacatcaatactaggtggtaaaaacatcagtccagaagcactgtcaggtttggccggcaaagctgataaacggtattcacctgctggaacctggacaatttgacagtaagaagaaagttgatattataagaacaaaaaagtctaaataataaattgaccaacaaaaatactcaaaatacaagagtaatacatttttcttaaaaacatgagtattctagataattgataaaatatatatagcaccatcatcagtatacctcaaagcagaagtttccattggcatctgtctgtttcgcttgaggtttgacattctctggtccatgagtcaaagctacctacagttcatgtgtcaaattaaatcctataaggacgcggaactgggttagcgaacaggaaaacaaaaggaattcagcttttacctttgccctgtgaccagaactaaccatccgaaccacaccacatacatcataagaaactgctttaatatccacaattgaagccatgtttggcaatacctaaataacaaggcaaacacaaaacaaggaataagaacataaattcggtataacttgttaatgccacataaagaaaaaaataaaaaatgctgaaaatcaaaataagtatgaaaaataacattgttaaaaaaacacaccagataatccttcaaaatgctaaacttgtaatgctccttcacagccactatcgtataacgatttgatgtaacctaaacacattagatttgtaacctcaattttcaacaattccataaatgataaaaaattgaataaacacaacagtgatacaaaaatataatattataataataataatcaccatgctaaccctgataaataacccaaggaaagataacaataatcatgaagattttgaaatcagatttcatatgaaaatactacttttttgttcttctatgtctctgaatctgtgtacttgtcaagctattttttaaaagctagagtcgcctgcaccccaacagtgttagacaaaattgttatactgtgagagtaatgcatcattatacctggtcaagcttataatatccttgtttgtcagtgatagacctttcatgaccatcaactataatcttaacaccctccactcccacatcatgtccatcaaggactcggcctccaacagaaaatccagtgacctgtaagaagtaaaaggtatgctaaacttgaataactcttacagcaattaactcagagcagcacaaaatgggataaaaaatatctattattctttctaaatgatctcaacaccaaaaaagtaataattttacaaacatataatgcttaaataaaaaagggaaaagcccgtattggctactacatattgttacctgaaatttttgtggaactgtcacatgctgatgtgtaacagtcactgacatgacaggaggtgaaatatcaaaaactgtattttcacccttgtagtaaggtacaagcccataagttcctggaagtggtaaaataaatggaatctgttaccttcaaaaacccttaaatacaaatgaagagcacttgagatgaacagcaaaaaacagtgattgaaactagctcaaccctattaggggataaagtatagccccatgagtttgttaaagaatacttaaagcccatgagtttccaatgctcggcaagcatttaaggattggtgggaaaaaaaatgctttaaacatgcaccatgacagggacaattaccacaaggtacggatttaaacacgaacattccttgagcatcagatacagcatggcaaagagccttcgttgtttcaagggcagtaccagaaccttgggggcaatctacctctaagacatcatctgaggttaaatagatatgaactcccaatattggatttccctacttgacagaagattaaaagatataagtgagttaagtgaagcataattattgcactttatccagccactgtccaaggaaaaaaaaatgtacctgagagacaactaacccacgaatatcatacccagagacaaagaaaatatcatcaactacgccattcccaaagcccaatttcacctgaaagacaagatgacttgtttcaatgaactgaatcatataatgcatgccgtcatattgagtgtaatgagagattttcctcaaaaaaagaaaagtgtaatgaatgataagagcccaagcagagaaggaaaggagaagaaaataataaggtcagtctttaaaggaaatagtgtgaaagataaagaaactgaacctcctttgaacctctagtctcaacttcaaaatcagggtgtgaagcacgtaattcatagtttcctgcatccataattaaaatacacacacacaggtaagaaaatattcctatcaattgaaaaaatagagatggttttatgaaaaatccggaaaacaaatttaaagaaaatccgatcagttgtagaaatccacaaggaaacctgcagttaacttgatgagttgactatttctaatatagcttagctacaatataaggtacgacttcataaatctcctgggcaagtgattgcagcactttcatacctggaataatgtttgtaaacaagtagcttccccctgatgacgtctgaactgaagaaacaagatcaccaccgggagacaaaagttcaacctttacatctgatggcccgccttctttaattggacagctctcaccaccaacagctcccacaactctcccagagatagtaaaccttaagccaattgtacaaaaagtaatttgtatcttaatcctaaccatgtccaaacatcatatgctcacaaaataatacaaagtgaaatacaaaacaggagctaataaaacaaaccccgtaaaccgaaaattgatatcttcattgccattgcagccagtatcatcaacggctactcgaacctgcaagaaaatatctgagcatcagaaaattgattccctatgaacggagcacatggcacaaaatttgagaaggaactacgtaaataataattgcaatttctaaaaaccttgtctggattccacgaccaaccgtctggtccattgatttgaataataaaggaaccctgcaattgaaaaacttaacataattagcacagaaaagctagagccggccccccagactactgagagttagtaaaaattcatgacaaaacagtgtccgactgctagattaacaaaataccttgtcatatactggaatgaagtaataaccattgggagcacattgagttctctccttgacaagtccatcaagtgttttaagttcaatctaaaataccagcagaattcagatccaattaaaaagttctcagcacaaagttcaagtaaaacagatacaagtttactataatgccagatgaattaacgccaaaacacatgcatacatagataaatataatatagtcaaaatttcaattgaaaaaaaaagggggggcggaaagtaccgtgatgtgcgaataatccaatttcaaatcgctagccttcttcgctttgaccaatgacgaacttgcctagaaaaaaaaccacaccaccaaaatcagaatcacaagctgtgaaaatcgaataaataaatcgatgaaatggaaaatagagattgacctcaacaaagccaccgcagccatggatggaatcggcggagatagcagagaatgaagagaaaagaatgaagaagaagaagaagagtgataaagcttcgatgattctcatggtttttggctcccaaattctggagctgagagagaaagggctacgctactactctcctactattctgtgatattaataaacagatctgatcattcacattttttttttttttaacttaaaattaattaattaaatagaaaatggattgaaatggttctcgttggctctctacgactacagcagactgtttgtgacccttgcttgctctggtgctagcggagggtttaaggctggatttctttctttcttttttttctttttcaagactttcttagtgagatgactttcggtattggtacatacgacacgtcgtttactaattttgaagcctctcttctttttttttaaaaaaaaaataaataaaataaaattgaccaaatgctcattaacaagaataaggaatacgtggtatctaaaaggaggcctgggatcacttgtgtcttcccaaatctcggagaggtcttggttttcgaaagtgttgcgaaatgaatcaagcgttattagctcagtggggttgggctcttctaaatgaggaccagatgtagtgttgtaaagttttaagggccaaatatcttagacgtaaaaagttattggcgtgtactttcaagagctttgattcgtggttttggaagaacgtagtgtgtactaaagaaattctcaagaaaggggtgtgcaagcttatttcgaatgggaaagagacgaatatctgggaggacccgtgggttattcatagttgggatttctcctctaagcctattacccgtccgccgaaggacttgaggttagttgtggatttactcttactgaatggggactgggacacctcaaagctctcaaaccttttttaccatgaaacaattaataacataatcaaaggtggcaagcctagtggtcaagagaatgatagatgggtctggactaaagaatcgaataggttattttctaccaagtctgcctaccttatccaagctcttgagcgagctccattgtgcagtgttgccccgacgctctggaataaactttggaactctaaa

SEQ ID NO: 19085 - DNA, 5263 bp, Cannabis sativa
  modified_base (2735)..(2735): a, c, t, g, unknown or other
ttatttatctgattatcaaaaggtatacagctgtgatcagataatatgtatttatagaattagggaggggacttagctacataaccttagttggactgggcctgctcatcaaaagcttcagttcactagaaaagtctacacttctgcttcacttagactttacacacatatgctaagtccattaacttttgatcaccaacaatatgggctaacacagcaaagaactatccaatcaactcaaattttaataaaaccaataaaaattaatgtaagcctaaataaaagtctaacatcttcgcgatctgacacaagcaacatgcccccgtttttttgagattctatcatatttttgccacgtgggtcggtgtccgcgactcataccattgtcggatgcccttttgtattccatatccaaaggttgtcttataactattcccttagagtactcgtacatccttgtggggatccttaggtcatctggctttaggccttcggccgggtccactagtaatagtgagcatccggaacaatctaactttaattctttgggtttgcttatcgattaggcgaaccttttttataaatcatcttggagggccttctataagatggctcaccttttatgtgggaaggcccatttttttggtatccgaaaattcagataacaataaggaatgattgtaactaattctaatgcatttcaaaatgcatttaattcaacaattgacaagaaaccatctaaaaaataatgtccaaccttcaaacaatattgctcaaccggtcaaccccatatgtgtgtactatataataatagtacgtaaatttgaaaataaagctatatacatttaattgtagcacttttaactaataatgcttactattggtcacgtgggaaaacaactctaaaaatcatcatgctaatttattttatttgcaaataactattgagtcacttcataaaaagtacatttaattaaatccacaatatatatttagaaaaatacttttcttgcagtattcactaaatataattaataaaaagttaagatgatttttttgttgttaataaatatttaattgtggttgttagaactaattttataatattaatatcttttttttctaaaaaatagtctatatatatgctaattataatatcttattactataactttagttaatttctatgtttaaaattacatgttaaaatatatttttttaatttttcttataacaatatttgttatacttacagtattatttatgttaatttttttaaaaaaattaaataatttatcataccgaaaatagaattcttaattttctaatttaccacatgtgctctaaaaactttaaacttatttttaacactataagtttttttaatacaaaaattttcaaaaaaatatttggtcattattttttggggacactatatatatgaagagataaagtgaggtttgggttttgaaatatatataaatataatccaaaagtaatcttgtgtacttatgtatcgtccaaacacgtgtcggattggaatcactatcgaccaatcacaaaacatttttgaaacacaaccctttcccaattctcattcatttcatatttcatataaatatttattttattgtttatttattttgaaaatgatataatttaattaacatgactacgtcagctgggacaggtttgaatgacgtaactgtaactatatatttatcctttttatttttactcacacaatatgtgtagtgttttaaattaataattaataggcaataaaatgtggtaagaactataaattaataaatatatgtagtagctagtaattgaaaagaataaaacacatgatgatgataatatatatatatataaaataaggttgttgttatataataatattctaaagccgaatttgatacagtgtactatttattactttaatcagtagtagtcatgaagttaaaaaaaagatatataatatggatccaatatatatggcttcactaatatatattcaactctgctccagaagtggggacccttaatttaatttctttttttttttatatataaaacatattataataggaccatatctaatagactatactcaacactatactaccaatatatttagagttgattttaaaatatggtaagccatcaaaaaaatatttttgaacttttatttaaaaaaatatcatattttttaaaattagtaaacaaattttcaataaacaatttttttagccggaatatgttaaaaaggggcttggatatggctcgttattattgattagtagttgccaatattatttattaaatcaaattaaatgttaaagttgatattaatatgtaccaataacatagtcgatattaaaatgtgcggctgttgctttggctattcagtttggattcaaatatgttttggtagagagtgattccagaatagttatcaatgctatcaatgggacggagtcttattgggcgattgagaactatgtctcattttgtgttaaatcctctccctctttttcttgttgtaattttgtttatgctagtagaacttgtaattttactgcccataatgtggctaactgggttttcattaacaaattgtacggttttattccgattaattcggttccagtggaccttttatgtaatgaccaacaggtctagtttatttaatgatatgaacacgcttatttttttgttttttttttttnaaaaaaaaaaaaaaaaaagacacccccaccttgcaatctaataattttgccttttttttttgtctctatagttcctatccatgtggaatctgataaataataatttataattgaagtaaaaaagaaaatgggaccttctctttctctatcttctgcaccaatataataataaacaaaattaattaaagaccaacaataatagtagcactaccactacacactactttttctctctgttttttttttattattatttgaaatattatatatatatagttagaatattaggtaggttagaagaggagaagatcgaggtggtataatggatgatgatgtagtagtaaaccctagttcatcatcaagaacaaatattaataataatggtcatgacaggaaaatcactgagagaaacagaagaaatcaaatgaagattctctactccaacctcaactctcttcttcctcctcataataataattctcaacaacaacaacaacaacaacaacaacaaaccaaaagggtatatactaattctatctctttctctcttaataattattaattaattaattagttgattattaatatttgattatatatatatgtatgtataggatagtagtgtgagtagtacatctttgccagatcagctagatgaagctgcaaagtacataaagaagttgcaaataagcatagagagaatgaaagagaagaggaatagcctattaattgatcataatcataatcataatcataatcataattatgattatgatgatgatagtaatggtaatggtaatggtaataatggtgatggtgatgatatgaaattacctcatattgagattcatgagatgggtttggctgttgagattgttctgataactgggttggatttcaaatctctcttctaccaaacaattcgtattcttcacgaggaaggatttgacattctcaatgccagtttctacgtctctcaaaacactgttttccacacaatacattctcaggtaattaataataattaattaattagtaataatcatttcatcattttaattagtttattattatacattaattatattgtcatgtatatatagaagggagagtttgcttctgctactgttggtgcttcttcaaggatatctgagaggctaaacaacttcattaatgaagccattactaattaataataattataatcattaatcttgattttaattcaacaaaccatatatagttgaatatattaaggattatatgtattgtcttgattgtcttatctctagctatctcttctaattatctgtaactcagtttggttaatgtattaatgataggcacaatactaaacctatatatataaactacttcaaatatatttatgattgagaacaaaattagtgtgtaatatatttgagtgtaaagttgagaatatgtgtcttatcatcattaattacgtactcttaataaagtttatgtattataccttgttattaatgttagaattgtaggataaataattaggttttatctgaaaactaattaataatggaaagagtaatttatgaatcttacacatataatttttttaatttttctatgaattagaaatgtaaaaccttctaacaattggattagatatgtttcacttttaatattattaatatagtgtggcttgagattttaattatatggtacttcttttgtttgatctgctaattaataaggtgtgttagctagttaactagctaatatattttgattattagaagtgtttatgtacatttaattttttttaggcctatttatataatataattatatattggatgttaaaatttataccatctatttatccaattataattttatttatcaaatcgttccaataatatcaatagatattggataggatgtatttcatttatatttattgattattagtttaatttaaatttattcaacatttttaatgtagtatttattaaaattgctatattatatattttgagtgaaacacatatttacacacatcatgcattagctccctcacatatacacgtacatggacaaaaaaaaaaaaaaatcattttcacactttgaattaaactttcgttacaaaaaatagttacttttagtgataactttttagtcatcataacataaattttttgtgactaaatatgaattttagtcacaacaaaaagttaattgtgactaagatatagtatttaattagctacaagttatccactaatttaattttggtcacaacgtgtttaagtattgtgaccaaaaatacatttagttacaacaaattgtaaactttgtgagtaatacttttagccacagactttttaatcacaacatagaaatgatgattgataattagtaacaatttttttacttttagtcacaagtttttgttgtaactaaaagtaaaattttttatagtattttttatttataaaaatatttgtgcagtaaaaacactaaactaaactgttttttgttgttttata

SEQ ID NO: 19086 - DNA, 2281 bp, Cannabis sativa
  modified_base (183)..(195): a, c, t, g, unknown or other
agtgaagaagaagaagaagaaaattcaggtgattggatagttggggaaccacttttcataaaaggttcaagtgcttccattagctcaccccttaagggatctgactgaataggtctactactgtagaaatccattgcagctgccatactaaattaaaatattagaataataataataataatnnnnnnnnnnnnnataataataataataataggaaaaaaaaaatcaaatcaagataaaatcgacctggttcttaaccaaaattaaagaacaggtactgggttttcagaaaaattaaaaatttctctgaataaagaggtttataatactcaacctcgtcttctacacaaagatcctaaaagaaaaataacaaccttgagggaaaccaaaaaaagaaccctcttagccaatttgaaaagaaagaaaaagaaactagaatttaccaaaagaaaagggtataatccagaagttacaattaaaaacaataaacctggatctcgattctgaaaacacctggctttcttgaaatcttttcaaagtttgcttcttttttttttcttagttgaattgaaaaagaaaaaaaaaataaccaaaacaaacccaaaaatcagaacttggaaagacagatgattaacagaaagggattcagagaagcgggatgttacagagaggggggaataattgaaatacgaaaaaaatatatatcaacaattaaaaaaacttctgatctcacaaactctcgactcacttttcctttttctctctggtttttctgtggtgtttaactctcaacctcactctgtgtttttttttcttcaccagcttctttgcccattatataagagttccaaaccactctcacctaaactaatctcatcgttaatcttgattatctcattctaacccacttgctcattttttattattattttaagctattattctctcactctctaaccggctctattatgacgtatgactacatcaattaatggtaaataaccaatcaatttgtgacacgtaagcatcctctattaatgttactgacagctgttcgtggtaaccgtcaggtgtcggtgaatctccatttgtcacatagctttgttttgtcttatgcctgttgaccatatttgttatgcgttcacactgcctagctctattcaaattggatgcctagttcattctctctctctaaaaagtaaaataaaatatagtggaaaattgttaataaagtgattttcatattccttttctcccctttctttaatttagaggataacttaaatttagtaaaaaaaaaattaagataaggtgaaattggtaggggtgtaaatcaatttttgtaaatcgcttaaattaaacaatccgtccaacctaaattgagataatttgacaaaaaatacaaattaaaaaaaccagacgaaaatataactcgtccaatctttatatttgaaaataataacaacccactcaatcaacctgaactaactcgactaacccgattaagaggattttatatatatatcatataatttacacggaaatttgataattcatgcttaaaaattgtccatagtcttttagtataccacattaaaatgcacagaaatttaatactctaaaattaattaaatcctaaaatactatcttcataccttccctctttctctcggccctctctctaactctcaccaaacccaatcgatacccacaaccacagaaccagaccaaacccacgaccaccgcaccacctccgacaaaacccactccaaagacgaaacgtaggacaaaatcgaggaggatatcgcgaaaccacaaagaaaaatcgtgaaatccaaagcctcaaaatctatgagctcagccaccccgaaaccttcaaaatccctacccatcgttggagttctcaactagcttattttatggtttttgacgatgtcggaaaacatcgctaaatgtcgcaaaacatcgcgaaaatcacaaaacatcacaaaatgtctctaattcacgacattactaaacacatcgctaaatgtcgcgaaattgtactcaagttttcatgataattagcgatgtgctatgcattttttagtctcatatcacaaatacatcgctaatatcatcgcaaaatatcgttaaatacgcaaaacatagcaaatatcgtaaatcataactaaacttcatccctaacctcagatttattttatcattgcaaatacatcgctaaatatcgcaaaatatcacaaaaaaatagtaaactagaagaaagaaacacaaaaaacga

SEQ ID NO: 19087 - DNA, 2512 bp, Cannabis sativa
tgtgtttaaattctattgttttagaaatttatatttagaaatctagatcatggtaaaataactcccaacaataacaaccctactcaagaaatcaaacatggtacatcttaaatgttgtcctactcctatgacagtagggaaagttttgtccatacaagatggcacaccatttgaaaatctcacaaagcacataagcttaattggggctcttcaatatctcacacacaccaagcctgatattagtttttctgtgaataaactaagtcagtttctaaaagctccaactgatgtttgctggtctgtagcaaagaaaattctaagatacttaaagggtactcaagatcatggtttgcatatcaagtatactgacagactggctcttacagggtactttgatgctaactgggcttggtgccctgatgatagaaattcagtagttggttattgtgtctattttggagactccttagtgtcatggtcttcaaagaagcaagctgttatctcaagatcaaacactgaatgagagtacaaagctcttgctcaagttgctgcagaatttgcttggattcagtctctgcttcgagaagtacagtttcctcttcaacacactccaattatctggtgtgataacatgggagctaatgcattggcttctaatccagtctatcatgctagaacaaaacacattgagttagatgtgcattttattagagataaagttctaactaaaactcttgacatcaaatacatttcctctcatgatcaaactgcagtctgcttagtaaaaagcctatccaactcgagattttattttttagttaacaaactaggtgtgatttgcaccctacttaatttgaatggaagtttagaaaatatattcattacttattaccagttactggttaccatttaccatttagtattaatgactttattaattattctttgcatgatttgacaattatatttctctctcttttcagttattagtgtgagagagaatattctttttatctgtattttttggagtgaggtgttcatattctagattgtactattagttgcttagtggctatataataaataatacacaatagcttgagctgatttttatcatcaccatcttcctgtttttaactgattggatttgattaaaaactgatatggttcaattatgtctcattgtaaagataaaacattcatcagatgatcttatcactattatttttattttttagaaaatgtatcaagcgaaaatccatatatgaacaaagtaccattaatttacatgatatttttaggtttcacttttattttaaattttatttcatcatcgtttatataaagatatggcaataattcacttaattgtgttctatttggttcaaattatgttgatatgatctcttatctagtcaaccacaacaagtataccaagtacaaactatataaataaataaattacttaaaaaaaaccttaatgcaagtattttccaaattaaagtgatccagcgtatatttattctaagattcctatccatatttttaattaaaccccaactttatttataaataaatagatgtcaaattgttttgcaaatgccctattttactcgagacaaatcatagtgatgcttcattgactgtttttaccttaaaagtcccatatcttgcttatccaaaacaaaaattaaataaaattagaaataattgaatgatgaaaataaatgcattcccttaaatatgtatagataaatattaataaataagattgtattttattttagctaataatctcagccaatgtcttttgtcatatatgaattagagattgattagatgtctattgatccgtaatgttatgattttttttttggacgtaatgggttaattttgataaaattgtatatggtttactttattttcaataatagtattttgattaattttaggtctttaatcactattggaaattgattttttttaaaacattgtgaatgcattgagatattattaagttggtcattaggttttttttttagtttgttagatcatttctaatggaaatataaattggagccaattttataaaaatctactccaattatgtataaaaaattatgcaaaatttgaaacataatatattattatacaaattttatgtcacactaaaaatacttttatatttatttttatgttgttttttattattttataattggaatggtatgcatcatgaaaatttattattaaaatccaatcatcaatgacatggcaatggtataccataaatttttattatataaatttatgttttaccagtttcaaaaaaaaaaaaaaaaaaacttatgttttacttttttggattatattttaataaatatattcccacatcattgaagatactataatttatgacaatttatcaaaacattgctcataacattccttaaaaaaatatatatcgttaaagaatggaccttttatatagaaataaaattattatttgtat

SEQ ID NO: 19088 - DNA, 2402 bp, Cannabis sativa
aaataaattctaatcatactttataattttgttttgttttgtttttttaattggtgttataattttgtttaagatatatatttatatttagttttaaataaatatttaggataattttattgtaatacaataatattatgtctaattattaactacaaatacactaatgacatttgtcactaatttatagaatgagtatctttagcactaatatagtacatcaatcttcagcttttcgttgttttatttttcttttttcttaaaagatggtctgatccaattttggggtaataaaccaagctcactacactaaaaagaagattaatggagaactacatacactactcaatgttgcagatcacgtgattttgcacattcagggagaccggaaatcaactttaaatatatagttaattcacttgaattcctcctttttcgatgacaatatatatgcaatactcctccattaaccattacaatatatagggtacctttatttttattttttttttttttagaaagcatatagggtactttttaatttataataacaagtattttactaaaattaaataaaaactagtctaaaattctctttttatgtttcttttatgtaattaaataagatttttctttatatttaggaaccgtcatcaaaaacggttccgtttcaaacgataaaacccattttaaatgaaggattcgtgcctcttcactttctcatccacgtacgttgcattatataatcatcatatatatatacgcaaataaaaatgtatataaatacattgctaaactataatctcatataatcatcaaagattcaaatatgcctacttcctctttcttcttctcaatcatcctctacgtcttcctcctcctcatctctctctccactttcaccggtgagatttatgcatatatatatatatatatataaaaatatgctactatatataattttgatatgatcacttcctgttagtctgagttatttttgtatatatatctgcagatggcactgaacttattttagtgaacaactgcaaggaaagcatatggccgggactactagccacggagggccacccaactccaaacggcggcggattcctcctcaagagcggtgaagagcaagcccttcaactcccggacaactggtcaggtagaatctggccaagacaaggctgttgtttcgatccaacaactggaagaggtgaatgccaaacaggagactgcgccgggcttctccagtgctccggcaccggcggcaaacctccgacgaccgtcattgaaatgacgttggggacaccgaattcagatctgcactactatgacgttagtcttgtggatggtttcaacgtgccggtgtcgatgaggccggtaggaggtggcggcggaagttgcggggtcgctggttgcgaggctgacctgaatgagtgttgtccgaaggctctgagggtggcgcgtggagggaaagtggtggcgtgcaagagtgcttgcgtggcggcgaattggtcggacaggtactgttgtagaggggagtttgggaatgcggagcgttgtaagccgacggtttataaccgtttgtttaaggctatttgcccgagagcttacagttatccgtatgatgagtcaacgggtcttaattcttgtacggcttctccttatgtcattacattttgcccacctataactactccttcctaattaatataaagttttttttttccttttttaagttttggttatattttggattaattatattttcatattttaattagaaaattttatttttatggttttttttttggcaaagtattgcttttttcttaaatcagaaaattttattttgtgagaaaattcagaaaaaaaaaaccagaaactataagaaaatcagttaaatttaccagttatttcctaagagtaaataattaattattttataatgtttttctatatttttaacttttattttttattttttttttaaggaaaaaagttatatttaggaccatgtacactattttttaaaaagagaaatgtaagtagatagctatatttctaactttatagatagttaatgttctttttttaaaataataaaacaaatattcttttctactttttaatacctaaaataccttttattatataaaaggtattatatgttttattcctttaatagaaattatgaaaaacaataaatcaaaatctctctactgaatttttgtcaattaatttttcattgtataaaaggtattatatattttattcttttagattttgttgctcgtgttgttgtctaatatgttatttaaccatataattaattttttattaatatatcgtatgatatacaaatataccttaaactaatatacatatatcacaaactt

SEQ ID NO: 19089 - DNA, 2454 bp, Cannabis sativa
tgggtctgatactctagactcttcgtaaaaagaagaagatggatctgactctgactgtgttcattcatatctgcaattcaatttcatattcatcaatgtttgtccatattcctttgttgaattgaactttgcttggtttgttctgtgtttattatgcagattgctttggattgagatcaatgtcagcgactttggggttgtggtatgactttcctgaccttactctttcacggtagggttatacttaatcaaaacataaatctataaacagaaagaaaaagttaagcttgattactgttttgtttctaacttgatcaaatttctaacaatagcacttgcaattgtcattttgtgcctaactttatcgagtgtcaaacaataggacttgttaaatatcagcaaattagaagtaggaatgcaatgcaacccttagaaaaccacaacacatgacatatgtgattattttattgttacaatacacatcaaccactcaaatcttttattttactcacatttacacaacacttgtatatagatcacactctttaggacactcaaagttggtttacagtcattctcgctctatcttagggtttttgaattaattttcattctaggtgatcatcacaattaaaatgatttctttcaaattcttattatttagttgtccttacatggtagacactacttatatgtgcttgttcgataatttcaggatataaactttcgtagccttcaataatttttcatcggatgtttgacttgacttagttttctactattttcaagactttctattaggttttggtgaggtttttggttttacattttcttagcattcatgttggtttggtaatttcaggaagtatacttgcataggcttcaataatctctaaacaagcatttaaccggacctagtgtcctagtattttcaagattgtttctatctttatcatctgcagcgcaggtctttgtgatttttggtttttatattttcttcaggttactcaaatgatttttctgggattttctacttgctcaatggattttaggcaaactttttctgggagctggttagagatatctttttgggttttacatagcatttgcactgtttcattttgcctctcctttctctcgttatggtttaagtattcaattgtttctgtgtgtttctggtactactgttttggtgtttttggtggtagccaatagtttaccataattacttgagcgttgtgcgtttttaagtagatgatgtagacatacacgaccttggggtatgacttccctcttgaatcttcttctgaataaccgacttgtttggacttgggacaacattgtgagcatattttttaaggttctagtttttaatgatcaaccattgtgaattggtttggttctttcttggtataagatcagattttacagcactttttcaactgttgatttacacttgggatcaatgttgcatgtttatttataagcccttggaagatatatcttattgatcatacttttgctggcggacttgattttgatttctccaaatgattttttttttttttttatgtatatttgcttgctgaattaaatttgttcggtattgatatatcaacatttgtgaattcttagttcttctggatagttttgtttgtttaaagtatggcttttgtctatagttgaaatttgtgtattttctttttctttctttttttttttaaaccaatttcattcaatttttctgattagttccttgcaatgtattttttattaccctgtttgcttaaagaaattcagcaaacatgacattaattcttagtactgtttttctttttttaataatgttatatacatttaaatttgcttaatcagattgatatatattttttcgaaccattagaattttttagattgaagaattaattagaaaaatggtgccatgagagtatggtataaattgaaaaataatccttttttttaggacttgttcagtttgtgtgaatattatgttacattattcaaattgtctattcctgttttcttttggcttttgtatgattttctgattattgttacatattggcatatatatatatactagttagaagttacgtgcttcggcacgtaaatattagttttatttaaagtttagttttttttttttcttatttagattgtatgtaaaggtataatcatacgaataatttgttttattaaaataatatttgtactattataatttgttattcaaatataattgggtaaatataagtcataacaaaataatacttattatttacttatagaaaatttggaggaacaagatataagttttgcagaatttaaagcaaacattatgttacaaaaattaaagagaatgtgcgatcttaaaatagatgaaaaaagttttaaaaaatgtcttaatgtatggaatattattagaaaaactaa

SEQ ID NO: 19090 - DNA, 2384 bp, Cannabis sativa
gttagttagggtgttacaaatactctattttattaaatgataaattagattttctattttttaaaatagtacaaaataaaactctgatcttaacttttgtcttttttttttttttttttttgtaatataaccaatctaaagttaatttctagcataaatagatatatcaaatataactagtatagtcataacactccaagttaagttattattaagttttattttgataaaaattgagctcatgatattattttgtacaattttgaaaaatatagaattttaattgttatttaacaaaatagaaaatccatcacggtaatttttgcaaaatacatattccaaaataatatttacctaaaaatttatattatcattattataaggtactagtgatatctaacactactcacagttggcgattagcgattagttagcgatatttcataaaaattaatacattaaattatattaaacctgatacttaattatacaaatagtgaaatattaagccacattaatgtcatcttagcatttatcttgtttgcatttaataatcaagaataagctaatcctttggtgttatatatagtgattaattagactattgtggtatagtttgattacaaataaagaaccattcatacacaaacaagattctaggttaaaattcattccgttttgtgtaaagtagaccaactaaaatataatattaaaataatgatactttttggttggaaatttattagttatttaatttgtttattattgaaatacaattaaatattctaatatataattgaagatgaaattagtcccatttaaaaaaaaatgaaatagcttcacaaatgaatttatatgtgttcttattctataataataaaataattctcgagaaaaaatataatataatatccaagtcctcttaaaaaataaaatagtaaataaagttcatctcattataaattctattcttttttttttcttgcttaataaattatattcttgttgttcaaaattctcttaaaatgatataaatagtgcaaaaaaataataataattataatcataaaaaaaaaaaaaaaagatcaaacagtatccaataattcaaatttgtgatcacagtttagattcttttttcagatgaacacatattttatgttatactacgtgtggatattatttgaataggcctatatagtatagtttgatactttgtattatttatataaaaaaaaaaatcaaaactatatgtggggaagacagaatagttatatactagtcacatggagtggtattggtgtataaattaaattaaacaagttaaatattattttagatattgtgttttacaaaaattattgatgaattttctgttttgttaaatgataattcaaactctttattttttaaaatggtataaaatagatcctaagtttagtttttgtcaaattaaaacttaataataatctgacttgcatgtgtaatgacaaaaatagttacatttttttacatttgttcgtgttagaaattagttgcaagctgattatatttaaaaaaaaatgaaaaattagttcaaaatctattttgcactttttttttaaaaaaaaaaaaaaaaaagctccgaattgagttcaagatctattttgtaccatttaaaaaaatataaaatttaaattatcatttaactaaatagatagttcaatttataatttttctaaaacacagtatttaaaatgatatttatccataaatatatatatagttatataaatttcattctttttgtttttttttgtttttgttttaatatataattatattaaatttaaatatatatataatgaaaaattaaaggaacgatgcaacattgagaccaaactagatccacagatgttaaaatcatgagaatcatataaatgggtggatctaactcatttttggaaaaagaagcactacaactagttgataatattattcactgtttttctttcatgaataataatatttttaaattttattttaataataataataataataataataaaattgttatttgcaaaatcattttaattaaagaaaagaaaaatctacaatgatgcttggaaaaaggaccaactaaatatacttttgggaaaaagattggacatcaacacatacttcatggagacttgtttttgcactttattatttttgactaaggtgactttccactagtcacttcacttatgttgtagtgagtttatttgtggccaaacaaaaaaaaaagtaatttaagttagtaatttacgagtattattattagtgttagtagtgtttagtattttatagacgtatcgttttgtgattggctagcaatattctctaaaagttattatattaaa

SEQ ID NO: 19091 - DNA, 3439 bp, Cannabis sativa
ttttttgaaggttttggctatggcagactctattgttacctctgataaaccttccacgtcgtctcctctcgatactcctcgaataatctgccatgtgtatgttctaccgaaaacttattatgttttcatttctgttttcttcagattttactctttatctgatgatgttttttaaaaattcagatgtcagaagcaattttctcagtatacttgtcctcgatgcaattcgcgatactgttctttgcactgctacaaggtgagcttgtattcaaattggtatgttattgcggaagaggaaaaagaactgttattgtttgttgaatcaatattgtaaagtttatttcttttagttaccaagattattgtatgagatttaaggtgaaaattttatatgaatgatcccacctcccccattatttggttttttgcattgatgtatgaagctatgacttaggagtgagcataaaggtttcttattttttgcctcttattcttaacttggggtatgttattgagctatggcaaatgcttaggtcgcgaccacttaagaagaaaagtgttgtttctttagtctttgtttcggttcagttttcgcagttgttacaactgtcattgtatattttgagttcactttcttttcagaaatcttttctttgaacacatatgaaaacttttggctgattatttatattgtaatactcttaactgtttttccattaacagtctcatagtcttcgttgtactgaatcctttatgcgggaaaatgttgttgcggaacttcaacacctgcaacctaatgatgaaactaaagagaaaatgctggatatactaaaaagatttcattcagaagaagaaacagaagacatggatgaacaaggtgtgtaattgaaatcataatagcccttctctaccctccaaagatatgatttcaagcatggtcattttatcttgacattgcattctcgattactcattatagaaataccctgcttctaattgtcgaagaggagtttctcataagattgattggcgttagttatgtgtgcggttcggttttttttaggactctcatatgatatgccattaagaggaaaattacacaaaagaaaaggcgtttctcgtctactaggttgtaatattcgtaggttgtgaaagttctatgaacaagcgatgatttgattcaatgttgtttagcatggtattagaatacactaatagattttagcaacctgctagaagattcgttggatttattcggaatatgtgtccaatacaatcatataagaggagtttctcataagattgattggcgttagttatgtgtgcggttcgattttttttaggactctcatatgccactaagaggaaaattacacacaaaaaaaggcattcctcgtctactaggttggaatatttgtagggtattttatcggatttaatcatctattgtattttcatataaatagcggcaagaaagtctatgaacaaacgatgatttgattcaatattgtttagcatggtattagaatacactaatagattttaagtaactaatagatgcacatcattggaagggttgaaaatctttagatgcttaacaatcaccaaaagccttgaggttcccaattttgcataatttctatcttccaattagttatcgaagtattctgcttaatttttctctttcttggcagattcaacactttccgaggagaccattaacaagattatgtctggtatgtttcgatgtctatctttgaatcgtgaatttatgatcttttcccgttttaagtctccatgctacattgcttgaagctaaagtaagttttttattcatgtctccaggagatcaaatcagtttcgatgatttatcttcagaagaaaagaaacaatttcaaagagctattgcatctggagaattgagcaagttaattgagccttgggaaccatggtggctgaggccttctgcaaggacgatatcgctcagcagagaaggtactcaactcgtgcagccagttaacgaagaggaaacaatgacatcaccagaatccagtttagaaagcaaccaaaccgaaattcctcctggcccagataccccacttcctccactcagcaatctaagttccacacaaccgtcaccacttttagctgtacatctcgttgacataatatacagctattgtttcacgctacgcctctacaatggtgattggaaatcaaatgctgcagaatctgccttggtggtgttaagcgtgtcatctgtattgggtcaatgtgcacaacccgaaacagtgttggaggctttgtcttactgcctcgagcaaacctgttccccggcttacagacagatgggaggcttgcaattcggtttaggccttattgatgatgtagtaagcttacttactttaggtaacaatgccctattgtgcttactttcggacttgcaaagacttgttcaaaccggggaaaaagagcttaaggctgagaaaccacagaaaacaaagaaggtagagatcaggaataagctgaaactagccgagaggaagatatattttatcatgtgttgggtacacgagcaacctagcgaagcttggtcttccttggccgccattgtgagggcggagaaggcttcggcttcggctatggaatatgttagtgtgccaaggaaattggataaagaaacagaacagaagagcaaggttatgattgaagagattgagtgaatgaatcaacataggtgagtctcactcacaaatgttcataaatgcaatttttgaacactcaaattttgactctgaaaatgtattgaagaccttgaaaaaggcttaagtgagtgaaaaatgtcacttcctaggttcatttcccaatattttctatgttatctctcttgggaattgtcaattattaaattcatatgtatactcatgcaataaattattttatttttttggcaaatactatttagatcttgttgctttgtaaaaagttactgagtaaattcttgttttgttgaatgataaatttaaatttgtattttttaaaattgtataaattagtacactaaatttattttttatcaaaataaaaattagtgattactcaatctagagttattatgaaaaaaattcggtatatttttgtattattatattaaaaactattttcaagttagttatataaaaaaaaattgaaaattgagttattttttaaaaaatattaagtttaatttatcattttttaaaatagaaaatttaattgataatttttagaagacacagctaatatttttataaaaaaattattctaaaatttattttaaaattataaaattaaaaagatttataaattttggaataattttttataatttttaaataataatattaagtgtatttttgtagatatcttaaatctactaacagtgttttgatatatcgga

SEQ ID NO: 19092 - DNA, 5126 bp, Cannabis sativa
  modified_base (5000)..(5009): a, c, t, g, unknown or other
cgctcacgctcacgctcacgctcagcttagtgctttaattggactatgcacctctgagcagctacagcacccatggcttccacttctgccatttcactatgctttattcccaaggtacaaactcactcactctactcttccctcgcctccatgctttttcttcattttataatttttttttccggctttcagatttcacagcgtttccattctaacaaccatacaccacagctccaaccctatcgtggtgcctatggccatgggggtctcctacatactcctctatcgctccggagaagagggagagccttgaggttttcacgtttagcggtgagagttactgcttcttctagggctgaaggaggctcgaggaggcccgcttctggtcggagagtctatcggcagtctcaaacccagagctcgtcgctatctgctcatccgctgaaacaagttgcttcctttgtggtcccagctggcttgtttttggccgtcacgtttggtaatttgtttcgggcaaaattccttcagctgaatttgaggggaaaaaaatgttttatttttagatttattgaggtttctactatgtagtgtgatagaaattttgaacttttgcatatgattattgtgtttatggtctttggcattgatttcatttttcaagggaagagaataatgttgtaacttgttatattatctcatctttgatgcttaaccctaatgaggtatatcaaacgagtttgtttggttgtaaagcttgatgctgggaacacaagaaattttacttgttgggtttctcagtggccgtactaatttatatcttcagctgacagttttgtggaaggtggtggagaaacttcttgttccgaaatctaagaagccttctaatgtcgaagaaaaaacggctaaacaaggcttggagtggtcttttgctgctggtacaaatctgttatcaggtcttggagcaaagattgaccgagagtccaagcaaaagctcaatgaatttgccaaagaactcagggcatttagtgttgtcgatatgtcaggtataacaaatgggcgaacatagacattgttagtttttgaagaagttatacttgtttatggacactaaagtattaatttacggtcattatactttcatcttctttataactgcccctattggttagatttttcaacagtcttgttgaattaaaaataactgttataatttgaagtcgtgaaatagattttatttggcagggaaacgtccttttgtattttgctaacaagctaagttgtagttaaggctgctgccctctctcttaactatatcgaaagaaaataaaattctgtttattaaacttttttgcaggatgtaattttggtgatgaaggtttagtttttcttgctgaaaggtttgcttacaatcaggttagagccgttgtctatcaatttgactcataatattttgtttattatgctggtgatcttaatatttaccaatctactttttggtatcattgaactaggaccaaatgttgtagaatccaattttttgattctaaacatatattccataattgacattggactgttggtactgtttcttcaaaaagttgtataataaaatggtttattaaactataaacaacttattaaacaatttagctaaacatggatcattatttaaaataaaaatatataattataaaccataaataaatatattaataaaaaaactacaaattattaaattatataatatgtaattgctctaaaaatatatacaaatttatattcattaaatggcttatattgttgttttttagtaattttttaatgggaatatactcatttagtaccttgtgttttctcgaaaaacataattggtaccctacgttttcaataatactttttggtatcttgtattttaaagttgtacgtatttagtaccctaaagtaaaatttcatcaatataattttattaattcgaccaaacggttctttgttatatgtaatcaaataattaaatttaaattcagaattcataaaattgaagatagtttgattgcattgatagaattttattaaataaatttgagtttagggtatcaaatatgtatgattataaaatatagggtaccaaacctatatttagataaaacacagattaccaaatgtgtagacacttttttaatcaaaaaatcactgtaatattataggtttgataaaacattataatattattgtttacccgaaatcttatcctggtgacgtggactgatatcaatgtttgacatgtgacaagaaagaaaactctcggagttgagtagtctcaagtcatatcagtcgacttgggacgggtccttagtcctgctctgctcccaagttgactttgagaactccggaatgagtgtttggttctcgccaagttgtttccaactcactatctttcagcaaagagtcacgagacactataaatccaaggttaaaaactggtaatttaagcttgaagacatggtattacgataggtatttttgaacacaaaagacgccagcaggagtactcggacattcttggaagggtcatacgtcgtcactgaagcactagaactcgaaatatacaagttagcacgctatgacgataacttgaattcaatgcttgtaccaaggtacgggaatggggtgcatctaaggtgatactaccattaaagcagatgttttcaatacagctcgcttcacaatgagattcactttacgacgtgcaagtgaatcaaccgcctctcgaactgacaagatgcaacaaagttatttttaggtcgagaggtccatcgccaagttatgacccctacactactagtcaaacaaggcgttagtgtagtgaaaatcaacttagctagttcttcatgaaaatataaatttgcaattgtatttaattttagctaattttgttttttcaacttagctacgataacgtaattgtatttaattttaagaatgttaaacaaagtttttttggtacttcattaatattatgaaattacagctcatagacctaacgacgctctcaagcgttgagtaaagctcatagagttggtcttgggataacttcggttatttctttagtgagttcaacttgccaacctacgaatttccaaataaatggacgagtgctcacatatgtaacagcctaagacccatgatcaaaaaagtccaacgagatttggtatgacaagtgaccaataaaggcacttctttgatcacttggggcacataggttatggtacacgagagctatatgttacatggtgttaacccatatttcgagcacccatatggtcacgacacatgtaaggaagctggaatatgaaccaactcagattgtgtagagataaatacgttcaataacttgcctctaagaatacaaatggtggagatattttagtcgctccttaggcatttaagggtgagtcatgaatgacaactgccattcggtagactagtgagatgaacatctaaagaaaaagtccatcttaggatacacagggtaaactataaagcaacagttagctcgaaagaatagataataaattctttaaaagcttacaacttattgacccccatcctcgtgaatatgttaaaagactaagggatattcacatagagtaattcacctcggaatgttcacgaacgacacaagtggatagcgtcttgcgtaagtgtatttaatcagttctaacaatacagaagaatgcgaggagcatcttggatataatacctctgcatagaatctgtcttcaagattaacatgagaaagtggtttccaatacatgctgcgacgcatagaaaacttaatcagcataactgattttagataaagacagaggcaactatagcatttatttatttatttcatgtgttgtaaatatgaaatgtgtggggattgtccacatttttcatgagcaattacgaggataagatcacaagagaataactgtctatcccagaaacacctataaataggggaagaattcccagaatcagggacgaccaaatcgaatatcagagagaagataccattgttgtattattgttactctctaaattcaccaaattctgataataagatggactcgtggactatgaagaattaacttcaaaaccacgtaaaaaccttcctgtatattattattgttatttaatattctaaagtttatttataaaattagggcttatatattagttaatgaaaatcggggttaacacatgggcattcaaaaaatttttgcacacctgagtagtactttcatggtaaagaaactttaagaaacattgatgttactcccaatgactgagtttcttaagacatggaatacctgtgcaagtgttaagaggtcaaacggtaatgaattaagtaaaaaacataaacattagaataattttttttattgaattggattaatttctaatttaattaaaaaaatctgataaatttttagtgagacttatccacattaacaggctgcccgggacaaccaactaatacactaaagctaaaagctaaaaaagaaaataaaagaaggattaagacagtgccctacgaagccatgaagctatctaagtcaacaatgactattatttgttcctcattctctgtttgtggcgcattagcagggggaggaaagtcgggatgttcaaggttgtagccttcgattctcgtagcttcttcgaccactggttcatcgccattcaagttgaagtcgatcctttgaagagctttagctttgagacgttgctcacaacgcttcacaaaaaatggaacttagttctcagggaagtctgaccaattaaatgactatgctcctccattggcctaccaatcacagtagatggcatcaaaatatgccatcatagtaggcaacatcttcagcctctttccgctctgtctgtcacttggctcataagacgttgaatttgatcctctagctcagcaactttaaggaggcgtttggttgggnnnnnnnnnnatataggaataggaatgagaatgtagataggaataggaatggaatggaataaaatttaaaatgcaaaaaaaaaaaattgataaaaaaattattatttttttttccttgttacattgg

SEQ ID NO: 19093 - DNA, 2674 bp, Cannabis sativa
  modified_base (2639)..(2648): a, c, t, g, unknown or other
ttttgtatgtacaaaaacattaaaaaaaaaaaaaaattggtagcaaatctggtccgatggggtccgatggtggtccgatctgaagctatttttttttttttatgtattaaaacacaaaaaaaattggtagcagatatagtccgatgggtccgatgggtggtccgattgtgtaaatggaaagtattttaggaatatcataaaagttttcatatcctacaaatattagttattatttatttaggaaattctttttaatgtaatcataaaaaatcaaatttcccttctcaaattttgtcacctatttaatatttcaccataaatcatcaaaactccctctctttttctctctctcaccaaatagccaaaactttgaccttaaaaaaccaaactcaaaaaccgcccaaaaacaaatttcacctcccttttcccttattccttccttctaaaacttcattccctccaaaaataaaaaacttccaaatgtaaataatctatataaattagctcaacccacctgctctataatctcaccaatctcacatttccatcaatcttgctttcaccattgccagtacaaccattaaaatggatctcactaatgtcctttccgtccgtaccaccaattacaacagcaacaacaacaaagagaataacaatgcttcctccatttcttctcccaagatctcaactttccaagaagatcaacaaaaagaagaagcttcagaggaagcctttggccgacattaccaactcatttaatagtaattgcttagctccatcgttttattcttttgattctgatgaatggggtcttctacctttactgcaaattcataatggttctgattcgctcaggatgagaaaggcttcggcgccgactcttactgctcctgctcggatgtccatctccaaatccttgagaataatgggatttagatagctctgtttttactttttgtttcatattaattaatagagttgaatattgcggccaatttagttttaaataaaatacttttgattgaaaatagaaaattaagataaagagtccaccatcaacaacagccacaagtttatgccagtattgtcaaattattattatctttagtttgatgtcctaataataaaatgaacatccaaacagatactattggataaattagattggtttattgctatttcataataaactcattgaattaatggatcgacatttatcaaacttcatggtttttccaattggcaaaagagtaaagccattagtaaataaggggtttgttattgttggtataagatttaaaaatcgtttcaggaaaaaaaaggttgaaatattaattacttgtaattttttttttaaacaataatttgagatttactaaatactctctatcaattatttcatttgtaccagtacctcatcctttaacttacattttgtcagcaattcttcaatttgctagggaattagagtgttatccgttaactgttaatataaacgatttatacgtatacttttatacacaccgtaagtttatattagtatgcttaatattattattctaaaatttattttaaaattaaattaattataaaaatttaaaaataaaaaatactataaatttaaaaatatttttttataatttataaatgataatattaagtgtactataatataaatgtgtcatgtgtataagaatgtatacataaacaatcaaagttgtccgttaggggcacgggcagagtcagggtaaaaatttagggggtcaaactatattatatattaagcgacaaataatttaaaatatattattaaaattaaaatatagcatgtctctcttgcatatcacgaaaattatctattattgaatctatgctaaattttttaacaatttcttttttaatatacactaacaaacaatcacttttaaaaattcatcttctatcttgttgcgaagtgtaatcttcactatatttatagttaaaaaagatcattttgtagtagttacagaaactggaagtgtaagaataagagttaccactttatatacaagtaaaagccacctaattccttcaattgaactactttcaacaatttcttgtgatgtgaaattcgcaaactttcttgcaataagtgttaattggttcatgagatatgcaactgttttctcagtctttcaatgaggtgaattaaaatcattttcaatatgcgctaaaaatgcacaaatttttctctcaccttttttttataattgaaatctattaataataaatgcatccaatctagggtctagttaacaaatagactaaattaatattattatggaatataaataaatgctttaaaagaaaaaggaaacttataatttcttttttccttaaaattaataataattgtatatatttcgttagtgctagataaaatacacattataattttcaaattttagtttgacttttccaaaggagccaccatataataattattaaaaacttcaattacaatatactataactaagattttatagtgcatatatataaatgctagggggcccatggccactatagggagacaagtacgtccgcctctggttaggggtattcatcaaaccgctcaaaccgtccgcaccacaccacaccnnnnnnnnnncaatttgaaattctttgcggtgcggt

SEQ ID NO: 19094 - DNA, 5203 bp, Cannabis sativa
  modified_base (42)..(56): a, c, t, g, unknown or other
catcgttttagaagttcaatattaggttgttaaatcaacatnnnnnnnnnnnnnnntaagttcctggtaaaatatatttccaacaccttactcacaatctagaactgccagcattagtatttgcacaaaagatttggcggcattacttatatggtgagaaatgtgagatatacattgatcataaaagtttgaaatacttcgttacccagaaagacctgaacatgagacaaaggcattggcatgagctggtaaaggattataacagtgaaattctttatcatcctggaaaggccaatgttgtagctgatgccctaagtagaaaaggtcagaaccagatgaatacaatgaagcagatctccaagaaattagcagatgaaatgacctaagctaacattgactttgttgtgggacaattagctagcattaccctacaatctacacttctggaaagaattaaggaagtacaattgcaagatctagactatgcctccagcgctggctgctgtacatgatgtgttccatgttttgatactttggaaatatgtctcagatccgtctcatattctgagttatgaagcattggaacttcagccagatctttcatacaaagagcaaccagtgtaagttttagacagaagagagaaagtcttgagaaacaagacaattgcactgatcaaaatgttatggagaaacagtaaagtagaagaggcaacttgggaacttgagacgaatatgcaacagaaatatccagagttgttcaagtaaatttcgagataaaatttctataaggaggggataattgtaataccataaggtttaagaaaatggattaacaaccctaactagtttaattatgtattaatgtggaattatattattatataatttaatatgtgaaactatactgataaattacattttaagatcccgttggtgtaccaggatcattttcataattttgacccgagatgagtaaaatcgtaatttatgtgatatatcatgcttatgggctatattattatatagtatatttattctgtctttctgtaggtattttctgacaagtcggcgtggcatagtcataactaggtattttaggccgaattgggttcggggcctaaaatactagaatttgtttatggcattatttgataaataggaaatcctaaaaattttatgttatgtgtatgtatattgtttgacaactttacccgtgactttgtgtatgtggacttaattgattataggggtattttggtcttttagtcatttatttcattttaatgaaattttgttaagttgaaactcattttttagtttgaaccctcttctagctgacccctctctctttcttctttatctctcttttaaaaattttgttgatttgaaactcattttctggtttggaatttcttatgcttgttttgttggaggagcttgaggtagctatttttacctatttatttctaaatttaaaagctgaatattgtgatgatcttttgtgtttgtgatgttctttagttatggatgcatgtcttggtaatttttgtgaatgttgatgatattttggtatgttttgtatgtttgaactatagaggatgtatgtagtatttataggttgttttgggtgacttttaagttgagatttggggtttgatttctgggtttttgggctctgattttctgggttgttcttgaggattttaatgctttaaagattgactttatgcttgaatttttagataatggtatgaattgtatttcattcttagttttgaattgagtttgttattttgagcttattgagacattcttttaagtttcaaattgttgataaattgtggattgaatttgagatattgcatgttttgattaagtttggattgatttttgggctaaattttgaagtggaagaaaatggaaattttcggggttacagggcccctcaccgcggccgtggccttgctcgccgcagcgaggccctattttcctcaagaatctttcgtgtttttatttttgtcataacttttgactcgggactccatttgtgacgttctttatattgttggaaagcttgttttgagctctatgtgcttatatgtaattgaaatgccaattatgtgaaattaaatttttaaccctatatgtgaaatcctgggaattgtgactaggattaccgacgcttgctcaggaacacccagaggtttggaatttctacatacttgggataccaggtaagatagtagttagcacatagatttaagcgcggtggggctcatgtttcatattatgattgtgattgaatgtggaactgagatttgggttattaccctaaagggagcgatctagggttattactctagtgattaaatgtttttgaatgcaatgtcatgctatatatgttgaaataaagaattatgcgggtaaggtataattaggttagactcggtaatcatacctgagataagccaatctaaggccttaatgtaaatagacgtgtgagcacaacacgtaggtctatgctaaatagagagtagatgaggtggcatcaatatttatttgaattgtgaatatatattgcatattattatgtttactgtcttgatgggcttggcttacgggtgctctactgtgcaagaaagggtaaataagtttgtgatcagccatgagttcgagggcttggcggtggattgtacaagttcgggccatactagatcacgcggaataggtctaccaactgatatatttgtattctcagttttgtcgcttaggtcaacatgttaaaaatgacttgtaatattttgtgaaaacttttacgggatcccggaacatgtgtaatatttttgaatggtttgtaaagtttaaatagttacaagataaatttttattccttaactgatttagagtttaaattcaactcttattctattaatcccggcttagcgggattaggctatgtttatcgaaaaattgtagcgtgcctaattgttagggtgttacatattaagtctggttatagtttcgtagctcaggatggtgatggtcgactagtgtcaataagggcatgaatataagatggtggggtagatcctttgctaggtgagtgtggatgcattgagcattaaggaagcattaagttagttgaagactgttaatgtgtctcaagtggtggtagagtcaaactatttaatggctattaaagttattggtgtttgattaaaatatgtatagcttttggtcttgttattgaagagtatagggttcaattgaggtctttagtttttattaaacgttttgttaatcaagttgcacattatcttgccaaacattcttacagtatgactgatcgtctatcggtaaaagcttcgattccatctgaattattatctattcttcttagggattactcattaagattattttattagaaaaaacctaaattatgatattttttgaaaattagagactatttttatttatgacatttgaattacttgtctttatattaagaaaaaaaattaaattattgaagaaagagagagaattgtaagaaaataatttaattatttaaataagtaaataaaaaaggttaggacaaatcccataacctttcccttcttccccgccactctgtcttgtctactgtaactggcgtcggaaattgtggtatctttgacctaatcacactttctttctgatgccttctacctcaggtactctcttctctatctctctctcatcaacaaaattcaattttgccagattccagacgtcaattattgggttttttgaaatgttattatgtggatcaaattttatatttgtgatcgttgtttttctttttggtgatagcaggggtatgtaagcgatttgatccaattgggtcgtatgaggttcttggtttctttaattgagagtcggaagccggtaaggctgttcatgtatagctatagcatctttctacgcagaaagagatttttcgcagattcaaagaggttcgtttttcaaaattaaatgccgatttaattgagttttccttttgaaatttcgaataaatttctggtttttgatattccttggttcttgtaaactttgtattcaaattgaaggatttttgttttttatttgttataatttttttgtaatcttcagatttctttagaatggttagtaacagaactagatggagtgtttcagccatttttactaatcataactatttctggcaaacctattttggggcttgtttgctaatctttaatgagggagattgtgactgggattggtttggaaaagaacaagtcaaaattatgtgtgcaagtaaccacataaatagaaaacaaataccacttcttttttagttttatttcatttccaattatagatttacttatacttagctttgtctcaaactttattttggtctgggttttaggagctaaaaatatcagtcacttcaggttggaattcagcaggtgggttggacaaaattgatactttgactggaagtattgtgctacccctgtcttttggatctgtgaagtttgggataagagcaaaaaaagggatactatggctgaaggagaggagcttattcagcttaagttccgaatgtttgatggaacagatataggccatagtacttattcatcatctacgacagttgcaactcttaagcaaaagctagtggcggagtggccaaaaggttagctgtatgtttctgtttctgtctatttctcgttttctcttattctacattgaatatcaaatcaagaacttgagataattgtgagctttttttgcactcaatgaacttgtgtctactaactggttgatatccccttcactgattttgattatacattgagtctttgagtatctttcacattcccttgacatgttaatatttttccaacacaatgaaagtcttcagccgcttctattatatcccatgatgtcaccaagtgtacttcagtttgataacttacgagtctgtgcatttacagataaaacaatcgtaccaaggtcagtaaatgatgtaaaactcatacatgctggtaaagttctagagaacaggaagacactttctgattcaagaataacatttggcaacgtacctggtgaagtaattactatgcatgtcctggtacagcccactcaacttaaaaagaagtcaggtgagtgtgtgttcattcatgatgcc

SEQ ID NO: 19095 - DNA, 7734 bp, Cannabis sativa
  modified_base (5912)..(5914): a, c, t, g, unknown or other
atacaacctttccccaaaaaaagtatgcagctattccattctgacacaataccaatgactctctctccctctgctctgtttttattagaaagaaggggtccttctcatcactctgttttatagtgatcttttctggttttttttttcgtatatatttattacgttacagttttcttttggacattttttttaattaatattattttttttatacttttggacatttattttgttaaatgaagtatgaactggaatgaactgaagaaatttgacacacaaatcgaggatggcttattgtgtatcggactgtagtagattcccctctccctcttcactcctctcctgtctcagctttggatcattttcgccgtgttaaagtttccttctttatttttttttttctttttttctttgaaagggttaaataaaacccatttccagagtgccaagagtagaaaaaaagaaaggcagattaacactcgaaagcgtcaataattcattactttctcattcttgttccattttcccttaatgggatttgtgttaatattatgactcttctcaactacttctctttacttttcatctgttgctctatctttcataaaaaagcaactttgtcttctccattttgagctcgcaagccaaataagcctctaaccagtcattaaacctaagagaaagttatactatttgttcccattttcgttcgaatcgcacctgctcttttgggcctgaaggtgttttgtttactctgttttggtctggtacaaactatatcgtattggttcaaagaagagtttttttttttgttctttattcttcactgacaaagtgacaagagaaaagggttttggggtctggtataaagtggggtttagagtattttttaggctgcgaaaaatggggttgtttgtttactaagaaacccagcttttttctctgtttgaagttaggtaaaatgggttcatttctctgagggttttcctgaaaatgggctgtacaaactccaaaaacgaaaaggatgaagctttgcgtctctgtaaggagcgtcgaaggttcatcaagcaagccatcgattcaaggtacgctcttgcagctgcccacgtgtcctacattcaatctcttcgtaacattggcattgctcttcggcgatacgccgaggccgaggtcttgatagaatcttctctgtcgatatctgacaagactccatctcactcatcttacccttctccatcgccgtcacatctagccgaagtttcagactcgccgctacacaatgaggtggccgtttcaccggcggtgcctgcattgaactacatgaggtcagggggtacaaccgcggtgactgttagcttcagtcctgttaatgatggttatgtggaagaatttccaatgccacctcctcctcctcttcctgagccagggtcttgggatttttttgaccccattgatgagaatgacagcttcagattcatggggaacaatgaagtagatttaaatttcagtgaaatgaatggatggaggcagtttaagaatgagggagctggttccaaaggaggtaatggagttcgtgaaggaacttcaaggactgaaatggagcaaaagacttctgaggtcccacgtaattcagttagtgaatcaaataagaacggtgatgatttgagtaatgcagtaaaagttgatggttctcttcaagagagtaatggtgagagtaagcagttagacatcaaacgacatgttaatgcaccagttggcagtttgccagggaaacttgcaattgaggcgcatacaagttcaaagaagaaggcaccagcagagaaagacttaggtggagaaagagaggatccttcagagtttattactcacagggctaaagattttctttcaagcattaaggatatagagcatcgattttttagagcttctgaatcaggaaaggaggtgtcaaggatgcttgaggcaaataaaatcagggttggttattctgaagctaaaggtaaataaattattttggtggggttaatgcctccactttttctttagctactcaatttgatttgtcgttatttaccatacttttgttttttgttgatacaagttcattaataaatgtttcttttgttttattggcaactctttctgatgacttaatattttcagggagatcatctgctttggcatttttacaagcttttcaggttgcttgttgccaaggaaattcttcccttatctctaatggtaaggtcatgagtaatgtcactagttgatgtgtatctaaactatatgaggtagaatggtaggtagtgtttggatgggaagggagctaggattagaggtaaattcttttaacattgggaggccatgaaagttttctcaagaagaattctgtctattcattcatcaaaaatttatacaatctactataagggtttggttgttgattcaaattatgcagacatcaccattccgattgcacaactcaattttttagtattagagtagtcattacacaatctaccttgattggggataacttattcattcaaagtacattcaccatctgtgtctataaggcaagctgaaagaatgagaatctctgttcttccctctcttcattgtaagctcttattttttttgtagatccttcacaacaaggaacaaaggttatcacatggaagcgaacaacgtcgtcaaggtcatcttcatcgaggaatgctcttgccacctcaaaggaagacggggatgatagtggaagtgactttgttgaggaattctgcatgattgctggaagtcattcctccactcttgatagactgtatgcatgggaaagaaaactatgcgacgaagtgaaggtagatattcataccagtattggctagtgttttcaaatgtttccataaaatcagcatatgttcactcttgtatgtatggtgctaagccaagccatcttgagtaatatctttttctaatttgatcttggttaacctatgtagtacttgagggactgggacttactacccaattccatggtgttttgatttaggagacagacaaatattaacattttgtttttacatctattcggctatagtttctttagtggaaacaaaaactgcataggcaccagcagcttcccttgcacaaatttcttgttgcatattctattttgctcagcaaatgcttgaaattctgatccagatggtttctctgttttttgctctgtttttcctctctttggggatactctctattttctttgtgcggacagattcttttttctattagtatttttagcttaatatcaattttttttcctaattatcaataatgtgagttgcaacatgtgaatacattggtacttaggaattaggatattggaaacataaattataaatgtactgctccactgttcttgagtactcatgtaactcttgatgttagaataggtggtgaaattatattatgtcctgtaattttcctccttttctaaccttctaatcctaacaggcaagtgaatccatcagaaaggactatgacgagaaatgtgagcagcttcgcaatatgtttgcgaaggattgcagcagtcaagcaattgataaaatccgggcggttgtgaaagacctacactcacgtataagagtagcaattcattctgttgattcaatatccaagcggatagagaaaatgagggatgaagagttgcatccacaacttgttgaacttactcaggggtaagcaacatgtttccttcccaccttagcaaattgttaaaaactgccatttcttgatcatgtgagattttgtgcagagatatatgttggaccttgtaactgacataatatttatgctcacattatcaatttttggatttgttaatgttggctgcagaatgatcagaatgtggaaggctatgctagagtgtcatcattctcagtacatcacaatctcattggcataccattcgaaaagcacaactggaacgccgcaaggagatgcccacaggcagatcatggaccaactcttgcaagagctcgaatgtttcggtcttagctttgcaaaatggatcaacagcctcacgtcatatgtggaagcgctcaataattggcttcagatttgcctccttccaccaagagagcgctcaaggagaagcctgtattctcctcgtcgatctcttggcccaccaatatttgctgtatgtcgcgaatgggtaattaagataagagggttgtcatctaatgaactgaccactgcgatcagaaccttcatgtctgatttgcttcacatgacggagaaccaagcagagctggagaagaaaacagttgaggacaagaccgaagaatcagaaaacaaagatgatgagaacaacaacagtgattcatcatcgaatctcagctgcatacaagcaagcttgacaaaagttcttgatagactaacaaagttttcagaggagtctcttaaaatgtatgaagatattaggcagacaaatgagactgctcgaactcaatattccaactgcagatccaatagatgttgaaagggttatgtaattaggagaattggagtacatcttgagtttcttattgggacattacattgtataaagttcaaggcttgcaaaaatttccaataagatatttaagaaaaaaaaatgaaaaacaaagaataaacatattttgaattgagtaccaaaattataaccaaaaactttatttgaagtagggtgtttcatcaaattgaatatgcataataactcaaatttaatctagtctataaaagtgtagattagatcgtttattttagattgattattttttaatattgaattatttaatatttattaaaaaatatttttgttcaaacaattaacaacaaattaaatgaaattattattattttatatctctaacaacaaattaaaataaacaaaataacaaattaaaaggaaaaaaaaaattatatgtatgaataaatttttaattttattttggattctattttctttataataataaaatatacatttcatttattaaggtttgaaatatattcatatcatatgtattaaatttgtaaagtacaattttttacattaaaatattaattgtatatataatttttttgaaaatatttatgattgtaaaaaccattacgctgcactcaaaaaaaaaattgtaaagtataattttttatattaaaatattaattgtatatataatttttttgaaaatatctattaatatgactatgtaacacaatttttgattaacgatattttttgagttttctacgttaaagaatatcttatcaattaatacaattttttttattaattttataatattattatatatttaaaaataaaaatttatatagatatttatataaagaaattttaatttaaatttaaaatacttaaaatattatatatttttaattatatttttaaatttattggtttaactttaaattaaaataaaaagaaaaaattaagtatacattttatttaaagaaatttaaatttaaaatattataaatagttttgaccatattttttattttattattatttattttatattttaaattgaaatgattgtaataagaaattgattgttttccattttagttatagtaaaccgattcacacaccatatttttcgtaaagtttgaaaataaaaatttttatatcaaattataaacacactcaaatttagttatgtgagttttggttataaatatagtaaattacaatatatgtattatcagatacgttacctaattaaaaaataaataaaaaattaaaaaatacgtatatataatcacattcaaatgatacatcaatgtagcaatagttaaatttttttttttaaagatcaaaatctcaaaccctatttcaaaaattaaaaaannnaaaatacattacctaattaaaagaaataaacatacatgtattgcacttaacatcacttaattgaacctaattaaaaagaaaattaattatacgtacaatattgctcctaacatcaacctagtattatatatatgtaaattggattggatgagttgctttagcatatcaatcaaaatctaatttgcacaagtgcaaattttaaattttttaatctaatttatacaagtatagatatctacactttgtgaattaaattttatggattggatttaatattttatgaacactaaaaattaaatttgggttccaaaactttttccaaagagcttatggtagtcttagtgtataggatagatatcaaaacaactccgaagctctgctcttattgcacacaattattttgttagaattaaatatatttttcgtaattaggatcgatgaaattacttggttgtatgtcaaaatttggatggtgaaaagggaccttttgaggtaaattggcagatgtttattaaatgaaacagataagtcattctcttattaaataaatgaccgctgaaaaaggaggtgcccattggtgagattagatgagaattgaatgcattctttgttgtagatgatgccacatgatcttattatatatatatatatatatatatattttattagggagggaagttgaacttatgtttggtttgttgtaatcaacattgtaatgaaattataattacaattttaatgtttgatttgcttttaaactcttgtaatgacattctattgtaattactattacatcaaatcacttatatgaaaagtgattacactcctatatctcattaattctcattacattaacttaaaatgactattttacttttattttatactcttttttactagagtagggataattttatcaatttactatctattccaatattcattccaacaacaaaccaaacatagcaatcaattcatattacaattttattccattacattactattaccattacaattaccattctattccacccaaccaaacacctatagaattcctattacaattcttattccattacattacattacaattcttttttttggaagtgcagtgccgtttaagtattatgtttataggttattataagtgtctaggaaaattttaatatataaacgggttcttacaaaaaaaatacttttttatttatatttttaaaaatactgttggaggcgatgttattggttgtgtttgaaagttttttgagaatggttcccttgagaatggttgtagtgaagctaatattgttttgattcctaaaaagaaaaacccagaaagaatgacggatctcagacctatagccttgtctagtgtcttgtataagataatcactaaagtcgtggttaatagaatgaagcccttcatggacaccatcatctctacccatcaaagtgcctttatcccaggtcggttaatctctgataatattctggtttctttcgaaattctgcattatttaaggaggaagaggaagggcaaagatggttatatggcccttaagctagatatgagcaaagcttatgaccgagtggaatggagctttttggaagctatgtaaaggaagctgagatttgctaattattgggtgcagttgattcttagttgtgtgtcttctgccagttacaaggttattcatggtgctcatgagataggtcctatttttccgactagaggtattcatcagggggatccactgtctccatatttattcattttgtgtgcggaaggtttctcagctaggggtgtgcataaatcgatc

SEQ ID NO: 19096 - DNA, 4860 bp, Cannabis sativa
  modified_base (4693)..(4694): a, c, t, g, unknown or other
ataaatcacttcaaatttcttatattgataactaattagattgttaagagttttatttagggcataaaatccaacaagcgccacctaagaagagaagattataaagtttgacaattaagaataaccaagctaaaaatagagttcatgcgttgatcactacgtatagtctcaacacacaacatactatcggattcaaccactacattgttccacttattactctatttcccaattaagtttaatttctttttaaagataattcaatctaattcaataaatattatatgaattcgattctaataaatattaatttcagaatattagatggttcttgatcaaatctatcatatttaccagatgcatttacataaaatcaatccaatgattgattcaattttgcaaaatgatagggattagatctcttagcaaatttaatatccaatttataatcctaatctatatacttagcgaaaataaaaaatctattttaggaatatatatatatatttttaaggaaaatatgacatatagttatgatttctataaacgaccattttttttttggtaaggacgaccatatgattttttgtatagtaataaaaataaaaaaagattaccaacttttagcccaccataatggccaaccatcgatcaattacacctctaataaagcaacgaatttattttagaaaaataaataattaaatatgttaaaaataaaaaatataaaacacacgactataatctcagagaactgacgtgtcatctttttattgggtaagctacaaagcttgactaaatcttgacttcacgcaaccagatccttcttctccaagtaggtgaaaaagcaaagactatgttctgtctctctctttctcactcgcccacatattatattttaataacattaccatattactacgacaaccactattgctttctacctaatccaataagggaaaattagagagaaaattaatattttctaccatattaattttccggcaaaattttctgagctaacccttttaattccgaaccttgtctcacattcccccccctttttttttgtctctctctctaaatcaatttcaagagataaatatggcgaaaaatcagagtaagatactgtggtaaaataattacggttgttgttttatttaattcttatctgtttatctatctgtacaatcgaaccttaagcttgctttctagggttttattgaatcgttctgaaaacttctttttgttcttgtcttcagatcgcttcgatttttaacgttggtctccgatctactaacgattatcatcaatgtggcactcgtctcggccgggttgactcattgtgaactcactgagaggtctaaaggttttttgacattcaatggtaagcggagaaaatggcagcttctttagcgactttcgagcgtcctcgaccagttgctcctaatacggtatccatctctcttttctttcatttgtttggttactgagaaaatgaactgaagattgaccggaaagtgtttggatcttatggcatttatactttacttagtttagtttgatggaaattgaccctaggtttaaacgaatgtggactgtgttgttcgaacttgaaatgcaggttgtttttttcctttttatatcacatagtggggactggggagtatgcaagcttgttatgcttctaaatgaaatatatacttgatgacttaatttccttactcattttcgtagttagggaaagagagggagatcattgtttgttccttgttttttttcttaaagttctaaattgcattttatataaagtttatgatgagactgaggaatagttcagggcacatatcatgatgattctaaattgtgcgataacttgtccataatttaagattttatgtttcagctattctgatagtatacatttccttattttttcctcttgatggtatacatgtcaataatttaagtttaatttttctgctattctgacagtatacatttccttattttttcttcctgaagatggaaagaaatttaagcaaccctggtgcccagtttggaatttgtattatgctctaatttctccgtaaagttatcataagttcagagtttgtgcgatgagttttcgctctataacttcatgtaaacagttaccaaattcaatttgaatctattttgcaacacttcaatttttatagttgttatgtacaagctttgtaactcttagatgtgatcattttgttttgtctaatgtaaattcagtcacttggcagtttctttgaatgtgatatatttgtttggtttttggttcttctgttgttttccattggagtttttggaatgctgtttgttaaatttatagcttattgtgtttcataattttcttgttgcattctatatctttgtgcttgctgtaaatatgaactcccccctgcctgcctttgtgggccctttactaacagatgatgattcagcaggttttcaagagtggtccacttttcatatcttcaaaaggttggtaaacagttttctccttcccttagtgtatacatttccctagaatatttcttttaaattgttctaattgggtgcatgtgcacaaacacattatattttgttccaatcaataatttggttgatctgtttatggcactcattgaacttgctttcagattgtccaacatattagattttggaagtacgaacagtcctttataaatttatctatacattttaaaaatgcttactaaattgtctatacgttatctctgtaacgtttatcaataaatgctgccgttttcatataggaatgatgttaaatgtttccatatagaatccatagaattttagtattaatcctttgtatgattcaattattctacttttagattggcgggatatattaattaacaaagtaaggtgaacaaaatgatgcaagttgcttcggagaaatgccattgtattgaaatggacaatgtaactgaaaatcgtttccataagctctagaaatgagtgacgaagatgtgacatgtattatgcctaatgtagtaaattgcaatgcttctgcatttgaatgtttgatatgtggacaatatggtagttagggcgtgtgctgtttttttcctttctttttcaatcatcttactgtttatgtgctttttaaattgatttttaatttaactagacggctcatggtgtagtagaggcatttacttcttacgtatatggatattttatgatctttaaaaggaaaagaaatatgccttctctgttaatgccctcacataacatggtcaccttacgacttaccttctcaatttttatttgttgaaatttcaggaattggctggaagtcttggaagaagcggtggtttattcttacacgcacttctctggttttcttcaagaatgatcctgttagtgctacatactttatcccttttattttggttactcaagtagttgtcaattttactgtgcatgtttggtgagaaacagtttgtatttttatgcaagttttttgttgtcgttgtacttagctttatttctatagtattataatgctgagttggtgttcatttatatgacaaagtaatacaagttataaactgtgtggtatgtatttatagagtgcacttccgcaaaaagggggtgaagtaaatcttacattgggtggcattgacttgaacaattctggaaggtatgtgaaaacaatggaattatattagtgctacgctgttgcttttgcagtatactcaatctttgcaacttgtttcttatagtgttgttgttagagaagataaaaagctgttgacagttttatttcctgatgggcgtgatggccgagcttttacccttaaggtgatgcactggactattagatttttgttttgtctactcttctctgtaagagcagtgtaaaatgtactgtgctactgagaaattattttcatgttctcttactttgtcaattttcaggctgagacatcagaagatttatatgaatggaagactgcccttgaacatgcccttgcacaagcaccaagtgctgccattgttatgggacataatgggatttttcgtaatgacacaaatgacacaatggaagggtctttccctcatcaatgtttgtacttgagcaactgatacttcttttagtttttcatttagtgatggtattaaatttttcgagttcctttacttatgaatattccttgttttttatagggaaggataagcgtcctgttaagtcatcagttattggacgaccaattttgcttgcattagaagatattgatggaagtccatctttccttgagaaagctttacggtttttggaaaattttggtcagttgttttttcaacaccatcaatgacatttcaacctttataaatatgtagtagaaaataattacatgtatgttactatggtaatgcagcttaacggctaggtccatatcagcttcaatttatatgatattctctttctttttctaggtttgcttggcttttttattttttatttaataaatattttatgttttaaaaggtcataattaattaggtagaatcttttatcaagatttttcttgcaaattggacactgatattaaaaggagaagttaagaagtgcattgttttctcatctatatttcatacattttactatattctctctctctctctctcnntctctctctctctctctctgtcttagcttctgtaactttcctgaactttttgttaaatataaagatgtaaagaataatccaaaatcctgatatgggatatcgcttagataattatcatctgttcaataggaagttaacttaggaacaccaagccaagactgacatg

SEQ ID NO: 19097 - DNA, 3811 bp, Cannabis sativa
catcagagaaataggtattaggtaggggacctctctatacattcgtacacaagattccatttttttttctttttcaaatggcatttgaagcagcagtagaacccaccattcacaaattgatgtgacattcaccctaaagaaaaaggctctcatttatacctaaaaatgcatatttgagatattgagagaaagggcttacacaacatggcgctcgttccagaagatggagtaggaatgaaattctgtggtggggtcaaaccagaggttcaatctctgttctctgttaccaactccattcacgtagagattggtctgaactgagtaaggttctccagtagagtttcccaaaaactcgaaatcaaactcattgtgagttggaccttctgatgacatctacattcaaaaaacaaaaaatatatatatgttaaaaaatgatcatcagtttacaatatgtattattaagtagatacatcgatagttcactaatcagtcacaattatataagatttatggtacttgttgataattacaggtgaatacaatatcaataaatagtattaaatgctgtatttaagttagtacagagattcacgagtagaaaaaaattaaggcaggtaggctctagtagcataataataatggttgtagtagccctactcattattaaacaaatccaaaggtaaaattgtctgtaacggggaaaagtaaaatgattcaatgcaatagagtgcactctgtttgtaaataatttaactgggggaccccaccaagtcatctatatgacccccctaaagtaactttactaactattggctgagctgtgttgacaacattacaaaatgagaacgaccggtctattcaagaataattactgtactgtactcaaatatggtaacactaataaaagaggccaactattctaattaatataatgataatagcattatagagattaacacaaaataacgttttatatgtgcttacatagaaagcggtaacggttcctgcagaatcaccctctatgagctttatctgaatagtaactttcccaaacaaatacttgttctttgattgaaacccagctcctgtaaaacccagcaacagaatagtttagtcagtttaagagtgatcaaaccgaaacaaacacggcacatggttaaagacgaaaacttgaaaggtttatatttctgaaacattttcaatgggtagcacatgcagatttgagaggttttaaaattattaagtatcgttttactaaaaacattttcaatggtttgtggttaaagtaccggaatagttgtcaagtttgagcttgagaagctctccttcataggcaaaatggtctaacgcccaactaggctggaatagctcatcgaactttgctgagctaacagaaccaaccaaaaccaccagacccactaacaaagcaactaaagttgccattagagaagagcagagaaagaagaaaatgtagagaagagggaggggtgaaaatgcagagcagagagaagaaattctactactacaagttgatctgtagggacaagcaacaacacccggcttttatagccaattctattggcttgtttcacaagccctttgatttctctctcttgtcaaattagccatctcattggccacgtcatcaagctatgtcccagctggacaaccacgtagaacacaagttcccgtaagataagggaaaaaaatctgagaagggtcacaaagaaataaaacttaaaaaaatatagccgttaccaaattccccacttagctggacaaaagctgggtactgtgcgagtgggcacagcgtacggcactcagctcagaacaatgagtgcagattgtaaccaatgatagggctccacgttgcgattcacagctggttggccaggctgttcaattgtcagtggcgatacgagttaaaaggagctcccacttttcctcgcaaagcttctgctgcatgtctatggaattctatgaccaatccatgcgcgagtagagatatttacgtactcgccgtgagaaaacgacgcgccattgaaacgacgagcgttttatggcgagtggaggaaacagtagcagtgcgaagcaggtgggccaacaacagtgtcgtatcgctttatcttctttgtaatttgtttttactttggggagtgagagaaaagaagtgccagctgtatagttggatcgcactgtacattgccgcacacattttacatttattattattattgttaaatcaaaacaataaaaacacagaatattttaatcaattataattgtttcttgagattaacatttgataaaaatcattttaaaatttcgatttactatacagaaaattataattttggggagatgtggaacattattgggaatatttatgatagaatatggtttttcaattctctaatagaccaatacaaacttttgcagacggcaaggatgttgagaagtgggtgagtgggtctgctgcatgactgggatgtgacagatttggcaacccataaagtcatatgctccacacagcaaataatgaaaaatggttacttttgtttatttattaacttttctttttgaaaggttttatttattaactttttgggtagataactttgcatgattcatctcaaaatgtgtgaagataattttaattagccaagttgccttggctatccacattttcttaacatgggacaatagaattttcatttcataattcataaaatcaagttcaataaaagagtgtaccaaagttagagaccaatttatttttctttacataccctctaatctcataaatagctaaaaaaaaataacaaaaattttatgatttgttaaacttaatgtgaacgagaatcagttattatagttaacttatgcttaacaatttattagttagctgtattagctgtcaagttgttagtttgttaagattttagactcataatttgttgtatacattgtatttaagttactattatagtacatttactctctaagaaattcacaattgaattcttaacctttctctatctttctccctactttccttcccttctttcctttctttgattacaagaatgtctagaaaatctaacatagtatcaaaataccattggcctctgttgacggcgaatgttgttaccaactccagtgatccttcaaactctggtgtcagtggcgtacaaacaacaatcatgtctccgacagtctaggagaaacaatgggaatgatttttttttctcttatgtatttcaatcacagcttatccatcaagctcaacgattataattttttgttgtgaaagcaacaagttctagctgcaattcgtgagaattggttgcatagctacacaatcctgtattaaaattccttcatgttgaagattgtgctctcaacaaaatcaatataacctttcttgattaggaagctcaagatcagccttttgtttcttggctactatcctcgatgacgccaaatcacttagcacgaatggttggatgtgattcttcaagctagacttggtcaactcttgaaaacttctttactcttcaagttcgtgccaagagattctgaaattttgtactaagctacagaatctcaagaaaggctcatcatcactcaatgaatatcatctcaagatcaaagaaaatgtggatctacttgcttcggtgggtgaagtcttatctgtaaaggatcacatagcagcaatattcaaaggttttccaagtgaatatgatacttttgtcatatccactaataccagaattgaacagtaccatatggttgaaatcaaagatctttt

SEQ ID NO: 19098 - DNA, 2563 bp, Cannabis sativa
tcaaatagttagcaaaaatagaagacaaccgggtataagaaactgcttgaaatttgccattttcgaatcacctactacaagggctgtacttcatattatcaccctggctatttcacatattatccgagctgtgttgctgtctcggtgacaagagaaaggaaaaaaaaaattacaaatggatattaattgtagaaatttgttgcatcatataccaaagaaagaaaaaacttctgatttctcttcgaaatggtacatttccttaaaaacctaccaactacagttgttctaatagaatcacaccataacagtcaatctttcacttcttaaacattctagatttaggtgaattacattgcaatggtgataggggctttcttgttgtatctacctcagtaaaatcaagcttcttttcaattgggctactaatccttgaactagacgacttccgcttgtttgactgcaaaaaaatagacaaagcttgagactagatagatccaccatagaaagttccataaatctagaaagctgtcatctaatttttcaccttagctgatgcattgcttccattctttccactagaatcattgtggattctttctttacagcatagtgacagcaatttcttgttttcctcttctagcaaattgttatcttcaaagagaaccttgacctgcaccatcatagcctcacatatcatttttaaaccaaggatccgtagaggaagatggacggcaagattaagcagtgggagtggtccttaggattgtctcacctcttcttcagctttacaaaggttgattctcagatgctccttatcattctctagtacctttaacttggaagccattgacaggactttttgagttgatggctttaaactataaataataggaaatgaatatgagacttgatttataatgataattatacaactcaattacacagggacttacgaattccacatttctagcaacttttgacatgattcgtgattgctgttagcttctagaaatgaccgccccaacgcaacattttcctcattaatcaatgtccctaaaacagactcaagtaaggtgtcttgagtagttgcgcctagagatgaatcagccttcaaaccatagcaaaaaatgagagagcagttcataactaccataaatatgaaggctttatcataagcacctgatcaatttaccgttgaattcttttaagaggtgagtgctattttattacctcaagcttattaagcagtgaaatattacctatataagatcaaagcaaacatatactcggaaaaaaaactaattttatcatctactaaagtatacattaacacattttcaattcaaagaagaaaatcaaaaggttcttcgagagtaaattcagtataaagaaagtaatgcaagttattatagtttcaatctattaacaaattgccattttcttccatatttatcaaaacaaaagtagatgttaagagaaacaaaagaaaacacaaacgaattatagacattaccacacgcttctcatgttgagacttgtagaacagcagttcctttgataatcctttcatttcctcctccaactcttgacagcgaacctcggcgtccttggcacgttgatcagcctcattcccaaagtccatcagtgcttccctgtcacgatcatataacgaacactctcgttcccatttgttacactggctcaagagactattgcactcagatgccaatttctgattttcctcgatgaacttcttcaaagctatagcattcatatttgattcagcctaaaaaccataaagaacacagaaaataaacaacctaaatcacacagaaacaacctcttcaagacacaattcaatcctcttcaagacaaatataaaagaaaaatgccagaaacttttttgcatggaagagatggttcttggagtgcaaattatgcatcaagattcaggaattgaaaataccccttaaaacttaaaagatacccatttctacatctagtacacacattcaagaggaaatttttaggaaggaacaaaccctaacgcgttcgatggtttgatctttttccttcaatcgggacagtagtagcaaatagcgatcacgaagttgggtttgcgcttcttcaattgatcgaagcttcaactcaagcgtcttagttgacacaggaaggcctacggtgtaatcaatcgaccctttgatgtactcgtcgacttcttttggaagatccattggcgggttccggtgctgtactgtacttgaaaggccttacaatttctgaaaggaatcgaagaagcttcgatgagggagggtttccgaaattgaaaccctagaaagcaaaaatacgatgaagaaaagaagagaagagggggtttgcttctgtttgggtatgaaagaaaaagcttttggggaacttttcagttcaagatttcaaattacaaagttgaaatctcctagccgttagagcgcccttaacatttaattaaatatatacataaataaaaaaattacatgaaaattcaaaaaattacatttttatttggagagttttatttgcaacc

SEQ ID NO: 19099 - DNA, 1837 bp, Cannabis sativa
aaactctttctctttttcaaaaaaaaactaattgatcttacacttatagtatctgcagatcttattttattcttattggaacacaaattactcgattttaaagctatcctattatgaatgcacgtatcgttggataattttattactaattgtattattttataagattttttttggcaggaaacagcttggaggtaagctagggagttccttacaaagtgatctgggtgtaaaaacagtcggagatttgttgcagtttcccgaggaaaagctgcaagaactttatggcgtgaacactgggtgattatttattattaacaattttctttacagatattttgagtatatatttacaacttgtcttattacttgtaataaattctcttgtactgtgtgcaaaattacttccctatattggccaagcagggttccaacttaaggttttgttctgttttgtttatattttgccttttctatatttactttggcattattattatgaatttctttttcagctgtatagttatctaaccgatacagcatttgtttcccatttgcatatctagcaatttactatgttgatattgatctatatattttaaacaaatggcagtacttggttatggaatattgcaagaggagtcagtggagaagaagttcagggacgccttcttcctaagagccacggatcggggaagtcatttcctggacctcgagctctaaagacatttgcttcggttagtaatattatcacataaagataagtgtctagagtagcatatgctagctttatggtcttatcactggggaactgatagaataatggtagaatagggggactaaattgatggttagtgaattagtttttttttttttctttctgaagaagattagtggattagttggcataggctgttttgctaagtgaatcccagtacgtggattgtgattttgtatgaactttgttctagggagagtgaggtctcttgaatatctcattgttctagtatgtgcttatctttttcttcattcattgataattcctagatctgttttcctccgcctcaagtgaggcttttcaattcattttggggagggtcctattaaagacaagaggatcctttctcttttttcaaaaaagaaataattactagatctgcctgattttccatgttatctctctatccttgtctactgtctgtgctattgattggaggatcctatttggtgtctatcattggatcatttattaattcagcaaaagctgagccaacaagccaaatgaaagcttgttgtgataaatttgaactcttattattgtatttttatgaagatgtaaacttgtaaatatttttaagtgcacagagaaaaaaacaatttaattttaaggcatgagaatcactctgaattattatgcttattatacttcatcttactaaagaattatttatagtgtgatatttatggttgtcagggaataatatcctctaacacaagaactgcttcataattttatttttagtttttcctctggcgtgaggttccctaataaatttgggaggaggtcagtcactgacttcacctttgtctctttttcaagagacaggcaatttaattttaagagaaaggcaagagaatcactttgagttattatgcttattgtacttcatcttactaaagaattatttatagtgtgatatttatggttgtctggaatagtatccttcataattttatttttagtttttcctccgccataagtgaggttgcctaataaattttggaggaggttaatcactgacttgacctttgtctctttttcaatatatatatatat

SEQ ID NO: 19100 - DNA, 6532 bp, Cannabis sativa
tatattactaatatctctgtatattaataaatccatatatagaaggaatatataatacattatattgaaagcattttgatgtaaaatctagttggcaatgtgcactaatcgatgactctcatcctcgtcggtaacccttacttagatttcactacccacttgacctttcttttgtattattaactggccaccataaaatcataacgttttatagttaaaagattttttttcaatctttttttaatcatgaacactatttattttgagtattaagtaataattaaagaaatatataaataaatggaagtatttagttggatcggggctaagacaacgtgtgtccaaatgctgccataatagattcaattactatatatgtcaagaaagctgatatatatatatatatacttattatttatatgtacgtatagaagaaaaaccacagtaatagcgtgttgactacaatttttgatgatccaactacactttaattattatatttttttttttttatttaagcgtttatatattacatcagcataatttgggactcgaacccaaaacttccaatacacacgcaccccttatagccacttaagctagcctcaagtgatttgcactcattcggggacaccgcaagatgcagatcatacgatcagtgcaccccacgaacgtcatcaccttaattattatagcagcctttacaatttagatcttaaaatatatacatgcgtatatacttaattattacataatccctatattattatatgatctatcattaataaatcacactttctgatatataatcttacttaatttattttttcagtgtgtcacacacacattattatataaataaatatatcatgaattaaactcatttatctacctacaatgattatgagaaaagtattaattgaagtaagtccacttctaaaaccgcgtgacaactcattagatcattaaaattgatccaagtcctgaaaccttacgtaacccattctcacattttattatttggtttacaaaagttatatatgctaatatataaagttcaccatcatttattatctttagattttttttttaagtatctatatttatctttaacataatccttttatacaaaccatttaatcatttgacataacacaaacaaagcatcgcgctactatagaactatatcacaatctgttccacgacactacaaaagtgtagatacacattaagatggagaaactaaatttctatgtgtattgcgcacaacattgtcatcaaaagaaatatatataccaactagtctcgtgttcgaggttcgagatctgagttcgggtcagagttcggtgttgggatccgagtttaggttcatggtccaggttctagtttggatttagggtctaggatctgggttcatgttggaatccaagatttaagttcggatatgtgagtaaaaatgtaaaaaaataatgttttagataaaaaaaacaaatttaaaaatagaaaacaacattttgatgtttgatattttctaattttttaaaactcaattttcaaaaaactgtttttaaaaaatttggccagaacttttattaatttttaaatgttatcttctatttttaaaatttgaaaataatttttaagttatgaatcaaataatctcaaagtttctactaaaattaaagttagttagaatctattagaatttagaatcaagaatatatagcatcattctccactaactgactctaaatctcaaaaatcagctcatcacagttggtaatgatatgttatctttgcctgctaacttggcaaattaagtaaagaaactaaacttttttttatatataattggatttttcttatatcaaaaaatttatggtttttttttctttatatataccgataaaaatttaaatgttgtttgaaaatataattaaacttttttcttaataaaatatcaaatgtagcatattaaaaaaataaattaagtattattttttatataaataataataaaaatacaaaatatgattcttttaaaaaataaatttaaggcattttttgagaaagattttttgggctaagtgtgccccttctgcgttactcttgagctgaccctaactatatgtataacgagggagagggggccggagggaccctgaccccctaaatattttaatttttttttaatttatatttaaataataattgaaaattaaataaaataatttttatataattttacatgtattgcccttgctaaaattttggtttggtttggcttggccattgtacatgtaaattatttgaagggtaggtctaaataaataatattttcctagttaataataataaataaagttgtttagtgtagtggtaaagattttttcaaagtttaaagaggtaatacatttaacacttcaatattttattttcattttttttaaaaataaaatattattattgagaattgaaccacttgtaaataaaaaatgtaaaatgtatataaaagttactttaatacaattatgcattattttacatatattttattatatctaccacattgaaaataaaatccaacataaaatcaaatccatgtcggaagaagccatcaagatttggtgatgagcttcataaatacatgattgattaatccatgttgacagtaggatttagtatttacacatcgaatcattgctaataattccttaaacttttgattatatgtataaatataatttaagatttcacaaccaacaacaaataagatgtgttctgagatcactttagagtattattgagtagtgtaaccttataaaaatacatttcaggactaatgaatttaagcaatatgaatttttgtacatgtatatgaaaatatattcttgtactgagacagagaatacaatacaaggtggagttaagctattgttcctcaaaaaataggattaatgatgtctcattctttcaattaaacctctggatttgatcaggatagcgatgaagatgacgaagctggccacgaattgtttagtacttttcgataaaaagagtggttgaaatggcgataccatcttgtgttcatgtcaaaagctgtgcttatcccttcagtgtctaattaaattttgtattaagagcaacttataaggggattagcagctaaaactattgcctggacgcggcggcgagcctcagatgatcaagtcccatgcccatgcccatgtccattccattgtatgctaggggagcatacatccatagttcatcagagctcaaaagctacaaaattcagaacaacaaacacagagttagcaactaagaactgaaaatgtaagtaatatgtacatatgttattattgtagtttttgaaataattaccttgatttgaagctgcaagaacttcacatactggacagcttcttcaagcatagtgctaatgtcaacctgaaatgtaaagtaaccaattaattaacaatcttgaataaggtatgaagttttgaagagtattcaatccattcatattgtgtctcttgtacatacctttgttccatttggtacaaggttttgtagtacttttagcctctcattgattttctctcttctcttctgcaagacaaaagttggaaatttttcttaagcaacaaagcaaaacaaagtactaaaaaaccaatgtgcgaaaatggtttgtaaaggatttaattaccctggcatagacgctttgaggatcggttgcagaccctcttgaagctcttgctttcccactaaggttcaaagctgtaggttcttttggactcaagcttaaagctctttctcctagctcttcatcaacagaatcattcgagtgttgttcctccgaaagggagctgttcgagtgtcctttatctgtgcctgcactattgccatcttcttcattgtcactcatcagagcaacttgttttttagtactcttccttgactttacattcctcttgtgttttggctcctaaattatattataaaatgaggagaaattaggaaaacatattccaatacaatacatctctaattagttacaatttattaaggtacttacttcatgagatggactgatagacctcttcttagaattctcagatgtgactccacttgccacagttgaagattcaggtactgtcatttgatcacattcccatttgtgtggagaaaagtgatcaacaacagctgatgtagttagctggtttacaccagattcttccccattaatggttccattattgctcacttcttggttctgccattcttggctgtgatcaggatcaacaagaaacaagttttcgttttgacattcttcactgaattcaacagagacattattgcttgtcagccaagtaactgggtgagaataaggactagtattaatcattccttgtgagaaactacaagggtaattgtcaatttctgaaacacttgaattatgtgaataagaagttcctggccaaatggtaaatgggatttgatcatctaagcttgaggtttcaattgtcaagtgatcatcatttgtgaccccacagccagctagaaaatagtgatcagaagccatgaaatgatgatgatcattgtgatcagtttcttctgagcaataaatcccattgaagttactccattcaccagctgaaatagcacccaacataggctccatttgttgaacttgattaattaggtagaagagaaaagagggcaattaatgtatttagaatgagagagggctgtatttgcttgatgcttatgaacaaatgacagaagctggtatttatagattagctattacataattaatgaacagagcatttcattgacttaatgaatagaatttcattttcattctttaataccaatcattagcagagatataaattaaaagaagtctcattgtttttaaccaatcacttggtcttttccttatggaggcaatttaatagtacaactaagagagagagacaaagaaaaataataattgattaattaaataatatgtatccttacttgggggggtgatgatgcaatcttcaaaggactaaatgtgtaattaagaattttattagttctgttacttgttaattgttattaatgtatgagtataattcttaattgctcatcccaagcagcaacacaggctgtgtagtgccttttaattggtcagcaacctgtaaatattatcgaacagttaatttttcaggcaagcaaggttgtccaacattattgtattttttttttcttaagctgtaattttaagtacgagaattgttaaaagatattattgtatttaaccccttttcggtgtattgtggataatgtctcacgtggaataaatagtagagaattgagccatatataaaaacatgggctactccactcattgtcaattaattttgagatgaaactccattattctcaacacagtgtcatgtcatagtcaagaacggacacactgttagtaacattaaaatgaaaataataagaagcctccataaaataattataattttaatgtaaagtaattataaatatttttataacaattaagtccctataaataaaattttttgaattttactgttattagtgtaattaagtatgggatgttatataatttaagaaaataatttttaaaaaatatcgttaattaattacggaataccacttataaaaggtgctaggcactactgatgttcaatagtaatacactttttaagtactcgtaagtacaatataagatttcataaatgtactaccatagactaaatgcgtaggagaatatgttaattaaccatcgttagttatatttaataaataaaccaaaaattagagaatcgagggagtactaatttttttgtttattatgttaattatattggtctatctgactatctctctcttattttcaacaattagataaataaataaaaaaagaagaagattggtacccccaagtccaacaattctctataattaaagtatttggaacatgtatttaattttaacttaaactgggaatctatttggtagtacattttttcttcaaaattaaatacaaaatagaatttttatgtgtttaatattgagcaattggtttgacccaggtgggaaccctaagcaaatttatattctgttcaggttagtttggtaggttaggttaattacagagcttattatttatatataacatgctagttaagtccaattgacttaaagagtaaaatgcctttcaattcttactccatatataatacaaagcctttggtaaacaattttcacatctggtccaccaagaaatttactcctcctcacaacttttttgggtttaatctcatcatatttagggagtgtaatgtagttactcatttgttacccaagcatatatttttgttcacatatatagttagtgattagggataatcccttttgatgcatgccagtactgctttcactggtagactcaaaatttcgttcaagcaaggacagaataaaacattcaaacaatacaata

SEQ ID NO: 19101 - DNA, 5977 bp, Cannabis sativa
attaaagacggcgccgtcagttacgccagccgatttacagagactaacaggcttgtccaggagagagccttcggtcgcccggtttttcctaaagcaatcggcgaacttcacgaccactctggcatcgcccggctcctcctgttctacgccagaggaatgttcggactcgtcgacccgactcacgggatgggagttgccaacgctggacttgtctacttcaacaaccggcttctcgccatgtccgaagatgacttgccttaccacgtgcaaatcacgagctccggcgatttgaaaactgctgggagatacgatttcggcggtcagcttaagtcaactatgattgcccacccgaaagtggacccggaatccggtgagcttttcgctctgagctacgacgtcgtttcaaagccatacctcaagtatttcaaattctctcccaacggagagaaatcccctgacgttgagattcctctgcctcagccaacaatgatccacgactttgccataaccgaaaactttgttgtcgtccctgaccagcaagtcgttttcaagttgcaggagatgattcgaggtggctctccggtgatatacgacaaggaaaaggtttccagatttggggttttggacaagaatgcctctgacgcttccgggatcagatgggtggaagctcccgattgcttctgttttcatctatggaacgcttgggaggagccagagaccgacgaggttgtcgtaatcgggtcctgcatgactccacccgactccattttcaacgaatgtgacgagagcttagagagtgttctctctgaaatccgactcaatctccgaactgggaaatcaacacgacgacccattatcactgctgaatctgaacaagttaatcttgaagctggaatggtgaaccgccaccggctcgggagaaaaaccaggttcgcttacttggctttggctgagccttggcctaaagtttctggctttgcaaaggttgaccttttcactggcgaggtgaccaagttcatctacggtgacgagtgttacggtggcgagcctatgttccttccaaatggccccgattcagaggaagaagacgatggttacatcctggcatttgttcacgatgagaaagaatggaaatcaaagctccaaatcgtcaatgcaaaggatatgaagctcgaagcaacagttgagcttccatcaagagtcccatacggtttccatggcacatttataagctctaaggatttggagaagcaagcttaaaaagatggtgataatcgatcttagtgttggattattggatcgacagtttatatgttatgtggttatgtaaaagtctgcggtttgtatattggtgttaagaagcagactccagtggagacttaccagagggatgatgacagattacgtccccggaagatctcctctgttttttccttttcaaatctttttactctttttctttgtattatacacagtgagaggttttacagaaccagcttgtagcttttgggctgtaggtagttatggagctcagctggtttttgcttattctttcacttttattattatgattatgattgtgtatatcataatgtttgcaagtacataattttataaacataaattgcattctgtctttattaatcctaatctctctaaacaaacactctgttatatatgctctgtttctcagttcttatttatgaccaaacttctgtttttttggcacctgaagagtgaagaccgtcgagtaattcatggattgttgtctgtttctatttcattatatttaattttaactttcgttttcgtctgttgtggtacgtggtaataagtgaaaagtaatattggataattaatattatagaaaaatacagaagtgagaaccaatcaatgaataaaaatctaataacaagttttatttaaactctcttctattaagcacgtactagtactaaagaagaagaaaagagccaatgggagtatccaaatccaatgcatcgggggaaaaaaaattgttcaaatatgcaatcaattcaatgcccgacaattgttctgtttactcaaaataaccgacaattaaaaactaataagaggaaagtgccaacatatttttaatgaagattttttttattgttgcattgtcaataattcataaatagtactattaaagttaatgtgaattattcaataaactatatatgtaagtgtaacttgtttaggatttgattttgagaggacccctacgagttttttttggtcatgtttttaatatatttatttttatataataagtggtatatatatgtaaatgtttgccaatgaggggatttgatggtggtggccatttttgattggtgagatagtgagtgtactagaggagtaaggttcacgctcggaaccaatcacaagaagaaacatcatgtcggccgacttattgatagattttttagaaggttaacaaaatacatatatatatatatatgtttatatatatgagctattcagagatatttcaatggtgacaccataataataaatatgatggtcgtctaatcttcaaggaaatggagagagttgaaatggaatacttttcatggtcaactttgccaatgatctttactggttttagatgaagatgggcatatcaatgatatttttccacgtgactaagtactttattttaggccatttttttaatactaaatataatcttgtgctaataaaataatgtacacatctcttcaaacggatatactatggtaatgatcatcatcacctacttaatttcataaatatctttgcacactttcatatttaaactgttttagcgattttttaaggaggattattaacttgtggaaatttacatcctatctccaaagttcataatttaattaattggactatataaatttcattataggactccgcatgcaattaatatattatctactataattatgttgtagaataaagggtattaatataaatgatattagctaaagtcatacagctttaaataaaattgtcaaattgggtaattgatattatggagctagggtatggaatggatgacaatatgtaataatgtcaactcttgttagaatgatatatagtgaagaaaatattgaacatgttgggaaatttgcagacaaaattagttttagctgatgaatgaatggttgtgcatcacaaattgcggtttatcttcgaatagaataaaataaatagaaaaagctctttgctacttcccaatccttttatagtatattgcttcgggtgcttttatataatattattatcattattatttcctattcaatgcaaacttcattacaaataagaattataatgttaattcataaaggcattttttctagcttatatattttcaatcacatgtgcagggtcactatctctacagaagtcattgttaataagtgtaacatttacccttattaataatctcgcttatatatgttaatataatagagatgaaaggggaaaaaaaggtttcgatggatatgtgggcatatatatatatgggcatttactgtagatgatataaaatgggtaataataatttggacaaacacattgaatggtagaggggctcatcaactattctactgaagctgatgaataatgagtatatgtagggtatgtttctttttgtagtttattgaagcttttggggtttaattttggatgatggggtatatccttattttgatccgtatgcaatgcatggtcttcttttgttttctacatctccatattatatcatctatcgctacccaacacatgtgctgggtttcatatcaaaatgtatataccttttgatgataatgaatatccatcatcatatataacactatgttgttatttatttaaattcattacttatatatatacttattattagtaaaggtaatgtttaattattcttccactttttaaataaaaaataactgaatttacacgtgacttcatcagttagttcaaacataaattaaagaccattaattagccatatgctactatacatggttttctgaacataataattaataaagctctccaattatgatcttgtgctaaatgctatacaaatatatatcttcagttatttgagtttgaggatttaattccttcgctataaattcagtaaataattgcgaaatgtaaataaatacaaattttatgtttggtattttataataattatatatattgaattaaaatatataaaattggatcaatactaaattatataagtaataatatgcaccaaaatactgtagttaattagtgacatacattctaatatttttcaagcaattaactaataattattatgggagctaggtaacactaaaaaaaatactgcagtatacatcattgagtgtatcattatggtacatatatttcatatgcacatattacgtactactcttaaataaatgactgctacatgattaaatcaatctaaaatagcattaattataatcacttatttagagaaagctaaattaataacgcagcaaataaatatatatagagacatgcaaccaacttgggtggttgattggatatatatggcagctgattctgaactatatatatatatttatagatggattgcatggtatatattaatgcatgatcgatcagagcaggtataccgtgatatatataaataagtaataagttagatatacatatataccgtcctaaaattaaacaataattaattgagatgttaggcatattaatattgtatgtacatattaattaatttatgtacatatatataaatattgtattactatatagtaatgcatgtacgtctgaatctataaataagagattctatttgacatttatatgtataatagtgtaaaatatataccattggaacatgaaatccagatcgatcattttaatacctattttaattaataatgttaaaattatgtacattaatcttagatatggtagagttagttgtgcgaatttccaccaaactatagtccataaattaataagtgctaattataactttttattataattttttaatcaatttttacgttcgaaattatatgccagaatatttttttaaattttttttttcatagcgattatagttacaatatcattttttataaatttttaaaatttttttgaataatttgcaatatcaaaaatagagttcctgatatttcaatttacgcgtgttcaaaaaattttcaaatatattttctcagcactataaactattcaaattttttaaaaatttgtaaaaatgatgttgtaagcataacaaatactgtcgtgaataaaaaaaattatacatgtgttttttagcacagaaattcattaagaaattataataaaaaattgataatctatatatataaaagggttaattcttggttcgaatttcttggttcgaaactactatagctatagaaatatatacagttaagtaggcgttgctattggatcgataactaagatatatatgatcacatcatcagttagtattattattaagatatatgtattgtatgatgtatatatttaaaaatatttatctctttcattttcccacattgaggatctctaattggccatcctagtcctatatatataaacctcaaaatcgaattggggttccttcttcaaccgcacaaacccacaaactgcacataattaatatattacatacaaaaacaaaaaggcacccttccatctcttgatatgacactatataaatatatatatatatatatatatatatttcgaggtaactaattaatttatataattaaatacgtatacaatattattacatctgtatattcataacgattatttatgtggaagacatagctacgccaaaacttaaaaatagtttgtttctgatcactatcaaattttaataacatatagtacgtagtagtatttg

SEQ ID NO: 19102 - DNA, 4035 bp, Cannabis sativa
  modified_base (2061)..(2061): a, c, t, g, unknown or other
  modified_base (2558)..(2558): a, c, t, g, unknown or other
tgtaatttcttaaacaagccccctcaaaatcattattagggagagataagcatgatcaactactgttattattattattactgtgtgtggatagataaatagtgtgtataaatagtaacttctatcctgatttgtcttacaaatgtagtaatttctatattgtggttatcttacaaaattactagctttgtagagtttttgtttaaaattagcatgtaatatattccttgttatctctacaaatatcttttatatatatatatattctagttttcgatgccaacaaataatccattaattattatcattattgttcaaactccacaacactaacataggagaagattagattctagtaaaaagagaagaggaaatgttcctcgtatcatgaaaagaagctaccatacctaataatataattaagacttcaatctctctcaataaaacacatgcatccactacgagatagagagactgctttttactaattaaacattaattactattattattattattacaattataataatttagataaaatgtcgtcttctcattaatttcccaccattcccttttttctctacttaatgaaaaataaaatacaaaatagagtaccatatttatactattgcacatctcacacacagtgtgatccaccactgctttttttaaaaaataaaataataataaattgattattctttttgttattattttgttgttctccttccttttgtcccctttatgttttgtttttctcattggtttgttagacaacagtctctctcagatgtgacccccaatatcacttgcatcttatgttcttcttcactttcaaatatgcatatatcatacatatcctaaatgttccttctaactttttcaataagacccactttagaaagtactctcaccccactagatttttcatttttcactttatttttgtcaccatgcaaacaactagctattataccaaattaaacaggtccactactagtaaatatgtactagtaaatatgtactagctaataatagtgtactacttgttcatgtaatttatataccaaatactaattaatatgcactctaataacttttttatggtaataacacaggagacttggtattggtacaaaattggtggaacgactagaagagtggtgcaaagaaaagggtgcagagtacgcatacatggccaccgattgcaccaacgagccttctatcaatctattcacaaaaaaatgtgactacaccaagtttcgtaccccaaccatgttggtgcagccagttcatgctcattccaagcccataccttcagacattgccattattcgagttcaaccaaagctcgccagctctatgtacggccaaatctttgcaaattcagagttcttccccaaagacatagacgccattttgacaagcaagctcaacttgggaactttcattgccgtaccgaggaattccctctccaaatgggacccgaggaagacgttgtttcccccaagtttcgggttactaagcgtttggaacactaaggaagtgtttaagttacaattaaaaggtgtctcgaccttgaaatacgcatgctgcgaagggagtagggttttggatgcatggatgccttggttgaggctgccttctttcccagatgtgtttaggcagtttggtgtgtatttcatgtacggacttcacatggaggggaagcaaggggttaggctcatgaggtctctatgcacctttgcgtataacatggctagggatgacggtggatgtggggctgtggtggctgaggtgagccagagagaccctgttagagtggccattcctcactggaggaagttctctttggctgaagacctttggtgcatcaaaaaactttcaaagctacatgaaactcaagagaaagagactgttactactactactactactactactttgaatgtgggcgagagatttgagccgtccgattggactagtgctcgatcatcttcgccagtgatctttgttgacccccgtgacttttgacatagtaataataataataataanaataataataataataatatttagagttcatcctcatcatcattatgtgtatttcttacgtatacacacaaaagccgccaaggataacgaaatgtcatgacctatctggtagagttttcaatcttacacatttctctatttgtaagatttggtcgatctcagcttaatttagatcaaagttcaatgaaatctaatctctcaaggaccacttataattagaaatacaaatatcataacacaacaagagagagtctaatttaacaaaaacatgttcagatatagtaatatatttctaatccatatcttataatgattggtttcaattgtactttgttacatggtttatttactgaatcccaagacattcatatttgtaatttggttaattttttcctttttaaaataaaagttcttaatatataagagatgttgtctactttactgacaataatgagatcatgaaacttaagccaaagtaaatatatatatatatatanatatatatatatatataacttcattattgttgtcttcgtacaattatatacattaaaatataagtatgtatatggataaacatactactagctagactaaaaaaagtagcaaagctaagtaggttaactgaaaatggcttgtggacaaaaaagaaaaggtaggaagaacatgctgccaaccatagtgttaattttcatttgtttttcttaggttattttattttatgactttttttttttggaggggaggacattatattatgatggattataaatcacaatttgtaaaagatgcagccgcacctcaaaaattggctccactgaataaagtgaaaagagagaatctgtagaccttattaccaataagaaactcagattatattgtcctcatacttaacttaatcgatcattaacgtgtcataattatcatcaataagacatctctctctctctctctctctctctctctatatctctcattctatatatatatataaatatatattggtcccccacacctgcaccgaccgtacgtacaaaagaaaataaaagtctctaaacctttcaagaactaaatgaacaaatcataacaaaacagaatcacaaagtaaaataatataatatgaaaaagaaaaggcatttaccttagaatcgagctacctgtcaaacttaaagttccactgctaaatggcctacctcacaagtgtcaaggtccccatccctttgcttttgtttcccaaagatactgagaccacaacaacaataacatgggtagtagtagtagtagaagagaatagtgacatgaacttgtacaacgtattagtgcttttccatttttattttctattttctgtggtgattatctaggctttaatttgtacaccatgcacacacacacgcaattatattctttcgttactttcacgtgtacaaatgaataaacaaagggatctcacttaaattttatattatatatgtttttattaagccagtattattgatatgaagcgtggtatgtacacaactgattaagttaagtaatctttatgaagaatcaaacactagtagtacataaaacaatttaaattactgcaatatattatttaaaagaagtcccaaagaactctctttctctttctcactcttcccaaaaatattacacactattatattttatctatgtaacaaaatcatgtgtaatatcacagatgacacacttcaaaactttattgatgcaaagactttcaatactttcttccagtgttatcttttcatgcaaagtcccttatcttttaatggaattctttaccagagattaaaatatagtggtgtgcaacatgcttcccaacttgtaatatatggaataacctaatactccaattagagcagagcaccatgcttaattaattcagtattacctatggactgaggacacgaacaatacctatgccatagtccaagaatgttgcctataaaa

SEQ ID NO: 19103 - DNA, 2765 bp, Cannabis sativa
taaatattaaaatagatgaagaatataaaagatatagcctttttatatttataacaaatttttcttagatttaattgatttatagttagagttcaaatagtaaagaatgttagaatttaggatatttgaccgtcgttgatttattattagagaacgaggagtgggatcttccgaaattgaattggttgtatgatcgggacattgttgatatctcatattgaaatgggaaaagccttcatggcaggagagggatcactgtgtttggactaaagaatcgaatggtaaatttttcaccaaatcaactaccttttgcactcaaaagcccacactgtagtgctcattctttgtggaacaaacttcaaaacagtaaaacacatgagcaacataaagtactacggtgaagcatcgtatctaatgctcttccaattaaatccatccttagagattgtatacacattgaagattactcgtgcccaatttgtgggggagaggaagaaaaatatggaacatctttttcttctttgtaatatgacatcttatgtgtggagagcttctccttagagtctcaaacatgtttaggaattaggaacgagtagaattgggtcaaattcattttgagtttgaatgcgagagacgtaagtgttgattatatgtttctatatgcgtttatcgtagttgacacaatatatggagaacgagaaacgacaaggtaaaacaataatcatctgtataacatacattattataataattttattgctcatggctatatagattatagtcactttcttttgtctcaacctcaaccttcttttgatataaccgatcaatgggctcctccgcccatgtattagatcaaaattaactgcgatgggacagttaaagagcggctatgatgcttgcagcgatggcttgtgctcatgtaaggaaattgttttgggttggtactaagcgggtgccttatgctaatgctcttagtagggaagcaaaatcttgtctgattgcgatggatcttgctactaagaaagacttacaatttgttattgtagagtgtgattctgacattgtcattaaagatgttaaggggttatacccgaaatggaaaattaataactttgtaactcagtgtagatgccttattaatcttttttatgagatgtactttctcgaatgtgtctgggccttttaattgtgtagctcacaatttggctaagtgggcatttaattaaaatataattgatatgattgaggcttcctctataccagagtactttgtttgtaatggtcaagaggcataattagttttcatatatttaattaggtttctattaaaaaaaatgttagaatttaggataaatgtgcatgaggttctatctcaaaattaattggcaatgaaatgagtagtcattcattttatataaagtataatctttccatgtattactaatgtgggcctatttctaatacactactctcttaaatttgggtttagaagtgtgagtataatgaacgagttttaagagactagataaccaaagttctatatttgaaaggattttactaggccaaataatttatgagtgtacacgtcgaaaattttgtagattttttgaaacaggttaaaatcccaatacaagattgtcacatattgactgaaagatcccaaatagttcagagatagtagattttttttttctttgataccatgctagaatttaagataaaggtacaacatctccactccaatcatgctctctaaacacactctttagctaaaatgaagagtgaaacttgagtgaatgagttctaaccatacaaaaaatgactttctataataaaaaaaatagatagagaattctttattttttgttaagcttattttaaaataattaataatatttaataatactattattttataaaattaatgtattttttaaaaatttaaattataaaatattattaaaataattaaatactaattaaagtataaagcatgattggagtaacaataataaaaaagaaaattacctcatatgtttttttttttaattttttaaaaaaatttacagtttggttgctctagtgatttctgcgtggcttgttatgtaaattttaattacgatttaggttgctttattagttattatgtgagttgatatgtgaatttcaaaatataaaaaaaaaattactttaaagtataaataaaaaaaaaaaaaaaataataataataataatagcttttattttagttataaaaaaatattgaacggtgttagtggtgtctagtacaattttatgcatcaatattgttattagtctaattaaatatcaagactcatataatttaatataataacttttaaaaaatattaactaaaaaaaatagtagtattatttccattacaacatgaaattatttgtaagaaatattgaaaatagagaaaggtaatgaaacatatcatgtgaggaagggagagagtatgtaaggagatgtggtataatgatttgtgtatgtgaaatgtgaggtgtgggccacagcacgagagggagacagattgaccaaactgccccaccgtcaacgtcagacagccgtactctactccaccgcttcagcccccattctccaatcatctcacggaatccgctacgacgccacctttgccttgtaatcatcattttctattttctattttttctttatacaaaatatccaatccaatattataaaatatacatacaaaaatatccaagaaaaatactct

SEQ ID NO: 19104 - DNA, 2113 bp, Cannabis sativa
aaaaaacgaatgaagagaaaagtgtcttaatgagaacatctatacatctcttttgacgttgcatatattttggaaaataaatcgttgcatttttgtttacaactttatggttgttaccaatttaaacttaggaaggcatataaatgtaatataaagggaacaaatattagtgttgttgtttcccctcaatcatgcataaaaggagaaaaacacttattttggtctttcgatgacgatacacaagaaactctaaactcgtattttgtgtttggattgttaaatcttgacaatgtacataaacaccgaattttgctccttaatcttgtcacaaacaacaaaaaccatcacaatcatatgcttgtttttctggctacactagacattctttgcttgcttaatggtgttacacatggggcctaacactccttcttggtatgttcttgagatacttagaatatatgaatgtcccccaaaaagcaatgagaatattatatcatatatcattttgtacgagttgtcgatcttataacaaaaaaaatcaaacacttcgatattcttactcttattaccttataagtttatttgacaaattagatggtcaacatagatattaatttcttcaaacaatagctaaattgttcacacttgaaaaacatgcaggaaaatgtcttattcatattgaaaactaataaattcgtggaattcaaattgaaactcttgagcatatatacttctgctagatataaaatcgatattgtgctctttacttgcgaataatgatcaagggtttcaaatttttttctttgatgccacaactttcattccctgatagataatacgtacaaaacctagttggaccacatattgtaaaggatttacttgatcactatacatgtacatgctactaattccaataatgtgaatttgtctatagtattataatttgtataaacaagagaaaattgactacagaaaatactatattttttgattaattttatgaacatagaaaataatatcttatagggatttttaatattatacttttataaggtactttggtatcaaatgcacagacaatattagtgtagtgtacgtatacgtagtaatgtaatggagcggtctaaactaaaaggtagaaagactaccccgccccaaacctttaattacacatggcgtatatggagtcaaagtagtcgactgatgattattggaggttacagcaaatgggttgattatattcttctttctgattaatatcatagttagaaacaaatatgcatataactacactgataagtcatagtcatgatcagtatcaaaaaatggggtatgatacaattaattcgatcatgacgtgctatatataggctgcaaattttgagtattatgtatatatatatatatatttatataatactagtcaatttttatatcctactatataaggtaacgactaaatggcggcgcatatattcacgatgattatgtatatgatacgtgtagaaacaaaataaagctaaactaggtataatgaagaatatatggctttgcatgtatatatgttcggaaagatcgaggtaatcaaataagggaaaatgggaaagaatattaatatatagtatagtaaagcaaaattctatattcgctctgaaaatatataattcattctaaatttattatgatttaatgcctgccggtgcgccaaactatactaggccactacatcttcatgtgtctttcctattgaaaaaggaaagttcaaaagcactacctgtttaaccatcaattcaatcacttactgaagcaaacataattatcctcagtacatctattaattataatgtacatttctctcctctcaagaggttcgaaaaacctaaagagcaagataccacttccaccagctaaaaaatacaaaatccgttgaggaatgacataaatcctatgcagcctccctactgtaaggtcccatgttcctgcatcaacaacctgcaattcgatttcctctgctgtgacaagtgttcctgtgtggtcctaattctgttattgtgtaatgattgcaagttgttagaatattccctttctacaaatctttatttggattgctgca

SEQ ID NO: 19105 - DNA, 7347 bp, Cannabis sativa
  modified_base (6922)..(6928): a, c, t, g, unknown or other
tttacttttagtcacaagttttttcgtgaccaaaagtaagattttttgtagtgagattaatatatatatataattatatatttaaagattaaattatataatatataatttaataatctacattatttgtaatataagagtcgttataaaatctaaaaataattttgtaacctaagaattatattttattatatagtaaagagtctcatattgtaaatatatggaaagatatatatattatataatatataagatgattgggttactatactagagttagggataagttagttattttttctggtttttctgttatatcggttactaagttgcaactagcttttgcctatatgctctgttcctaatatggtatcagatgaaataatctgaagcttcaagcacttcatgattcaagatctcccctccacaatcatggtgcacacacgcgccacaagttttgctacaacttttgatgatccttctagagtcgaagctcccatggctcctccagcatcaaaccattccgctgacaacccttctcgaacaaatcttcctcctctttctgttgttcatcgccccaatccagttgacagaccagcctataaagatgttcgatctctatactacatcagcacgactgatcatcccggtttatctcttgttacttcgattctttctgacaaaaatttccatccatggaaaaaagacttcaagctttccattagagcaagaaacaagaccccctttcttgaaggtactcttcatcaacccccctgataatgatccccttcttgattcttggatttgttgtaattagcttgtaatgtcatggatactacacttgatttcccctgaatcaagagtagtacatgtatttttaatactgcatctaaaatgtggactgtgttaaacaatcagtttaaccaaggaaatggtccacgcatttttgaattgaatgaaacactaacctatctcaatcaaggagatgattctgttagtgcatacttcataaaactcagagccatgtgggacgagatcaaccaattaaggcctcgaattccatgcacatgtgctgctgctgcacaacacttaaatcatcaaaatatgatcaagtgcttcaatttctaaaaggtctgaatgactcatgccaggctgtgcgtgatcaaatcttacttcttcatccatgccctcctctgaataaagtcttttctatggtaatcaatcaagaaagacaaagatcactaggccatcacatgataccccgaatggctacctcgacttcttctactcctcaaaaacctatccctgcagcaaatgtagcatcgaaaaacaagaggccaagacctcactgtacaaattgccaaaaacctggccattacaaggataaatgctacttcctaattgggttcttcttggctatggcactcaaaaaccagtagactccaccaacgctagaaaatttgatgctggcactacacccaaaaacaatccacaggcttctcaagtagcttcatctacacctgatctttccaactcacaactcataccagcacagtgccaacaacttatttcaatgttggcacaacaattgtagcccacatatgcatcaacatctattaacaaggctgttgtgaataatttttcatgtatctctaatcctttctcatggattatagatagtggtgccacacaccaagtgtgttgccatcttgaatgtttttcttccattcaatctactcctactggtttttctgttcaattacctactggtgcaaaagttaaaattcataagattggcattgttactattaactcacacataacactcatcaaatgttttgtttgtgcctgactttaaatataacttactttctgtcagtgcactcacacacaacaccaaatctacaattttcttcaatactaacagctgctatactcaggacccttctttgacatcgaggattgagatagctaaaagacttggcaacctttactacctgcaacaaaccaatcttgaggacaatatttcagtacaaacttgtaatgttcacttgaataatatccaatggcatacacgccttggacatccttctataattatttcaaataaactcaataaacaattacaagttcctgcaatttcaattccttttaattctcctacttgtcatattgccaagcaaaagaaattaccattccaatcaaacaataacattgcctcagctatttttgatcttgtctatatggacatttgggggccatattctattacttctattgaaggttataaatatttcttaaccatagtggatgattactcaagacacacttggttatattttttaaaagcaaagtcagatgccattttggcaatacagaattttttacaattcatacatactcaatataaaacaaacatcaaagcaattcgtacccgacaatgctaaggagctcactctcactactttctatgctacaaagggagtaatacattacacttcatgtgtagggagaccacaacaaaatgttgtggttgaaagaaaacatcatcacatactcaatgttgctcgagctcttgcctttcaatccaatttacctctgcaatatttgtgtttcatgatatctactactgtttaccttttaaataagactctctctggcctactaaaagataaaacatcctaccaactactccataacaaaccaactcaatattctcaccttcgaaactttggttgtcttacatacgcctcacatgttaccacaacaaccaagttctcccctcgagccagagcatgtgcattcattggttaccctcccaacatgaaggcctatactctcctagtccttcaaaccaagaaaatatttcattcaagagatgttctcttctatgaaaatatttatccatttggcaaagtctctcaaacacaccacatagataattttttcctacacattactgagactcatccatctcggacatatcaaatatcaattaacactgagaccaatccatttcaattgaacaaacaagacacacaataatctcaacttaatgtacctgaggcaagttcatcacaccaattccccattactgaactcaatcagcctcatcacataaattcaaaccaccaaaatggaaaatcatgcactactagatcaggccatgtacaacaaactccggcttatctacacgattatcagtgtgacttagtgataacaaaaaatagtacagaccatcccctcattaactatttatcataccacaaattctcaccaaaattttgagcggctattctatccataagcctaatacctgaaccgacatcatacaaacaagcttccaaatacaaaatctagaacaatgctatggatgtcaaaatcgatgccctcgagaaaaatcatacttggattgtcgttccattaccaccaacccagcatgtgattggcaataaatgggtatataaaaaaaactcaaccctaatggctgtccaacgttgcaaagcacatttagtcgccaaaggttacacacaattacctggtatcgactacttcgatacctattccctagtggctaaattcaataccttaaaactcatctttgccttagctgccatccatgaatggacttacatcacatggatataaacaatgcgtttctatatggggacttgaatgaagaagtttacatgaaacttccccaaggttacaaaccgaaacaccccattccacataatgttgtctacaaattatagaaaagtatatatggtctcaaacaatcctcatgccaatggtatactaaattgagtttcacattgattgaacaaaatttcactcaatctccaaatgaccactctttgttcataagaaaccaatcaggtatttttatggctttacttatatacctcgatgatatcgttgtagacaccaacaagacaactgaattacaaaaattcatcaccacactcgatactaggttcaaattaaacgaccttggtcccctttgttttttccttggtctcgagatatagctcgttgttcaaaaggcatatgtctcacagagacccttaacaatacaactcttacaagattcaggttaccttggctcaaaactagcttccacccccatggaaccaaacaaaaaattcagtaatgacactggggaattacttccaaagccaacacaataagagtcttatagggaagctcctttacttgacaatcacacggcctgacattagctttgtcgtgaacaaactcagttagtatctttaatccccacgactccctcacatgcaagctgcaactagaatactgtgctacctgaagaactctccaggacagggccttttttctatgcttcctcaacaaaatcaatccaactacaagcattcctagacgctgattggggagcatgcctcgacacaagacgaaccataacaggctgctgtgtcttcctcggacaatcactcatctcctggaagtcaaagaaacaacaaaccatctcatgatcctctactgaagcagagtatcgagccatggtgcatgcctcttgtgaactcacttggctcacttcaatcatacgtgatttcaacatcaacatcacactaccttcaactctatactgtgacaacaatgctgctatgcacatatctgaaaaatctaatatatcatgaaagaataaaacatgttgaaatagattgccatactgtctgagaaaaagtcacttaaggagttcttcgaatgaatcatgttccctcaaaatccaacttagcaaacatactcacgaagccacttttctttactcaattcaaagatattttgtccaagttgggtgtttgaaacttctacgctccaacttgaaggggcctattagagttagggataagttagttttttttttctgttatttcggttactaagctgctactggcttttgcttatatatgtacattttctctctgtacaatttataagatacattttaataaagattttcttctctaaatgctctgttcctaatagttactcctcccattatcaattagttaattttgaaataaaaactcattcaccttatcccaaattttaaaatggaataaaatcttcaatagaatttagtttagaaaacaagtattttgataataaatattgtaataattctacttgtattgacctaagggtggtgccaccctaaatgatgaattggagagtatatgtttaaaaaaaagttcaatgaatggaatgtgtataaggtcattaatggtgcaaagtgagattttgaagtcttataagtcagtctagtaaaggtgtgtgtatcatcactattttattataaataaaattagttcaatgctttgttaattagatttttaataaaaacttgtggagattatactatagtaaattttaagttgaaagaaactttactttatgcacatgagcaaggtctttatgaagagagtttatttattcaaggtaagaaatatatgagatttattgattaaataaataaaagtgttacaataaagtcacaaattttaatgtggaagaatgttatattattagttatttaaacaaattaatattacgataagattaaaataatgtgatatattatatattaatatgagattaatatatataatgtatttggttattaaattatacattatatagtttaataatacacatttctgtaatataagagatgttgcaaaatttgaaaaaaaaaaaatgtaacctagctaagcatcacttttgactatatataattaattgagttattgcatatagagattatgaaatacatggaataagtttcttgctcttaaaaacaactacaatgctcatttatattatttaaatgagtgttgggacattagagaaagatttggctcgaagaagaattacaaaaagttaatactggattttctagaaaaagttattttatggttgacatgacatattgttttatggttatttttctatcacctggaaccagtttttgaaaatgtccataacagagatgaatttatacaacatgtttccaaccctcttgtctaacgttttatcccaatatataataattaaactgttagtgacaatcatataataaagagattttttattttcatggtcctcaaatactttaaataaaggtctccatgtcacttgtagatatacttgcttctatatataagttagaagctctatgagcttgtgtatttctaaagggagaaattgaagaatactctttttttatacattaattaaatttacttctaaataaaatttaattcaaatatacctctttttatgagtattgcacttaaattatcctcacacactcacataattaagacataatttcaaacataataaatttgttctttgtagatggatgtgtaggtttgtgagaaagtttgggcaaaattttgattagagaagaataaaaattattgtgaagtgataggggtaaaattggtagaatgattgaaaaaagagataaacataatagatttttaaaaaaagaggataaaagttaaaagcatcaagttaaaagagatatgtagtggaatttcttcatttctaaaagcatttccatattttctctaagtgcttggtagtaggggaaataagtattttggacaaagacgtagaattcttgttctagctattaatgatcccccttcaacacttaggtggtattcgattgaaggtaatgaaatgaaatgaaaagaaaaggaatcaatctccattttattcctttgtttggttggatattaaaatgttggaatgtcattccaatggaatgacttccaccattttggtggaataacaattccatttcgaaaggaaagaaaagaccattccaatgcatgatcataaaaaatctaataatatttttatcaattttttnnnnnnnttaaattttatttcattttattccattcctattcgcattataactcttattcctatattttcatttctcccaaccaaacaccaccttagtataattttgctcctcttctttgataatattatattatatatactatatcatatatctactacagtctccatataatatagtattatatactattatattatatttatgttttactattacttttacatttagatgtatttcatgcatcgagttgtatttctagtcttccacgtattttattttttcttttttatttgtactttgtgtttctagagttgaaagattttatttaatcatctctagtccttgtagcttattgtcttggtattattttatttatcttttattattttcatccattgatctttatttttcataacatattgtat

SEQ ID NO: 19106 - DNA, 4053 bp, Cannabis sativa
catacatctggtagtatatatatacacataaatgtgacagaaaatgatacttacatgtatgaccagaacagggcagttcaccataccaattttgtcaatattctgagggaaggacaaaaagaaaataaagaaataaataaaaagcttgcacacaaatgaaagatataaaatccaaaaagccttaaaacaccttaccttgtaaatatcaaaccagtaagtccgcttaacagggtacagcaccctcagccctgacaaaatagggctatgtaaaaccacacctctcaaggttggtattcgtgatgcaagatcaactgtgggaccactaccaacagattgaccatatagtatcaattgttcatctttaactccatacttctccttgaggcatttataagctgcatcaatgtctgcataggtgttatattccgttggctgtttcaaaaagacaggatgattacaacatattgagtaaatgtcaaacgaacaagctgtcaatgcatcaaaattgaacacaagttctttggcaagcctcagataagttaactaaaatgcatcacacacaaaaaggacaagaaaatatgcatattcttgatttgagaagcaagaacgttccagtacataaaatccatgtaaatgtggcattcagtgtaacagactccaacaacacaagtttcagctttttgaaacatccaatggaacaaattgattatcttcaatgacaactaaaaaaaaatgcaaagtttaatttgcatatgtcaatacatttcccatacaaaagtgtacgaccaaattatttcaagttaaaagtggtatgatgatggtgaaaccactgctctattattgctgtgagcatgatatgcctgccctatttctaacgtttgatcataatccaaagaaccctaatcacacccaacattcccaaactttggaacagatgagaattttgttgttgttgttgttgttgttattgttgtttattttatttgtttatttatatttttgaggaaaacagtaacataataataaacattaaatcaggtttttgagcacctatcccatgtggcacttagattgtaatgttgaaagattgaactacaagaatgtgttaaaaattgaaatatattgccaggatgaagatgataaaaagaaattctttagttatgagcttctcaatgttagcaaactagattttagaagataaggcatctaacctttccagttgattgtccatagccagagtagtcatacctgcaaacaccatgttaacgaagacaatgaaattgatccaactaaatgaatatggtaaattgtttgaaagcagacggtacaacacagaatataattacgttccagccacgagataccattcagtctaagagttgactagatacaaaagagtactcataggacgagcacctttaaatgagcaatcttctataaaaagaaaaaataaaggtttgacgaggcaattgcaccaagtgttaagaatgtggtagcgtcattaacataagactatcataaataaagttcacctttattcggtaataaaagcctctaagcaccaaagagagaagcatatatgagtcaaactagaccaacctagccccaacttaattctgttcattgaacaatgtatgtctagcccaaacctcacagtggtggaattccttaaaccccaaattggtcatttatctccaagaaattcaccaagaaaatgtccttcagtcagaaacagaatgaagaatggactttggccagtgaagtgatggaacaatatataaaagcttaaaatcaataattagcatgcaatttgcaacccacattccttatgcattcttgtgatctatcatagacataactgacatgtaaatatgtcttttagtaacctatcatagaaccctatcctctgctacatagaggtacgtgccatctcatagtaccccttaacagttttgatggaacaatttagtcatttcgtggcagcaatctcacatgtacttctatgctcatggaaagtttttcaaacgacattttgttcagcacagagctgttaatggtacctgacacgacgcaatcagttctcctttttgaaatccctcacgtactgaattccaagccatctaagttattaacacatgctaattggctttcagacgaatttagtaccgatcacctttcaccatcttgatactctccacccatcttcctttctcagaaaagagaattgaccagtggccaccactcactgtacactttacataaagaactaaagcttcaattgtctctaatgggagatcctgatgctaaatccattatagtctaaaaactaaagaaagaaacaatttttctgcttatagcttaaatcaccacagatttccacagatccttgcaattaaaaagaacagtgctaaaatactctcaaccagtacatttaatatacacaaactccaaaaggttatagcaactaccttgcagatgaaaactactcaaaacccagaagcaaaaaatatatatattttagtaaaagtagtatgactggaactcaaataccttggcacatcaagtttggaaaggagcactcaccccataaggttaacgcgaagccgagcactcaattcgacgaagagctcaaacatctggcccaggtcagcggcatttccatgagaatagagcaaagtagacgaagccctcgggtgcttgacatgaacggccacgatttcattccctctacgggtcttgagcttgagaacgtccacgtcatccctcctggcaacttcgggaatgtaaagcttgtcaccggcggaatcctcggcgatcaccgtgtaagagggcgggttcggcgggaagaaagcgaatttggcggcgattgacgatgtgactccgcccatcttcttctcatcagaagctctgaactcataaaggccctcagcccccaccacgacactcccaacttcctcttgttctctcctctccccctcttttagatccgaaatcctaagagagagagaaagtaggagagagaattttgtttggatttcaggaaaataaagaaagagaaagtgggggaaagggagctaaaaaagagggaaagtggagagaaagaagacaaaagtttagaagaagagagaagtggtggcgcgtggagaagaggtggaggcgcgtggagaaagtcaaagttgagttaaggataagaaggaggaatcacatcactcacggtctgattcaattcaacgttgaaggaggagagagaagatttttagtattccctgacgacggcgactttatatgatttgctgcctatttctactctgttggatgctatttctctacattgccaccacgtgggctgcgggatgtgggattttatttatttatttatttattttaagaaaataataatggacaaacaacatttatgtattttttttgtcaagaaaaagattcataatatcaaattcgttacaataatattttttaaaaaaattaccaacaatttaactgccatatctattcttatctaggcttcaggtgatttgtgttgactagaatcttttaggtgtgttttaatgaagtttgttattaaggattgcactagggccactactcacagattttaaagttggaaggaaattaatgattttgaatttagtataattaattagaaaacacacacgcaattattttcgtacgcattttgtaggcatatggtcggataaatattttgttttaagagttggttgctactattatattgtgtattatttatagatgctgaaaattatttaatatggtctcgctaaattagtaaaaaaaattaataaaaaaaaatagtgaacaagagagacaccgtaatttatagtaattcacttctcatatcgtaatagtaataaaattaagcatatttcgagtttttgttgcccacgagaatacaagagaattagatgatcaaagagttccattaaaatataataaaatattaaaaaaaaaattatggaacattcatgatgggatgatcttgaccattgattgtgatctagtgttatttttaaagct

SEQ ID NO: 19107 - DNA, 4854 bp, Cannabis sativa
gttttcagctggattctagttttagataaagctgaatgttcatgaaattttattttacaacggaaaaaatcttttcaactttcaaatcttatccctgggctggtgtgtgttctgcaaaaagtatggggaaacatcttcccatctatttttggaatgctttcttagtcagcgattgtgggttagagtgttcgaatagtttgggatcattggtgcatgcccagttgtgtagtcagctattattgtgtaaaattaatggggatgagaggagttctagattacagatagaaaccattttggctagaaagaaatagtaggatttttgaagtcattgaaacaaagctgatgtcctttgggagaaggttaaagtttggactgcaacatatgggtttacaagacataaagccttgagggtctatcttttcaagacctgactagggaatggggttctattttgtattagtgcattggtatggggatatagacataggcctaaatgtatcatgttttgagcttattttgtattttatgcttttaatttttcatgtttagcatggtaccacggctttcctctgccataggttaggctccctaatagatattgggagtaggtcattttaagacaagcaacctctgtcttttttaaaaaatctaaaataaaataataattcgtatattttctaagtttgatgtgtacttttcttaaatcttcacaaggttattaattagagctcagttgacttgtttagcttttgtttgcaggttgcagtagcaaaatgtgacttgtgtgaattttatgtacttcctccatctgaagtcttggatcttggccatgttgtagttgcatatcgaatggtaaaatcacatagcattgatcatggtacaaatctcatttaaccaacaaagtttcttatttttgtttgtgtgactgtgaatacctttcttggggtttttttttattcttaacaaaatttatttaatcggagaaggaaaataaatacaccacacaaagcaaaatcctgaaaggaaacctctacagaaaaaatataaactcacacacatatctccattccctaaaattataaagcaaactcacaaggcgacccaaaaaggttctccacttatatcccttgtatgttcctcttataaacatcttcaaagattctagcattgctaagggtttctttctacccattcagctgaaccttgatagtaatcctaaattatctttcctctttttcttttggctcccaaaaatgaaagaaaattcagcaataatacatatactggctaacttcatgctagaaaaatgagctttatttttgtttacttctctaaaaggaccttgagactaatgtttacctgtgctgtaagtgaagattctcttacctgtattcattttgctgaggtgagctttctggcactacagaaatacatgttgggagacaagattccgtcataaagggagaaatgcatccttctgatgataagttttcaccagcatttagagaccggtcccgcttgtcaaagattgaaacttgtggcatacctgtgcctcgtgtaacaaagcagaatgagcttttggagaaaaactacgtgagagcagacccaagttatttgaaaacacttggtcaagctcattccggatggatatttggtgcgatagcagagctcgttgataatgccagagatgctaatgcaactaagtgagttcacttgcttgtatcttaatttacaccgtttttaactaccatttacttatatatcagttgtcatacttttgaccaggaatattactatctctttacttcctgctctgttattacacttttcagtctctatggagataacataattgcatcgtgatgtgtcagattaactagtctaccaatctcttattgcagactggacatctctgttgaaatgatatactgtaaaaagtctgaaaaacatattccattgctgtccataattgatgatggacatggtatgagtcatcaggatgttatgattatggcatgtttcggtcataaacaacccgaagaagatttaagagagcgaattggaagatttggtattgggttcaaggtaaaatcaggcttgagcgtacatgcttctttttcaccatttaactttgccaaggcatattggaaggtttgaaatgaataaggattcaatagtattaatgatatgtcattatgtataaacttggggttttgctttttttttttttttgagaggatactgtatcttgtttaatggtccaatttaccaagtataactgtcaccaattgtgcttttctgcatatgctatttgactcttccctaatttcatttatatagtttaaatgtctttagatgttggaactaattaggggagaaatgaaaaactgcatagaaacaaaaggaaagatatcatgagatcagattgcccaacatgtaatcttattgcattaatggaaggtaaactggacagctttgtagaagcatattggttctctataattctcaagattcacgtaaaagtgcatcttttttctttctttatttcttttcaataggtaatatgaaaagccttattgttcagatcatggggtttagaatccacatgcaccttgaaaagttcaaaataacagtgtgcgtggccccttgagaagtaaaagtatggaccactcactcataaggtgaagtccatggcctaataagctttcttgtctacttcgcgttaaaggtcatttagctatgtgtaaatcatataagattagagatctttgttgcatatgctaattgattgattgttttagtgttttaattcttttggtgtctccttctttgaaagccaaagtagatggtctatatgaatatatgattaatacctctaaatcttttataatataaatataaatatagattttttctccttttcttaattgggtaatcagcaatctataccgagcaagaattattatcctattctgtgtatttttatggacttgtttggcttcctattatttcccattgaatgttgtataaggaaggtggaagctaaaggaaatggctggttataattacttttgattgtctgagtttcttatgttcgagtagtgtgttagtttttgcagtaattattttattctactacgtgtctactcaggttttcacaatattgaaatctaagtcactgattatctgtcttcttagactggagcaatgaggcttggtagggatgctttggttcttacccagactgctgattccagatcactagcttttctttctcagtctttgaatgaaaataaagatgtatggcactactttcactataaatttccatacacaattttcttgacataattgcttacagttaacatcacttttatgaccatttgttgcaatgcagaatcttgagattcctattgtaagctaccaaaggcacgggcaggttatggaagtagatacaaatgtgcagcctgaagctttagcaaagtacaatttaaaaaccattaaagagttttcaccatttaacaagtatcttattggtgaaaaggctgccctttttcatgagcggacaggaacacaaatatatatatggaatttagatgagtggggttcaaattatagtcttgaatggtgtactgggttgaatgataagagcactgtttgcgaaagtgacatatacatccgttctagaaggattagatgtcgtcctggtcaagtcagccaacaggtgtgtcatccgtaccttgttgtaagcttgttcaatttcccaagaagtgaacaagcctgttgtaagcttgttcctgatcaagtcatccatggcttataatttgttctttttggttttcaggttccgttagattattcacttcgatcttatctggaagttctttttttcgtcccaagaatgaagatatatgttcaaggttcactggtaacatatccttctggttttttggttcttggatgattttagctttcccccaagattctttttaaatcttagcttctaaccaaaacaggttaaaagtcgacctttggcaaagtctctcaataaaactcgtgtagaaagtggaattataatgggaaaaagtgttcagttgactcttggtaggagccaaatagaatgggaccgggcaaactgtggtatgtttttgtattggcatggtcgtttgattgaggtgagcagctttttcattaattgatttctatttgccttttcacttttctcagtcacgttgttcattgatatacaatgtggaaacaagaaactatcttttttgtttgtgtaagaaagaagtgtagaccatgaatttttagttttactgtttaagtctactttagaagagagcttatcttgcatttctttttgtttttggtgtggcaatgacacttttcatgcattgatgcaaatttaggaagacgaaatttttttagaacccgatacaagcagttatgttggatctgaataacatttgactttgtatacatcagatttcccaagtgatacgatgtcatgtaaagggcaaagggaagtgatagtttagttgaaaaataggaagttaatcgttcaacttcaagtattgtatctgttaaaatacttgaagttgaacgatgaacttcctgtttttaattaaactatcactcccctttgcccttctacatgacctgctacaaatagcatatgacatgctgtaattatgaatgtagagcaaagtattggatcagatttcccaagtgcatttgaggcatagttgtattataaaagtattctaatttatatgtcaattcatttagctgttctttcatgcttgtttatttcttctgccattttatttctctctctcactctctctctct

SEQ ID NO: 19108 - DNA, 3989 bp, Cannabis sativa
agtctgtcatgttgataaaggaaggtaagcttagttttgagagcgagacatcctcccacagccttccaaagcagcagggagtgacgagggtgtagatccaacttccataactttttccaacatatcttttcctcctgaaaccgatggcattgagagagccagtatgcgtttttgacagagaagagccccttattgctgcttttccagaaaactcgatcctcatcaccctccaaaggcttaatgcgtataatcgcttcagccacatcgtgggagaagcatgctcttatcaagtttacatcccatgtctgggatcttggcaagaatagatccgaaacagaggaaaatttatgagtaatagcataagtaaaactacttctaacctcctctagattgaaccccgtcacctacggttttgtccacagatcaatatcaccctttccaattagaattccagcaccaggcacacacagatcacgagcctcaaggatccctttccaaagagaggaatcattcccacgcttatcaactgtccaaaaatccatctcagtacaatattggagtttaggatgttgacccacgaccgattatcctttgtgagcaaacacccaaaagttttgcaagaagggccagattaatgtccctaaatcttctcaaaccaaggccaccatttctttttggctggcacagatctccctaacatttgagggccaagtatcggttgttggggccaaccaaatggttccctttccactaaaatcggacaacaaaactgtccagttctttgcaaatgaaaacaggtattcgaaaggtggacatagtttaacaaggtatactttgcagcacagattcaccaaggtcagtttgccagcttgtgagagacatttagacttccagcccttaagcctagacagaacctttgtcttaagaaaagaaaaatcgtcctgtttcctggcagatgcaaagagacgattaccaagatacttctctttacacgacaacggagtgatttgcagggagtccgagatttcctttcttaaagcactacagaccttcggggaaaagaaaacaccactcttcactctgcctacactctgacccgaccatgcttcgtattgctcaatacatgacatcagattctaagcttcaaacaaggatgctttgcaaaagtagatggcatcatcagcatataaaatatgtgagatagggatagaatttttcccgaattttaggcccgagatatcccctctttcctcggccctacacactaacttagagagaacctcactgcaaaggatgaataggtacggggacagtgggtctccctgcctaagcccctggcctggcctaaactgcttcagaggagcaccattcagcagcacagaaaaactcactgaagtaacacactgcataaggagactgcacacctttgcactgaagccattagccaagagaaccttatgaagaaaatcccattcgatccgatcatatgccttgtgcatatttgttttcacagccatgatacctttcttgccacggatcttttgcatagtgtgaagggcttccgcagccaacacaaatccctcggcaatccatctaccctttaggaaagcgtgttgaaagggactcatgagtttttctaggataggcttgagtcgatccgttagagtgcgagcaataactttgtacccaaaattacaaagactgataggacaaaattgctcaaacctggacgggctttctttcttgggaatcaagcaaataaaggtgtggttcagttccttaacaaagtaggagctgtggaaaaagtcttgaaccatttcagagatgtcgttacccacaatgtcccagtaagtacagtaaaaaatacctgaaaaaccgtccgggcctggtgccttgagggggtgtaaattccaaacagccgccttgatttcagaaaaggaaggcactctatagaaatcctcattttcctgagtcaaaacttttgtatcataaagctccataaagtcagcatccataatcgggtgagaactggtgaaaagagtcttgaagttctccacaaaatagtttccaatatcatcacaattttggagccagtgatccccgtgatcattaataacatatatgtgattccttctcctttgcagaatggtggcagtatgaaaaaattttgagttgcaatctccctgttttacccaaagttcgcgcgacttttgtttccaaatcctctccatctttttctccaaatcaagaatttctatttggatttgatcctcttccaaaatagacccaggtgtaattggggcattctgaatataggcaagccgagaataaagctccctaagtttcttgttaaaaaaaccaaaacaatcgcaattccatcttttcaaagcatttttggccaagtgaagctttttcaccacacaaaagcttcggtgcccatcgcagggagtcacccagaccttttcaattgtcttcccacaagtgttgtcagatttccacacttccaaaaacctaaacgggtacctgtgcttctgtaagctcaaacgagagtcaaggattagaggagcatgatccgaattcacaatcgggaaatgtttcacactagcgtggggaaaacgggtgcaccactcagggcaagccaccgccctatccagcctttttcgaacccgactctcagcatttctagcattgttccaagcgtacgattgcccaatgtagccaagatcaatcccgtcacagtccatcagaaagttttgaagtaactccccctccattctaccaaaaccacgcccccctgcttttcagtagcatctataatcacattcaaatatcccataagggcccacggcgagttgcaactttgaactagatttgtcaaccaattccagaaagcctttttttgaccaccatacggggtgccatatatgcagaatagatgccaaggagccaaacctaggtcgatgtaaatatttaagcaaaagcccgtaagaaaagtatttaacacctgaatattcagccctgccctccaaccaacacaaaagcccccagcaataccagtagctttgatacattgaacattggcaaaaccacatcggttttagatctctatcatacatcccttctcaactttagtttctaaaagaaaaacaacatccacaccttccctacgagagagaccccttaaggttctctctgccgccggtttgcggagaccgcggcaattccaagcaagacacttcatggcgcaggtgggggcatggattcggccgcctcctcgccatttccaaaattttggaccaaagtaattgggatatcaacacactgagagagaatttgttcgaagttacctcacacctccttttcctcgcctaatctggctttacgagatcggagccccattcgtctcgtcgacgacacagcccccctcagtttcttccttcgacttttgccttttgaagtttccccaggttcaaaggaacctgtattaaatgcagtcgccaatggcgtgtcaatagagcctctctgccctgtcgatggctccctagaggtatcagtaacggtagcaagttgtgcattcgaattcttgaaaggagaatcatgataaatatcaggggttgggctataccaagtgtgagccttgcgtttctttgtgcccagaaggtgtgcaattaaatcagataagttttgtggattagtgataagtaagggttgggccttgtagagatctgtgacattagaacccaaaagttggcaatacagcttttaaagctcagggtcattactgggccagtgcaagtgagtgggcttaagaaagtgatggggcctcttggatttacagaaccaaatgtgtggaatatcgagtccttgaatcagagtaggcccaatatcagggataatctccacatcccaatttgagaagcaaaatcaagtgaaggaaaatcctttagaatatgttgggggggggggttattcagcatttctggcacgtt

SEQ ID NO: 19109 - DNA, 3391 bp, Cannabis sativa
tcttgtaataagccccggcagttccacgataggattttcattgggaaggagggggcttgataagggccgcctcctcgcccatttgaaaattttgtatttcatgaattgctacttctactaaactctggtcagacagatgaatactgctaccttggttttggttggccccggtagtcggattaaattcagcatgatttgagtcccccctcgagttcctcccggggttctttctccttgtgagctttccatcctttgtgccactgctcccaagagtatacgtattaacttgcaacggtgggagaaaagtaacagggcaagaccctgtttttaaccccaagtcgacaaccttatcccgtgggtcaatgacagggattaaagtcatacacgctttcctcttcttagactcagataaagatgggcccatattagagaattcagtgcaatcgtgggttacaattttttgggtcgagacactctcatgacatgggtccatcaactcatttaccacttcatccagggtcttatctgtgggccacgtagcatacacgggttctgggtgttggtgagggactctggacctacaaatttcctcacggggcctttccacaagttggtctcttgtaggcccaatatcagccatgaggctagtaataacccctttgtctctctctctctctctctctattatcgataatagtcatagggtgcagctttgatctggtatcagctctgcgaacctgttgactcatattacccgaaatggaggaatcatcctaagaggcacggctagccttcgaaggcttctgacccaccaaactacaattagcacctccccgtctaacgttcgaatttcctgcgccctaactactctccatagaagggtcgttatctgagcaaggaattacttttttgcccttgtcacctttaaacgaagaagcttggctgccgggaacaacggtcttctcaggaagttttattctcggtattctcggatcaaaacagtttttgattgggactcccactttaatccaggccccgtaaagtgggactgctttcccaatcggagggtaggcatattccgttggtctgttgcactttgcatacgagtgagccaagtacccacagttaaagcagatcgcaggtagcttatggtatttgaactgcacccattcttttctatccctgaaaatgttgaggtagaaacctgctacaagtttctggttcagcaaaacatctacctagaactttaaaaagccacgtcgggctatgctatctctggttgctctgtcgaaatctacgtactcccccactttttttgcaatgacactcgtattttcccatgttagataaggtgtaggtaggccatgagcttctacccataacctggccttgctcatattaacctcttcccaacgcccgtctttcggccaatctcttatattcaacattagtccattaaccatccaaggcctcttcctcaaaacttccttcttgtccgcttcacgatcaaagaaaatcccccataaccccagtttcattgttttcatccgccactttcccgttaaggtccaaatcttggaaaggatgtctcttaatctaccgcgggcaatgggacgtctaccaaaagtagtagccaaaactccttttctaatgatctcagcattaagctcaaaatctgcttccagttcgagtgacatagagtcaatgaactgcaatctcacttcatccatgacgcctacttcagttgtaggatcatcagcttcctcagctagagtgttgttcatccttgtatcttcatcagaaatgcccccatcaactggagggacagtgtcattagtaacttctgtagtcaaagcgttcccagcactctccatggtacaagatcagtaagctgaaactaaaccagtaaatcgggattccgaaagctcacgaagagtaacttaaagcatagtaaccattaaagatgtagaagaaggctatgataaaacgtagattaaagaagaaaaaaaagatagtgtgaaagagaatatagtcaaatcatcatctcaaccattggatagtatagtcaaatcatatccaaaattttactcttcccaaaatttgaagtaaagatacttgatgataaatttaggccactgaatttatttgatcattatctcaatggtattgttaaatcatatgcaaaattttactcttcccaaaattttatgtaaagatacttgatgaataaatttgggctactagatttatataatcatcatctcaactattaaatagtatagtcaaatcatattcaaaattttactttttccaaaattttaagtaaagatacaaataaatttagacaactgaatttataataattaataaatttgattgggcaaatactgtaaactaatttttttctttttgatggactattttgtatgtgaatagggttggtggactatttgttgtcgttatagacataatcagcaacaaatcttacattccttttgaataacatgaacttgaattcttcagatctagtctctgaaattaaatgaatggtctgatgataaagttgattcaatggttgaagttggaggaaaagccaggaccaagtgctagtcatgacagagcatttaaaatatatctggtgagttaaatccaattttatagaaatttttacttgtttaaccctacaccaacaaaacgattattatcagtattcaaggtcaaacttgacctctccttagtctaaatcatgaacttagatcaaaatgacaacactttaatcaacacgacaacaatactagtgtcgtttgaacccacggcttaaaagacttctcaagaaaagtttagaaaccctaagaaccaaaacacaacacacacaaattagggttgttcaaaaaaattaataaatcgtccaacccaaataaaccgctcaaactaaaccgaataaaccgacaaaaaatacaacccaaataaatttacgaaaaattcaaactgcccaattaatatattgggcgggtttaatattattctaacccgcccaaataaccaaaataaaccgattgacatattttttactaaaattatttataacatgatatataaattacgtttaatagttaaactattttacgtttaaagtttgtagtgttagtgtttattttgaaattttttagaatttatagttgataattttgattgtatttgaatattgaagttgaaatttaaaatttagatatgaatatatttttttattctattttttaaaaaaatattgtttaatattttaatgtttactcaattcatgtttattttttaacattaatttaaactataactattttaattttgaaaggtatatactgtacatttatttttttcaaatcaattatttgaa

SEQ ID NO: 19110 - DNA, 6024 bp, Cannabis sativa
acaccatcagaaaaatatattaaattgcataattaactctaattacgcccaaactataactttcttaatgcacctttaaattatgaaataaaatttggtaaatactagacatattttatgaaaatatatgcttttaataatatttttctagttctggttgtataacattatatatgcgatttcaaattatacactgtcaaataagttcaattttttttttttatagatttcatcacaccaactaaataaatattattaaaatacatattatgatcaaatgagatttttctttagagaaatgttaaaggtgttaaatactatgaaaaatggtaaattgttatttgtataatttaatattggatcatgtttactgagatttttaaaaaattaattataaataattaaaactaaagaaataattgaacttgttacgtgcagcgacaaactatttgcagaaggccaactgtaagtccttccaaatattaattgatcttaaagctactcgcttccaccaatcttctacaaacttggtcaacgttatagaaaaacataagcacttggcatcgtcgctaacttggggaacttgcatcattttgttgtacttctccaagtgtgctcacggattgatccttccctcatacaactcaatgtggggcattttaaagttctttgggagtggggtctctgtgatcctccttacacatggttctcgatcctcatcttccgaattcaagagggctccactttattttttgaccagcttggttagagcaactatctgctcctccaatctttttgtgtcactcttgagaagatcatgtccccctcattttgtcacttacatagttcctgaggtcacccccacgcggccttgccttttcacttttgtacttctcatacttggcgtttaattgtcgtctaaggtctgtggtggaccagctatcctgagaatatcctacagtcgtcctttcatcctggttgataaaattactggggtggttccttcaccctttgggcttgggtaccctcacactttactccttcgtcgtagttttgcctctagaatcagaaaggcattaaggcttaaaagcaccggtggccttcttcatccttgaggcacaaccagacagattcatgtctctccaaagaggtttaggagtagacttttgtgggagctcatctaccttgccttacctttatccttgcagggatttcaggtttcagccttcgtttgtctatgagcatgctctttgaccattacttccactgaagggttatcgttggactccaccaagtcttcgaacttgttttagaggcgtttcgtcattggtttcattttctcaatgagcttcttcttttttactaactttgtatgagtagcttctagttctttggttactcgcagcaagtttgggtcatggtcatactaataaccatctttataaaatttgtctttcacatagccatcgtcatcgtcctcctcttccctatctccagggttcgggtcatcattgatgccatcaaacacgttctggtatcctcccttcgattctcagcactagttgtaccttcttctcttacacttcctggctagagaccgaaggcaagggagtttgcttcttccataacggtgtccagggaagttttcttgctttatgttctttcgtgtattcaccatggttgaggtggtgcgacgattagcaaactttcctaagctctcaacgaaagcactaaaatatttaccgaaatttttaaaaaccaattaattagagcttaagaaaaatataaaacaataagtaatagacaagtaacttttacgttattcaagcgttaataatctctagtccacgagtttgttgtattagccttgtcaatgagtgtttgaatattacaagtatttatattatcaaaattaactctatattcttgttgtctctctagaagaagaaagctagtaggaatttttggcagaggttttgtaagtatgtaattgttcaccctttgcatataaaaaattagggtatttacgacacgtatgtgggtgagggcatgcccttcacccacctagggttttgtattcaacacaaaacaatggcaggtactacaacatggtgatctgaccattggtttgtatgaagctttcccattgtgtggtgtatggcaggttcaaggtaattcatgggaataaggacacgcgtcacccaaaagtttcatcttgtaaaattattctctagacaagtcgttggacaaaaaaggggcttcagagcagtatgcgcactaccaaggtctgacataagggacaaaatttgatttggtgtcaaaaaaatatgtaattgaatcctgagctctgggtaagatattgccaaataagttctaagaacatctgaccattgccttcaagattagactaacttgctaccctcttggaatactcataacttctgatctttttcaatagcagattaatggttggagtcctagagtcctttttgtccttgctgatagggagaacctttaggtaactcctagaatataacatcttttgcgatgccaaaagtatgaaggtacatgctaaacgcgcatgatttggcgtggcacatttctgtgattgccacgtaccaggcattcgggaatacagataccaatattagattttggtattgtatgtatttgtatttagaaattgaataaatgctatgtaaatttaaatatataactaacgatcgaggagctagcttccaaatcataatctttggttcctatatactattttctgaacatcacatgcaggtttctccacatgtagatcgatcccggagacaacctttttcactagtcctctgcagacttacttaaggtcaatgaagaacaaaaatattttgcatcatcactggccttggtgacttgcatgatgcgattatatttggacaaatggtctctggggtccgttcatccttccagttccatttggggcatcctaaaattctccggcaatggcgcatcaataattcttttcacacaaggctttgtatctttttccttagaatcagatacgaaaccactttgttttctagtaatcctctccgtaatcttcatcaactcctcaactttacgttctaggcgttgggtcttgtcatttgaggattctctttcacgaacctgatcattgatgcggttcttcaaatcatttttgtagggtcttacttttttggctttagctctttcctttttagcatccagttttctttggagatcatttgtagaaaggcttccgccactgtcattctataccgggtgcacttcttcaacctcctcgtcatggttgctggaatcactaagagagggtattttttttcgagaatctggcctctgtgtcccaatgtctattttttctttctgtgtgactctgcctctagaattggtttggtctccacgccctgaagcgtggtttccttaactcttctgctgaggttagttagaagctttagatttctaaggctgttgcgtggaaggagtcttctttggctcctcggtaacgattcctttgcccttatctttgtgaatgcctgaagttctagggtccttcgactcttccttctcaggtgcatctgttgtttgaggggctcggacgtcgggaaccatcttagttaatgcggtcattacagcctccattttggtcatcttgccaagttatatctcgttgaattgatcttactgggatagcctcttttcagtcaatgcacttgttgtgccatgataaccacgggttctaattcgtcaggctggcttttctccccagcattgttctcaatagctttgtcctaagggtcgtcttcatgcatatccttcggtggatcattggcgttaactttgacatcctcagaactactttctcctgattttgcatccttaatgatgggattgtccagattccggtcctcgtcttgacgattttttcgggggctagtcacctgttggggttcactcgcatctcttgctttggcgtcaggcacggtgaaatggagaccatatttggttctggtgaggggcatgattacttggacataatttggtggtcgtctcactgcttccttcatctctcaatgaaaccaccaaaattttcccgagattttcaaaaatagaataaatataataagaactgaaaaataaacaatcgaaaaagaaagtataaaaagagacaaataattttttatgtggttggggcgttaactagccttagtctacgagtcagttttattcagtaatttgtatacttgtaaaagctttaggagatacaccagatgtatgttcgtatgtttgcgtgagcaaagtatgtaagagagttcaacccctaatttatgacattaatggggtatttataatagttgtagaattacataagggttttcttttttttcctttactagggagtttacaattaaacgatatctttgggcgttctcatgaagtccaacccatgaagaatacgatctactgactaggaaaattggagttaggttgatcgggtcaacatcgtgtccgctaatggtgggcgattattctgaattacctgtacaacctttgttatgggaagtttcccctttaataatatgatattctggcgtaataagatagctgaaatttccttatttatatgcgggaataaatagggaaattggaacgttctttcgagaaggaactatcttacccctccggcctcgcgataccggaggtgtcttctgggcttggtgcactgaaggcagaagactctgcaagtacagagctaagatagctcctagaaggacatatccggatgggcttggcccactttatcattactgagggtcccactgatgagtcttgaatgttgtcctagagtccacgtgtcccatgctggaaacgcggataacaagtgggttaaggtataagactagaacgatttgaacactaaaatcatggctggaagagagaaaaacaacaatgacctgaaaaggaaaaaaaaaaggtagaagaaagagagaaaggaagagaggtaacgtgtagcagaaatgtgggtgaaaacatgacatcaacaaaaagataaaaatgtaattagtgagctttttaaaatttaaaaatgaaaaacaaagattataaaaaaattatatgaaatttaaataaaaatgtaaaaaaatatcaatttcaacatctagtgtaaaaaattctacaattttactctttaaggttttgattataacattataactaaattttccaaatatctgccacattaaaaattttattgtccttatttatttatttatttttatatcatgaattaattttggttttttaattttttttcctataaatctaaaattatttaagtaaattagtttgaatggcataattgtaataagaatataatattatgtctagtttttaaatgaagttaagtattatttaaaagatgtcattttccatcaaatttgatagtgagaacaaaagagaatgtaatatagaattttttttttttataatgaacataaaaataccaatcaaaattataattagtgataaaaaccaatatatatatataaaagaaaagtataaggtgacatgacattctaaaattactctaaaattatttttttcttctttccttgattctctcaattttaatattttattaaagtataaatctacaaaattgatattttattattattttattttttttattaaaatataaaatattttttaaaaaaaagttaaaaaataaaaaataaatttcaaaaaaatattaaatcttaaatcaaatataattaatggtaaatttcgtatatatatatatacataaaatattaatcaatatatataagtttatatctatacacataaagtagagacataaagccgtgacattgtactctaaaattactttaaagctatttttcttttctctctttaattttcttattttttttaatttttaattcatataaaattgtttaaacactatttttctcttttctccttaattct

SEQ ID NO: 19111 - DNA, 3313 bp, Cannabis sativa
ccttgtccacaatagaaatgttttgtgcattgatcattagtgaagaggaattaatttagcttcctgatttaccttttcttctgctctttaacttcaatctgaactttactcacgcagcttgtaatagaaccaaaattccggacaaacctgcaaagaaaaagattagcacattcagagcctccagaagaacggctatatgaccctgaaggtgttggtataattctcagaaaaggggatgaggttgttttccattttgtgttgttgaaagtttcatgcttattctgtcacatcttaattctccaagcattctgatcatatttatgcttcacatcttttttccttttggccttgttcttcaagtatactgtcccaatagttttttacttcatacttacgtcaagaccaatttgagtaggctttgtttggaattggtggatttcactcatatcttgtttctcaatcaatttaatcattattgttcccctttgcttggatgagttctcaatctaattatattgctcctctgccaatctgttcaggtaggtgcttttaacatgggatcaacagtggtgatggtgttccaggctccagttaagaagactgttgattctttatctgaatttaagttctctgtcaaacgcggagataaaattcgtgttggagaagccttgggtgggtggcaggaacaatagctacaagccagaaaaacataaggaaaatgcatgcagtttttttttttttttttttgcatcatatatgacactttttgagaaaagcaaattcattaaaccatgtttttcattatagcacaaatcaatctcacttctcatatattattcatcagagtagatggtacgttcattaattgatttgcttgctgcaaatgcatatcactgtatcaattttgttccaagttccaagttttattgatgattgtccatcataaagaatgacctgtgcatttccactagtttgtacttgtagtacaaagtagaaagttactcaatcttatttattaatactcgtgctaagtttcgttagtatgcttattgagattaataaggaaaggaatcattgatgctcttaaattctcagtatttccataaactccaacttaaagtgtataaaaccaaagttctaattataatattcaatgctgaaacatcaaaaagattcaacatcccaaattatatcgagtttaatacaatcagccaacattcgaggacagcaaagtccttgtgtacattaacagagaaaacccaataatcttccctcaaaaacaaaaactcatttgtacgacaagcggcaactaagattttgtgactagaactctccttcttgccctcaatatgggtcatgtagccctttctaatcggttggcagcttattaaagctttcgggcagtcggtttttgcatactgctgacccattggaaaaaaccacggcagctcaggaggtcgtccgacatttttcttataacaaacttctttagcatgaaagcaacacagatatggcaggcattgggatcggcattatgccagccagtgtccatcttgtctattagtatatactagtaacaaatttagatattgatcactaagctcatggagtcactaaatataagtcctacataacagcattacacactacaaagtatactacgttcatgggattgctaagcttatgccaatagctaatttttgcatatttataccattacagagtatatagggaagcaaattctaaaacatatcaaacagcaaaattttcagacacctctaaattaaccacattctttcacttttgatgatagaaaaattcttttaaaagaacagagttcaatatagttaactgtagggtgtacgcatacattgcagtagaaattaaccaaaatggagaagaatctagagaaaggtatacccctcccctaacaaatgtatgtactgcaaaatcatttctaaatttaatcataatgaatgatcaagatagtaaagaaaacaaatcaagattgtcgtgatccaaaaagttacaagggaaaaatatattgacaaaaatgaatccacatataggcccctaaaacacaagcatgttatttctgtaaaagtgaattaaattcctgaacaaacccatatagcacaaatcgatgttccaatgcaaatttacattttgattacttcagtagagatccctcaaagcttttgtggtttccatcttctcaattgcctaaaaaaaacccagaaactgaatccaaatctctctctcaattctctataactctatatcaaaactttgctcctgtaaaaacccacaaaagatatcccaaaattagcttcatcccacttctaaaatctcccattaaaataaaaaattctccaatcaattacctatctacaatttaccaaagtgtttttcataataatagtaataaaagcaaagcacacctacgtctgtttggagtaagaggaggaagaagggacacgcttgttacgaaacatcatataaccgacgggtaatacaactccggcgatcatgatcgctgcaccgatgatgtacctgagcggactcggtggctcaacctctattatccccatcagctgcaaagtcaatgatcattacattaatcattccattagatctggatccaaacagctcaacacatacaccattatacacaggaaaaaggaaaataaaaaagaaaagagagagactagtgaaggaaggtgaccgtacgatggcgaaggagaatctgagtgggttaagaatgtctggggacggtgaggtttgggagggacgaatgagctctgcgactgcgagagtctaaggagagcagagaagtagaggatctcttgtatttggtactgtaagatcgataatgggacttcggatggataatcacaagcttacacgtggcgaacatcaaatggtgcttgcatttccttttcttttttcctctcataagtaagaagagtaaattgcacttcttcaccccattcatttagcattggtgctacgacttaatatcagtgagtttggtcggatttttttttttatataaaaattcagaattcgattttcagtctgaattagtgcaattcgacagccgaccgaccaatccaaaacttgaattaaaactgactgttttaaatcttggtttgatcagattaaactaccttaaccgaacttttttttttttttaaaaaaaaaaaatataatctaatttattctataaagatattattctacattttataattacaaacatacaaattaattgttcaaaaactaattttcttattcttttaactttaatatt

SEQ ID NO: 19112 - DNA, 2707 bp, Cannabis sativa
tttttttaatcaatacactgctcatttgattcaatttgttcagcagagacgatccacctagcatctgtgttgtccttcccactctcttgccaaataatcatatttttggctcttcaaaaccttactaatcttccaaaaaatttatcctacaaaactttttccacctgcttaatgaaagcttatctgggtgtgtgtgaaataagtgtaaatacaataaaattaacgttcaatgatatgtgttccaaggaagatataatcaatattagcaaacctcgatcaaatctttgagaattggttgtttcacctttcattttcattttcttggaacttcaacaatgcatgacgcatctcaagttttctttctttcatttcctccaaaaccagccttgcctcgtccttccttttcaacttaagcaaacgaaaagccaaacacccgaaactctcattatctagccacgcgtccttcccgcagtaggttctaacaaacttaatagcctggtcgtaatagcctaagctcaacaacgcgtcaatcacatacaagcgagttgataatagcataggaactccatcatcctccatcctcctaagaatcaccaaagccccttccaccttccctgccctacatgcgcctaacactagggcatcataagtccgtccatttgccttcatcttttgttcctccatccttgttagcacaaccgctgaagcactcaaatctccattggcacagtgtgtcatcaagatgtaattataaatcattgaatccggtacaactctaagacatctcatcaaatccaccacacgccatgcctcctcaattttgttactccttgcaagcactttgactataggataaaaactacacgcattcaagttgcaatctacacgggccatggaatcaatcacacgcaaagactcctcgatctttcccaacttgcataaacgtgatatgagtgcattaaaggcactgtttcgagtttggctcttgtcgagattaattaaggtcaaaattagattatcgagcataaggagggaggcctcattgtcagtgatgaaattgaaggtgttggtggtgttgtagcagacatctttcatgcgcttattaaggagttgtcgaactgtattaaaatccccagagctaccagcatcattaactagatcatcataataggccgcagttggcttttcaagaaattggcaattgaaaactgacagtgtggagaagcaattggtaattcttaaggcacgttgaaaatgaatggccttaattgaggcttcgtggaccaaagagttgatcattgggaaagagatttaaagattaatgtggcttaagctgcaaaaaagatgagccaaatttgatcgatgatatactttctaattacataatattgatgatttcttatctaagtaacccaacacatgtagaagtgagagagaaattaagaaatggaaatgaaatcaaatgcaaaaaacaataaatagataaataaacaagaatgaaaacaaatgtctgaacttaatttaattctaaaaaataaaataccctaaaccgtcaagatctaattgcctagccagaagccaactgaatatccaacaaaatagagagtaaattaaacctcaaaacagtcattcttcttcctcttcttcagttaaaatctattgaaactaaggtacccgggaacagacataggcacagaaatatcctatatagaaaagtcgtaatatttgaacaaaatcacccctatttttaaagaattattgaatcaagaaagtctccatggatagtctcctctattgataagctaaggtctgtaatagcgctagctttattggaatataaaagctaaatagcttgttgattgctactaaaagaataaaattaaataaaaatacctggaagaggaagaaaacccagatagcttgatggaaatgtaattagctacagcgatgaatgatgatgaaggttgtagattgagctcttgttgttacaataggcaattgcagtaaaggtctgcacttcttctatacactaatgctgtttttttagtttttccatttttacacaccgggccctatcctaaacatgctacccattttttttcttttctttttttaaagggaaaatctaaacttcagctactccaagatacttttccaaattcaaaatttgagcaaaaaccaaaccatactaaaacgaacactttttttttcttttaatcttttggtatatttaatatataagtaattcgcagtataaatattaagtttaacttctaaagcagataaaaacctaagtttaatttttaaggtaataatacctaagttatatttttagaactttcgtaggtacgtggctgttaatcttgattgttccaggtcattaaatttttattttttatttaaatataccattaaaaaaatgacacgtggataatgacttcacacttaacgactaggtaccaacagaagttctaaaaatataacttatattattaccgtcaaaaattaaacttaggtatttatctgtaactaagagttcaactatgatatttaaactgcaaattactcttaatatatcaataccaaggaagtgatgatgtggtgattaccatagatatagccattcttaccactacactaccagcttaaatgtatagacacaatcaaaattcaagctcgtagctttggtctagtggtgaggtaggaa

SEQ ID NO: 19113 - DNA, 3985 bp, Cannabis sativa
tgataaagcaaaacctgtaacagaagttagttagtctgttagttaactctgtccaactgtattctgtccaagttggttatttgtctgttttcttttctttattctgttttgcttttctggtgtaaagactctttgcctataaatacaatacctgtcttcaagctctgcatcttttgcaagcttgagttcttactgcttgtattgataagatcgttcatggtatcggagccattgacggaagtcttctatggatcctacctttgttgaaaacccaccacgcccctctggtcagaaccaagggcctcaacatcaaaatgctactctccagaacaactggaacccgtttcaaaattccctcaactcctcactcaccgtcaagttggatcgatccaactttctcgcctggaaatcacaagttatccctactgtcattggtcatggactggatgatatccttcttgctggtgtggctccacaagaaaggatggttaatggtcaagaaaacccaatgtttcttgcgtggaaacgaaaagatcagcttcttctcagctggctgcgatcgtcgatgtcggaatcgattcttggatcagtagctcaccatgtcacgtcttcctctgcctggcgtgcccttgaacagagatttgcatctcagtcaaaagcccgattacttcagatcaaatctcagctatccaccgttcagaaaggtagtctttcaattgcagattattttgacaaagttaaagttcttgcagattccttgtccactgctggccaccctcttgatgaaagtgatctcattatgcatctcttaaatggcttgggccccgaatacgatccggttgtggttcatgtcacgagtttggtggataacctatctttcgactcgattcaatccttgcttcttactcatgaaagtcggttggagcgtcattacaccactggagcccccttatctggtctttctgcaaatttatctgttggatcgtcaagatttggggcaggttctacaaacaatcgatctgctggttatggaggtcgtggttatggtgctggatattccaatcgtcccttcaatcgtggacatggctcaggaggtcgtagccatggcaatcctcgcacaatctgtcaagtttgtcacaaaagtggtcacacagctgctgtgtgccactacaggttcgataaatcattcgttcctcccaagcttggtgaatctcaggcattcttgacagaaatggaggatgatgatcagaatcattactcgtcccacaccattcctgattttgcttatgatcaagaatggtatgccgatactggggctaacagtcatgttgcaaaagggatggaacatctcgattatgaggctccctatccaggccaagaaactcttgctgttggcgatgggaagcaacttccaatctcccatattggtacatcttctttaccttcctcttctcgtcctttaaagctcaactctatattaaaagtccctcatatcaccaagaacctagttagtgtgtcgaaactgaccaaagataatcatgtttttcttgagtttcacacaacttgttgttttgtgaaggacaagagcaccgggaaagttttgctcaaagggagagttaagaatggcttgtacatgctaactcaaccatctgcctcaaataccccaattcaacttcaatgtcacctagctacaaaagaacccacttctgtatctactgcagatttatcttctgtttgtaattgtcaatgtaataaagggactgtgtcatcagtcccaactcaatgtacttttcccaatattaatgacaatacaatttcttctccatctattgtctcagctagtgaagttttccacattaatgttgcacaagatattaatatctggcattccaaactaggccaccccggccctgcaactcttgctagagttctttctaatatcaaccatacaggcaccttaaaaagtctcaaattttgtgatgcttgcaaaataggtaagagccacaagctaccttattccctgtccacaagtagagcctcctcccctcttgaactcatccatacggatgtatggggaccatctcatgttccatccaaggatggttttcgctattacatccattttattgatgattttagccgatttacttggatattccctctcaccttaaaatcccaagccttttctaccttccttcagtttagacaattggctgaaaaacaatttaacctccctatcaagtcagttcagtctgactggggaggggagtatcgctctcttgctgcatttttggctcaaaatggcatacaatttcaacattcatgtcctcatgatcatgagcaaaatggacgagctgaacggaaacaccggcatatcaatgacataggtatgaccctccttgctcaatcgggtcttcatctctcttattggtggcatgcttttcaacatgccacatatgtcattaataggctccctacacctgttcttgacaacatatctccttatcaatgtttgttccacaaacaacccgattatgccttcttgaaaccatttggttgctcttgcttcccatacttaaggccatacaatactcacaagatggcagtaagatctgaaaaatgcacttttattggttactccatgcaacataaagggtatctatgtgaaagtagctcgggcagagtgtacattaccagaaatgttgtcttcaacgaggaggaatttccagccttactgcccaataatactcagcaggtaatgtccacttcacctcattcttttcccactgctacattcactactgattttccaccatcacatattaataattgcccttctactgcctctgaggttcccaccatgagaccctcacacagatcttgcagctcttctcaacatgtcatcactgctggtgtccctatgaatcaagagactcatgacacagctgctattaatcctgcaacaacaagcaatactcttgcttccccatctgctgaccctgctgttgttcccttaccacatccacctgatacacatgccttcccatctcactctcacccagaattaccaactgctacagctgtctcgactgtcccactcatcccacagcctactcccacagccaacatacatcccatgacaacccgatccaaagcaggcatttctaaaccaaaagcttatattgccaccaagtacccactgcctgaatctctcttaccaaccgaaccaaaaactctcaaacaggcccttgctaatcctatttggaatgcttctatgacatctgaatttcaggctctcaaaagaaatggcacatggacacttgttccatatcagtcctacatgaatttggttggcaataaatgggttcatagggtcaaactaaatgcagatggaagtctcgaccgatgcaagtcacggctagttgctaaaggatatcatcaaactccaggaattgattttcaagagacttttagccctgttgttcgccctgctacagttcgcatcatattaactttagcagtctcttacaactgggttatcaagcaactggatgtctctaatgcattccttaatggaactcttgaggagacagtattcatggctcaaccaccggggtttgaagaccctgtacatcctcaatatgtgtgtaaattacacaaagccatctatggcttgaagcaggctccacgggcgtggaatgataagttgaaggccacacttttctccaggggtttcaagtcctctaaatcagatccatctctgtttattcatggtgctgccaactctctcatcattttattagtatacgtcgacgatatacttgtgactggaccaaactgcacgctcatcaatgacttaattacctctttaaatactgaattctcactcaaagatctaggcaatcttcactactttcttggagttgaggttctacgcaatcatactggtttatacctttctcagtccaagtatattacggatctg

SEQ ID NO: 19114 - DNA, 8187 bp, Cannabis sativa
attctctcatgcagtgtcattctaagctagaattgagcctcactaaaatccaagagcaaaattggctaacccgcaactgtaaaaactttaagatgctctaagagttttcattaaatggtcaaaagcttttgatatatatatctatatcgaatttatctcacagagtactcttgcttccctctgaagttcaatgaagctgctgactccaatgttctccatagactcctcaaactttagatttgagatgaaactgttcagcttttggaccaattgtaccattttctcggctgaactaagctcggacaagttgttggctggttttctgtgtttaccatatacagcctcaaagttggtagacctaactgctgcattttgaagaacagagttgggaagtcctgtagcaaaataataggaaaagacaaatccaattcaaaccgttactctccaaaattgataaaatggattaaatagattaaatataagaatttgattttagtatggaagactgcatctttaacaaattcactctcctacctataatgctagcttcttcgcatattatctaaagaaaaagacggaaactattgggcaaggagcccctacttctgactagttgataactgatggcactcaatgtggattggattggccaactaaatcgttaataacaaaaccaacaaatgagaaaaccttaccagctaatcgtgcaacattgactccatagcttttaggacaagcaccatgagtcagcctatagagaaatgttacttcttctatagctccaacactgcttccaacttggcatgccatatggcagagctgaacctattgaaaatataaagagaatcagagaaaatattgatcagtccctgtcattttgcagcatcagctatgatcatacaatcattatcatgcattgaattaaaaataccaaggtcaaaaaacattacatcaaggatgtgagaataataagtccaatcgaaaagtaacaagcaatcctagaaaagaagaataagaaccttgggatctttctgataatctatggctaatcgatggtagtgagtagaaaacatccctctacactgcaccttgtgaacaaaatgttcaagaactgatccactgcatagaagtaataatggaaaaattaaacatttaatcaagctctaaaacatagtatacagcagattatgacacctacgcaatggcttgtccatctgaagttgaggttcctcttccaagttcatccagtgccaccaatgaattatgagttgctgatgactgctcaatacattaaatacaaataacagaataagcactggtgttggaatacctagtggataaaaaaaataatcttcctctgacacagcgttctgtttggaaccttgtttttgatgaggaaaaagttagagagaaaggctggaggaataaaaccctaatgctaatttgtacgagcttttatttaacatttttatcttaacgattccagaccctctaaaatagcattaaattcctccctcttcccctaaaattcttttcactaacattttgttaaaacaagaggattggaatctctcaagcacaaacatttacttaaaaattcacgttctaatcacggcctaaatgaaaataattctcaccagcatcattgcagtttcagagagctctgttaagaaagtactttgccctgccataatatggtctttggcacccatccgaacaaagattctatcaacaggagaaagctcaaatctttctgcaggcacatcagctcctaactgtagaagaaagtgaaatcaggaaaataacaataattctttagaattgacaattttcatattaagaagaaagcatcaactggggaaaaacatctgcaaagaagggcacacaagttgtttcttaacatttacttgcctgggccaaaattacagttaagcaaacttgacgaagaagagttgactttccacccatatttgggccagttagaagaataaagctagggttgccagaacctccaatagtaacatcattgggtacaaacgaacccttgcctaaggaatcacttctcaggacaggatgtcccaaactttttgcagacaaacagggcacctcatctgtacttgaactcagtattgtaggctgacaagtaggtccttcataaaagtcacttgcaatagcaagacttatcaaaacatccagctctacaacatttgagattcacattcaggcatgcaattgcaaacagatgaaaagtgaaaatacaaagctaatattccattacttgcaaaagaacaaaaatttcattattaacattattcaaacaaattaggagtcactttgagtaagtggttgttcacgagagaggatactgtcaaattcatctgagtttattgaagtactagataatgcttttgaacttgtaataatacaataggtaaattagatgatcctctatgacatctcttaacagatattaaacataaaagagcaaaattctggtgaaaggagaaagcatgtaacctgcagttgttgacaccagttgtctccacttagtatgatgctcacagaaacgtccaattaatctttgtaaaatgcttttcagtgacgactccttctcgcattcagcttgagctagctctccaagaaacttcttaatgtttggtgtccagtacctgaagaatccctggatgtgccagtacaggagaaaatatggtcaaagtcaaatctgagcaacatgataaattaagcaaatttacaatctccacaggacaaaaaattacaaaatgaacacggccaaatgtttttataatttcatattgctgcatggttagccatgtataacaaacaatctactcaaatcaataggcttttctctactaacctttttggatgagcgcaactcatagtctcggggtacgcggccacgcaaactttctggcacttctaataggtatgtatcttttccaactgtgacataagcaatctgtaatagaacaccagaggtcagatttgataagctatgcccttacatttgtatgtgcactactaactactaagaaatcaaaaccaagctcaaaattttcttactgatgtatctccaagtaatttgcactgttctttgaggtatttggctaagctagactcaatctccttaacctttttacatgcagaatcatactctatatcaactccttcatgaggaatgatacgacctgaatcattagcctccatccaatcaaaggcatccttgaaatgagtaagaactggatcaatgtgaggaattcctgaacataaatgaaaaagaaaatttcaggaaaaaatgaactggactctttagaaaatggacttattaacccataaaagataaaatggttaactagatcataatttagaacaatattttatacacatcaaatacacaccagaacttagcaaatgatgaagttgcctagattcaacattttccaaaatggcgccaaacgaagaacaagcctggaccattaattcacaaccacatagagctgaaataaattcttgaagctgtttcttggctgcatcctcgtacagggtaactttattagcatttctcccattagcttcactgcatttggtaaaaacagttaaatcattcattagtcattaaaattctatttaagaataaacattaaatatatgaatttcagcactggttcttcccagcttacctaatagagaacacacgtggtagcagtctctccatgtccggcaaccttgataatgcttttcgatattcaaatgataaaggtagattaacaccctggaaagcaaactacatgtcagcatatttccaaagccatgaacagcaatgtacaataaaagctttaaagaaaataggaatcgcagacaaaaatataaggagtgatgacttttaaaaaataactacttttacccttaaacttgccacagccttctggcgctcctttatggactcaacattatatagaggtcttgcaagccatgttttgagtagcctcttcccaaatgcagtcacacaatggttcagttgtgcataaagtgtccttgagaaagtacacatcatctcagtaaagctgaaactaaagttaaatgaaattataaaacaaaaggtacagagcaagattacccaaaggagtctccatttctactgttttcaaaaatctcaaggttctctagtgcagctgcatcaagaaccaagaatggttttgatataagatcacaaaaaccagacgagggaagcagctcaaatttcgcatatctaagcaatgtctcatccagaaaagcctgtttcagatagaaaagagttccaccaagagctgaaagtgcatagcttccattctcacccgctcttattagctctactaaaacatctggtaggtgagacaattcttcctcagtagaagaattcttaacctttaaatcttttctgcttgaagaactggaaactgattggtcagaagctcgttcatagatgcctttcacttcatgaatagttttctcagtatcccagaactccaagcccggaactagtttgttcactagaggagatcttgtatgtctcagcagcactttctcagtttccagactaagttgtttagcaggttgtacaatttcaacgggcctcagctcagacaagagacaagacaatgcactgcactctgaatcgtcgtgaaactgtacaaaagtaagcactcttaagtcaaagaaactcacgagcataacatatgtgatatgatgagcaattaatgaagttttttaataaaaacatgccaagacacacttgcacacacacacacacacatgtatcatgtcagtgaaaaaactgtagagaattgttgatcctgaagttgtacaaacagattcacacctgtccaagaataaccctactggtagcaacatcaactacacaaaccccaaaattccgctccacattttgggttcccacattctgagattcagtcaatgccattatgtaagaagcatcaggattggttgacaacatctccccctcagttagtgttccttttgtaaccactccacatatttcacgtctcacaacctataacaaagaaaataataatagtcataaccttaacataattgcagaatggacacatgagaaacgggagagtacatggctattactacaaatgttgaaggtttaagaaaaaaggcaaaattttacagaaaaaataagagacatgataaataaaaaagaagatttgctcaagttaggccttccaaataacaagtacaggaaaaaggaggatgtgtcacgatgcgtaaaaagataattttcacaaaccttatctttagatcctttctccctgcgacgaagctccaactgatcaggtgtttctgtttgctccaccacaagaactcgataaccctgctttgtaacagatgtttactttaaatttcttccacagaatagaaaatagatctctcaaaaacatcaaagtgcatgaacccaaacacaaaaaacattaaagtaaattatgaaatctagcgcccaccttcctagccagtttctcaacattcactgaaaagttcttctctggaaatccacagtgaggttgttctccctaaaagtagaaatcaatattagctaaaaaaataaccaaaaaagtaaataaaagatccagaatgatgccagcactttgtcttggtgtttgaaacaaggcttacttcccctctcttttaaaagaaaaacaaaacacttatcatgcatactgtagtcagcaaactactgcacccaaacaggttaccttcatatattgcaaaccgagctctttcgctcctacgtgagcatccatttcgaaaagttcataaaacttgcccatctgcttaagcaaacaaggaaaatcagttttaagatattgtccagcactactagcactagtaactgaaatgtaatgcttaccttgaaaaacagaactttgtccatgtgctttgacttgaattcccaccattgtctctgaaaagcacatgccacagatgaatggcaagaaaatgaaaaagtacttcaaaattttacaatcataggaggaaagtcaaacctggccatctgacaagctctttacaaatatgggaggtaaaaaaagagttttagggtcatagtttggatctccaggtcgcctcctatttgcatccctacgttcgctgtttccacaagtaacccaaaacaagattaatggaacatgccacaccattaaacataattcatcctatctatcatatacttctctcaacttgctcataaacctgagttactaatgtacaaggtaaaactgacatgcacaagaatagatatagaaaggtgaatagtgaatttattgagagaaccatcaggatcaggcatcaagagggaaagcaagaagacacagaaatgcaagcatatgtacaaagggagacgctgagatattgttaaacaaacttactccccgaggaagtgcaacttcttagcttcacggatgctaaacctttctgaagcatcaccagataaatcagcattaacagcattagaacatttcgcatctgcaatgaaacacctcaaattcaatacaaagtacatttgatcaaatataatatccgttacattctagaatggagagctacattattgtcatgtcaaaacaagggaaaaccatgttaaaataaaaacattattgactagatatcgtgccaaaactaaaggcaactgataattctaaaattgttatcttttgagcttttgaatttagaatttatatcaaataagagtgatgtgtgttcttagtatgccttctgaatcattttagctattaattttgttggcgggttctatttagttgatgctaattattgctggaaataaatagaagacagaaataaaagaaaattgtaaattctatcatcatggtaaaaaggaatgaaagcttggaaaagattggaatggaggcgcttttgaagagagtggcttgaagctgaaaactgaaccttgctgaaatatctaaggcaaacaagcgtttaacaaatattcaaccttgaaagttgaaagaaattccaataaatctggtaagcacaaatcaatgctgctcgtttcagatagtaattaattttttttatttgtgcaaaagttatcattaactctgctaagagaaatgagcagatacaaaatcattggatcaatttattcagtcacatgcatcataagtaaactatatatataaatatatagaacatgtaaagaaaacatttgtaaggacaatcaaacacaacggttgttcttctccattcaaagaataactaagatgacaaataaagtcacttactttcagcattgtctgtaggggtagttcgcatgatagaaaccttagaaccacctttattcacatctttactacccttgctcttcttagcagagtcaaactctactgctccaccaatctttcgcttcttcgatataccttccacacccggctttcctttgcacctcaatgcttcatccttctcatcctcgtcttccaataccatttccatatcctcttcctcactattctcagtaaccattttctccccactcttcccccaatcctcatcactagaatcatcagcaccactaccgtcactgtcaccctcttcctcatcttcaagattctcagcttcatcttcatcatcaataatcatcttcctcatactcaaagaagaaccccgacgcaaacgcttgagtttcttcgcgctttgtttgacccattcaatcttctccttagccaaatccaacaactcctcctccgcgtcgtcatactgcaccaaatgcttgccttgatccttatcgaacgatttcacaaacccctcgtaccagctctcatccaacggccaatacactttgatcttctttccgacagcttcttcgccgtagggtttgtcggaagccgaagtcgaagtaatagaagagggagaagatgcggcgataactaaaaggggtttcttgagcttcgattgaagaggagatggggtgacagggctgggactagggctacgcttttgatcggaagaaacgggcttgagtttagatttaggagtaggattgttgagcttttgatcggaagaagaagtaggggatttggagaagaaggcagtgatttggcgttgctgattaacgagtggggatctgccattggtctggcgacgaga

SEQ ID NO: 19115 - DNA, 3673 bp, Cannabis sativa
actcacaacaaactctttataataaaaattcattaattttttttagaaaatgtgataaaattaacttccatcactgttgtaatctttatctatttcggtatttgaaaaaaaaaaaattagtttaattttttttatggtcatttatgttatagttatttaaaatattttacaaaattttaaaaattcaaaaaaaatttaacatgtcaaaaataagatttaaacagtctattttgcacacgtataaagtgaaagagtctcgcgtacaacagactatttgaaccctagttttggcgtgataaattttccgaatctttcaaattttataagtcatcttaaataactacaatgcagacgactataaaaaaaaataataaagatatttatggtgaaactcccttaacattcacaatgcatatgactctaataaaaaaaaaaaaagtagtggcaaacgtactttatcttatgattttgttaccgtcatactttttttaatcattaaatgtcaactcagaaacaagtggcgacatattatttgattatgtattaaataaactaaagaaatatgttgttacgtatttttgagttaacatttcacgagtttaattggtacttaacaacttaaaaaagctacaactgcaataaaatcgtaaaataaggtaatttttctaccattttttattaaggttatgtatatgtgtaataattgcaaacaaactaaaggggtttcactataaatatccttaaaaaagttggacgaaataattatttcagatatcaaaatagatataggagtgcatcggtcgtcccattttaaggtgtgcattgtagagaataaatagtaagttgattttcttaacttattgtaataatatacctataatatttaattatatatattataaattattattttaatggtgtagaaaataaaaaataatattattttaatggggcatagagaaaaataaagaaaagttaattgatattgtagtgtaaaatacaaaatgacttttcttacgatgtactttaaataataggaaaaaaaaaattattgtgagtgctcttataaaaatgctccacgcaataatatattggattgatcaaatggtttatcaattattattggaaactaaatccatcaattatatccaaaagtacaattacttaagtgttaattaagtaaatatatataaagaggattgttttttgggcacaaatagtgctagccaccttcaagacgtatcactttataattagttatactccttaaaagttattatattaaactatacgagactcgatatttagttgaaccaataacaatattaacatgtagaaaaatactaaacaccactgatatcttttaatatttgtagtatataaaattttacctaatagttattatttatgaaatataattgtatataaattataaaagaaattaaacacaatgagacacataatcagcagaagaaacaaaacaaatctatgggtctcggattaaaacacggtgtcgggtctttgtttgtttggtgtctaactactcttttggttcattgcattatttcatctttccaaaactttctcaatactaaaaccgtttactactaattatattctctatctctagactctacttggtacagtgaatcattccctttatgggtttacacactcattactttcactaatctaggtaattaattatttattactaacttaatctagattatatcttaatcacatcctgccattttttttaaagaaaaaagtaaaagaactagattgaccttgaaataagtgtagtagttattaattagttgtatatatataacgaaagtttgactatgaaaaacgatgaaggaacaaaaacaatccatgttcaattcacataattacattataacaacttaatgtcatgtcgggtcatgcaatacaatactagttggatataagcatagaataaatgaaggcaaaaattatggatcagatctattatatatagtcactttcagttcaacaaatgcccatgtagttttattctcatatgaccctcaaatcttgtgaggagagggaccctcttgtcttttgagtctctctcaagtctctactatagggattattattattattattatttgtcttttgttgatacacagccattatatatatttttttattgggttttgtttttgaacttttgaaagtgaaatcataataatcagaatcagaatcaattcgagcttgagctgctaaatagtagttaaacacacatttggtgaaaatgtacagtaatgggattttccttttttgaagatttttaattgtggttgagcatgaaggctggattggtgtctgtaataaaattaaatgggtgggggccactatatttgtgtttgtcttattttatatttggcattatatgtgtcactaagttagaagtatgataatggtttggttagctagtaggacactaattggtttggttggttgaattgcattgcatagcagggctggtcattagtctttttgacactgaatggcctagtatgaccttctcacttaaacacactcacttccctctttttcaaacttgaaattttcaaatatatattccatgcaaaacactagtggaggaaaaggaaatcatacatactagcttgtcttgtcttatactattatattatctactgtttttttttaattatggtcactgtgaatgcattcattcattattttgtgtttggtttattgtaatggagatcgtaataaaactaaattatttattataatatttgttttgtttttaaaaatgatataatgagacaatattgtatttataattacattaattcccgttacattaaaaaaattatgtaatgagaattacatcacaaaaaaatatatataaaaaaaaaaattaaaatgactctaataccctttcttatataaatataaaaattaaaataccaaataattttattaatttatcatacgaatattcattctaataataaaccaaacatcttaatcaattctcattactattcttattccattatattactattaccattccgtttaaaaaaaaaatactattatatgtattaccattatcattatcattacattctaccaaaccaaacatcacctaaagtgtattcttttattattatccacatccattcacttgcttgatattagtaatggatatttataaccttgtgtttgttaataccattataatttgttaatatagttataattggttttttgttattaaaattaaaaaagtataaatattttttaaaattatgttttatataattagttttactttttaattttttaattaaaattttaaaaaagaagtcactttcaaaagttttttaaacaattttttttttcttgaatatatattttggacaccgacctcaacctagaccttgaaacccgaacccagaccccgactccagacccaaacactgaactgaaattggaccccaaaatcggacccgggacccaacccggacctaggacccaaatccagacccagacctgggcctcagtcacaggcccgcacccgcacctagaaccggatctggccccaggctcaaccttagacccaaaccccagactcgaaccccgaaccccaacccaaactggtcctgac

SEQ ID NO: 19116 - DNA, 5012 bp, Cannabis sativa
ttaaaattacatattatatatttaaactctatactcatcattttctttttgtttcaataccaaacaagaaagtaaaaaattactagtcaccttattcatcacatactaccaagtattaaatagagatgaaaaaataggtcaaacatgataacatgattcaatgctcgttttacacgagtttgagttatttttaaataattaaggtgtctaacctgtttaataaataagtcgtgtttggattgacgcaagttttacgaaatcaacatattaataacccatttaaagctatttaacactttaacaaattataaatgtgttaaatatgttataaaaatattaattaagtcattaatatggtgtgttaaaataatataggttacaaaaatcatgtttggatttcattttttaacaaaattattaagcgaattgtgtttaaatcaatcatatacttataatacataaatcttaacacaaactcgataaagacaaattaccaaccctacaaccaaacataccctaaatgattgcacatatctattgtacgagtaacaatagagtttggaagataaaattaaaaaccaatccaaacaagtaaagttattcacttttcaccacacattttgaaaaattagaccaaaagaagaagaagaggagagagagagaggagaagttaactaagccacaagtttttggatgggcctagcttagaatccaataaaaattacaaggccggcccttaaacaagaaaagtacgccacgtgtcgatccgttagggacacgtttttaaatacagttttcaaagtaagaaagaaagaaagaaagaaaggaagacttgtcattttcatggcaccaccaccatgaccacagagcatcaccacaccaccaccacccacaccacccagtgagaacctctctctctcactttatctatctaacccttgaattattgggattcgattgatttttttgttcttttgagtctcatctcatgttggtagcatagttagtagtgaagagatattgaagctctggttttgggtcggaaatggcggcgttggagtctttctcgaagagattgatagaggaagtacagaaatggggttgcatgaagcagacaggggttagtttgaggtacatgatggaatttgggtcaaaacccactcaaagaaatttgctaatctctgctcaatttctacacaaggagcttcccattcggattgctagacgagctattgagcttgatactcttccttatggtctttcccataagcctgctgttttgaaggtgagataaagattcaacctttaataattaatttattattattattataataatattgtgaatttggtgtgatgattctctgacccacttcctaattgaattttaataaaataggttcgagattggtacttggattcgttccgtgatctgagatcttttccggagataaaagatgcaaatgacgaaagggattttacacaaatgattaaagccattaaagtgagacacaataatgtggttcctatgatggctttgggtgttcaacagttgaagaaagaaatctccattcctactcggactcttaatcaagatattcatgagattcatcaatttcttgatcgcttttacatgtcaagaattgggattcgaatgctcattggtatcatcttcttctttaaactttttcttcaattttttcataataataattgcattacttatgctgtacattatttaggattaactttaaattttcagaaaataatagtttataatgtccaaaatatagttcaattatgagcttttgtaaaaatagtctttttattagcaaaaatatctttatatggtcccagaaacgatcatgaattacactatgttatggtaaactactaaagaagtaaattaagtgagattatttgacaaattttagtatttcacattgttagttttgcaaatttcgcttttgatttttcatctgtaaattatttataatatgttgaaaatatttggttgtttgagattcaggcaattgcgggtgatataactagtaaatttgttctcctcatgtcaacatattttattgtagagtaataaagatttttccaataataataataaactgaaatactcaggtcagcatgtagaattgcacaatccgaatccaccacctcattgtgtgggttatattaacacaagaatgtctcctgttgaggttgcacagcaagccagtgaggatgcccgttgcatatgcctacgtgagtatggctctgctcctgatgttaacatctatggagatcctgattttactttcccgtaagtaaaatcgttatcataatcaaatcttattatgctctctgatgattttattatgatatgaacatatgatatgagcctgcttataccagctatgtcccggcacacttgcatcttatggtgtttgagttggtcaagaactcattgcgtgcagtccaagaacgcttcttggactcagacaaacttccacctcccattagaattatagttgcagatggaattgaggatgttactattaaggtactcaaatttcagaactttcccacattacaaaacaccaactttaggctggtcttttaaaagctgtttttgcacttatcgagctcccaaagcacatatgttgctggtcgggtaatttcagcttttagctctaaaaagttaaacgaaagccaactttagtgccttaatgcttgtctgcttgcttaaacaagataatgtggtttgtttcgtaggtctcagatgaagggggtggcattcccagaagtggtctccccaaaatcttcacttatctttacagtactgctaaaaaccctctggacgagcatgctgatctcgggatggctgatacagtggtcaccatggctggatatggatatgggctccctataagtcgcttgtatgctcgatattttggaggagatttgcagattatctccatggaaggatatggtgagttgagttgaattcaaacttctttacttgaatatgaaaatcttcaattcttgatatgtttgtatacattttcgtgttgtggtgcttaaacaggaactgatgcatatcttcacctttctcgcttgggagattcacaggaacctttgccataagtaagcaagtagtctccatacataaaaatgtaattgtgaaaagggttctttttatttgcttgtcatttgttgattctggtaatttagaaaagagagagagaaaaaagaaagagcagttgtgaatattctttatgtgctcttcacaaaagtgtatgatgaacatactatttatttacttctcaaccaattgcaaaaagacaatttgattaattgttgttgttatcttttacaatagtagatttatagtagagcccactctacaatagtagtaattgttaagtgttaaattatggagggtatagttaataatacaaatctatagtgctatttctcccaactaacctataacatagatatgatttttcccaatacatatggattttccattttctgagtttttaattattgtagagtaaaaggtactggtgcctagcatcttcctcggtgttgtatcgctattggtgtaatttaagaaaataatttttagaaaatattattaactaatcgtaagacgtcacctatagaaagtgttggacactactggtgcctaataataatgcttgttgtattccttgttctttttttttactctgaaactcacaagaaattcttccaaaactagtgaggccattgattgaatattttacatttaaattttagatttttcatttttctcaaagtttgtgctttaaagtttagtctatatatgcatttattgttcattgcaagattgaactacctaaagtacacacttattaattagtccattgaagtttcatacttatcttaaatacagaagaagcaaagccatagccataagccattcattcattttctcaagagagtaatgtatttatatcaagttcagctatcaagtagggaccgagtttgaattttccttgatagagatagcttcataatttcattataaattacatgtacacttgttctgtgttcagtgttaaattgtattagtattaattttcatgaaaatactaagagcactcccatcactttttctactttattattcaaaatgctttattaaaatcttattttttctattctacttcacatttttattataccatatattaatttttttttctatatcatttaaatattatatgttacttatataaacaaaaaaaaaaaaaattaaaaatattaaatgaaaaaatagaaagaaaagagaaagaaattaaaatattatttaaagaatgaataatatttttctacatatagagaaacactgtttataatgtaaaacttttgagttattttagttcactgatcaaacataattttaacacatattttttttttattttttacgttttgagttattttgaaaatattgttgtgagtactctagtgtgattgatcttttctaaaataaactaaaaaaaatttactttggcaaagtttgtttttattttttttagatactaatcattattcattactctcttatactaattggacttatgagtaatgatacgtgctgataaatttttctaacaaaatatgaagtaaataaatatagacagtactatagtataacttagtacatttgagaaccaagttataaaaaaaaaattgcagaacaaattagataagtgtatagggtttgtttggcacgttggaatagaatttgaccggattagattgaattatgccgaatgtaattttttttttatataaagaaataaattaagactaattaaatttaaaatatattttaataataaataattatagtataaacaaaattttattaattttgctagcagggttattaactcaattgtatatttttattaattttaataaataaaattttgataataaaaaaaataattctactagta

SEQ ID NO: 19117 - DNA, 2578 bp, Cannabis sativa
acttcagagtctaaagcttggaatctgcttaaacatgactgatgagggacttatccatgttgggagaggttgttcaaaactcaaagagcttgatctttacaggtttgcttcttatccaaattcttatggaaaaagggacatttttgtcttgccttgaaaattgacacaagttttgtttctataatgttattcaaaggtgtgctggagttaccgacaggggcattgaagctataggccatggctgccctgctctggagatgattaatattgcttataacagcaaaatcacagacacatccttgatatccttgtcgaaatgttcaagtctaaaagtgctcgaaattcgaggatgtcctcacatctcctcagttggtctatcatcgatcgccatggaatgcaggcaactttcagagctggacataaagaaatgctttaacatcaatgataacgcaatgcacccacttggtaaattttcacagaacctgcaacaggtaaatacttcttcatttctcctcacactagttccctagaaaattcaaatgaacaattcttaaactaagaagaggggttcatttggttgtgttacagatcaacttgtcatactgttcagtcacagatgctggactgttatcagttaccaggatcaacaggctccgaaacatgacaatcttgcatttgtctggattgacaccgaatggccttgctgccgctctcttgacatgtggaggcttaacaaaggtgaaacttcattcatcctttaaaccgttacttcctcaatacatctacaagtacatggagtcacgtggctgcgtgtttcattggcgtaacaaagcatttcaggttcttagttactctaccttccaatacttttatgctatgctgccaaattcttttcggccaaaagactaaatcatcttatatttatgtttttcaggaggaaatcgatcctaagggatggcaactccacttgggaagaccttcataatcaaggaagaaaaccagagaaactgtgttgggtgagaatagtatgtacacctgtatgcatatttagccacatttttcttatctgttttacttgagcacagaaatttgtctttgttcattaccttgtgatacatttgacttgaaatatagtcaataatacaagcaagagatagtctctgtggcctaatatttatggtaaagaccccatctgttgtctgtatgaggaatttggccaaagtcagagatggatctaactctactgctcccttttttgttttttcttccttcaaatgtattatataatggtaatgctattcaatttttttatctctacaaattagtagcgttgggacccaaaaaaaagtataatttaatcaatgttttctcttgaatcggaaccagacaaaaatgtaatataatgaagtatttaattatgtgttattatattccttttaggttagccagtcaactgttcaaataatttatctaaatctagttggtgtttttggggtttgccattttcttcaccatcttctaggctataggtatatattttatatcacatcagttgagatgaatctgaagaaccagaacattaagagtggagttgaaagaatttgtcctcaaagtcatacatcgtttaaatagaataacatcaaaggtagtcaacttctgaaataatgaagctaaaagatgttcttactgtttagtgtgaaaagtgacataaaaatttgttcaccataaccattttctacaaataaaactattaacacaatcctattaggtgggaattaaaagacattggctagttagaactgaggattgatgaattaaacaatgttgttcaatttttttttttcgatctacaaaatatgctcaaataataacatttgtattttcagtcatactaaataattttgattagtatatatagctaactaaatccatgtaaaagaaaaagaaaaaaaaattaggtaggtagggtacatattatttattgagaactttcttttattttaaagacattataatgtataattgtatatcctagaatttttaatttcatatcactgtatgggattccataccaaaaaaaaaaaaaaaagaagaagaagaagagagagaaaatatttaatataccattttcaaatggtgcatcactgttgatttaaatgataagatttgacgtatttattttttttagtaataacaataattatatgaggcaccaatattaaactctcccattctcataacagaataaataattaattattatacaatattattattttacgtaattattaagaatttatatgtaatttttaattgagatctaaaaataccttatgcttcttttaagtagaaaatctacttttattactaaagcaaatcagccatcacaatagcttgaaaatcactaggacaagcctcctaccctagccacaatcgagaaagaacaagagactttcgccaaataattagtaactttatttgcaaatcgtttaacaaagataattaaaatattttttaaatcaaaaattaatgcacgacaatttaaaaaaattaaatcaaagaagacacatttaaaaag

SEQ ID NO: 19118 - DNA, 3699 bp, Cannabis sativa
gtaaacattttcttttgcataattcaatgatcatgactgttagtagaaagaaaggaaaaaatggtaattaagtggcagtacctgcaaaactagtgatgaaaatatctctgtagttgacatcctgtgactttgatgattgcaaattgctttggtaacatttactatgtccattattcaactcagatgtcaacagcacgaggccgtaatatgaaaaagcatttccaaaaaatacaaaccatagaagcaaggtagacctaattaatttgggggaaagaagcactaatagtgatgaaaatgcccccgtcttagtatctgttgccttagaagttgtgctttcaccccccacagatggcagtaaacgtgtatcttcttcttctgatggagtattcttttcctgtagctcaatttggtgatcagatacaagaataccaggagggagcttggctttgttcattcttgctattttttccaaaacattgagtgcttcagccgttcttcctttcgagcataaaaatcgaggtgactcaggtgcaacccaatagaatagaaggagaagggatgacggtatcgaagatattgcaagaagccacctccaacccagtgttggcatgacaaactgtaaaccacacaacatttcaagatcaagatgcaaatcaagtgtatttattatcacatatgtgagaggtaaaagacttgttgaaatcaactaatttacttgcaactgaaatgattttggttgcatatctggtaaatttaatggaatgacaaaacaaagactccaacactctccatttaatagcaattcaatttcaaatttttgtgctcatatattttggtacgatgattcatattcatgtagtaaaatattaacaagtatttagagtataatatatggctatatgagaaagttagtttaaaaagaaaacatcaagttaatataatgaacaatagaataagaagagagtagatggaatgaaggtaaaagaccttgaacaaagccgaccaatctaattaaattttgtgaataaggaactaaaaatgtaataattttgtttttctgaaaaagagaaagaggccacttgtcttagaccgacctccccccattatatattaaaagcctcacttgtggcggagaaaaatcgtggttacaagaaccttagcgaacaaattgctacaacaaaaatagccacaaacgaagcttagatgaaaagaaaaactaaaaacatgaacagaacacacaccatacaccttaaatttctctacatacttaattctgtcctaaagaaaatcataatcctcaaatgcaccctcaacaaccctattgtgttgacccatcatatcaacaataacaattctaaaagcatcaaatcttaatgaaatgcataccaaaagcatagagacatattgaaatgacaacacatcccttctctaaaatgttaaaatttgacacacaacaatggactggcgaaaaacaatgcttctgaatgcataaaattcgtaaatgattgagagggttattccaatctgaagttaaacatcaaagtctaaaaaagaataagaaccaaagcattttctacaaccctataatgtcagtcaaatccccgtcttaagtcatactgctgccctattaacacaatcttctaatctgttcagcataaaggctgaagttcctttacaactagaacattaatttaaaataacagttaacactagatattaggattaggtaaacagatgcataaccatcaccaagaacaataaagtaatcagaagcatacccatgcaattgaagcctcaaaaattgttccaagagtccaaaaagctgaaaaaataaccatccaagtacctctgttaggagcaggaatgaactccagaaaccaagatgagagtacaggaccacctcccaacccaacaccaaccaaacaacgaaaaataagcaatgttatataattgggagcaagtgcactcataaatccagcaccggcagtaaccatagctgtcatgaggaatcctttcctgaaggaataaaatgtaaagtaaattgaaagaagggcatgaaaaattaagataaggggagaggtcttaaaactcagaataagctctagctctactgttatatgaattatcataggctcatagcttgttaaaagagtttgcactggtttgagttcaaatgtcgaaaataaaaacaaccctagtcaaaatgaaatgaaattccagttatacagatgacactattactgttatatgaatactgcatatactttaaatattcaaagtaaaagttgcatcagctgttaactttctcaagaaaaaaaaaggaaatcgcaattgatcatcttagattatatttcctttaaatgaaagtactgatattggcaaaacaaacagaagacccacctccttccatatttgtccgaaacaatgccccacgaataagctccgacgagcatgccaccaaaaacaacactagttataaggctttgttgatgagatgagataccccatgctgatcgaagagctggcccaacaaaagaaagcagcatcatctccattgcctcagaaatccaagccatgcccgcgtaacagagcacaagaacatggaagtttccgaaccccatgaccagaagggcctcatccacagtaaaggttttgctgccatcttctggtggcatctatggaaactgagaagagcaacaacgagcttttaatttgtgttttttttttttttgttgaaatgtacaatcataaaacgatctctatacaaccttgttcacaataacactaccaaccaatccataaattcgaaatttcaaagaaaaaataaacacatggaaatgtaaatctgaatatgaacaagaacattacaatgggaaaagatgatttatactcagatccaaaaatcacagaatgaaacaaactgataagtcaaatgatccaatctacaaaaaattaaagatattgatattgaccggctattttgaccagaaatagtaattttaaagaagaaaaaaaaaggaaccttggaattggtatggcggtctccgcgttcttgaggttgcagggtccctgtcaatggtgattttggtgtgtcctttgagagagaagtcgttcgctttcccgctctcttcacagttgtcttctcaaccgacaaatccagcttttgtgttctcttttttgctcctatgaaattttggtttgacttgttatttaaatttcaaatgaataaacgacatgtcgtattatcaatattatggacagagaaattgaaccggaaattacgtttgtagtatatagtagaaattataaatttatatgaattttttttttatagcataaataaataatattatggggttatgaatttttattattttttttttagtttatatggattttcttatgctatatttttgttaaaaaagataaaaatcccatattaataaaaaaataataagtttctttagaaaagttgtaggtgtcggaaaaatcgctgcaaaaattagtgttgctggaaaaatcgttgaaaagtcattgaaaaagtcaccatcgccgaaaaaatcactaaaagtatatatctcatatataaatgaaaatagaactagttctataacataatgaataataacaaataacacaaaataactcaaatcggttataattgaaatataacaagttttgtaatataatgaataaaaa

SEQ ID NO: 19119 - DNA, 3277 bp, Cannabis sativa
taatactgaataccattaaacgtaagtgccccatatattttgttgttttggcagacaagacacaatattagttgtggataacggctcctaatgagtttaagcacatccagaaccagaggtgggctttatttcccttaaagcgtcacgtaacatgcattcaaaactatgataattatatatacaaacacaagtacatataaaaggaacatagtttccgaagagaaaaaaaaggtttcttggtcgtcatggactcttccttgctccaacgccatatctttcttcatatccttaccagttccacttcaaggtacttcttttaatctcaaatacaaacaacagagaaagcctctgtttttgttttgagttaaggtattgtatattgataatatattagtgttttttttttttaattttcagcttacatcgatcatttgcggctccacataacttgggattcggacattataggcagaaatggttgaatcccagttgttgggcaataggggtagctcgaaataaagcaggcaacttgtttgatgatcagactgataacgggtctttgcttggcgccttggacgaatcgtcttccgtgccgtttgggaccctgaaagctgaaatcacccctgaaactattgatttctttgtaagtgatgctgaaggtgatcctgattgcccatctgaaggttactcatcgattgaccaggcacttgatacactgcgccaaggaaaggttgctactgatcttcctatgtagtaactacttgttctgtttatccaattcatataagggttgttaattctagtttgtaaagtccatgaataattaatcaatcgtggttgaacttaagttcaaaatctcataatggttttacagtatatctcttatttgattgatcattttttcttttttctagtttgtgattgtggtagatgatgaaactggggacgttgaaggcaacattatattggcagcatcacttacaagtcaagagcatgtggccttcatgattaaacatggctcagggattgtttcagtgggcatgaaggaggaagatcttgaaagactgaagcttcctctcatgtcaccagaaactgaagatgaagactcttcggcccccactttcacaatcacagtggtaataaatgtttttctagttacccaaaaacaagtttaatgataaaacaggttatagttcatttcaatctaattttcttttggcttggcttgtataggatgctaaagccggcacgtctactggagtttctgcatcagacagagcaaagactgtgcttactctttcatctcctgattctaaacccgaagattttcgaaggccaggccacgtctttcctctgaaataccgaaacggtggtgttctgaggagggcaggtcacactgaggcttctgttgatctggttgctctagctggcctacgtcccatgtctgttctttcatctttagttgactcagaacatggctctatggcctctctggccgatttaagaaagttagccttggaatatagcattcctatggtctccattactgatttaatcaggtgagacttcttgaaacacactattttgtttttggggttaattaaagatgtctctggactggagtacacacattcttctcatttttgttttccactcattaaatctaattgaatttgatccaataaagttgtgtttggtatggggttgaatttggtagaaatggaatgtaaaattcaatccattgtttggtaaaataaattttaatagcttggggtttgtgttttcaaccgagccccagttttaagtatcatgttctctttcaagttcaactcccacaacaaacaccctttaagtaatccaagtgagctttcaagcccaactcccataacaaacacccttaaataatccaagtgagcttacaattgtagttattgagtgaagaagatgcttttctcaatagtcggctcactcaaaacttggtattgtgtgtgatgataataggtacaagagaaaaagagaaaatctggttgaaagaactgcaatttcgcgtctgcctacaaagtggggtgtattccaggcatattgctatcgctcaaagctagatggaactgaacacgttgctattgttaaggtatctgaatttcccacgtaagaaatttgagaatattaactctgacaatttcattaatacaactgttggcttggaaccttttcaacagggaaacataggaaatggagaagaagtcttagtaagagttcattcagagtgcttaaccggggacatattcggatcggcacggtgtgactgtggcaaccagttggatttagcaatgcagctaattgaacaagctggtaaaggagtagtggtttacctaagaggccatgaaggaagagggatcggactcggtcacaaactccgggcctataatctgcaagatgaaggtcatgacacggtgcaggccaatatagagctcggtttagcagttgatgcaagggaatatggtattggtgctcaggtcagtctctataaatttggataaagaatattgacacatgatagtcactgattagtgttaactaattaatactgattttaagttttgagatatttagttgttgtggtatggtatggatgcagattctgagggacataggagttaggacaatgcggctaatgaccaacaacccagcaaaattcacaggtctcaaggggtatgggttggctgtggttggaagagtgcctgtattgacaccgattacagaagagaacaagaagtacttggaaacaaagcgaactaagatgggtcatatttatggttctgatatacaagggcctctagctgcatttttcaaaaaggacgaaaaaacggatacccaaagttaattttggatcacattcacacccccattacagttagataaaagggaattccttgtgtattacatatagctatcttatatgttgatagctatctgtttcgtaattttcaccatgttaccatttctcaaaagctattaatactgctcgattttgttattatcgaatatatgggaattataatggtttattattattagtaattagatacaaggaaaaggcataattaatctgctgacattggtgaaactgccattgagggtaaaccctcatcgcacaaagctgaagcatataataaagggatcacttattttaaaatatgtcatcaattttaataactatcaaatttaattttattattcatattttctcctgctatttcttgtacaaaagaagctt

SEQ ID NO: 19120 - DNA, 4755 bp, Cannabis sativa
tttatgatgcacgaaagacagtgatcttatcatttgacttatttttggaatacactttaattcttttaactgtttgaattgtatggcccatattcgtgggtaaatcctgttcatgtcaacagttgctttcgatggatgagacatggatgttccacttttaggaggagatgaaacattatacaataggctaacagtttgatggatcatgacaactacgtgtgtttagacagattatgcttccaatccccttcaagagtaaaagaacctttcaatcccttgcattcattcatttcccctccctttctgccccattcccaaccaaaagaacagacaagaacaaaaaagaagatataactctttccatctgttttcactcatctaggttccaatgtagtttatccttgtcaaagttcatctcttggggaaaactgtcataaaaccactgcattttctctatttgggcacgatccattgggtttttggaaacataaaaaagtcagttatacgttagccttttttttttctttctgatgtcgttagtataaaagttgatccttctttccttgttcaatatgccttaggtttcaatgttaaaatcagcacttctgtaggttctcatttaatttgatggacttaaaaagtgtcacttcacatcaagattcaatgaaaaaaatcttaattgtgcccctgaacacattgtaattcatcacattcttctcaattttcagtatattattgttgtgctcgtatttcggtcattttctttttccgaacagattcagagaatgcattctttttcttggccaaactaaaccataatagaaaatcaaacttctttaaactgcattaccattttgcaatatttattttttgttcacccttgggacttactggttcatatgtttcaatgagcaggcagaaagcgcaatacttgctctgaattgtagtggaatggtcttaggaacccaaccgataaggtgcgaacaagtcaagcttaattagctagatcttcaatttaaagtcatttctcttatctgtattctatattattcagggtaagtccttcgaagacaccagttcgatcgcgagttgttcgtcaataaccagtcttactaattaaggatcggtggatggaattcaacatagcttctcagctaaggaaatttgatgccttttactggttggtgaaacatttgtttctttccgtttatcagtcttttatgtagcaacaattgttgttctgttactctttacacatcggggcctgcttcaagtttgaagtttttacgggatggtttcgatcttgagaatatcacctgtttcgaatctgaatgcgcttggaaacttctcttggtatagcgatcatacttgtgctcctttacttagaaaaagcttttaattatcatcctttctcttggatagaaggtgtggtgttgttgccaccaagttccaagaacctaggtaccttttgtgccaatgcgcccttctatatttacgttttgtatttccttatgcatattgaacgaacaacttgcctgttatcaagtaaatttcgtttgacagcagttcatttaggttccttttgggtcataagacactggatatatgttgtatgtattgtgaacctttttaaagctctgaatgcccaaggtttcctcttaccatattttggtcagaataggtcgtagggaagttggctcagggaaaacgcatcctcgttttcttctgttatctttatttgttacatccctaattttaaaacatggagatatggttagctcactcacatcatgaatagatgttacagtaatggcgattgtattgtatatgtgtatcttatctctttcataagaaattgaaacgttgtcagaagtgttaagttttcccaacgtcaattccaacctgtgaatgtgaagttctctgggtcctgtttaatttttctttatttgcccttcaatgccgtctcctgacctctttcctttcttaattgtcgtttacaagttttcattcacccttttagaccttaatttgtattttttattttcttcacgttattgtcttccagttttaaaatatataagagaattttctaaatatatatatatgaaaatccttgtttgacgtttgtccttgctgtgctattgcacgcttgtttctttttattttgttttgaataatgaaccttcattgtttttcttttttatacacaaaaaaaataattattttaaattttgtttttttatactttaaattcttttaaaaattcaaaacaagttgtctctacctacagtctacaatgtaaaattagatgttataatttctctctaatattgaaatcagagaatgttgttaaaggcccaatctaagaagtgtttcatttttccaaaactgtgcttggttattattattttttgtttgtttgaaatgatttaacaatagaattggaagcaaagttttttttatttactttaattaatgtgtgtgttttccagggttcgaaaatataataacagaagacgtacccaatttggtagcttaagctttgatatataaagaaaaaaaaaatgagacatgaaaatagacaagaaaagtataactagagagatattccaacaaagaatataaagtagtggtggttaagcagtttgatgatgagacggggaacggtgcagaacaaattgaatatagcatgtattgtagatcatgatcactctcttaattttgtcttctaattttgtcttctcctttaattttaatttttattttattttattttatgatgtatgtaaataagagagattttttgagggagatgctatgcaaatgtaaaatataactctataaaaatttactcaagtagtgtgacaatatattaaattgtgatgtaaatttgtcacattttaatcacaatgtatgatgatgtaaaatttatatcataataaatattatgtttttatatttattattatgccatttttaatgttgtattattaaagtttagttaagatactgattattaactatgacttttattatttacatagttatttttgtattattattaataaattattaaaagagcattatatattaaattttacattaatattaataacaattaatgtaaaaatattacaaaattatattttgggctaaatatagatcaacttttccatcaacaatgatcttaaatataatttatgtgttacaatatatatacatactttatgtaaggatatatatgtcacaatttattatatatacattttgaaagtaatgacaaatattattaaaaaccaaataatatcataaaggattatagaagaaataaggaaagttatgtacctaaacaaattattcttatattcgaagagcatgtagtgcaaacttgtaatattttctaacaagaaccaactcattgaaataagaatgtcgattatcaaatgccgatacaactactaaagaatcagattcaaccacatatactcccaatcttgaaaagaggattaatgtaaagccacagtttataataattacaaaagaaaataaatcagttaacaaccagcattctactttttttttttcttcttttaacttttatttgcttgagtaatagttcaacgaaaatctagttatgaatagaaattgtgcaatggagaaagtgattgatgagtagaatgttcattgtacttagaatttaccttgagctattaatatctactaacttaaccaaaaatattattaccagtagaaaaatgacaatacatataagactttaggtacttttctagaacacaatatttgaagagttggaccatagttatatgatcattgtggatatatattgtttcttaaatattatattgatgatgagatgaggactaattgttttttcttaaagtaattatatggagagaagactatcagcatcagatgcaaatattgaatatacatattcaacgcatgttttgacaaagacaaactataatgttgcctattcagcataaattttccaacagagcaagacaatttttccttttcttttctttttgttttgctgaaacagagtatggccaagcttaaaatacagttatttttttttttaaaaaaaaaacgataaataaaatagattcaacagttttcacctttttgcttaaaagacttttttttttctcatcttttcaacaaagtaataaatgttatttattaattatcattatttgaaaaacattgttacgagacaccaataaattactaataccttttatactacatcacgttgatatcagggattcaaaatacattaaaaaaaaattataaattctacttttttccttaataaagaataaaagtttgagaattgtagaaataattatatgcacactaaaattcttaaaagatattggtatctattatccttctccgtatcatatatttttttttgtgtaattaaaaaaaaaaaataacttttaaaaatattgctaaccaatgaatagggctccacacacaccaagcaatgctcttatgaatacgtaaagaaaatattagctatatgtacagtatataattatactacactatccatagtttccgaaaacataagcagaattatgtaaaataaatttagaaactaaaactctaaccaagcgaatacgtattaattcaacctttgtcttcgtacgtacgttaataaggttctagatcgatcagatcgacttgatatgacgtacgtacttagactttgtgatttttttt

SEQ ID NO: 19121 - DNA, 4030 bp, Cannabis sativa
  modified_base (2531)..(2538): a, c, t, g, unknown or other
  modified_base (3981)..(4003): a, c, t, g, unknown or other
tagttttgccaatagtaacacttcctcggatgtaggctgtttagcattccaaatcacctcatttttaacgctccaaatcgaccataatatcataccagcttccaaacattctgtcaagttccaggctctcaaaccatcttcccaccagctacaaaaaatcatagcagcagctcttacagcaggaacccgaacctgcctccaacagctttgagcaaactcgcatcgaactaagacatgtagagtcgtttctggtgcggccatgcataatgggcagtcagagttaataggtacatgtttggttgtaagctgaaattgagtaggtagactgtttgtgcacactcgccataagaaatcttttacttttgggggaagtttaagctgccataatttcatccaaacacaagaattatttggttgctcattgctggtttttgcctgctgcaataaagcatatgcgcttcgaacagtatacaaaccagatgattcctttctcaaataccagtcatcactctcaacatcagtagccaatggaattttccacaccaggtcttgcacatcatttataacatcctcatcccactcacgcacatcaactttcattaaagacttcaccattctaccaacaaggcacggctgttgagattcaacaaaagggtatacatcatcaacaagtcaaggatcgttaaggatattaatttgtgaaccattaccaaccaatcttctagctccagcccgaaccaacacttaggattctaaaacacttctccatataaagcttgagttacttcctaaagttgcagaaagaaagttaccatttgcataatatcttgctttaagaaaatttccaaccagactatcctcaaaagtaagcaacctccatccttgtttggctagaagagcaaggttaaagtcatgaaaatccatccctcccatactcttgtgcatcgagagcttatcgcaactcaaccaatgtatgcctttgttgctattagatcgccaccaaaacgtgcttattgatctttcaatatcttgacaaataccaactgaaattagaaagatattcatagtgtatccagggagagcttgaaccacagacttgatgagggcttcttttcctgctcttgaaagaaacttgttatcccagttttgaattctcttctgaactatttctattaagtaactaaagatcgcttttttatttcctctaatggtgcttggcaacctgaactacttgctacgctcatccgcttcatgaatacccaacctttgacaaatagcatgcctcattgtttgagtagtgttattgctgtagaaaacagtggacttctcaaagttcacccgctgccctgatgcattagcaaagctctccaaaagtttaataatgtaagacactttcttattcgtaactttacaatacagaaagctatcatataatcttctcacttcaataagaattaattgtaattacaaaatattattacttttaaattattatatagtattatttttatgtataagtcacatgtgaacatagtaatttgagtatgaagaaaattaaatgctctagaatgaaaatgttaaaaagagaatgcgtagaatctttattttattttattttacttattaatagctgagaatgtttatcttcacaataggtttgtccaccttttcctcaattctaatgtttattatacataatcaaaaagcatttttcactatagaaaagtaaatctactaaattttttaaaaaaaaaaatgtgtaaaaaaaataactacggtacaattttataattttttataaataaccaccatgttgactttacatagaaacaaacataattttttacaattttaacatactcattatattcaattggttttctaaaaaaatgtgatcataggcatagacactcttcacaaagaagaagtcacaagttcaaatctccctcctccaaagttataaaaaaagaaaattgattttctaaaaaataataaatgtataaaattaaatatatgaatatgtaaatcaatatttatattttgatatattactaaaatttaattaaaaaattaaaaaatatatatagaaacatatttacaaattttatattttataaacagtgtatagatatggttattaaatatattattattattaaaaatatttataatgctattattaatttaatatattaattatgataattatgataattaatatattttttaagcaaatttaaaattaaaacttgttttttattttgttttgagaacacttatgtttattagttattcatgtctaaaaaataaatagcattgtaattaaatgtgacgttatgtaaaagtaatatgtttatatcattattaataacttttataaatttttaatctaatatatttattatgaaaatatttgtgataatgtgttgatgcaatgtttattattttttttttaaatggaaattacacttattatgggattttaaaagttgtttacttaaatatagcacttttaagtttgaccaatttannnnnnnnttttttatttttaggtatttttatggtatttgatatgtcatatatacatatgtaaattaggttttcaaagcccatatttaatgtttttatttgtttaggtagttttatttgtcactagtgccggaaaagtcgctggagtttgtcgtcggcactagaaaagtcgtcggagtagctactggtaccggaaaagtcaccatttgttctgttggcgccgcaaaagtcgtcggaattggcattatcgccagaaaaattaccaaaaatctagtttcatgataaaaaaaaatcggcttcttgatgaagaaactactttcttggtgatttttctagtgattttaccagcaaaaatgccaagttcgatgatttttatggtccagcagcaactttgatgacttttctgacaccggtagctactccgtcgactttttcaacaccaacagtcaactctgaaaaagtcatcaaaattggcattgtcgtcggaaaattaccaagaaattgatttcttgatgaagaaaccactttcttggtgattttgttggcgacaatgccaattccgacaacttttccggcaccgaaaacaactccggcgacttttcggacagaggaagctactccggtgacttttccgacaccgacagaaaatttcgaaatttttttcagaattggcattatcgccgaaaaaatcaccaagaaactggtttcttcatttcttgatgaaaagaccaatttttcattatttttccagtaatttttctggagacaatgctaattccgacgatttttccgacgctagcagcaactccggtgacttttccagcaccaacagctactccggtgacttttttagcgccgacggtaaacttcggcgacctttccggcaccagtgacaactcaggtgatcaatatagtttcatttgttttatttttttaaaaaaaaaaaatatatgaaggggattttaatattttttatggtaattcaaagtggcatatctcatatatgttacgtttttattttaaataccatatttttttctattaagttttcttaccatatttatgtaaagtagttttatttttcccatatttatgtaaatacccattttcttatatgtttcatttcatatatgtttattttttattttttatcataaattatttttatataaaattaaaaatatatttaacatggataataagtttttaaacacatataatattactaattaatataaagtataaaaatttataaattttccatttaaatattcatatttcataactattaacgtgtcatttctagtttctattttcacattagcacgaatcaatacattttgacatatttactaataagtaatagaaatcaataataagatagtcgttcctttacatttgtttacttaagtgtcgcttggtaacacttttgtttttaattttttaatcacnnnnnnnnnnnnnnnnnnnnnnntttaaaaaatttatttttgaaaaacaa

SEQ ID NO: 19122 - DNA, 2797 bp, Cannabis sativa
gcgtccagtaaggtttttaatttgaaagacttagaagaacctgctcttgttaagctcaaagctgagagagacccagataagctatttcagttgtttaaggctaatgcccataataggattgttattgaaaatcggtttatatttgaagatatggtatctcgattagctggggcacggcgttttgactatatagagcatttgctggagcatcagaagactcttcctcagggccggcgtgaagggttcattgtgaggattataatgttgtatggtaaggctggtatgaccaaaaatgctattgatactttttatgatatgcatttgtatggttgtaggagaactgttaaatcttttaatgctgcacttaaggttttgacacagtctcatgatttaagagcaattgaggattttcttagagaggtgccattgaggtttggtattttgttggatgtgttttctattaacattgttattaaagcttattgtgagatgtgtattttggataaagcatatttgataatggtggagatgggaaaggtggggatacagcctgatgttatcacatatacaacattgatgtcagctttttataagtataataggtatgagattggcaatggtttgtggaaccttatggtgctaaggaggtgtatgcctaatattgcaacgtttaatgttagaattcagtatctggttaataagagaagagcatgggaagccaatagagtgatgagtttgatgccgaatattggcattgcaccagacgaggttacctataatttggtgatcaaagggttttgcttagctgggtacatggaaatggctaaaagggtttattctgctttacattccaagggatttaaacccaacataaaaatttatcagactatgattcattatctttgtaaagaaggagattttggtttagcttatacgatgtgcaaagactgcatgcaaaagaattggtttccaaatgtgcttactatccatgccttggttgaaggccttaagaagaatgggcagcttggtaaggctaaggcaattattacattagctcagaaaagggtacctccgttttcttcaaaacaattaggtgctcttcgttctgttttgtccaagcattgaattagatagaagacttttgaagagaaatttctttttttgatgtaacccgggaagctcaacaggagctggtattttttttcccccatttttatttgtaaattttttaaccatttggatatgaactttctggaaatatcacaggaagggcaggcttttttttttttccttagtgaatttgttgtaacaccacaataaagtttgtcactaaatgagatttcgcaatagaaattgttctttctgcaataacttactctttccattcattgtgtttcatgcagctcatatgatgaacaatttcctacaagttttatttccttatcatctctttgctctctatggtatactgcagtacagtgctgtagctacctaatcctgtaaaattgtactttttattatttaatttataatgcatttccgtgtcatgatcctgaccaggctcagtagttattctcctttaatccacatgcaacagaactcagcatcatggccacttcatgaaaaaatcttaatcctggtttgttcattcctaggtaaggttatgctgtgtgcataattatttgtcttatttgattaaagaaaattatctgatcttagacatcaattaattcctgatatattaatgacattttctttccattacaggtttgtttattttatggtggtagttagtttctggtatcttacatgctttgttctgtttcagctttaatggtgaaaaacagaaggatcgaccaagttacaactaccaagtcataatggtaaataattcttttgctgtacttgtagttgtagttgtaggttagatttatttattgttctctctaattcaatatgaaaattggtagatgcatttattttcattggagtttaagctgatgagtttcatgcataataagatctaaaaatggagtttcatccattgactatatgaagttttcatgcatatacagctccactttgaagttatcatttctcgaacattgatcgatagctgttatttgggaagcaagcctggttggggtgcggaaacaacagtcgagttggcgggtttattcctgcttgtattgaaaacaaaagatgttccagtggtcccagtttcaggtggtatgagatttgaagaaacttacattttcagaagagacaatatcaagctacacttgtctagagcagacaatatcaagctatcagcttgtgtgtaatcttaaatttgaatggaattgtctactactgtctactgctacacttgggggaaaactactcctattttccaaatttgcatagattatgacttgcataatctcgatgttacttaccatgtacaagaaaagaagagaaatttcgtgagttattactatacagtgtttgaaatttattcttaatatatatttttaattattcttttaaaacattttatgttatttttaggagcctgattattatggtagcagatcatttgacaaaacataaaaactttaagaattagggataattgcataaggcataattttttgtaaaaaaaattacatttttatgtttaattttttttttacatttttatagttttttacataaataacacgaaaacaataagaaaattagataaaagtaacatgaaaataacattaaaacaacaaaaaataacatacagataacaataaattaacaagagtac

SEQ ID NO: 19123 - DNA, 4718 bp, Cannabis sativa
  modified_base (578)..(590): a, c, t, g, unknown or other
  modified_base (3206)..(3211): a, c, t, g, unknown or other
gtattggttcttttttttttttttgataattgttacctccaacatttaacagaacaacatgaacaaacgggaaagaaacaggggcccaaggccagtacaaaacaaaaccaaacaacagagaacagactaaactaaggaaagctaagaactaagagaacaaaagaacaataaacagactaagaaacagatcagccatccgcctccgaaagaggcagggagctgtcaaaattggccaattcaatcgacccaaactgctcagattgaatcgcccaccgagccacgaagtcggctgcacaattgagtcttctcaggatccagttggcctcccatagctcaaagctcaaagctcttggcctcccaaaaattggtacttgacttcaagctagcctctcttaatctcattgggatcttaggttaaaaaatttaattgaatttttttaatttttttaaggtaaatactatttttgatcttgtatttttacaaaagtcaccaattagaccatgtattttgtttgacaaaatagaccttatattttctaaaataaaaatagggtcttgaactcaattttcaacaattnnnnnnnnnnnnntaactaactttaagataatttttaatactaacaaatacagaaaatgtaaccagatttatcataacatctatagatcagattattatcaagttttattttgacaaaaaattaatttagtatcctatttgtacatttgtggaaaatacagggtctatttcgtcatttagtaaaacagagagtccaactgataacttttgtaaaacacaggatctaacatggtatttaccctttcttttaagggaaaggaaatatttattcaaacaaaaccaaaagtataaacaaaggctacagcaaaagctgccccaacaaaacagaattgcaaactaaagagggatgtgatatccagtggtcttggtttcgtccttgtaaaatttatttaaagttttttatcattcttacacttgttagttatctaattccagctttgataactaactttacagaacagctaattatcttggctaaattaaaaacactatcaaacaaacatttgtttctattacaccaaataaaatatataagtagagattacaacattaaaaactaaggtggtgtttaattggaggtaatgaaatggaatggaaaagaaataatttcattctattcttttggttgattgcattttaaagtattggaatgtcattccaatataatacaatttttcattattttagtggaatgactattccatattaaaatgaaaggaaagattattctaatgtaacattagaaaaaatttaatgatctttttttatcaatttttttatgcgttttaaattttattccattctattcctatttctattcctattcccatccttattctcattcctcccaaccaaacaccacctaaattcaaaagagaaaacttggtattattgcaccaactgctccattccaccagagaattcggccactgcagaatgctaaactaggtctttatatcctccttcactttcctagtataaacataatcaaagaacaactgctagtgagattcatcagcaacttcacacatcgaacacgaacacagagaagaagacaactccaagaatctgccaatgttgtcacgagtaaggagttggttgttcatggtttgtcaagcaatgaagctatgcttgggacacataatctatgtcaaatagcatttgcataattcactctatttgcattaatcagagtgttatggaacttctttgttctgaattttccatttggagccactgccttagccaaatcttccttgttgattgaatttctaattttgattagtttcttgacgtaccaacttgagtcaatctatttcacccaaagattgtcttgtttggacatagtcatccaaatatactttgccatcattgcaatgttccacttacgaccttcacaaaagccaataccaccaaacttctcaggaaggtaaattttttcccaagaaggaaataaaatttgcttctattaccaataatacccaaaatgaaatctctacaacacttatcaatggcctctataatcttttaaggaatgatgaagatattcatccaaaagttcctcatgcccaacaagacggagtgaatcagttgaactctcccagcaaatgacaaatttctacttgcccaattattaagattttttttgaattttttcaaagatttcaccacagcttttcatttcgttggtcttaattggacttttttttatatgaaaaaattatgattttttcatacataatggtaaaaatctaaaatatagtattttgagaaatatagttgggtcttttatcttaaaatattaaatataatatcgtaaaaaataaattagatattttcttttagaaaatagttatatttttaataaaaaaatagtaaaaatacaatatggtatttttataaaataaatttaaaacttttgttaaagaatattttgaaccttgtttgggggctttggacatgggcccctgacttaatttgttctctttttgttttgtttttgttttgtttttcttcaaataggtaacaaacaattccaggcccatctaatccttaccttgtatattgggccgggctgaatttgaagttgggctttggtcttttgcattgtcatttactacgttgtcaacaattactgaaaaaccaattatcatagtcatatgattagtaaagtttcttaatttaataaaataaatatatatatatatataacttatggtggctaaatatatttacattaattattatgtattagtaataatttttaaagttttaataacaaaaattagtggtttcaaaaaaaaaaagaaaagtaacaaaaattatttgaattgtttaaaaaaaaatagtacaaaattgaaatactccctttagtttatttttgtcatatgtaggtataggtaatattagaaaattttgagtttttatgattaatttttctatttaattagaatttttttttaatttttacattatatggactgagattggtccatcagctaaaaaaatatttttttttggcaaaaaggtgataaaaaagttgaattcgacttaaatattttacatataaacatatttttttatatagtgtaaaaaagaggtaatttttaatatttttttaattaagtannnnnnttaagcatagaaattcaaatttcttttttattattcgctatcggaccaagatctaatggtttaatatttttaaaattaatatttacagttaaatttgtttattacccattactgggtaatattcattatatatattatatatattatgaataagtcataataagttttaataaaataataaatcttcatacatttacttatttttttttatactttctagttttcatatatcttaagagatatttcatttctacttaaatataaattaaaataattgagctaaactataattgtagaaccatgtaaatcatgttatttgtaaaaccatatgtgagagtagtagttttttttagaaaatatactcaataatttattattggagtttttacaaaaaatattagattttgggttaaaatttacaattttactatacacggaatttttacaaaaataatatatttttataaaataattgtaaaacaacaaaataaaacaattaaaaaaaatagtgaataattaaaaaacaaccgtagaacaaagtaaaaatttgacacagtacacaatattttttaaaaaaatatataattttttgaaaataattgcgccctacagtgaaaaagaaaaaaaaaatcaatatgatgtaaaaaccccttaaacaaacaagaatcagcttgatataagataagatatttgtaaataaataaataaatggttggggacttttcaaaaatatttttttttatattttatttataattttatgatctaaaattttttatttataaaaatacgcttgtaaaattttataattatacaaatacattttactcagcaaaaagtaagaaataactaaaaaacaacgaaaaatcaacctcacgatagctataaataagttataaaacaataaaaaataactaaaaaataacttcataacaactataatacaactataaacaaactaggtaaaacaaccaaaaaataaattattatttttattgaagaggcatttatataaataaaaaagttcaaagcgtcaaaataaaaaaaataaaaaaatcagtattgatgtatttttgtaatttttttaaaatttttgattgtagatttttcaaatgtaacttgttttgtcaatagttctacacatattatattgatgtataatataatcaatatataaaacaatttatgttgactgaatatttagtttcttttcactgaaattgattggagtaacacttttctgcaaaccaattttaattaatggccctattaaaaattgatgtactaatcaatggatttgcttatttaattaataaaataagacttcaattaaggattgactattcatgattttgatgttagttttatctttgttgattatataattggttcatttttatgttaggacaaatcattattttgcatcaacttgatgtattgtgtttcttgagcctttatttgattagatgtattagatataattatttatgggaaatttacatggtat

SEQ ID NO: 19124 - DNA, 5169 bp, Cannabis sativa
cttcaaatcctatttctcccttaacattttcttttcacccctctcttaatcattaatgccctttcaactatttcctgttccctcactttcacacatattccttatatttgcttcctccaagttttattgtcttgcacaatttccttacatagatttgagagtgtccaatttccaggctacattatgaggatggtgctttctgattgcaattgtagcatctagttactgtagaatcctggaaactcaggctgtatatctttcattattcctcttgttgaatcaatcaatgcagacaagtgtaattacatattgttgctgatgagctaagtagttcgggaattggtacgttgcaccgaggacaatcagacgtttttcgtgccttttaggacaaaaatatcaagaaactgcagaacttacattacttctcgaagttcaggtatttaagataattctttttctcttgaatttagtaaggacaaccctggtactgccttcttctaagtacattctgcagtttcctatgccatcatcagtcctattgtatcattcatgcttttgctattttctttaaacttagaagtcaatctgtattatacaagaagaggagaaagaaagctataatgtacacttttttcatctcaaaaaaaaaaaaaaaatcctttattagaaagagtagctgaaagtagacttagtaatgttctttaagaacattttgagttgagaaaaatattttatggtctagctctgttaaatgtcttaaatcaaatcaatgtgtaatgtataattcatttgaaattgtatcatttatattcgtatatgtatatatttacatgttttgctggtgtatcatttgcatttgataaatttatcttttcttgtttgttgctttacttgatttaagtgaattatatggaggaatattatgaggttctgaatgaatgttatatgaattgaagaataatccctctattggttagaaacaaactgaaagaacatgatttttctgcatttcctatctgcattacaatctacaactaacacaaatggaaagaaatgataaaaggtgatttagattggtggtggtccggctattgctagatcactatattgtttttgaagcggactcacacacgagaagatcgacgccttttgcctcttcaacttcacaccaaacaagaaagacctcaatggaatccttggcctattagctggatgtttggtggggctgcagtggacattctttgcagttgaaatcccaagatcttcattgagtttccgcagagtcttctccacttcaactttgagtcccttcacacgattaagtcccagtttcagttcatctgcaaccttgttgttctcctgcttcatgttgagaacttctccttgaaactttgcagcctggtatttgctaagcttagtcttttgaacttcagaatcaacacgggagatcctcgatatctcatcctggattttgcacaaggatgaaaacctgccctgcaattcgtcttgtagaacagcattgtgttctaaccagagtgccatctcagtttggatttccctcaagtgcctgtatattggcctggcatctgtttgtatgtagtgttgtttggagcctattatgccttctggcttcttgttatttttctcccttaattttgataaatccaactgtaaatcctctattgaagtctcaaacttctgtatctgatgaactgaagtgctgaacctcaaccagaactcgagattctcctccagcaatccatcaatatctgatcggaacttatcttcaacagacgaaacagaatggggtacaggagcctgattcttctccactgtctcttccaccacctcattttcattagaggttttcaagtcttctgttgctgacatgagtttttccaaggttttaacagtttgaacaccgagctcaccagaatccgattccaagtccaaatttagaaatggggtttgatttgcactctcacctgaagcatcttgacttgcttggtacttataatctgtgttgtaagtaaatggacttccatcaggagtcatctgtggtgggtagtcaaacttgtgtttcaagctcttgatctcatcatctttagaggctacatcactctttaattctcttatctgtattgccaaatcgaatatgctctcccggttcttgctctccatttcactcagcttcttcttcacttccttataatcttgaagaactgaagtatactcctgtagtaaaatattttctctgtcctctaaacctttcaagaacaacagcctccaattcgatctagcgctattaccagcctcatcactttccttctctacatccaatacatcacttggctcatcaaccaactctttctgctcttctccaacctcttgcttttcttcctctacttcaacactcacagtgtcagaactattgcttggattggtttgactttccgccgagtttccaagaactgaagaatcatcttctttttcttcttcattcttttctacctcaacttcttcaatgcttatcccttgtttatgctcatcaacctcctcgtcctgcttcacactcttcaacttctcagaaagatgatcaatattgcaactggcttctgtgaaatgagtttgaagattgctgttttgtagttttagacttctgtttagtgcttttattctcttcaattcttcctccaactctctaagcctcattctcatcttatttgatccttccttcaaattctcattttcattttctaagcttcttacattttcttgaagctgatcagtctctgaacctaacctctttaccaaagcagtttgtgaagtaacctcagtttcgagactaacaaccttgttgacaagctcatcaatcttctcagctagttcagtcacagtaagagtagcctttgaatccacattaagctttttcataatcatttccctcaacatcttcaaatcattttcatcttttcccatcccaacaatctcctcctcatcttctactttggtctctactttcccaagaaactttgctcttattctagaaaacttttcctgagcatccttgatcctttgctgctcaactaaagcctcttctgtcgacttttcttgcttctcttgcaacttaaccaaagtctcttgacacgatttcagagccgtggctgccattatagaccgagcttcgtcgtcttcaataacagtttggatatcaaactcatcttgtaaactactaacctttttctgcatttcagttatctcattctcaatctcccaaaacttttgataaccattttcatacatactctttacaaactccttctctgtttggaacctaagaatacccttttggagattatcaatttcctccaaagcctctgttctatttagccctgaacttggtaccactttcactgagctagatatccttccaagctgagtctcttttcttgaaattgccatagatggtctcctgaaatccttagccattggtatctttggaactttggggacacttggttcggattggtcagcttttgaagttgaagtttgagaaggcttttgttcctcatcaacatccatggccaactcatgagctctttcagggtagatagtggcaatggttcggttggcgctttggaggtctcgtgaaagaaggtcatatctctctgccaatgctcgataagctctgaatatttcttcaacaaagttgatcagttctggcctttttctgtagtacatttcagctctttgtgcaaaagagtctcctccagcgtctatgattttcagggtcattgttaccttttcttccatatctgtcaaaatcatgatgaaattatattatattcatatacatacatacatatacattggtgttcatcatcctcatcacaattgttattggtttggttaagaaggaatattaagtttcaacattgatttggattggggccataatagacaatataaattagagcatcacctcctaccctatggtgtccattataattatactagatagcatcttgcttgttttctagaaattttgaataatttatggtgttaaaaatatgattaaaacattcacatgttttcgtgtacacgtatgtaataaactattttaaattttattttcgagacatatttctcgaaaatagtcggtcggcctattataattataatatataaaaaaactagaatataatttcttatagtacaaaaaataggatacaatagaagtaaaagtgacgcttccacttaagaaactctctaatatatgagaaatgctaaatagaagtgatacctaacactacttaatctatcaaatcattattagtgcaatcaaatattgaatcacacataatatatatatataaatataaatttctgagataacttggtcttatataagtcattttgtagtgacttatattctgactttgtatatctttggctagacaattagcttgttgattggaagttttcctgcgtcgacgattgtcatagtgtgattcagatcattctttaaaaaaaaatattgaattgcacataatatatataaatatataatacatacatgcagacataagtgtaggataggatatgaatatatatggaaattaataccttggaggttttcttctagccatttggattgttttgtcctcacgtggcttgcccaccaccatgaatatgcattgcttgctgctctctgcaacatttctctgtggagaatctaaaagaaaaacttttcaagaaaccattatctctaatctctatgtttctccagagatccccttaggccaaaagccaataagcaagaacatgcatgaattattgaaaattcagcatgtataggaataggcctataaaaaaaaaacgttgcatgttaattgtgcagagctagagaataacaaaacccataacagaccattacgtgatgagagtgattgatgaaacagcaacaacaaaaactcacaagactgtttttagttatttttggaaaatagctatgagcaatttgaaccacacgtattgagtataccttggctgagttttaggttgtcgtttccttatgaaatcattgaaataacacccttttattgacagaaatttaaggggaggttatttgagtgtcacttttgaaaggttgtggtttattattggagg

SEQ ID NO: 19125 - DNA, 2287 bp, Cannabis sativa
tgggtgaggattacaaaacagtatcaagattattagctttgagcttcgttgtacttaaagacacaatcataaagtcgtcctccaagaaactgtgcaacctctggatgtttcacctgtaatgaaagatcaaaaatgtatcataagcttaccgtgaatctcaaaactactacgagcaagattacacagcaagaaatcttatcttaccattccaatcttgagagagtcgcacttgaattgagcataaagatttgtctctattccacgaccctgcgaaattccataaatattgtactcaatggacagaactcattttgtttctcaaatgattctactccacgcatatttaaaccgcaaacaagtgcaacctcttttagtttaggtaaattttttctttttcccctaaataattagaataattaaaaggaaaactgtaagtttgcaaataccaaacctctaagaacttaccatcccttccaaaattactaggtcagcatcacttgccatgaatgcaagttcttgcgacacacatgtcagatcaataacctgaaagaagttgaaaaacaaaaggttaaatctacagcaggatgtcctcattttaataagccaaatacaaccaaaattgaccctccagccccttaccggtaaatcattgccagaattggcaatcaaaagatttgaagtatcaacccccaggagctgtccgttgtcatcctttaactggcaaagcaccatgtatttgtcaagaactacaagagccaaaattctaatttaggagtaaaataataatgaaaaaaaaatcaccttagcaacaatctcaatcagctcaggataagttacatcattgatagaaggcaagtcattggcggccaacacaacctgtacaacaagaaaaggatgttatgtcaagagaacccccactactgagctcaatacaagcacaagatgatcaagcaataaaatttgaagacatgaagctgagcacacagtatacatgaaactaatacaaacaaaaattgcaacccaaacggccaaaagaatctgttttttttttttttgtgatcaacaggcaaacaaaatctctgaacccataatataaatttttcattgaaaagataataaaaaatgtatcatatcatatgcataacatagaagcaactcctttttgagagcaaacctgtgtcccacgtctaagtaactcccttgcaaaaggcaagatacccagtattatgtccgcaccagaattgtcaacgaaaatgatagcctgaaatagcaccgaaaaaaaagcaagttaagatttcagaaacatagatttggcatagctaattaagtagagtaaataagttcatgagagggaaaaaattacactgcaacatacctttttccatgaggttttgctccattttgttttgaaagcatccaaatcatcaatcacccaaggtcgagggacaagattttgacaactagctaagaaggacataccatcctttgagaatacttctgcaagcttcaaagtaagaagcagttatcatctcaagtacctcttacaaaactcattaaaaaatctacatttttggtttatgtttcccattctaccattagtgaacaaaaaaaaaatcataaattagacacattagcagaaaggtaatcctacctgtgcagaaccaagatcaaatatgtttcccgcaaaaattcctcgaaccaggttatctagacgctttccttcatcctcaatagcatcattaatacgaactacattctcaaataaagatatagcttttgcgttctcttcatcctgttccattttttacaacaaaatctcttttgattagacgtttaaatgggatatacaagactgaggaagaggacaaggactagggactcagtcaaaactctcatatgtctctaacaaacaacttcataaccatgcatacacaagcataacattagatttacacaaatctttcacaatcaagaaaaccatgacaaccgttattttaaatgaatttaaaacttaaccatgcccttttcgaaatttcatggtgttagtaatagcaaatctgatgctcataaagtaaacttgccttgactttcttgaatatgtctctgaaccccaattcccttaggatttgctcacgaagtctgcaaagaagctagtattccaccccaaccaatttatatatatttatatatatatatatacaaaaagtcagcgttgccatctttgataacggtttttaagtaacataaaaaagaaacaaactagtttaagtccaaagaatttgtctta

SEQ ID NO: 19126 - DNA, 4919 bp, Cannabis sativa
aaaagaggtatgtttcaattaaatataaaattaaaagtaaaatttgattaattgattaaaaaaagtagtatttttcaatttaccccttgattcggggtatgagactcgatattaaattgaaccaataattatatactatatgtcatctcttataatgtttggtgtcccttagtatttttttttaataatatgatttcatagtgtcttattaagcaaaatagctaaaaattttataagaaaatgatatttttttagtaattaatgtttagaatgaaattttttttagtaattatacagtgtatttatatttaattttcttggagacaataaaaattggagaatataattagaaccttcaattagcgtcaattacattgttacgatgttactacataatgagacaaaactctattactatttaaaaatatattaacaagatttttatagtggaagtcaatctcaatcaagtgaatacgagcctataagttatttcgaattgataaaatatttacattggtgcataaccttcaccattaccacaaaatcaattgaattttattgaaaattgcatatgtaatatcattgtttttattaaagaaaacaaaaatatccattaatacgtcaatcgaacaaagtccgttacattataactcaaagagtaaaggttagttagaatttttatcccctaaactttaacatataccaaatcgtgcctcctgaacttttctgaccattaaaaattccctctaaactattgagattgttagatttaaggatttttgtttaatttcattcaattttactatttcattgattgtttatgtactaaaccatactctccagattttgatatctacaaaatcatgctcatcgaattttgatatatactaaatcatatttcatgaactttcatccatgttaaattttttttactaaaattaaacaaaagtctttaaatttaacaatctcaatagtttaagggacatttttaacgaccttaaaaattcagagaacataatttggtacatatcaaagttcagaagataaaattcctaattagccaagagtgaaatcataaaagttaagtataccgaaccatttacaataacataaagaaaaccctaaagcaacctcaactaaagaatcaataagccactaaagaattactaagccactaacgttgaaatatattagacttccaaactaaatgaagagtaaataaacaaatcactttttatttgacctataagataagattttggctacaatatcatgaaaataatgaagatatgaaaaaaagtgtattatcaaaacttaactagaataaaatcatgaaaatattttccttgaatgagtgggaattgattgggaaagataaaagaaaaggtccacctttacttagctgcataaactccatatagtgtaaatcacataataatcaatgaataatgcctcttggctatactacatcaagccaaggaacatatacacctgctctttgttataagaggccaaaaaaacaaaaactgaatttcactattatatatatacaagaaattgctcttttaaataatcaatctattgtaaaagcaacttcttttcaaacccaggaaaagaaactgggaaaaaaagccaagaattttcttataatatcgtggggagaaacacaaacaagtcaagaagaacaagaaagcatacagacaccaggcctatatgcccaggcgggaggcaatcgagcgtatttttccattcctggctggtcgtcgtatggccgttccattactttcagcagccttcgaacctcctcgaaatcgccttgttcagcagcgtcaatggcgctctggcagaggtaattcctgagaacgtatttcgggttcactgcattcattgaggccttcctctcttcgtctgagatgccactagccgctagctgtgaaaatagaagcataattttgagaaagtactcgaaaaaaatttaactaaacaagggcgaaaaagacaaacttggtacctcctctatgtaggtttttacccaagcagtccatgcttctttgcgctccttcccgatatctaacagaacagccttcagtggaaccaacaactcctcttctgggatgttaacatcagctttgatgtttgatagtaaccgaaagaaatttgtgtaatcgactttgtcaacagccatattgttaagaagtttactgatcaactgtttgttgtatttgggaagaccgagttttctagtcattatagcttgatactcatccataaatttggtcccatatctgtaaaaaagtcaaagaaaaatagtcaattgcttgctagccacacaatataactctcttaagaaaagaacacagtaccgaaatgaaaactacctttccatggcataatttgcctctgtatcatttatcaattcagcagaagataaagttgtggcaaactgtgcaacattccataagcctatatcaggctgattggcgaaacagtatcttctgcctggaagatcggtagtatttggagtgtaacttggatcgaatgcatccaaaaatccaaatggaccataatcaatggtgagtcccaaaatgctcatgttatcggtgttcaaaacaccatgagtaaaaccaactccttgccatttggcaaccaaggatgcggtacgctcagcaacctccacagcccaagctattaaaaattaccgtaaaagcgataaggaaatgaaaaatttaataattttgagaaaacaattccttcatttgttacaaagggcacactaggataacccaacaagaaaatttcaagatacaaacaagtgaaatggcgaaaaagtcagctaacttatgtttcaacttttgtcgtaatactacaaattacctgcgtacttattagaagtcagatccacgactgaatgatcttcatcgcctgtgctaaaggataagctctcacttgtgtccatattctctatatgaggaaagtgatgcttgatagcatagtccgccagaatacgaacaatctcaaggtcctctttttctctagatgcatgaatttggtatgaaccaaaccgcagaaatgatggagcaactctgcaaacaattgcacctggctcctccttcgggtttccactacaaaccaaagtaggacaacaattcaaatttatatgatgaaccatttattcattcataaaaacgtatcatgataccgatttgcatccaacaaaagctacaagtcaattacatactcatagaacatgtctcgaacaacaaattttccagttgtgactagacaaagagcccgagttgttggaattccaagactatgcattgcctcactgcaaagaaactccctaatgctactgcgcagcactgcaaagccatctgcaaatcgactgtacggtgtcttcccagcacctttaagctgcagttcccatctttgagacttagaattaattacctcaccgagtgttatcgcccgaccatctcccaactgtccagcccacatgccaaattgatgtcctccatagcattgagcataaggcacactataacaatcaacatcataatcaaacttgctagcacaaaataccaaacaaaccgaacaacatgaatttcataagttaatcttgaaaggaatacttacgatcccaccaaaggagaagccccagaaaacaagagaggaaaatctggcctttcaaatctgaaatcccacaaagtcatcattataagagtctcataaacatatatgaaaaggtaagtactattttagattctttatttgcaaaaccatttcaaaatggcacaaaagaatacttgagctcaattttcgtcaacactgaagccaatttctagcataaacacatgcaaaaaaaaatgtaaataactttcagattagattattattattacgttttattttgacaaaaattaagctcaagtatcatttataccatttaaaaaatacttgccatttaacaaaacagaacccgattgataacttttacaaaacacaaagtctaaactagtatttaccctaatagaaacgggtatagtcataacatgttcttaagtttttctagtctaaagtttggatttctttttacaataatttttttacatgaaacaaatttgcttactctttggaatccaaatcaagcaactcagctactgattctgaccaagccacaagctgaggcttatccacttgaactgatggagaaacttttgtataacaagcatgcaaaacctatagaaataacaataccaaaccaactttgagctaattcccaataaacaaaaacaaataaaaatcgtatctttacaaaaaaaaaaacataactctattgaatcaatttaggttttcattttctaggcaaccaaacacaaaatcaaaccaaaagaaaacaaacaaattacctctcgtggaaagctatcggtcctgggatcaccaggaagttctctaacaaacgattggtcccaattcagatcctctagattcaacctaaccttcttaattccattactaacatcaccagaagcttgtaaggtctgattctgcaaatcccgagctacggaatcgagggataaagaagcaacgtctgtagaaggcggcgagtccattgaaagtccaccgctgccgttgccggagctagcgtagcatgcgaaggggtaaccggggaaatttgaagggaagggaagggcaaaatggtaatttgggaggacggtggtgagagaagggaaggaggagagggagtgagagagaagaagaagaagctttcgatgagaaataagaaagcattttttgtctattgtttttttttttttttaatttaatttcatttttattaaaacaaaaatttgtaatatataaatgaaaataaaattaaataaaaaaaatttgtcattatttgtgtgtgttgtgtttta

SEQ ID NO: 19127 - DNA, 4010 bp, Cannabis sativa
  modified_base (3350)..(3357): a, c, t, g, unknown or other
ttagtagggttaattttataaatatatataaattttaatattattaattttaaattaatttattattttaagttaattgaacttacactaattttaaattaatttaaatatatatacatattaatgtatcatttgtaatattattatatattttttattataattttaatattttttaacttttatatttatttttcttaaattttttataactttaaatattatttttaaaaaattaataaatagtattcttttatttataaaattttaaaatattattgcacctaataataatctagtaaatagataagtgtttctatttttagtaagttgcattgcaagttagtggaacttgtcttagaaatttccttttttttttcttttaaaatatacattaggagtttttcataagactcaagagaaatctttgggtatattggattattggaatatggcctaagtttataaaaaaaaaaaaattaattaaaaaatatagtcagccgccccagataataatcatctttattttaattaagtctctatgtatgtaaggattaaaatgtgatcttttgttggatattaattctaaagctcatcatatatatatatattcattaaacatattccaatcttttaatttgcatataccattacacccacttttttaatattttaatcatagaagcaaagcttttccatgaaaaagaacaaaaagtgaacattattatataaaaaaaggaaaataaatagattaattaatgaaaggagatatatcacatatgaacaaactgacattttaatacacttttttacatataaagattacatcaatataacaacaacaaaaaaaaaaaacagagacaaaaccctaaaaccccataacaaatcttccaaatctatatgatatgattcatcatctccagccaaaaaaaggtcgcccaagacaacacaacataacaaaatggaagcttttgttttcctcctacgtacgacacaaataacaaaaaacgacaacttttacaaaaacagtgatagtgttgggtaaggtatcatggtcctgcaaaactaactaaaacacaagttattacagaaacacaaaaaccttaacatacccaaaaaaaaaaaaaaaaaaacaaagctatataattagatcccaaaccaaaacattggatcataaatatatagcttctaaattctaatacacaattaatttatattttccagccgaaaacaaataaaacagtaggactggaaaagttgggtgatttttaatatgctcagttcaaaaacaaccaagacataataaaaagatggtttttttgttttttttttcgaaaccccatttgaaaaagtttcgatctttaggtggtttcagagttggcgtcggagttgtaggagctggccggtggagatggggtatttccggtggtttcagaggttggaactcttgaagtgacggttgagacgactgttttgacaaggctgtcgaagattcgagctttgatttggccacgttttgggggaatacttggctgttttttgttgttagtggtggtgggattggtggccatggctgatcaaacggtgcgttttgatctgagaaagaagaaattcgaaaacagagtatctgaaaagaaaaaaaataaaaaataaaaaaagagaaaaagagaagaggggatttggggaaagtgaaaagaggaaaagttatagggagaagtggtggtggtgttggggttatgtgtatttatagtgaatttttttataactaaggcagactctgttttgggtgtaaaaataaaatgtgtgatttttttttttttttttttttcatgtttggatatttggtttggtgggtgtgctccaatatgatttgacttagtttagtttagtttgcttgtgaattacattaactaatagttccgtacaattgagtataggaactaacatatgtgtttcctataaatgatctattctagattctagtactagtcttgagttgagttacttcaacccatttaaatgatcatctatgtaatcttctccatgtggctgctgccgaagtggggagtttttacttgggccttcaagtactatgaataggaacaagtcaacccatcaccaatctaagtcacctttataatagcagctatggactggtggctcatttaacattttaaactaattaaagaatttcttaaaaggaaaaaacctcaccccactttaaccccacattctttctcctaagctaccccaatcaaacatgcttttaacagacaaggtcagcaaaaggttacatagatgggaagggaaatttctttttaaagggcggtaaagaaatcctaatcaagtgggtggtgcaaactcttcctagttatgtaatgaatgtttttttgttagagcactttcaataatttttttattttattcttttaaaatactttattaaaactttatttttctttatttttcttattttgcttcatatatttacattatattatacataaacttttttataattttctctaaactatttaaataatatatttataatacactcaagtaataaaatattatatattacataatatttatttatttttacacttacaattaaataaaatacctaataaaaaattataactaagcactaaaactaagataactcttagctacatttagctcaacactattcataaggtaaatttttgagttgttttagctcatctattaaatgtacttttttgagttttttttgttatagtgagattttttcacctaaaaacttgagaccggactcctacgaaaatgacacgtgtactcactctcctcgaggaaagttgagatgtcagtgagagacccctcgagtatgaacctcgcctgaactagattcagcgagatgatgtgaccatgacagagtctagtcgcattcgtatggctcgcatagcgtaggaccaagaaacagttttagacttgcatataccaagatatatgcgaggactttcgagatcctcctgcgagttgtaaagatcgattctttactttgcgagctggtctaagatgacccaacaacctcgataacccgataaagacttgcatgccttaggttaccaacttattacaaaatgtcagtataagcgacttaaacaaggcgcagacattctaaactagactagtcttgtatgcatcttaagcctgcgagcttatgtaggaatatgaacagccaactcacactataaaaatcgcatacgttgctaaatttagtgaattaagctgaaactttccttcatttattatacttacggcttttgtaatttaattattgtaattcaatgtacaaacggattgannnnnnnntcaatctctatgtaatcaaaagacacttactttgtatataaatgagtgatctaacatgaaatggacaaggataaaaatctttgcaacagtggactaggcagaccgtgacctgactaaaccactatattatcttgtgttcttgtatttccagtttattttttagtattttgtgtccttagtttgaatactcccgcatatcctctttatattattagtatgttatttattttggtgttgttaaaattccttcaacaatatttttttttaattcttagctattttttaatctttgtagctattttatattagctattgtgagtgcttttacctcttgagattagtagagacattgaacagctaatggcaaagttttggtgacaatcttcaaatggtgatcataaggactctattggataacatgagatagactttgtaaacatagaaaagatggaggaatggggttttccaatttaagagattttaactttttttctcttaggtaagcaacggtgtggaggcttcttactaggccagattctttagcttcaagattatttgaaaaaccgtgtttttgcaaatgtcaattatatatacgaaaatataaactgtatgcgtctgcagaagcagagtgtaattctgttattgcagaaacc

SEQ ID NO: 19128 - DNA, 5561 bp, Cannabis sativa
aaaaaagttaaaaatacttaatacaattaaagatataaattttatatgaaataaaaattattaaaacggagtgtacttaaaaaatttttgggtgtaaataaaatttccctatttttaacacaataaattattttaaatttcttaaaatttacaaaataacctaaataattaagtaatacatcatcatataaaaaaaatataataaattttgaaaacacgttagagtttcaatggtaatctaatttttagaggtgcaccatataatttttttgggcacgccaatataagataactgggatgagtaactatatttattttttttaggggatagtagtaactgattatattttgtttgatataaagtttaaaaaacatgattatcctaagaaagaaggaatgctttatggactgcatggcaggttttacactctcatctactcgttagaaaacaaatacctattgagtttcctatctgccaagtctgcaagttagaacttatatggcatttagttgaaggtaatgaaatggaataaaaataaaacaatttatatttcatttttttatttagttagatattaaaatattgaaatgtcattcccaatagaatggcatttctatcattttagtaaaatgactattttattttaaaatagaaggaaagaccattccattacatgattagaaaaaatttaataatttttttatcatttttttgatgcattttaaaatttattccattcctattctcattcccatattttcattcctccaaaccaaactgtttggtttttatccagctatggctagtgctacttatggcatctggtagtggtaaccaatcgaaacttatgtgtgtttgaacgccaatgtatagctccctcagtgtatagattctatagccagtatgagagtattaagattcggatgtgctttgcttttttttttttttttcctttttttgctgaatagatgtgctttattaataagagtaagttgttaagatggatagattataattccaaacacacaccaaccttacaaattctttacaaacattcagcaaaaaagcaaattctttacaaacttcaatgtcccggatgaagttgtaaatatgttagtattgattaatgaaggctctttcttgattaagaaaaaacaaaaaaaaacaacttaatcatactattattaaaaaacaactgaattatttatcaaaataatattaattattttagtttattgagaaaaaaaatcttgagagtttaaaataggatcatcttagttacttgagaagaaccaacacaaagaatctagaaaagtttaaggaaataagatcaaagaaaattatattagttaagatcttgtggaaaagcttgggaattagaagaggagagctagttggaattatctggtaagttatttcaagaatgaaatttcctagaggttggattgtaaaatccctctcggtgcccttttctctcttgctctcgccctatgtactaacattttctcttgtgttcgcccccacccttctttctctcaccctctccacctcaccctttttttcatccccgccttgccctttctttcatcgtcacccctctcaccctctcccccacacttttttttttctctcaccttcgcacggtgcacttgccctcttctcctgggaagacaatggtcagcttacctttctcagggagagagtaatgtgtctaggggcagaattcattcacatttcttataatatatctctctctatatatatatatatatataatatgtgtgcgcgccatagatccacttcaataaatgagaaaaattaaagacaaatcaaacgagagaatgtttaaaatctttgtttttgtttagtagaattataatataaagccaaatggagcagatcaccatttccattcacaaggcaaactaaaatctaagaagcaacaagtagtagaagaaaaatgtcaggttcgatacatataggaaattcacagtaaatttactttcataccaaaatatttcatagtgaagaaggagacctccgtacacaaatataccaaatcagcatgtaattttgtgaagggaaaaaaatcataatcacctggaatagccagagggtggataaccagggggcggatattgagctggaggataccctggagctggataaccttgagcctgttgagcaggagggtaagcataagctggttgatgtgcatatccaaccgagggaggaatttgctgatcgattcgagacatttgctgaacaggaggaactgccatcactggctgaggcccaaacttctcatctcttttgtccatttcaaccttgtgttgcgtctgcaaataatcaaggcagattgttatatagtgatctctcatataagaaattgtgtacattgctaggcataaaacaaattaatagagcgtggattgtgcctcttacctgcatgcatgcacacaccctacattgaaggacacaacaatgaaacagttagttaaacccagcagaactgagatgtttcagaggaatataagaaggaagtcttacgtgcagtagaccatctcagccaaacaagacaacaattgagaagcctcagaaatttcttcacttccaacaatcattgcaactatggagaaaatgcacgcaacttgctgtaggcagaacataaaaccctggagacagtagataatatattaaactgcatcatcttgaattgcttcatttaaaataaaatggacttaaagaatcaacatagttgcaagaatgagagagcagcgagagagcatacaatgatgcaattatcacattgtgtagtttgtatgttgaactcgtcttgcaacaaaaagcgtgttgaggccacagaatttccaaagcagagaacaacctggagatcatcaagctctgtataaatgctactctgccattttatggcctaaagataaaataaagtaaaataaaaaatattttcatttatgttatctttctatacatatatcttaaagtggtaaagcaaaagttttcgtatcacccaaagtttcttaataattcatctattataacttattcaaaaaaaaataattcatctattatatatatgataccaatacaaaaaactaacaaaacattaggaaaaacaacagaacgaaaaattttggttcattttcatattgtttttatataaagcttccaaatacttacctcagttgccaggcaaaattctggacatctactttctccacaccttccactgcaaggcatataacctgcgcagcatacatatctaagaaaaagaagttaaaaaaaacattaattccagggaacactcacatcagtagaaaagggtttattcgataagtaagagcgttatcaattaccttgacatgtcattgtatagggctcgtttccttagcaaatatgatacacaaggagcactagagaaaaagaaaaagattaaatgtaaacaaaggacagaaaatctatcataagtaaatagttttcatatgtttttcggaagttagaactcttgcctatgaaatttaattattatgcttaagtgtttaagttcatatgttgtgtgaggtaactaggagtatagaacccaaggcacattctcataatgaaagatatgattagatttaaaaaaaaaagggcggaaaatctatcataactaaatagttttcacatgttttttggtagttagtactcttgcctataaaatttaattattatgctcaagtatttatgttcatatgtgtatgtatgaggtaactgggagtatagaacccaaggcacaatctcataatgagagaaacaatattagatgtaaaaaaaactatcataattaaatatccttcatgtgttttgtggaagttataactcttgcctacgaagtttagttattatgatttagtgtttatgctcatgtgtatgcgcgatataattaggagtacagagcccaaggcacattctctgattctcataatgaaatgcatgagaaaatcaaaactttataaatacctacacaattggctagtgcctctaaggacattaaagagacaaaatactacaaccccagaagaaacccaatttaatgtttagataagcattagcctgaaaattacagggctttccaagctaaattttaagggaattaagcacgactctttcaactaagacaatgccaccaaagatatctaaccagcaaaacccaaaatctaaacagaatgataaagattaagattcaacaaccatagtaatcaaaaaaagaaaaaaaaaagattcaacaacaataagcttaataaataaactaatacatgcataataatatagattaagattaaattattaaaatttacaaaaacaatgaaatttacaaccaaaaaatatatgtgtgtgtgtgtaatcaaaaactcgttactactgccacttatagctgagcctgtggagcaaatgtgctcttggctgtcaaaaccagcccttacaaataacctcggatttaagggctaagggggttccagatttccaatgtctatcacttcacactttacatttaacagtttaaagatgaagagcagcaaattaatttcccaaaatcattgcgaaatccgcatcccggtacaatgccaaatcatttcatagtttctccaataagaaaaccatcacaaggaagaaattccacaaaaattcacattgaaattaaacataatgaatgaaagtactcagaagcagaacttatagctacaaaaacatcagattacacgatttaattatgaatcatcaaagtcaacgctcttgacgggaagtcaacagccccaaataaaatttaaaaatgcgaaagataaaaaaaagcataaagatcttgaattaaataacaaaaacactgtaagaagaatggtggagaaattagaactaggacagatctagaaaatccttaccaaaacaaggaaaggcaacaatctgccaaaagaaaaacacacattcaaagccaattagatacaatataaatatagagaacgaagataaacataataattttgagagagatagagagagagagagagaaagtacaaggagtatcggcctgaatagtgttcatgaggctagtgtgccagagatttcgataattctggcgaagttgcatcttctcaaggtgctctcgattcgccatcacaggtgagttgaactgaactctctctctctctgtgaatggtctttctccggcgaagtcaggggacgaacaaactctatgattattatgaaaatgatattagacaaataaatttctcctatttctagggcttaattgaaagaaagaattttcccagaagccaaacagaccttacgaaaattaaaaggccgaaacttcgagattgaatttttttttttttttttttgacgttttcgagattgaaaattcaaattgcagaaattatattttatacattgtaatttaaaaataaaataagaaactaatttatatgtaataacgcgtacaaacagtgtttgttcacgaagacgacggcaactttgttattataaattatgggttgtttggtaa

SEQ ID NO: 19129 - DNA, 2707 bp, Cannabis sativa
ccagtacaaactcaagttagagtaaaaaagaatctaagcagtaaaactaaaatattttcttgacctccaatgtgtgttgagatatttaaaacatgaagcttcgacaatcaggctcataaaatattcaaatattcacgaccaacaaaatattcgtagcagcatatcctgtaataggtttattgcagtgtagtatcacaaatgaaaaggtaatatttacttacctaagtcattgatgcagacatcttgacttattccatcacttgagatcttgtggagcaattgtaaaggatcactattactggttttatccaaccgaaaacgctgcaatacacaaaaaagttgccattaaaatgtaacaaaagaaaacgatgaaatattcaccatgttaaaagagcattaccttataaacttcggctgttgaacatgcttctgggggctttatgagaaccatgggaatgtttaatggtacaggtggtagaatatcctgaacaacctggacaaccaaagaacattttatagcagaattcatcacaattactagacctctatgcgaactcctttatttagattagacaagcatacataggtaaacaaataaaaaacataatgtcagattcaaactcatagactgtcactactgaaaaccctatgtagttatgcagtagtaacattaaacacaagaacccatgacatacagaattatattgcacacactgcacagctatatgcatctacacacaaattcctaggctgtatactgtgttccctcattttgactggttctgaaagccgatgcaacttctcaaatatgagaaaaaagagccgagagaaaagtacaatagggctttccatttaataaaaaagacagtagccaaattatggattttttttgaaactggctgcttgctttaccctacaatatttgagcatgaaactatggcaattggtacccaacagggattcaaattatggaaactttagcagattcatctttggcaatcacagaaaaaggattaatagattttcaaatgaatattgagttgtaaaagaattataatatctttgtttgaactacatacagtaagataaagacctacctcacctcgacctgtacaataggctgccccttgggagaaaaagaaaggaacatctgaaccaatctcacttgaccattcttgcaattccttttcagtaacaagacaatcattgaactgatttgctgcccatagggctgttgcagcattgctgctcccaccacctagccctgctccagtgggcactttcttgtcaagatgaatctgccaacatgttaaatgacacaaggtatcatcaatcaatggcagctttctttaaaaacaaaacacaagacataaaactgttttaggggtctcttacccaaaagtatttgtttgtaccagttttctttcggtaaagattaagggccttgataatctgtacaaaagaaaaaaagtcctcttatgagtgattaaaaacatcatcatgcaacaaataaaaagcagcaaaggaacattcatcccttaccaaatttctatcatcaagtggtaccccagaggcattcgttgacaaagaatctttctttgttgaaggagacaaagagaacttaagcacatctccaagacttatcacctaaaatttcaaccaaataatcacatatgtttcatatattttccaacaacttaaacaaatttaagtaaaacttacgtgaaagagggatgccaaatcatgatacccatcttcccttttgctagttattctcaagaaaacattaatctgcattcatgatgagacatcaaaaaactgctgaaattagcataaatcaagaaacccatttactaaaaacaatgacaaaccttgcaaggtgagaaaagagtgagcctagaaagaggcgcttccttgtccactacatcagccaatttgtttatcctttcatcagcatcataaactatctacaaccaccaaactaataattaaaaaaaggatacaaatttatacacaaaaggtaataaatgatcaaaaagaataatctttacaagataaagactgaaaattttgaagtcaaaagggtgagaaggaatgggagattccaaaacaaacctcaacttgtcttctttcagaaaccacaattttgagagatgaaggcctcgaaattctagatttcgaaccaaaaaaacaaaacccatttgagtttaaggaagagagacctctgttcctaaaaggattgggagaaagattaaaaacgttgttgtggcagagaatatgagaggaagccattttagttgtggagaggtaagtatgaactaactaactatcaaactgtgaaaaaatggtgcatttgaagacttgggattcagcgggacttgggattcagtgggcagacagaatcaatttcgaagctattcttcttcattcattcattcattcattgatgtggtttggttgaaggatgactctctcaagaaaacagcgcaggttgttatattccaagagaatttaaaactataatataaataataaaaacaacaacaacaacattttacggaaaaatggtttttttttcttttttaaaaaataaaataaaaatacaaacaattatttttttttatctcatttttttagcaaccaacaattcttcttttatattgccaaaaaaaaaaaattgttcttttaaaatataaaatttatatta

SEQ ID NO: 19130 - DNA, 4281 bp, Cannabis sativa
actagtaatttcaacaaagattttgactgtcaaagaaatataagagtatcaaagataaaaacagaggataggatatgctatcaaagttaaacagaggaagcaatcactatcaaaaatattggggagaatccttaggctactgactttgttggcttttcgtttggaagagaatagaaaaaaaagctggtaaattttggagtaatgtaaaatactcatctgtctatctcttttaactacacagaaaaagacatttcattccaagcagacctaattttcttctctcttttttcctgcccacatgaggtataagaagaaaaaccaattttcattggttagaaaaagaattcttcaaaattaataagttcctccaaaaaaaaaaaaaaattaatataaatagttgggaagaggaggtggggtcatgctctgctttggtaatttaatattgtcttctaagtatggtactagtgtgtgtggcattatgggattagtatatttcaagtggcataaaaaagaactctttccccactttccccctcaacactgtaccctcctggcactttttgagagactacaaattcagacccccccttccgcttattgctcatgttcattcctctcttcttccatctctctctagtttcaaatcttcttcatagtacaaaaacaacgtttcccttatagtaaatccaagtgctaaacccctttgtttaccttcttcttattatctctctctctctctctttctctctcaagtctcaaccaaaaaaagaaagaaaagaaaagacctccccttttatatcttctcatttctaaactcacaagtcgctctctcactcactctccctttttcttattgtaattccaagccaaaaatcctctctctctcagtaaacagaacaaaactcttttcataacacaaacggtctctctgtttttaatcatctttgatttttgctcttttgagaaatattagaactcttctgttgattatattaaatagttcaaatttcaataatattaaaatgacgacgatagtatgccaaggtttgcaatcatgtttggactcaccacagcttgttgagtcgagaacactgaggctgaggctctcttcttcttccataacacctcacttgacagcacagccacagtcctttgatttgtcaaccttaaaatccatcttcccagatgccaaaacaaacgaaccagcagagaaatgtcagctgcctaatcaaccccatgaaagccaaacctcaaaaaacactgaaatgggtgggtggtgcttcctccaatccctccaaaacagtcaaagttccaagcttgaaaaggaaaagacttatgtccatcccatggttaagagctcatcttcttgtctgagcgaaaagagcttgaaattgtgcactgaaaacttgggaaacgagacaggaactgacatgtctgaaagcggcattttgtcgaacacttcggaaacagagtcaaaaagtgaagatttttccagtcgtcggcgtttgtcggctaggaaatttagatcgtcagcatcaccatctcgtaactttccacctccattgacaaccatgagtggagctgaatctctccaaatcaagcctcatcgagaagaagggcggcttataatcaaggccgttaaaagcccacctagaatctcttgtttccacgctgaaagaagccatggccgccttcgactctgctttatggaaaattatacacctacttttgactctggagaaagagtcacaaatcaagaaagtgaaatctgtgaaaatgacaacattgatgctgctgctgatgataatgatgatgaagaagaagaagaagaagaattagttgaaaggaaaatagaagaagaaaaagaagcagaagaagggtgttctagtgaggacatggatgagaaaaatataaaaatggagggcaaaatgggaatggaaaattatgaaaggaaaaataacttaagaagatgcaaagaaggtggtggtggtgaacatgagaagaacaaagcattaatgttaaattgggagccattttgggtggctacttcttaaaaagccttattttggattctatctttataaattttaatattatcaattccaaaatatttatatatattataattattgaatattgaaagaatttttgtaatagtttgtctttctctcttttttttttcacttttttcttctataattttctcttgtttcctcaaatgtagtgtctagattttgagtttatggttggttggtagttattattgttgaagtcattttcaaattacaactttaactagaaaaaaggagtaataattttaccaaaattttaatttcacacatctctgcaaaattaataaaatggcccacattaacaggagagagaatttgaacttgtttactgattttcagaagctataaatatattaaaatatttagagcaagaaaagaaaagaataaaggatttgagaccaatacttttaagtagttgggggtgttaatgaaatttagttcatgaatcattattattaggctcacaacttatataacaatggagtttacaatctgactgctctatgaaaattagaaaattgaccttacttgagggtgcaatgactctattttataggcagtcatacaccaagttggattggtccatacccaataaggggggttactacactttattacccatcaatggaatatttacaagaaaatatattaatgcatgtcaaggaaatatatagtgactcaatctcttgctaacttgggcaagtatgtcatctatcaatttcctaatagtaaatagtaataattaggggtggagatccgatctaatttaatacatttttttcacatccaatctaattaaattagtaattagatttgaaaaatcatcatccgatccaatccaattagaccttaaaatccaatccaattactaattagattgagtcagttttttaattagatatccaattacacacctaaattttaatattaacttaaaaatatgaagaaaaaaatacgtaaaaattaagtatcacattttatttaagtttaatacttcttaaacatactatttttactggttacaagtgtaatatagccaaaagtattaaataattaaaacaacaatatttctaagaaataaaataaaacaaaacatcatgaaaataaatacacaaaacattcaagtgttacaaaaacatacaaaacaatgtaataaatatatattatatttttcttatttttattatataaataatcttttaatagatatataattagatttgatcagtttttaattgaattttaagattgacattcaataactgatctaatccaattagaatccagcgtttagcatccaatccaattgtaattagataaccaattttttataattagataggattggatcggatcggttcggttcaattggattggattggatgatgcccacccctaataataaccacgtgtgagtcgttattaagcgtgttgggaaggagtgtgtcaaagtagtggtagtaatcatcacaaatctagtataaaatataatacaagaacaatataagagattgattaaatatacacatatatacactatatattgtatgtataaaaaagatagaagaagatataacacatatattcacatatatattacaagaaaagaatatgtatatacacactcactcagaaccttgagtatagatcagtgggagtcaccataacttgaacaatgtataaacacctttgtcaaaaaatttattttctcctatctttaagcactaagagaattctcatggaaatagttttgtgaattatcaaaccttagagttttctagcaaaatgtttttttattcaatagaaaattaggtcacacaaatgaacactttagactcctttatagtacttttgcatatataactatttaaaattctaacacataacattccatgaatgttatggtctcaattaaatgagtatacaattcattctccaacaattatattcctataacttttaagaattttaatttaagatgtgaacatctttttacattcttaatattagtgataattgtggaggttactcataacaacaagtaactcctcatataatacaaaatgatgacaactaatgtatattattcataaataatacaacaatcatccactaaattataatattatcttattattaacaaacttgtaactttgtaatatttatttaatcaatagttcagggggcattttaacgaccttaaaagttc

SEQ ID NO: 19131 - DNA, 1963 bp, Cannabis sativa
attggatccccttaaggcaggcctcttttacttttgaaagaaccatggcatctcccattcattaggagggtgtaggaaattataacaatacttaaaatttcgtataatggtatttttataattttttttcttatttatatgtatttgtgaaatagttccaaaaaaaataaaaaagtaaaccagtgtaatgtttgaatctcatctggaccctactcctctcacttggaaagatttttgtaaattaatgatatatattttataaatagaaaaagaataagaaaataaaatagttacattttcaatatttttggtgtgttaaggtcaaagacgatgtcgttttgctcttctttgtcaccactcaatctccatccccaaagtccccaaatcctttcttcaatctcttccaaatcgaaacccaaacaattcaatacacctgcaattgcaattgcaacttcaactttttcttcttcttcttcgatcagatatggcgtcaaagcttccggcgacgttcccaattttctgtccgaagactggcttgaatctcggaaaaaaagaccctttggtccaagattgaattttggggcagaagaagctgttcaacaccaacttgatgcattgaaattcaatgaccaaccccgtcaagattatgggattgaggttatgtacaggtttgctgggtttgatccttttgaaaggtctacctattttgggccattttttgatctgggtcagtttgaacggtttaggaggatttttcaccattcgacgtaccgagtattgctgggtcacagagagaggaagattttgagcagtttatttgttgaagagaatcggttcaagcaacgagtttggattaggggaaatcgtcctgaggaagaagaggtttttcagttcaccatgattcaggtttcctcattctaacactttttctataaccacagatttcttcatcatattttcatgatattgttattattattattattaaatacttaataatacttaacttataattatagaatttttgtagctaagttaaatattaattaaattgtcatatgaatttttttttttaaataaaagtaattcattaaatagcagtatccgctatcataatagactgaagagcagaaagaacattgcttttaataaaaagacgatcagaccaaaaacaagcaccgcgagcaacacagtgtgtggctttattagcagatcgtttaacatgtcatgtgaaaattcttaattagtctaagttattaaatttttatttttttaaataaaattaatttaaatataccaataaaaaaataatacttgaataggtacttataaagttacaaaaatataacttaactattattatcactaaaattaaacctatttatttatttatttataactttgagttaaacttaaatatttacactacaacttaatcttcatataattatttcactcttgaagtaaaatagtgatctagtcttataatatcatatatttccacaataataataataataataccattactgcttcatggtaaggtggaattgatattagggaacttgttgatgtttgtgattaatagggcgaattcagtagttatataatccgttttttctagtactgatttttttaagacttgagctttgatgacatctactagaaatcatctaagttttcatttcacaacaattgaattgacatgttggtctttttccgacagagggttggcggttcgtgggatggttattggctgacggagagtttacttcacgacggagatccttttgcgggtggattggcctattgaacagtcctaaggtccagtccagtccagcgtgatataagatatagtaagatcttagtataggttgttcagttgttctttgttttgtacagccagctttagaaaataattatggaactttgtacataataaataaagttcttggagtactac

SEQ ID NO: 19132 - DNA, 6074 bp, Cannabis sativa
ttatttttctattatttgttttagttcttacccgttgtcggaggcaaagggaactcattagagaaagagcaaacagaaaaagttatgaacaagttaatttccaagaattcccatgaaatactcaacgtgaacaaggtttgattttctttctatagtgtctcatctaactcttttcttccctaatgaaaatagatttaatctcggttgtgatttgaacaggcaatcaccatgtacaatgtcaagaaagagaagaaatggaaaggtaaacaagacaagtcttcacgaagctcaagcaacttgaaaccaaagaaagatattcagaagaaaccatcatcaagtaaggcctcttcatttaaaggcaaagggaaatgaaattaagttctagttattggtgtaagcttttgcaattttgggatataattttacattttagctactggaggatattttgtgtttgtatacttcttaatttttgagcaaaaagtagtttcagtctcttttttccatttctctttcattgccagcaaacgttcacataaaatgtgcttacttatataatatgagatacacatttttttaaattctttaaatatacctgtaaaaaaacaaagtgatgtactctatctaaattaactacacattattatttgtaatctagaattattcaagtttgaatgaccactcccaatattatattctatttttataaattacatttctaaataattctatttgaaaaatataataattacagtttattatttgaaaaggaataataaaaatatattaactacacattattatttgatctcattttatttactctgactataaaaatcataaagataatttttttgccggagtgttataattaaattaatgtggggttgaatgtgcccttcttgggtctgtgtcagtttttagttatttttccttttaactacctttatcatcaatctcttttcatcattttcaaatttcctctgtattaaccgttccccccttcaaacctcctccgccatagccggcgttcctgcccttaccctcctcgattccttctcaattccatggactcactttcaaatgatatacattcttctctttctgtcactgatgaggaaagatttttcgtatacctgaatataatcctcccctacccgatccttctccccagcccattctcttagccaaagttctcacccaccagaatgtgtacaaacaagcctttactgaccaaatgtcaggctattggcaaggccgataccgtgttataatcactgaatatcaagaaggagatggcctatttcatattaagtttggctgtgaaggcgacaaaagacgggttctcaccaaagagccttggcactttcagaatcatctcattgttctgcgcacgccagatgctctgcaaaatgtctcaaaggatgatttagtttttacacccttctgggttcaaatctatcggctgcccttcttaagtaagtccaaattgcttgctgaagcacttggtaatatcattggtgagtttcttgaagtttatgatgattcaaccaatgaagggtggggtcccttcttacgagttcgtgttaaactttgcacaaacaaaccgttgttaagaggccaaatgattcggctgccaaggattaaagatgagttctgggttgacttccgctatgaaaggcttccggaattctattttgaatgtggccgcttgggacatcctttcgagcgatgtgttgcttttatggagcgtatggacagcggcaatgatgacgattttcagtatggaccatggatgaaaggtgctaaactccctacccataactatgaccgatatcggactgattttgctaaaggcaatccttggccgctaattacccgcttggcccgaactacacttacttccactttgccatctctgaaaaactgatttcaagcttctccttctacactatttgaaggtgaaacctctaatagtcccttacctttgcatcagcaacattctcactctcacatctctcccaacttcacaccttatcaacaaccacaaaccgccttcacaccagccacctctccaatgtcgcatacgcctctcatccctacaactcactccaacatcatacactctctcatctcccacaacactaatgcccctgcctccttcccatattctgctgcatctccacagccgcccaactcaccagcaaaccagaaacctacctccattcctagccctgtactgagtcacagcaaccccaaaaataaacaaccaatggatttttcagccaacttatctcataagcagaaccccagtacttatgacaccaacaccaacctcgcagacatttgcaccagcaacccgagtcactcccaacatcttttttctccctgcaacagtgtacaccagcaaccaattacctcttccagcacccactctcaccaaacatcagttacaattcaccctggccgaaccactcctagtgagtctattgctgacctctcacatatttacatgcctgaaattcaaaaccagacttttgccacatatccaccaccactccaaccaactcatcttcactcaaatacatcttcctccaccttaaatgtccccctcaagcatcaaccttcagttccaacagccattgtgtccattggaaaagaaaactcaccacctgctagcaactttaaaagacaaaatgattctctttctatgaaaaagttcttgaaacgatgccgtaacactcaaggaacatcatcttctcccttgtctcgagctgatgatcatgagattctagtttctgacccagaggattctaatttctccttggactcaattgcggaggttgcatggcaaccccgctcatcatcatgaaaataattagttggaatgcacggggtttggggaacccgagtgcgttcagacatttgcgattgctagttcaacagcaatctccccatcttttgtttcttatggaaacaaaactgcctgataactctgtttctcgtgtgcgacaatctctacacttcccaaatggattagaatctcctcgctctggccttagtggtggacttttgttactttggaaggatgaagtggagatcactttgctcaatatgggtcccactttttttgactgttacatgatgatagaaaacagccccacggttcacttaacatgcttttacggtgcacccgaagtcaataatagacaagcatcttggactctcttggaaagacttgcagatgttgctcctcatcttccttggttagttcttggcgattttaatgaaattctctcaaatagtaataaatcgggtggagctcttcgttgtgaatcccaaatggatgctttccgaaaagccattgacaaaggatgtcttcatgaaactcaaattgaaggtgacccgtttacttgggctaaaaatagagctgctagaaatactatcaaagagcgaattgattgggtcttcatcaacaatcattgggaatccttcttcgagagccctcaagtacatcatctagactattttcagtcggaccatcgtgccattagtgccaccatcaacctgattgctacacaacccaccactaaacgaaggaaaaatcggtctcgctttgagaagatatggctgtccaattctgacagcaaagacattattgctgaaaattggttgcacaatgattccaccgaccctattgctgctgttgtttctaatattaacacatgtgctgcacaacttcaactttggcatgatcgcaaatatgggaagatgaagaaaaacattaaaaagtgtcaaaaacaagtcgagcagctcaataattcttcctgtcatagcagcagccactttgatgatctaaaacaagcggaattaatccttgatgagttattggaacaagaagaagtgtattggcagcagcgatctcgagttgattggcttgcttgtggagataaaaataccaagtattttcatacaaaagctagtgcccgatggaacaataaccacatcaagtttctctacaacaattcgggtggcaaggcttcatctattaatgatatatcagctgttgttcaagatttttatgctgatcttttcacagttggtaaccttgatgagtgtgctcttactcatacacttgattgtattcccacttgataactactgctcacaatgatactctccttgctccattcacaccagctgaagttgatagtgccctaaagacaatgagtttggacaaaagcccaggaattgacggaatgtctgccatgttttatcaacaacattggtcaattgttggtaatcttgtatcaaatgtcgtacttgacatactcaacaatggggctgacccttctagcctcaatcacaccttaatcacactcatcccaaagattaaaaagcctcatcatatgaaggattttcggcctattagtctttgcaacgtcatctccaagcttgtaaccaaaatgattgtagcccggttcaaagaagtccttcctttggttatttccgaaactcagagtgcattcttggctaatcgattgataactgacaacattctggtggcttttgaactggtacacgcaattaaaaacaagactgctggtaaacatggcatcgcttctctcaagcttgacatgagtaaagcttttgatagggtcgaatggaaattcgttgaagaaggaatgaagaaaatgggatttgctgatggttgggtctcgcttataatgagttgcctcactaccaattgattctctttccttgttaatggtgaagttaagggctctttgactccaacaagagggttgcgacaaggttgtcctttatccccctatcttttcttgatatgtgctgaaggcttgtcaagattgctgcaacgtgagcaggatttggggaacttgcatggttttaaactcactaggcaggctcccatgatctcccacttactcttcgctgatgatagtctctttttttgtcaagctgatgagagctcctgtctatccatcaaaagggttttggatatctatcatcgagcgtcaggccaattaataaatcgagacaaatatgtgatgtccttctccccaaataccaccttggctgcccaagtgttctttcatcggcacctttccatgccaattagtgagtgccatgaacgatacctaggcctaccatcttattcaggcagggataagaaggagctttttagtaacattaaggagaggatttggaaactcatgcaatcttggaatgaaaaactcttctcagcagggggtcgggaagtcctccttaaagcggtagtccaatcgatcccaacctatgctatgagttgtttccgcttgccagtatacttttgcaaccaacttgagagtatgatgtcaaacttctggtggggcatgaatgaaaatggttctaagattcactggcgttcttggaatttgcgttgtaaaaaaaaaggagaaggtggaatggggtttcgctctttcatccaatttaatcaagctcttctagccaaacaagcttggcggctagttgaaaatccaacctctctccttgcgacacttctcaagagcaagtattttcctaacaactctttcttggatgcaagtatgggccactccccttccttaacatggcaaggaattcgttggggacgtgagttgttgataaaaggcttacgatggaaaattggtgagggaagactgattcgaagtggttttgacccgtggattcctgggcatacatcctttctacctttgacatactcgggtccttccaatggtgttgtggctaaccttatcactgatgatagacaatggaatgttaccttgctgcagcaatactttagccctattgatgttgataagattctcactcttccactaagttattttccttctagagataaattgatatggcaccctcattcttcagggaactttacggttcaaagtgcttatcacctagcaacttccttggaagaagaagatcttagttccacttctacttcagctgtggcttggtggaaactattttggtctctccaagtccctcaaaaagtgaagatctttgcttgg

SEQ ID NO: 19133 - DNA, 5814 bp, Cannabis sativa
tagtgcaagtttgagatatgggtttgggcccaagagtacccagttttgcgcgcatgggtaaggactcacacactggaccaccacacgcgcgccgccgtctgaccgatccgagtcgggccaggttggattggcgggtgggtgaagtctcactttatattttaaagaaaaattatttaattaaataaaaatttattatttatttatttatttattaattaattttaacacgtgatcagaaaaagtaaaacgcgatcagtcaatgatccgccttttcctcccacgatccaactcctccccgaacgataacattactgttttttcttggatcgacttctatataagtcgtatcagaacaacgtaaatatacatcttttccaacattaaaaaaattattttctttctaccttacgatttttctcagaacaaacagtagggtgttatagagcgatacagttcagtgcagaacgtatcgtacttatacagaagttgttttatcctgaggacgccgtggttgctagactgccgtgcacacttcgagcagagccgtgaaacgtcttaaagagagtgacattatccgcgactcagccagattattctatcagtaattcgttttaattttattgtatttaatttcggtataacatctttattttaagatcttattgttgatgttaaaatttaattattctattttctttttgtttctcatattcgtccagatgcaaaccaaacttttcatgacttggctaaacaaacttattggtgaggtgaaatcccttatttttatttctaaacttataataagataattattctcaaaaaaaaaaactctacactataaacttgcatatatcctattcgaaactgagttacataaatatatattcgtacatatttaaatatatatagtttgattataagtagctatagtcactcagaggcagtgcccgtaacgccgagatcttggtttttgtcgtcgttggcagcaccgaaaacgggaccgcctttaccggcggcatcaggaaccttatcctggattttatcgatctgaatgcctccttcgtcctcctgcgatttcaactcgatcttcgttctgttctctcctccctgtgtcgattcgtaagtcgttgccgttttcgaattctttggctgagctccttgtgcccctgacatctttatttattaatttgatccaattatattgctttataatttcagaaccgtactactatatacatatatattaacaatgatgatggtattgtttcgatccagttaacgtacgtggcctctagtactagtcgtggctaactattgccacgccaagtggcgcatgtgattttggacacttggcattttgttcaaatctcaatgtgtaagagtcactattgattagaccaggtgtatgttaaccatgcatgcacgtggtatgtgaatattggttcttatccttaacagaattgggacctaaacatgtattcctagaggctagagcatttgctatacgtagcagatctcacattggttctttaagaaccgaatgttatggtgttgctgtattcaatgtactctatagaattaaaatgatatgtaaaaagagtatttaacatcaaataagggtgtctacataaggcttaccaagaagccaagtaaagcaccagcaatgactttaatttcggtatgaccaatcgttcttttagtgaatatcgctagaaattttttctaatcctaccttaatgtcatctgccaaaccgcatctgagtcttgctctctgactttcgcactaaaaaggcatttctagtttttgatgttgaagaatttaattcattttttggatgagtagttcaagggcaatgattgacaatcaaagccatctatgccctcggcatgagttgagctttctcgtgatttgggctttaggatttcgtttagtgtctttgcatgaactcctacttctcttctaacaccctgtaagaatatggataataatgcttcttagtttcagttcaggtaacaacatgcgaaaaagaaacattaataatagcaatttcaaacaagaatagcaaatctagcaaatgagaacttcattgcccaagctcgaaccgtatgattaagaatgacattgcactaagttaatccagttcaatttttgatgattaagtatgacattgcactaagttattctggtacaatttttgatgcggctactaaaaaccatgagtaataaactaattcttagttagagaagattgtgaaagacatgaaaattcatcgatcatgtcataacaagtaaaacaatatttaatgccaatattgccaatatcacctaagttatcttcaactattaatgagatgagatgaataagatgcaatggtctgaaactttttattagtacaagttaaaatactgaagaaattataatcctcaacaacttaacaagacgtacccaaaggcaaaaacataactgctttagctaataagccagaattccaaccaaaatgaaacttgatacaactcacagaagatcagtgtgtgtgcacatttaatgataccagcaaaatcttttccactaatggaataccataaactgaatatgttaatttaaataatttccagaaagttttaaatgaaaagtaaaagtttccacagcaacaaattgctctgaaatagagtaattagatataaacaagtgcaatctagtacactgttaaaaatggttgttgtttttcttttttctacaaaatgatgagtctttggatttgaattttcctatagtatgatttcccagtcattttgggatgtaaagtatataatgaagtaccaattgctcttcaaaatctaaacattttgttactgtataaaattcattgtaactatatctttttaaaactcaagggcttcactgcagaatacaaattctcaagaacaaggtagcaaacaaacgaaaaatttagtggcattttaagatgtgagtaaaaataaattgtgacatttttgaaatgttaggcattaaaaaatgtaattaataattaaaacttaatatttgtttgaatttatttatttggaaaatataccagccagccagccacatatccctctttctctctcaagtctcaactccctaaccctaacttatctgcgcaatggcgaaggagaaatgaaaaacgtgaggttgttttcggcgtcgttggaatcggcttctaccctcgatctcacttttaaatctgggtatggacactacataactttatattctaatttttatttaattttccaaaagctctgataaaaactatagactaatttcattttactgaaagtttgttttgataaatttagaatttttgtctgatgagaagaagagaaagtttgaaaatttttcaactttgagagaaatggtggctgccgagtagtgagaattcgggattagaaaattaccttccatattagggtttggcatcctaaggttactattttgtcttcttgggttgttgattcgagtgtttctgtaatacatacaattggagaggaaagatagatcatagatagaagaagaggagcttacttagttcaaggagtgttggtaaaagaggcctcttcaccaccaactataccagccgccattgctttgctttcactcctaaggtgttaggctcctctcaaaaactattcttttccttttctttaacatattgcgatatgagattttgcaaagatattgtttcattaaacccatatgtgttattgttgttgtttttaattattagatatatatattatatacacctctgatttttgtatcaaccatgcactcttggtgtttgatgaaaagccgaaatgggtttatatatatatatattttggatgagcaataattgagagtagacctctccgcattcattttacaatttttttgtttccttaatgattatttgtaaacattgagtaaggtctgctagtttatgtggttatgaactaaattcaactggcaagtcggttgctcattttggaatatgggaatttcagtgatgtgaaatatgttgaataaattcaagcatttttggttaactttcttttttttggggtttgaaagtatgtctattttcctagcatagtcatttgtgctgaccctgatgtacaatgaaatgagatggtgttacttgagatttgtgtgagaaacagtaattgtttagaaaccttttggatcttgatatgtttaattggactaccttctctctttgtcttttttttcttctcatatttggttccaatgaacaacctcgaacctgaaaagatttcaagttcaggagttttggcgctaagaagtgaagcaagtaattaaataagaaagtctcataatggtataatgctacagtttacagaaagttctcaacttttattttacagccttttctttaggactttattgacatatgactctgaattgagggactcctcacttcagtttgattgaaatgtatgcaacaaaaacaccccagaagatttgatttcaataatttcttctttgattgatgcaaaatgaaaatgttataagattattgtatgtaattaaggatgttactgtaactggtaagtggcttcagtttgttcatatacatacagttgtttttattgaaagatgagtgagaattgctcattttgcttacatattgttgttgtcttatcatctttctgaggtatacattatatgttttttcccttatgtattcaaattttgatatgtttgttgaaaatttttgaagtcatctcaagaaaaatctagcactatgcttccggtgggaggttaccgagtgactagtgactctgaacctcaagttggacaaagtgggtcatttcgccatacaagcagtgctagttcttcaatgagaaggagatcttttaatttatcaagtgtgctctcctcacaaatggatgacaccattgaatgtgagagtgtgtcagaggcaggtgatattggtgatagggctcttcatagcaacatggacagtaggagtgcaagccttcgcttttctttcgatcatgtatcagaaagtggggtggttgttcctattgcagaaaattccctttcacattcaaatgtgttaaactctcatgactctacagtcttgaactctggctcagaacttttttctcctctttcaactgatggtatggtgcaagctgaaagcaaaatgcaagtaagttttttcttatgttttttgttatcttcagaagatattcttgcaactttttggttttattattttgatgatgatactgagagttcagtctagatatagtcatatcatgccagtacatcacaagctcttgtgtgcttattttgttcatttatttattttaacgcagaatgacaagaaagaagtgccaaagctgctgaagtacagttcttgtcttactcatttggctgtttttgggattttgggggtaatatacttgattgcaatggttaatccagctacttcaataagaattggtaatttaaattatggtctttagtaggattttgtatcagcctaagaacctcataaataataatatggtctttagtaggattttgtatcagccaaagcttgattactagctctttggtctcaatacacattggcaagtttcatttcctgctgaatagaatgtgtaataatttttggcaaatcaactaattttatacgccgtatgttttaagaacattcttcattaacatatttatacggttctacaaattttattctagaatttcttgtctccaaaatattttttttaaaaagtactacattcccattaaagttccaatt

SEQ ID NO: 19134 - DNA, 7718 bp, Cannabis sativa
  modified_base (7666)..(7669): a, c, t, g, unknown or other
ataaattaataatatttaaaaaaagagaattgtaataaagctaatcttttgaagtccttgcatcttacaatgaccaagtgagtaaaataaaaatacacttatataaaatgtataaaattaattattacactacttaatggtaatattaaaatgaaaatttttaatgttgaaaaacatttcaaaatattattttatgaagaaaatacttatctttactatctatggaacggatcgtcactactacctctcgtccttcttaggataaacacaaaacgaaccatcatatatagtgaaccaccatatatgatactaaacaatacacatgagcacataaacatactaccatatatgatattattttagaatcaaatatttgtataatttaagtgctaattctgtaggtagctgtagaattgctgctgttagtataataatagaagcagactatgcgtcaacttgacatgtatttactgacatatatgtcttgggctctttttctgcaggatattcaagaggcacatgctgggcaaatagttgctgtgtttggtgtagattgcgcatcaggtctgaccattactccaaatacaaacatgttattattactatcaattgatggttgagaatagctcaacaatcaatagttttctggtccccaattattgtagggtttgacgggaagcctacataagaggaaaaaattgcggtaataataacttagtgagaactgagaagaagttgcttgctgtattttttttaaaaagggatagaggccattgtcttagactggctcatacctgttatattgaaagctcacttgtggcagaggaaaaccgtttgatatatggttttagcataaaacacaccaaaagaagcacaaaaacaagacaggacacaaagtataaacaatacttgtttgtccaaatgaaaaattagatcaaagttctccattctctacttaaatctaagaatgagaagtgttcaaaatgattagtcttgtacactcaagtggctgtccaaaatctaattctgtcccacaaatcctctactgaacattcagatccttcaaaaattctattatttccttctaaccaaacagccactacacagccatgactgctgttctccacaagcaagacctgcgcttactgcctctgtgcctcccacctttctcactatcatttggggtactgactcgggcagaacccattgattctcaaattcgttcatcagattaaaccatagattgtgagcaagacggcagtttaggaacaaatgcaccacttcttccccacccctcttgcagcaaacacaccatcccagtgataaaggaagaaaaggtctctttttttgcatcctctcatgtacattaattttgcctagagctaccagccacccaaaaacttaactttcgatggaccattgcttttccataaagtcttaggggatagttaaattgcttgtgtgattactataagtgaagatggtgctaaataatgtggcaatttaattatgatgtttgttcctttgattcccttgccctttgagttttgagaaatttttcctgagactttgttatatgatcaggcgatacgtttacggatggatcagttaaatataccatgacttctatgaatgttcctgaaccagtgatgtcattagctgtccagccagtctcaaaagattcgggaggacaagtaagtcagttctatgaaaatgtgtttgtaaatgttattctagtcaggctatttgattttgtgttcttctaatcaggcttattttttgatctagttttcaaaggctttgaatcgtttccagagagaggaccccacttttcgtgttggtttggatcctgagagtgggcaggtctgtttgttaatgtcattctttattccgcttgttacaaatcaattttactttctttaccaagcgtaagaataattcttgtttcttagtgatcaattttcttttgatcagacaattatttctggaatgggagagctacatttggacatatacgttgaacgtatgaagagagagtataaggtgcctggccttttttcattgctaaatgtctaatatgggatagtctatcgctatttttaattaaaatgtgctattctttctttgtattctcttttatacaggttgatgctactgttggaaaacctcgtgtgaacttcagagaaactgttactcaacgggctgaatttgattatctacataagaagcaaactgggggacaaggtcaatatggaagagtatgtgggtaagcatgcacaatatttgtttgtgcttgacaatagtcttttaaaaaacatgaccacaacatgtgcccaaggctgcttagttctatgcactctatattgattaacttgctaatttagtgagcttaacaatgctgattgattttctgcatcgtgtacttaagtttgtttcaatttgtatctttagatatattgaaccacttcctccagggtcatcaaccaagtttgaatttgaaaacttaattgttggacaagctattccatcgaattttatcccagctattgagaagggtttcaaagaagcagctaattcgtgagtcctttgctggttgatttttgatctttgaaaatatttcagttcacaacagctgacctgtttcttttatgtgctcaggggctcattaattggacacccagttgaaaatattcgtatatgtttaacagacggagcttctcatgctgtggattccagcgaacttgcatttaagttagctgcaatatatgcatttagaaaggttcttttctatgtcatctttgtattttaatagtgacaactatatgtaattttgtttctattttattttgctttcttcttcggctcaaatttgaatttgtacttatttttaattttctttttcttgtaaatcagtgttatacagcagcaagacctgtgatattggagcctgttatgctggttgatttgaaagtacccatagaatttcagggcactgttgctggcgatattaataagtaagttgcttttctacttttgtacgtagtgtatttcaaggttccataccgatttcactaattaataatgggtggtgttcacataatgtaggagaaaaggtaccattgttggaaatgaccaggatggtgatgattctgttattactgcccatgtgagtcatttttttttcttactgttagtattatctagattagacttgactgatcatttaagaacatgctttagcttctaaatattaattccctgatgtatttataagtagaaggttaggagctttttgtctttacaatttttaagactgatcgagttgcaatggcattcttcactaggtctacttcataagcattaatgacactcgttgcatgtttctataccaaataaaactaaatcttctcctgacttgaaattcttgctatctgtcattgccatttgcatcatctaaaagcgccaaaatacacctgtttttgtttaatctcgataaaggaatagtgcctactaattgagctgttaaggggttgtggagttcatgtaaaaacgggttatatttacttaccaattaatttaataaattaaatactaccgctggtggattctctgaaagaaaaataggtaataagcttcttacaatttgtgatattggtctttcaggtccctctaaacaatatgtttgggtactcaacgtctctacgttcaatgacacaggtaatgaaaattgtcatgattttaaaaggtgtactcttttatggtatgcatttgatgtacagtgagttgatacacttattccatattggcaggggaagggtgagttcacaatggaatataaagagcatttagctgtatctcacgatgtgcaggcgcagctagtgaacaattacaagggcacaaaggaggctgaatagtggtagatggagagtcttcattatagtttttcttttattttaaattatatagcaattcttgtagtcgaaaagacgaacttcataaatccagaaattttgacaggaactaataaaatttagctacccgtgattcaggggaaaatgattgatgtcaataaactgtagtctcttgtaacaacattatagcagcatattaattctagtgtgctttttcggtttggaatgggtaatcctaccttgtttaacatatcaaactcattctgtcttctttttgattcaactatacatggtaaaactctttaaagtaaaccagtcagagctggtatgaattgatcccaacaaatgttggatagtaattcttcccaattaggtaaatgcttcccgcaaattcgtgggtagttccaggtcagcttcaaattcacttaggggagagaaataacggtccaccatatcttcggtaacttgccctaatgttggaggatcccactgcattttgaaaccatagaaactgttaccattaacgtttcagcacctattacatgatgttatcaacccacattctgttaaagaattaaatataagaacatgatacctttggtgccaaatctttctccactacctttgcccgaaccccctgataaaacgcatgcagcaagtagtgattaatttaatgacttgtcacgagtctatgcatggccttgatttcgtcccagtaggagacaaattcttgtagcaagtctacgcattgccttggattttatatatctataattttcttttttaaaatgtacctccgtaaagtcccctgaaatctgcttagataccccctgcaatgacattcgatattcccgaatcaagcattgatcaagagtctgaaatctaccttctcgtatctgaggagaccaatattagaacagttagccaggtcataggtatgatacaatcaagtttcatcaaagaaaacttcaagaaggtagagagagagagagagagaaagacctaccgatctcaatgaaaccttcaagctcaatggtgaaacttcttttagtctcttcgcagtggaaatgcaccatgcatccttcgttctagctgcttcattctcctgagaatatgtttaaagaagttagataaggaattattttttatgtcttatatacaaaatctcaaatttagttgggttaatggttaaaaatcagcatatgtttaccatagcatcaatgatttcttcaacagtatcatggctgaaacacttgtcaactacttcaatcctaaaaatgccagaaatacaaaccaagtaaaatatttaaacaaacgatgttatcaaatattaaaagaaaagttgatattgtaaacttgtttaaattgacgggaagtcatagggtatagattttatacaaggattaggctaattaaacctgctgaggacaccattctctgagtctggatggataagttcaccatagttttctaaggttgtttcaatcactgaaggatcatcagttactaaattcccaagttgttcttcaattaaaggaactctctaggatagaataaaattattaattaatgattaaaaaattgacaaggaaaaagaaagaagattaagcagaaaaacggtatcctaactgagctatgtgaatagtgtgtagcaagcccacaagcaaccatttctgctccattgagtttttctcctgttaaagccaagtactcgcctgcaaattacataaatttacaaaagtaaaaatccactcacccttggaatatatatacatgaaaacacctcgttctaccttgtacctgttgattaacatatccaacagaagatatttattatattataaaagttttctccttgatcaaaattccaagtctacttctatagattacttaaatattccacaaaaactatgaaaacatacctaagtgaccaggtagatgcgagagataaaaagatgctccagcatcagggtgaaaaccaatcagagtttcaggggtagcaaaaacctgcaggaaggaatacggatataaattcttccagctgagatcaagagaatattttgaaaatgtattttctctctataagacaagtttaaaagattacacaataaaacaggatgcgtagaatcatgttacatttaagaactccaaaaaaggaaaatataaattgaagcacacagttttaaataacagagaaaacaattcaagcatttacagttttttctgttgcaagacgaaacatcccagggattgatactccagcaccaccccccattgtaattccattcaaaatagccacctgcaaagtgattgatattgtaactagactcattgaaagtgtagccaaaaagtttatgtatactataaagtattttcttgatggtaaagtggcaaaaggaacacaacaagagctatcatagaaataccgttttttgataatcacgtaagaaaacattaacaaaaatattaccacaatcccaattcaagggtggttatctaaagtaacaacaaaaaatgttcagactaaagatccataaaaattgatttacttacatggggtttcaaataagtaccaagtatgtacataaacgtgtacaatgacctaaagaactccttacaatcttctatcttccctgcaaatattaaaagcttaaggttactcaactaactacgaacaacaatgagattaggtacttaactgaaaaccactgatttccaactacgatacatgaattttggagaataaatcaacaaatagagaataacagacaagtatgcaacctttgtttataaagtgataaagagaaacgatatccccaccggcacagaaggctctaccgcggccctttaaaggttaagaattgtatgtaaggttaaaactgttttatgacctcaataataataataataacaaacacgttagtaacaacagaagatcaatttttaatgtgaaaacagtgaaagtaacccagaagaggggcagtacgggaaaagaagtaccttcattactacaaagccaatattagggtcattttcccagcattggtatagtttctgtaacctagtcccctagatggaaaaaggttcatcctataagaagtttatcacttgatttcaaataagagagcattaaaaaatataatcagaacaaatacaggaacaaaaaagaaaaaagagatttttagaaatcaaagcacagttaagcaatttagtcaatcaggaggttgggttctgaccggatatcaaaactggaccaattgcatttttagctataaatttaaggaaacgggttctaacaataaagttgagaaagaagaaaatggaagccatgatattgaacataaatacgtaccattacagcagtgagagcattgagggctgagggtcgattgagaatcgcagttctcgaccaaggtttcccttcaaccaatacctacagagagagagagagagctaattattgaggtgtaaatagagaaaataatggaaagggcaatctgaaaacttacttggctgtcaaggacatcggccgaagcagagtgtggcacggaagagagggctctgtgatgggtatggaagccataacaatgaagattttgtcgtagtaatgaagctgctttcttgagcctctgcatcgttttccctggttacagcctaatcaaagtatctatttaacttcttgaccctatgttagcattgattttgtacttgtgttgtatggtaaatttagtattggcatttaagtggttaaattnnnnaattggtatttttgagaaaatgagatggaaaaatgataaaatggcaaaa

SEQ ID NO: 19135 - DNA, 3094 bp, Cannabis sativa
ctccctgcatttgaaacaataatatgttaattgaacagaaataccgtgcaatgcacttaggacaacaccggtgctatatatggtccatatttgaactgatgtgtacacacacatggaaaaacaaaaagattaaatacctcaaaaataatcccatccaaggccattgcattactggcctcctcaacagatctcatctccacaaaggcgaacttcttttcatggttgatatatacatttacaacagcatctcctgcaccaaatgaataaaaactgaaatcagacaaaatatcaattaaacattagctatgcatgcgtatagattaagatgcaacaaagatgtacctggaccagcagtgtttcctccaattgcagccatcacctgactgaaaaatgttgcaacagactgcagcagaaacattgtaagctcactgtactcactaaaccgataaaaatttatttgcaaactaatgtagttctaagcactctaaataatatttgagtattaaactagttttatataaattatttgttaaactaaagtagtttaaacaatctaataatatttgagtaatgtaatgtaataatgtaacatatgggtggagacactgtgcaatcaatcaataataagtccaagaatatctttaattcaactccacgggaagacaattcgagaaagatttcagccatcgcaaaagggtgcatactaatgttaactaacaaacaatttcgtgagataattaaggaattatccaggtgttttacctgttcatttgctgtaggaggaagcccaccaacgtacacccgtcgggcatgtctagtagcctgaaaagcaaagaaaattaggattagatataaactgttcgttgaaactcagaactcagttttaaaaagatgccaaacacacacacattcatgccaacctgctgagtcatggcttgcactggcatgactggaagggctccaaattgctgcatgggaacaaaacacaaaatcaacaatgcaagccatgccatacaggtaataccaccaattttttatttacattttttttttaatttcaagtgaaggtgtagagattcacctggccagttgctagaggaaacatgtttggaaacattccagggatagctggaggagtcccaggaatctgacctgcaaataaaattacagaacaaatcagtctccgaaaaccatcatgatttgacatcagctcataggatggtacagtaaaataacaccttccacttttaattccatacaaattcattaagcatgtcataacctcaagagtacattttatcaaaggagatgaaaggaatttgtatacaaattctggaataaatatttgtaagactaccaaaaaaggaatagtggccggttgaagacgaacaagatccatcaaaccggtgcattgattcctccttgtacattaaagctacagtagtcggctcacacccattgtcagcacattggggctagtagcccaacattgccttcttacaacaaaagacaagacacaaacaaacaaacaaacaccaaacacaagaaaaaaaaccaaagagatctctcagtcccgaattatttcaccaagtaaacaataaaaaacttatagcccatccagagaacacttcttttataaagctatatgcacaaaataagaaacaaaatatatcttaccaaaataacaccatgaaatttgatacgaactttccacactattccaacaaagaaaaaaagcagttaagagaatacaaaatgctaaagtgatgttgataaaatatacctgtagcagctactgcagtagctaacattgcagaagcaggaggtgccatatcaaaaccgctaatccttttgctgcaagtattgaatgttagggaaccaaaaccataagcaatatattgaattccgtattaaaaaaaataacaatacatactatatcacctatttgaattgttcatattctgactatcaagtgtgtattaaagacaataaatcagacaattcagacaaggacgttcaacaatcacctaatgtaaataatatatatattatgaaaggctctagtgtagtacctttttgagcgtgaacgagaacgcgaccttgacctagatctgtgctcagacctacccattgagcgtgaactagatcgaaccttgtgcctatcttccctatctttgtcataatccctccgtctgtgggaaattaaacaagatcaatacatcaagaagtataaaagatctaaatacaagaaactaaaatagattaaaattttgataagttcattagactaacagtattacctatcataatctcgactgcggtaataatcatcatcgtcatcatccctatctctgccacgtgaccttctctcaccacgatccctgtggcgatctctatgatgtcgatcacgatctctgtctctatctctatccctatcacggtcccttcctctatctttgtcccggtctcggtctctttccctatccctatccctgtctttctccttgcttctccctctatccctatctctatccctatccttatccctttcgcgatccctgtctttctctttttcacgccctttatccctttccttttctctactcttcgaagactcccgctcataatctcgcgtaccatgctgcaaaagatatgttagtaattatcaattacaataaagaaactgacagttacatttgaattccaagcaagaacataaaaattttgaaccatgaaataatcatatgataaataactacatagaactgtaagtaacattcatacagcaattttctacagattacaaaatgtacaagtctagaacaagtgccaacaaaaccacaccactaaagaacactctaaatccaactagagcactacaatcatcacaacttttactccctaaatagacacaaaagaaaccttcaaaatcagagctatgacttattctctcatctcatacagcttccacaaaaaacctagaactcaaatccaaaataaagccgaatataagtttatatcgcaaaaaaaaaaaaaaaaatctaaaggaaaaaaagaagcagtgttgtacgaacgtagttcaacctgagattta

SEQ ID NO: 19136 - DNA, 3898 bp, Cannabis sativa
tatgaaataatccctaaatacgttttaactttcatttttgagtatttatgaaataattgtgctgtgcatgactggacctggatttgggccgaaacagttgtgcttcatcttaagacttgggcctaagcccaaaacaatattaaaccaagttagttaatttacttaatattctgtttccttgtttagaaacgagtgtgttctcagaccagatctccattgttgtcttccttcttcttcttcttcttcctcttctcatggtcaccattcccaaatctatacattcacaattctcacttcaattctctcaaatctgaaattttcagctaagctaacactactctagatctgaaaatctgaaactttgaattcgattttcagatctggtgaacttactcgatctcgacgacaatggagaaatcatgtactttactcgttcatttcgacaaaggaactccagctctagccaacgagatcaatgaagccttacaaggaagcgaaatcgaatacaagatcgacgctatgaaaaaagctatcatgcttcttctcaatggcgaaaccattcctaatctcttcatcaccattattcgctttgttcttacatctgaagatcatactatgcagaagcttctccttttgtatttggagatcatcgagaagactgattcgaaaggtaaaatccttcctgagatgattcttatttgtcagaatcttcgtaacaatcttcagcaccctaatgagtacatccgtggtgttactcttcgattcctttgccgtcttaacgaaccggagatcgtcgagcctcttattccttcgattcttcagaatttggagcaccgtcatccctatgttcgtcgtaacgcggttctcgccgttatgtttgtttaccgtcttcctggtggtgaccaaatgctggttgatgcgccggagattattgagaagtttctcacttcggaacaggataattcgagtaagcataatgcgtttcttatgctctttacttgtgctcaagatcgtgctgttaattatctttttactcatattgataagattatcgattggggtgaacagcttcagatggttgtattggaattgattaagaaagtttgtagaactaataagggagagaaaggaaagtatattaagattattatatctctattgaatgcaccttctagtgctgttatctatgaatgtgctgggactcttgtttcgctttcctcggccccaaccgcggttagggccgcggccagtacttactgccagcttctgttatctcagagtgataacaatgtcaagctcattgtgcttgatagacttaatgagcttaaggcttctcatagggagattatggttgaattggttatggatgtgcttagagctctttcgagtccgaatgttgatattcaaaaaaagacacttgatattgtgcttgatttgattaaccatagaaatgtagatgaggttgttcttatgttgaagaaagaggttgtgaagactcagagtggtgagcatgagaagaatggtgagtataggcagatgttggtgcaagctatccatacttgtgccattaagtttcctgaggttgcaagcactgttgttcatcttttgatggactttttgggtgacagcaatgtcggttctgctattgatgtggctgtttttgtacgggagattattgaaaccaacccgaagttgcgtgtttctattattacgaggttgttggatactttttaccagattcgtgcttccagggtttgtgcttgtgctctttggattattggcgagtactgtctgtctctttcggaagttgagggtggaatatcgaccatcaagcaatgtcttggggatttaccgttcttcacagcttctgaggatgttgagggtcaggatacccagaagaccgcacagcctgtgaattccactactgtgtcctctaggaggcccgtggtgcttgcggatggtacctatgcaacccagagtgctgtactggaaacagccctgtctccaccgacacttgtacatggctcggcttccattggaaatttgagatctcttattctctctggtgacttttttctcggggcagttgtggcttgcacattgacaaagcttgtcttgagactggaagaagtccagacattaaaaactgaagttaacaaagcatcaacacaagttttgttgatctttgtctctatgcttcaattgggtcaatcctcagcccttccacaacctatggataatgattctcacgagaggattgtattgtgtatcagattgttatgcaatacgggtgatgaggctagaaagatatggctgcagtcctgcagagaaagctttgtgaaaatgcttgcagataagcagcgtcgtgaaactgaggaattaaaagctatggctcaaatatctaatgcacaaccagatgaccttattgatttctaccatttgaagagcaggaaggttaggaaactcgtttattttctctcaaaggcattaaaaattttgtttctttcaatattattcatcagcccatttgattttgtagttttaattttcggtttgcacccaatttaacatgtctttccttgtcgaacactgactcatttagatattgtgaactgttttacaaacacatctaatctaaatattgaattttatgtttatgttatttatatgggtggatacactctgcggtcatctgttttagtatttttcaagtaagaaatatttgttaaatggcatttcagggtatgagccagcttgagctggaggacgaggttcaagatgatctcaaacgtgctaccggagagttcacaaatgatggagatgatgcaaataaactcaatcgcattattcaactcacaggattcagtgatcctgtttatgcagaagcatatgtcacagttcaccattatgacattgtactagatgttactgtcattaaccgaaccaaggagacactccagaatctatgtttggagttggccactatgggtgatctcaaacttgtagagcgtcctcagaactatacactcgctcctgaatcaagcaaacagattaaggccaacattaaagtatcctctactgaaacaggagttatttttggtaacattgtttatgagacctcttcaaatgtacatgatagaatggtcattgtcctcaatgacatccatattgatatcatggactacatctcccctgcatactgcgctgatgtggcgttccgaactatgtgggctgagtttgagtgggagaataaggtaacaccaatatctcattcctcttaaatttattatcgttaacttttctacattattttttaaattaacctgatgacttccttcatgcaattgatctgtctgatgtgttaaatagagacttttctccttttttaaagaactatctactcatatgtattataatgataactaaccaacaatttgaatgaattggtggattatattaaccaatttggctagtgccttatggtttgatcctacaaagtctgagactcgagtccctcccgagtatctacatagcaattgctatagtttcctgcttcctaaatattgtaaggttaggtggggatcatagtttcgaaaggaaaaaaatggctagtgctctatggctcaccttctcttcttaccttaataattgtttacatccatttaatgaaagcttaatttctcataagtatgttgaagcttgttagtctttaagatcggtttattaccaaccctttttgattctaaatgtaataattctattgtggacgatttctttgatccaggttgctgttaataccgttattcaaagcgagaaggaatttctagaccacatcataaaatccacaaacatgaagtgtctgactcctctgtaagttctcgcctttataactacaaac

SEQ ID NO: 19137 - DNA, 1379 bp, Cannabis sativa
gaacaacaaaataacaattggagacattggacggttcagcatctgcaacttgcaacaattccaattttcaactgataacttagaagcaaactcttggacagtttcccattcttgcctgaggaacagaaaaaacatgaagcatgagtgaggcatattgagtcaacaactccctaacaaaaacaaagcgaaacaattgtttatctagaagtattctgcaacccaaagtataaagcttttgatagaatggcgatgaatgatgcatgagccaaataaatccaatccagtaaatgaaaacaaatagagagaaaattattaccagccaccaggatggccaacatagaccactaagctgattagtcctccaggagctaaaatatcttttgcaacactcagtgcttctagtgttgtttgtggttcagtaattagcgttttgtcacctccaggaagatagcctaagttgaaagcaataagcctgaaaacttacaagaaatcagagtgtacacccccatgtttcagcaattcattctcctaataataaagtagttgaatcatgtgcaaagccactaagaaaaaagtaatatgtgatttccacaaagtgttcaaaataccactatcaattagttccttgactgccactttgagtaacccctctctcaaggtattggaaaattcactttccgaattccttagtttttacttattagcactcggtagaatactagatgtagtgtcctgccacagcttgaagtatggattcaacactcttaatgatgttgtgcgttcaacttgcttagaatattacacaaaagtttcaattggaaaaaaaaatacgaaagggaagtataatactgtaatagatgtgtatcaaattgcaactttgcttctaaatgttgaatagtaagacaagcatgtagaagttttgagtagtgagtaccttaccaaagtatcctcaggtagaacttctgccattttactatggcataattggaagagcttaacaagttctttctgtgaagataataggataactactgcattcagttttatttataaggtaccagaatacaaaaatatgctactaggtttgaattttgaacttacaaaagcagaatttggtcatattgatatataactcagaatactatgtccatgaaggaaaaacatgatctacagaagggtattggattgttagaccccataatttgttgaaacgatttttttttttttttatggaattagttagtagtttactatctggggtatacgggagaatgcatagctgagattgggactcacgaaaattgtattgatttgagagattgctcttggcacagttctgagtctctcgaatgctcgggttgtcacttatagttgaattg

SEQ ID NO: 19138 - DNA, 4726 bp, Cannabis sativa
  modified_base (4084)..(4084): a, c, t, g, unknown or other
aaaggcttatattgtagtagtgattatttagaaattattgtattttttttttttctatttaaatcaaattaatttaagtaatatctaactagggaaaagaaaatacatagaaaatataagaaacgttgatgtcgttttatattaagaaatctcataaaggagcactagaaaataatgagggagtttttttttttaatggaagtatggaactttattaataattcaaatcagccataacaatgagggacttctttattttatatattttgtggcaataatgagtaagttttttattaatgtaatgtaatgtaagcactatggaggagtcagcgccaatcctacgtaacgatttaatttttttttttttaaagaaagcaagtttgtttattatgtggttgacgccaaaatagtattttattagttatgcgtagagtgtggcttattaattttctataatatgtattagctaaaattatggtttggtaaataaaattgttagcatcattgttttattttctttttgatcatttgttgtgatattatttatataaaatttctgtgtttttttttttttgctaaagaaaaaaaaaatctgttttttttactcaaaaaaaaaaaataagtaagtaagaaatccaaaaggaaaatctcatatgagtggttggtactttgagtcttggataatactaggtatcccatcatcccacctcatatatcacgtttgtagtatcattttgtatagtaggtgagttgtcagaaattgaatcaatatattgtcttctttttttttcttttgcttatacaatatattgtcattaatcacaaaagaatattattttatatgacatatgagttgttacaaattttcaattaataaaacaccccaagtatctagtcagcattgtcaaatatgataatttgcattgtcgattcaaatctgttttcaaaaccattaatgtatttatcaacgtttttaacacaataataaataaaaaaaatcaatattgttattttggaagattttttcaaaaatggctaaattattaaaaaaaaaaaatcccactttttaattacaagtggcatttgcttttagaatgtaccaaacttattaaataaataaaaaaattaaaaaataataaaagaaaactgaaaaaagtgaagcgtatgggaattagagggctggtgtaaaagatcgaaacgtgtcgccacataagactaagcagaggcaaaacactcaaaactcgtctgtatggagactattactgttcaaccacgctcttttcttaattaccctttattttccccactaattacaaaccaatccccccacaaccccattcattcaacttgacgagcttcacagagaaagaaaagagagaaaagtacagcgttacagctagtttacaggtgtgactgtaactaggttgttattgttgttgttcttctctctaatcactctttcatttttaagctccaacttgcacaaacatggagacgctaaacctaaaaaggctactaataaagagataacggaacctcatgtcaaacaccacacactctctctatctctatctttctatttcttcccgccattgataaccaacctgagaagctctgtttcgtgtagatatacttcgtctctaataccaaacagaggatctgattcaatccaacagttctctttctcgctcgatttaactacaattagttagagtcttatcttatctgggtaagtatgtccactttttcaccgctttttctatttcaaattcagttttttcttttctttgttacggctgcaaattctattcggattttagcttagcttatctgggttttcgttaaatttttcatttgtttttttgttttgggtgacagagctatggctgaagtgaacagtgtaatcaaaattagtcagacggagttttgtaaacagaagtacgaaaccccttcgaatggtttgtggggatcctcgccggaaaaaacaaaccagggagatgcccagttattccttagctctgaagaaccggacctgaatctgggactttctttaaacggactttacgccagaagctctaaagaaaagaatctgattcggtcatcgtcgtccgtcgccggattccttgctcaagaccgagttccggtagactccacaatccgccgacaagaaaattctttcctttctctctcaagatcgtgctcgcttccggcagagacgaacgagacggcgatcaagctcagggacttgcagacaatgagaagaatggcggccaagaagagattggttgagaaacagagaaattgtagagatgcccttgacgaagataaacctcccctggcaccgacaccggcgccggacatggcagcttgggcggcggcttctgcggcgaaaagtgccgcacttagtcgcgccattagtaagatcaaaactcagggatatgtttccagtaactatcggcaattagaaggtacaactattctccttttttttttttgaatagtattctcttctatttttcgttcttaaagatatttgtttatttacttcttttaatgtttgggagttgaaattgaacttcgagcttttatgataaattaatatatgtgctaggtagttagaaatggacaaaaaaaataaaatgtccaaaatcaaaacattacactaaaattattgcttaatagaatggttgattatgaaattttgtatcaaaacaaataacacattaagactacaaagaaaactgtctacttctttgaattggcatcttaacatgttctgtgaagtctttttcttgtaatgctactgagtcctgactagaaaagttaacgataaggattatttaagaaattcccatgttgaaatttcctaaagaagcccttttttccttggttttgttcaacaggacatgaattcctaactgctgcaagggacaatactgagtcgcactcgccacttgagcaaaggagtgctgtgaaacctccgatggttgtttcctcagaggaagccaccagagaccgaagtggtcagtcttcggacgatgagccgaaggagaatcccttgaagaagctcaaggtttcaaatggcataaaggccatggacaattggatggatgtgatgaacaatatgcctagtgtaacaaccaccggggatggtcctaatgggaggagaatagaagggtttttgtacaagtacaccaaaggtcaagtgagtattgtatgtgtttgccatggaagcttcctctccccggccgaattcgtcaggcatgccgggggcaaggaggtcacaaatcctatgaaacacatccatgtctgcactgcctatcgcttgtagatgaaagatcagtcattgatggtggtggcattattttgtcaccccttttatcaacaatgttttaactagtgaagagagctaagaagttttttttccttttttttttttttaggatttaactatttcgtcctcgtatgtttaggttagaattaatattttagatttctagtgaatggatgaatcagctctttgatcatgttctttcttttggctgtccttcctctgaaacaaagaggtacctcaaaagatagagaaaagaaaatgtactcaaatagtcaaatcaacaaatgatttatgctcatcttttcatacgacgagttttacattgtcgttttctatgtatcatttcaccttgtgaattgttacattgttttatgattaagtttgtactgagggagttcaacccaagacttaaaaatattaaaaaaattatattacactgaaaataagttaaaagagaaatgttaattacaacttcttagtcaactttcatatttgaaatcacatgcaaaaatatttttttcatagcggtatttattatagttagagtatcatccctataaatttttgaaaacttttgaatagtttacagtaccgaaaacaaagtttttgatattccagtttaccatgcgcgttcaaaaaacttcaaacgtattttcggcactgtaaactattcgaaatttttaaaaaatttacagggatgatgttgtaagcataacgaacacccctgtgaaaaaaaaattgaaaaaaaanattccgacatgtgttttcgggcgtaaaggttgactaagaggttgtaacaggagattgacggtagcactcctcaaaagttaatctctaagtaaaaaatgtttgatctaatctaattatgtactaattttcaaacttacagttgaaattataaaatagaaagtgtgtttggatatttttttagtcttatatgtgttttgatatatataaattttatttttgtgcttagcaaaagagttattaattacacataaaaataatatattaaataataattgtttaaaaaggataattattatttttgttttataaatttttgatattactagattattgtgccccttaacttgttaaaaaatttcttcaaatattacagttacataatcataacatttttgttagattctatttattttaagtgttaaaagtgttatccatgttttcggataaataacacgtggcctctcgctaaggcccaatagacatcaggtccatcaacaggtctaagaagataacaataggaatttttactaaatgtttctaggggtgtttattggatcacatccaatagatttggacccaatctatccaatccaattatttattggatattgaatttttttattcgatccaatccaatcgaat

SEQ ID NO: 19139 - DNA, 2439 bp, Cannabis sativa
aaaaatagaaactaagaaaaagttggagctagagttgggccaagacaggctaagtctgcgcttaaggcccacttaatacagaagtccaataaaaagaaagtttattggatcttacagattggtatagctgcaaagctctgccactagcttcaatggcaacactaataggttgatgagccacagcttttttcaaagccttctcatctaatgtaggaacatcctcatacccgctaatcgaaacaactttcttgttagcctgaaaaaatcccatttgtaaatacccttttgtgtttttaatttaactagtaatgatatatgcaccaaaatattacagacagtgatataacaattaaaagactaacccgagaagcgttgcattggccattgacaccggcataagggtagtcattttcagaggtaattccaccatttttgatgatgaactcaaaggcatagtccattaaaccaccattgcagccagagttataagctctgtcacaatcaaccaattcttgttctgataaagacacaagttctcctgtaactatcttgtttatgccttcaactgcagccactgttgaaaatgcccagcaacttcctgttcataccaaaataactgaattaactaactttcaaatctaaccatttcattacttagaaaactgaattaactaattctttctgggctttcactaattgagtccagtctttgagcccgtgggcccaagcccatatatagtcttcaacaaaaagctcaagtaatagttttaagtagcctacgaaccccatgggcttttgattatgggcctattagaattagtaagataggcccatatatgatccaccaacaaacagcccaagctggtaagtccaactacttttccttaggttgaaggaaaggtggcaatcttttccatgcaatatatattttttttcaaataaaaaattatttatattttatcaaaatatatataaatattaattttttttgagaggatacatatattattattctttttacatataaaaaaaagatagttaaaggaaaatagctatattgtgtatctaattaaatgaagaaaaaaatcaattcaattatatattttttttcaaaaaaaaaataagatatataaggaaaaaagagaaaactaaccacaacttccttgattcttaacggcattaacggcgccgttttgcctccaatcaacagactgaggcagcttatgatcatcattagcatcagaagcgtatctacgacttgcgttttgagccttcataacacgtcgtttaacatctgagcgagtacccaaaaacccgacccggtattcctcattagtgaggtcagcaaaccggttcaacccgagtttgtaagatcggttttcctgggcgttgtgttgatccacgaagcgaagattgtctttgaagatttgaaatctcctgtcttcctcgccgagaccgttataggttttgtggttctcaactacccatttcgtataaatctcttttagctctgagtcagttcgggagctggacgacatgtcgtttgaggatgtggctacaagagaaaacgacactaaaaggagtgtcgtcaaagtgagaaggtagtagtaatgatgataagaataagaaaccatattttggggaaaaaagagataataagaagaataataagaagaagaagaagaagtgagattgtgttgtgttgtgtttgaatatggtgagtgttgtggtgtttatataggcatgtagagagagaaagagatgggttgagtggaccatggtggggtcgttgttggttatcggtttcaagggttgaacttggaactttgaaacgtttttttatggaaggaagagaacttgaaacgtattttgagaaaaggatgaccaatattattagatactttaaggccatatgtttttaaaattatttattaaatatcaaattgtataggatccattttcaaaatacactaatattgatatgctacatcttggtgtttgctactttaaggtagttctatcgttaactatttgtaaaatatcatctcgtaatagtgttagacattacttttgtctaatagacgttatttttaccgacacacaaattattactgtactaatatcaattgcttttaccaacgtaaatttatgctgacaaaacgtatttacattggtataagtcgtctaaacactattccttttgatatattgggagttttattaagtagagtattatttttgaataaagatgtggaatctaccttaactacacaactaaatatgatatagtctcacttaaaaatagaatattacactacacattgtgagtggttatcaattttttatattatttattaaatcacgtgtgaaactcaatactgaatacactaaaataatatgcaatctatcatggtgttggacagtttctaatgctgttta

SEQ ID NO: 19140 - DNA, 1741 bp, Cannabis sativa
  modified_base (399)..(412): a, c, t, g, unknown or other
aaggatggaatgattttccattccatttcattacctcctaccaaatgccacttacttcaatcaataattttttcacaacgacactcttgagtgtgggtttgtttaacaaagtcccacaccgttgcaatgcaacaaacaccaaaaaaatcaagactctctctaatgttgggtcttcttcaatatgagtttttttaacaaactcattttttttcacaatttataagaagatttggtctacacaattctttaggaaagaaaaaatactccattttttatccaatgcaatcgttatagtgtggatcttaccacttagaagttagtattaaatgcctcatgagtaaggtattttatagaacactttttaataaatattataatgggtactaaataaatttaacnnnnnnnnnnnnnnttaaaaatattaaaccattaaattataatctgatgataaatatgtgatcatcatgcccgcataaagtaaattaaatgagattattttgcaaattataatatttcacattgttagtttgataaattttttactgaacgtaatatgaagcaaaacatatcctacaaccgcaagttcttcgttccgttgagttgttgacatttttaattctacacccatatttatgtttttatgtgtaaaaaataattataatcatcattaatctatatttacatataataaaataaaatgtaagttttttttttggattaaattattcatgcaacactttgaccaacattattattattagcacctctacattgaaaaataatacattattaattgggaaacaacactagtaaacaataatgttatagaagttagaaccctaattaattacaataaccaaatatttccttgagaaaatgtaaaatgtatataatattaattaaattccatataaacaggattattgtttaggataaagttattagcttatataattataatgaccaaatccaaaacattggtccatgcaattttatgcttattattgtatatatcacatgtttttacactctctataattgtcactccctaggtataccttcatctacatgggtacaacaatatattctttttttttttcatataatatacatacatatatttgtatatatatttttagatttgtataagtaaaaatattatttatatataaaatgtatgttttttttttggattaaattattcatgcaacactttgaccaacattattattgtataagatttaaatattttatttcacgtgtaattattatttttttttatactcgtaagcagttatttgaacattatttcgattctatagactatttgaaattattgaaaaatttataggcaaacattcttttggaggttgtgatataaaaattcctatatatgaaaaattgtagaaatgttcgctcctgcttcaagcttttgttgggcatctacctacaaatttatgactctaatatgtcattttgattgtttcttggaacgacgtctaataatctcgcaaactaatacgagtctttttcagaatactttgttctcatcgtatacttcctgggaaatctttattcacgaaggttacttctcatgagactactctaggttaagcttgtttaactttgaagttcttaaataatggttactccttagcatatgtgatgtataatactatacaataaaatcatcacatttgacatttttcaagtgatttgggaatatactcaatttttctca

SEQ ID NO: 19141 - DNA, 2346 bp, Cannabis sativa
atatatatattattagaaattaaaaagaaaaagagaataatacttatactattggcacacgtgcaaatagacttaggatatagtaaaagtcaatgattagaaatccataatagtaaaaaaataaaaaccctaaccctaaccctaaccctagctaatctaataacaatccgatgaataagaagagagagacaataatgacaataatggcaatgtcaccatgatcagaagaaccccagaatctatggtttcatgtttgttgtcggtcactaaaccctaatctccttctctgtcgtttctttcactcattttatatatataaatatatatatatatatatattatttggcaattaagcaacgaccaaactctatactttcttacatttatacaatcattattcaatcaatatgtacatttgttgttctatatatataataccccacaatacggctccatgcaatgtgttgtctattttttttcaaagacaaaaaagcaaaggaaaaataaataaatcgtgggaataaaagataataacacgtacgtatagacttgcttaatttagggagtgtttggcataattaatatatatatatatataacaaaataattaatttaaaattaaaaaaaagtttggcatatagttttgaagcgccgtacgtcggttgtttttgtataaataattatatatatatgttcatttatttgaagtttaggtcttaaattatgtgatcttttgtcattttcattatattaattaatatggaattatataatattttgaattatgtttgtgtgtctttcaaaagattcttctttaggaaactcatgtctatctagctataccaaacataaataattaaattaataagaaagaaagggcaaattaaaggtgaaaaaatatagagcattgtgtttttttttttttctcaccatttttactgactaattaatcattagctaggttaattaattacctaattcacatattataattgttctactgatcaattcattgttattttaatataatttagcaaaccatatttaataataaaaaatttacataagatgtagttgtgagaagtatacttaaaattgagaaatgctaaggtgtcaaacaccacattttgatttaacaaagagtaatttattatgtaaatatttaagtttaactctattgcagataaatatatatgtatgtttaattttttacggcaataatacttaatttatatttctagaacttctataagtacattgtcgttaagtgtgtccaagtgtcatttttgtattggtatagtaaaataattttttcaataaaaaataaaaatttaatgacatgaatcaattagggattgtcacgtgatcattgacttgacatttaacagtaagtacttacagaaattctaaaaatataacttaagtatataattatcaacgccaaaaattaaacttaaatatttaattatttgcaacaggggttaaatttgaatgtatatacatcgctaattatttattaataaataatataaaaaatcgctaatcactcacagtttacaatgtactacatttggtgttaggcaactaatgctctttaaaattacacatagatcaaagatttgtatgtagaaatagaaaacgtggctgaaatagttttgtatagaatatatataggtacacattaaactcagcaaaataaattatatatattcacaaacaaatatcttgtaattaataattagtatcaattctcatgaattgaccaaaataacaaaaggtagggtccaaattatgcagctttgtttattagacataaatacatgcatgcactgactcattttgtttttatatattaaatgggctctttctaagaacaatacaattttttttttgttaaaaataaaaactattcaatatatattacatgtctaatttgtgaatacgatttatctatatatgtatatattgcattttaattttattatataatcatatatatgtaagaaattaagagaatattgttgtaattaatggatgagttattagtattaggactgtctcaagcttttatgacaaaattttagaaaatgaaacgaaagtcaaagaagttcttaaacaagttttttaacaacaaatggtttttaattactaggaaaaaaatgattgaatattttactatcaaactattgttggccttatgaatgaattggtctttcgggttgagggttttcggataatagacccatgccgcccccacgctaaaaacgaccttgttatggttgatgtatgtacgttctatgagtataaaatattagatttttatttgggcttacattaaattttatt

SEQ ID NO: 19142 - DNA, 2322 bp, Cannabis sativa
tccaagaaaagcccaagtccagaaagtaaaagggccgaaacatcgacccaaataataaagcccaagtccaataaataaaagggccactaaacccttgtttctggttcttttgtcatcaatcaccttcttggagcagaaaaaccctagctaccaaaaccctctgtctttgctccaatatctcactccgcagctggtattctcaatctcaatctctcctttgcctttattacttcattttgtgcattcttacgtgaatttatatatttatacatcttaccgatcaactggtttttatagttaatcatgatgaaattgaagacccccaagaaaggaaaagctaggagagagcttgagaaacgtgctcctaaactcgtgagttccatttcatctctgtttccctacatttccattgggcctcagtttgttttcccggaaaattaatcacccggagaccaaatcacgtgggcattgggcaatgctctataatatttttctaaactgtgttttcattgagtttatttatttgtttaattttttgattgtgatcttacaggttgagacaggaaagaagactttgatacttcatggttcaaagactagtggagtattgaattctgtgttgactcaaatttatcatttgaagaaggagagttcagtgaggtttagccgcaagaatggagaagttaggccctttgaaagcggtggtgaaactgcactcgagtttttctctcagaaaactgactgtggcatgtttgtggtaagtagaaaaagttagcaggaattatctttcaagtgattttttttctcttatttgtttgccattgtctattactgcggatcagtatagttcaatactatgttgtagaggaaaaactccttgatctctttagctacctaagagctattagtgtaagcccatacacccattaaccaattagaggtagttcaaaatggttaggcatgtagaggtttggtgaggagcccaggcatgtgtaaggttagatgtgggggagcctaggcatgtccttccatagaccaactgaactcctaagttcatttatttctgtctagtacacaatacacattgtaaggactcatttggttgaaaatttgtcttagaaggcattggtatacttgtgcatctgttgacagcttaatatatcttttcgagcttaaaaggtttttcttttgagtttctcatgcaatcatgccttaattaactgggagcttagctgcaaatcttaacagtttcatgggggcggagtgaatgtttcttgggagcatttttgtatgatgcctgtagcaagcagagttgtgtttcaagtaattgtttggtttttgccttcatgcaaatttgacagttgaacttattacataatctttaaaaccaaaaactcatgttgaagtttgctcttttagcatcttaatggcacttgaatatttttgctgaatacctggctatctaagagcttttagtttaaaagtatacatttgagtgaatgtgttagaaggcatgatttttattgtgtttcttttgaattttccaacgagacattaaacccctcacggcaatattatgatctatacagaagatttatttgactattttattttggagtaatgttctgggttcctttcagttttataaattttattatatgaatttccttcattgcttgtatttgcagtttggttctcactcaaagaagcgacctgacaatcttgtacttggtagattctacgatcaccacatatatgatcttatggaggttggagttgaaaatttcaagcccgtggaatcattcaagtatgatgccaaactagctccaaaggcagggtcaaaaccatttattgcttttatcggagaaggatttgatagcgttgaggagttgagacatttaaaggaagtattgcttgatttattacgaggagaggtacttttttcaagtccaatgcactcaagtttttcattttcattttcatttcagttttgagaaagttatatattgacttcaattatgctcaggttattgaaaacataaatattgctggaatagaccgtgcatatgtgtgtacagctacatcttcaaataaagtgtttcttactcactgtgctctacggctaaaaaaatctgggacagtggtaccaagaatggaacttatagaaattggcccatccatggattttgtagttcgtcgacatcgtctacctaatgaaggccttaagaaagaagctatgagaacactcaaagaccaggctaagaagaaggtttgattgctcaattcctcatctcactttcagtctctttgttttcctgcaca

SEQ ID NO: 19143 - DNA, 5764 bp, Cannabis sativa
atcataatataataaaaataaaaatacatcttttataataattaaaaattattaataatataaattctttttaaataagcagacaataataatgatataaaattttatttattatcattcttttattttttttattcatagcaaaacttaattttttaatagtaaaatatacatctcttttttttttttagaaaaataattaaaaagttatatatatttaatgtaatatcctaatcttctaaggatgtcacgtatgtagttttataaattagtttataataataaagtaacagtttaagtaaaaatgtaatttaataaaaattttactaaaactgaaatataaaagtcatggcataatcacttttacaattggggatccctttttaaaatatttccatacatgccattgtaatactgataaaaaatatgcgttaaagttcaggaacatctgaaagtacaaatcttgataacttggcaccacttgtcggataagttgatatgtacatttattggagaagatccctgactcatggttattcatacgtttctacctattacccacatagcacatgtgagtcatagagactcagtaagaaaagcagtaatacaacataacatctcattacacatgtatcagcaattaaactaaataagaagagtcaaatgatcacacattactcatgtaattaaatccaaatcaatacagatgcttagttgcaaataaacattaatataaaaacattcagtaatatacaattacttgttaaataatacaatctatacccattacttcataaactaaccgtttttcattattatttaacaaaacaaccttgatgcctaaataggtatcctaatatctctgatgttgtctaaaaagataattctgacatttatcatcgatattcaaacaagcatcgttgtctaataagacaaccctgatacttatttttggttttctaatgttatcatcgttgtctaataagacaaccttaatacctatcaccgctgtctgaatgatactgtctttgtcaaacgagacagcctagatacctagccaccaatatccttgatatgaaaaacctaacaatggtttcagtttatagtcatgacttttgataccaaacctttccgtatctaaatatcattgcctcataagataactttaccatcattgcttaataagacaacatttttatcattgcctaataagataactttttcatcattgcctaataagacaacgttttattattgtctaataagacaaccttttcatcacataacagtaataaccgtatcttaatatgatatgcaatgtagtacaaatatacttttcttacctttaatccagattcatgctgttggaaagcttatttaactaggaccttatgttactactaaagtatgttgaaattaacaaccaaacatgaattctaaaatgattgaattaaacatataaggagtttaggaaatccttacattgatcgtagtggaaattaatatctcatttcattttgttctctcacccttgttcgttttaatcacagagtgtaatcaagaatagaacctcgaatcttctttaggctgtgagagactacatagtcttccacactgatttaagtattgtcttgatatgtgtgggcatatattcaacactaatggcacttaaaaaagatgaagcaaactataagaaaatataatactatagaataatataagctcttaatctttcttttttgataaagaaagttagagatctctctagattatattatttatatatgaacatatatatatatatgtataggtgtgtatgacaataatattgtctgtgctatcttatgtaaaatgtatagtgtgtatatatatagctattgcatattaggttaagagttattttttatttatagcattttcttaagggttatgtttagacatttaaaatggaattaaaaaaacaaaataaacatgcctttagaaacaacaattgcagaactctatagaggcccaatgaatttcaaaaatgctattttatgccatgacttatcttttctcaatactataattatttgtagtcctaagcctttaaatgttaattttttctatttaataattatgaaaaattatcaaataaaattactatttaacttatttattaattagacttttcaaagtctcttaattaacaaataaaccttaaatttccttttcttttcaaatttacctttgcttagttaactcataattaatacatagtcttacttagaattttaatttattaaatattaaaaccaattaattgagtttacaagataatattatctcagatagtgtggggatcatgggcctatataatcaagctcttaataagtagtacttatagaatttaccaaataaattctctatcttattaatttctcctgactccactatagattcaaaattacactcttgattagatagaatgctctattaactaagaatagatacactatgaattacacattattttaatctaaacaatcaatgatcctttatatatggtttacatcgagtagggactaaattaccattttaccctccaatgcattttatccttaaaatacttggctacttgtaaatgatattttatgaaactaatataattatcaaaatgagtacttcaccatttaaactcatttagccaagctctaaggaaactatcatttcacttctaagtatatatttatagaagctatagattctatatttatgattagcgctcccactcacttgcactaccgtgttctcaagatataagtattcggctaatcctactagtcagctataatgaacaagttaaagaacacatgcaatacatttaagccagaacctaaccatctcaaaatttagatcattaatctaagattaactttttgatattaacttagaaaagatattacgataagtttatgatatcttttctactgtgaatatcggtccagttcgatatatagccaatatatctgatacaagtttactttactaatgccttagaaaagacattccccttattcaagtttaagtaaaccttatcgatgattatcacgttagtgcaaatccagtgtattgataaattgtggaacttaatatttgaagcatataatcacaattactttctactgtgatgacatcaatgtatttttgaatagctatatgttttggtgtttaccaaaatttttagaaattaaaatattttagagctaaagaaacattaaaatggcaaaaaataagagaggaagattttttatgtggttcgagtgttaacacatcctagttcacgagtcaatctattagcctcattaggcaatattgatgaattacagtgttatgtaagaaaccctagctcttttttctcaatttattttctaagaagaagaagaagatcaaggatgattttaaaagagtttttgctatgtgtttgttggcttgtgcccttcacatgaaaattttaggggtatttataggctaagtgatgggtgtgggttgccccatgacccccttagagtttcttcttcaatcccactattggggtaaatatgtataatgtaaagctgattggctggtcctgtggataacattacgaccgtgcatgctgtaggtggataatggggaccattttgtaccacttaagcacatgccactcaaaggtttaacctttaaaattagaggacgcatgtcattccaagttggttcctttttggtgtattagctgcttggtaagtggatggtggcgatgtgcgcactaccatgctctatcgtgagggatatgatcaaattctattaggaaaagtataactattgcttgatgacttagcatatggtaaaagttagtgtctacgatcacctatgaggtttgacatccgcatctggtccttctagaacatatttaagagcctctcaaaatgtgcctccttgttaagcccatctagatccaggtgggacacttttatcccactctttgagaagcagagtctgtcgtaagtaagcttctgtgtgtctttttccctaagtggctctaggttcaaggagacccttcagcgtctgtgtgtctttaaaaggctttaactcaattgacccttttccattaaaattccatgtgtcatttcttgcgtaaaacacatataacatttacccccaagctttcgagacgcaatgcagcccgagagcttgcagcccttctcaacttttaggaaacccatggcacgtgggaccatttgagattgtctcatacttcgagagttgtcatcaattaataaggcattggctgtaggcattaatagcatggaacataggcactccgttaaatgtgattgttggcgttgcgcgcgtgtgggaacatgtctcttagggggagttatagtgacgactgagtgatggaaatgactcttcttttaatgaacacactactcaaagcatgtaatgatgaatgttaagtgttagggctaaacattaaatgctaactttttaactccccaaccgttggattggaggatactcaatcaaaataattggggttgttcagttcaaagggtaaggacttcaaccggtacataagtaaatttcaaaagttcatttgtcttaaaccatagtgagtttttcctatcctcttagaactcaaagctcagaagtttcaactcaccgtaccccttgtttggtgaaaacttacgccgctgaagttgtcgcaactagacgttaaggtaagcattgcactctcgagcccacagtacgacatccgccttccacctaacctattatttggtaaggaacttgaagctttgttgacttttacacaagttcatttttgatgtagaaatgctaagttcaagctgggttcgatacttactacatgtcgaacttatagaacacttattcatagaaatgcattattaaatttggatagcatgtgcatctttgtgctttgatcttgccagtcttattcagatgggttgattacagtcatgccacatttctaaacaagcttgcacgactctaagagtgcatccaggaaaccactatactgacccattccctttatttttagataaggatgtctcaaaggtggatccttccatgaaggatacctagagtctcctgcatgcacccgtttacgggttcattgttgcatgtttattgaccttcctgtgttgattgtgcttgcaggtgtttctctaacagtaaaaatgctatgccctaggaaagagtccgattcaacaagctttgggcgtggaggagattccataggaaagaggaggaggtaggatatccaccctcaatgagccaacactccaccctcaattgatcagtcgccctttgtaacatcctccacatcaatcgtttcaactgcggtgctagcgacctacctctttttctgagatcccttcaataggcttcaaatttcccacaaaaattagtctagtggaattcattgctatgcaaagggtaaaggatgtcgaacgtgctttgaataagtagcacgaggaagaacagatgattttgcgcatgagagtaaatagactttcttctttgaagagcgctgaaacctttgaaggtctttttgtcactgttccccctagcccaatggtggacattaaggccttagaaaagtgaatggaacctaaggtagggagggaggttgtgttgggttttgtgtcctaaataaaacccatttcaatataatcagatttattaagtaataaagatcagaaatcacattttatgt
